United States Patent Application Publication US 2019/0348154 A1 - sequence listing, part 138

SEQ ID NO: 521950 - DNA, 192 bp, Stenotrophomonas maltophilia
atgcatttggtcgaaacgatggcttatgccggtgagaagccttggcacggcctgggcaaccgactggcgccacggcaatccatcgaggtctggaagcgccaggccggcatggactggaaggttctgtccggacaggttatggttgaagttggcggacaagttatggtttcaggaacacaatggcgtccgtga

SEQ ID NO: 521951 - DNA, 129 bp, Stenotrophomonas maltophilia
atgaagagcaaggtcgagctgatctactgcgtgatggtcgtggccactgctgtgctggccggtgtcatgaagtgcacggcaagcgcggcctgcagcagatgtgctggcatggtcgatccctacagctga

SEQ ID NO: 521952 - DNA, 219 bp, Stenotrophomonas maltophilia
atggagtttctgatactcattgggctgttgtggctcattggggcaatcttcggcaacaagacgcccaaggcaccgcccgttgatcccaagcttgaggccgaggctcgtgccaatgctgcgctctggcaagaggccttcgatgagaagtacaagcgctggatcgagcaagccctggccttcaccggccaggggcattggatccccaaggggacgggctaa

SEQ ID NO: 521953 - DNA, 798 bp, Stenotrophomonas maltophilia
atgagcaagaccgcacgcgacgtctgcgaaaccatcctccgggaaggtatccgctacaacctggaacgcgagatcctgcccagcgaaaacgtcgtggcccggcgtcttctggatcgaagtgaagagctgactgaggcataccaggaggtttacgacaagctgcatcaccgggttcatgctgtgaagcagttcatgggcatgttgctgtcggtccaggcgttctggagcccggagaagattgcccaggcccgagccgaccgagatgcgctggtggagatcaatcagaagatccaaggtcacgcgagggcactggccgatctgttggaagaacgcacccgcctgcacaacacgtccgggttctcctcccggacgctgtaccacatccgcgacgtgatcgacaccgcctacgaagacaactggcactaccgcactttcctacgtgaacccttggaacacttggccgggcagttcgacctgaaatactggccggagttgagcaagatcatgttggcgattgccaatgacgccgagcacgccgagctggaagccaccgacccgttgaccgaagcggccacgctgagcaagcggccgtccacgtccgatcaggtgttggcttttcttgcgtacattgaggaatgccgcggcaatcacgacggggcgctgccctacagtttccagttgagcgatagaagcatggcgtccttgctgaacgtcgtgttcgacttgcccgtggacaagctgcttacggccgaatacgtcaagggtcgccggcagcgggcgcgcggcttggcgggctag

SEQ ID NO: 521954 - DNA, 615 bp, Stenotrophomonas maltophilia
atgaacactacagcagcgctgatcagggagcagagcgaggggagcttcgccctgctcggatacgaagtgtgcccgggcatgatgtcgaaggacatactggcgcttgcctggcgctactatctctcctataccggtcttgcaggctactacaccgtgaagccgggcttgaacgcgatggatcgctacgcggacgcgcttggcgaggcgatgctgccgacggtgcagacacgaattgagcagaccactggcctgaaactgctgcctacctattcctttgcccgcatctacacgaccgagtcccggctgcacaagcacgttgatcgcggcgcctgcgaagtgagtgcgaccatgacggtgggctatcgcaacgtggcggagctgtggccgatcctggtggagtcggaaggggtcgccgtgccgttggcgttggatgtcggtgatgcgctgatctatcgcggtatgaccctgccacattggcgtgagccgctgccaagtgggttgtggtgccagcttttcttccatttcgtggaagctggaggtgagatggtggagttggcgctggatggccggggacggctgggccctcatgccggcggcatgaccgaggtaccgtga

SEQ ID NO: 521955 - DNA, 381 bp, Stenotrophomonas maltophilia
atgtaccacagcatctacggcaccaatgcattctccattgcatgccaagggcgggagcagcgcgaggtggtcgtttccttgattggtgagcgtgccgagcgcctcgtgcatctgtttgccatcagtgaacgcccgattgcctttttcaaggccgttggcagtggctacctttcaagccgtttcgacggcagccagcacccggtcacgctggatgagcttcgcgagttgatcgccatcgagtgtgcaaacctgatcgagcaacgtggacaaccaggccttgtcgaggtgcttcttgcactgcctgaagcgcagcgcagtgcgcttgtcgacgccaatgtcattgatggaatcgaacgatccaacggagaaggaaacgcatga

SEQ ID NO: 521956 - DNA, 618 bp, Stenotrophomonas maltophilia
atgtcgacgttactggatgatctcacttcggtggttgcacctgccctgggcgaggtcagggtcgtcgagaatggtgtgccactggaacttcgccgggagatcctgcgtctggtcaggcgtccgatctgggcctatggctggaaatcggtgaaggaccacgattgcttcggcttctggcacgcgcattttgccggcggcgacgaggaaacaagggagagttgcgaggaggcgctcgccgccaatctgcaggcatcggcgatccatgcattgtgggttcacctgtcgtccaccgtactgcgtggacacgtgccgctgcgcgtttacgccaatggccatacctatggtgtggaaggctccattcacaccgacagcatggaaagtgacgcgttcacgaccatctactatgcccacggcgcatgggatcccgattgggcgggggagaccgttttctttccgtcggacagtgccactgcgcacgcagtgttgccggttcctggcaggctgatcgtgttccgtggcgcgacgccgcacgtggcgcgctcggtcagccgccagtgcccggaactgcgtgtttcggtggtcatcaagagccgtgtggtggctgtcgatgagcactga

SEQ ID NO: 521957 - DNA, 2034 bp, Stenotrophomonas maltophilia
atgctgatgcagcatcacggcagcgcttggacactggagaagatgcgctcgcggttcacgccttcgtcccgcggcaccagcgtcagccagacggtgaagatggccgaggcattgggcctggatgcgcgcgttttccgtgccgagccggtgcatctgtcgcagttgaagctgccctgcatcctgcactgggatgtcgtgcattttgtggtgcttgagcgctgccacgacggaacctacgaagtcatcgatcccgctgccgggcacatcaccgtcagcgccggcgaattcgatcgccgctttaccggaatcgtgatcgaggccacgcctggcctcgattttggccaggcggtgcacgccagcgaccgctcggcgttgaccttgttgaaggagggcgtggtgcagcgccgcgcggcgattgccgctgtcatcgctctggccgttgtcctggagctgctggcgctggtctccccgctgttcatccagaccgccaccgacgtggtcatcccggcatcggacagcgacctgttgtggatgctcgtcgttgcgttcgccgtctctgccgtgctgcagacctgtgtcgcgctggcacgctcctggacattgctgcggcttggcgaagaactgactgtgggctggaacgccgctgtctgtggtcgcctgctgagactgccgtacattttcttcatgcgccgatcaatcagcgatgtgcattcgcgattcgcttcgatcgaggagatccagcgcgtcgtaaccaacaagtttgtcgaaggtgtgctcgatggcgctactgcgctgctgagcctggtgatcatcctggcctactcgccgaagctggccatgctgaccttcggcttctgcgtggtgtatacggtgttccgactgcttaccctgtcgcggcttctgcagggtacagaacgcgcgatccacgcccgctcggcacagcagggccagctgctcgagatcctgcatggtgtccattcgatcaaggccaacggatacgaagccaaccagctggcccggtacaaccgaaagacacgggacgccgcccaggccaccacgacaacgctgcgctggggtggcatggtcgatgagatgggccagtcgattctccgtctgcactggatcgccgccgtaggtgtcggcgcgtggctggtcatgcagggcagcatcacagcgggcatgctggtggcctacgtcacctacgcgtatcagttttcgatccgctcaacgcgcatgctggacctggtcgcgcagtggcgcacgctacgcctgcatggcgagcggctggctgacatcgtcaccggggactgcgagccggccggtggcgatgcgatggtcgagcccggccagtacgcgtttgatgtacgttcgctgcgcttccgctacaacctggatggcccttcggtcctgcaggacgtcagcttcagcatcagcaacggcgagtgcatcgccatcaccggtgcatcgggaagtggaaagtccacgcttgccaaagtgctggtggggttgcttacgcctgatgatggcaccatctgcctcggcgggaagccgttgcaggagctgcggcgcgagcagttgcgcgacaccatcgcctgcgtcctgcaggacgatcagttgttcaatggcaccgtggccgagaacatcgctttcttcgagccgggattctcccgcgaacgggtccagcaggccgcaaagctggcgcagatagatggcgagatcatggccatgccgctgcgctacgacacgcgtgtgatcgaccttggtgcatcactgtccggtggccaacgacagcgcctaatcctggcgcgcgcgctctatcgccggccgcgcatcctgatcctggatgaggccagcagtcatctcgacctggaaaacgaacggctgatcaaccaggccatccagtcgctgagcatcacccggatcatcattgcccatcggccgcagaccatcgccatcgcagatcgcgttctggagatgcggcagggcacgctgcacgcgtggcagtcgtcggatccgcacaggatcccggcatga

SEQ ID NO: 521958 - DNA, 693 bp, Stenotrophomonas maltophilia
atgcatgggcacactcgagcatttctgcctgcagaaccacagggacacgccgcccgaaccgctgcaatgccatcctgcgcaacgacccgatcacgaccgctcctcgtaccgtcgccacactggcagcatccaacccagaagggaatgtcgccgctccaggctgacctcggtcgcggtgcctgctgccggtggctctgttggccacagaacctgcaggcgactgccgccaccgtcagcccctggcgcgaccgcaagtatgtgcagcggctgaggcgcctggtccggcacccgcaacaacaccctctccggcgcctcagctgcaccggtttcgatccaccgcacgcgggcgcagcgcggcacgttcacgcaggcaccgccaagcccttcgacccgcacctggtggtcgcgtacctggacatgggcgatgtttgccagagccagtcccagcgccaatgcaccgagtattccgagcaggccgagggcgataccaccacgtcggtccgagcttgctgtccggagccattccgccgcgccgggattgtcgaacacctgcttgcgcagcagcgtggaggcgccggtgccagaggatccttctgcgtccgtcatacggcactcgtggtcatggccgggagttcgttgcgttccgacaggatgcggctaccggcacccaacctggcgtccacgtgcgagtag

SEQ ID NO: 521959 - DNA, 1173 bp, Stenotrophomonas maltophilia
atgcgcatcaacgccctgtacgtgatcatcaaactagtggagcgctgcaacctgaagtgctcctactgctactactacacacccgagaacgccgaggtctaccagcgtccaaccctgatgccggacgcctgcctcgatgacctgataggttacgtccagcaggcgctgctgcaggcgccggtacgtcgcgtcgtattcgggttccacggtggcgaacccaccctggccaaggctgccaaggtcaggtcgttctgtaccgcagcccgtgagcggttgcagccccatgtggatgtggatttcaccctgcagaccaacggcgtgcatctctccgaggattggctgcagttgatttccgagcagggtatgggggtggggataagcatcgatggtgatcgcgcgctgcatgatcgctatcgcatcgaccaccaggaccgtgggtcctacgaccgcgtctgcgcaaacctgcacaaactgcaatcgcttgacccggcacatccgatccgcctgaccgcgctggcggtaatgggcgaaggctttgaaggcctcgcgcactacaggcatctggtggaggacctcggaattcgccggatcaagttcctgttcgttgacaacacggccgattcgccgctggcaaaatcggagctggagaaactcagccaggaactctgtgaagtattcgaccattggctgctgcatgatcgcaaccgcgtcagggtgaccttgttcgatactgctgtgcgcggcctgttggccagccattacgaccggaggggcacccgggaccgggtgaccatggggtttgcgctcttgagcgacgggcggatccgcatccaggatgatttcatgatcgcttcggactggttctggagccagaccgagttgaacgtgaggacatcggcgttcaccgattacctgcatcaaccccacctgcaacagttgctccacgaactttcccatgtacccaaggcgtgccaggactgtcgattcgctgagtcctgtgcaggtggagagccggcacatcgatacagtcgggatcggaggttcgacaatcgctcggtgtactgcgaagcgttgtaccgcttctactcgcacgtggacgccaggttgggtgccggtagccgcatcctgtcggaacgcaacgaactcccggccatgaccacgagtgccgtatga

SEQ ID NO: 521960 - DNA, 150 bp, Stenotrophomonas maltophilia
atgagcaacgaaaccgaagtgaaggacctggccaaggccgcgtcggagctggtgctgcgtgaactcgacgaaatcgaggctcgggatatcttcggtggtgacggcggctgggtgaaggtcggcccgatcgagcccgccttgcaggcgtga

SEQ ID NO: 521961 - DNA, 1134 bp, Stenotrophomonas maltophilia
atgatggtcaatgacatcgcacgcgccttcgcaatgcccacgcccgtgggcctcggtgcgggtgattccgcacaggtcgcgcgtctgtacttcgagcgtgtccgcaagcgcgtcctggaacagctggacgaagcggcgcatcgtgatctccgccacctcgtagcaatgcttgatccccgcgcatccgcctgctggcgtcccgcagtggggttggcggccagcatgctccagcagaccccgctgctggctgccctgcagctgctattgataagcggggacgacctgcctttactggatacggcactggtagagggaggcgtgctttacgttgacgggcaggcgatgcaggtgaccgaccatcagcagcctaccaggatgagagccattggcggcgtcacaccggtggcgctgcggcatcgcctgtcgtcgtcggaactcgacggtgcgtcgtcgatcggtccgcgctaccttgtcgagcacggtccatcgccggcagcggtgtttcccgatccgttgcagcccgctccgatcccttcatcgcctgcatccgcgtcaagcgaggcgttgcagcaagcagtggcgttgctggcggcgtcctcgccgctctatgccggatgggtggcctcggtggtggatgggctgctgatgacgcagggcccggccgagtgcgtactgagcagtccggcgcatcccgggctgctggccgtacgcgaggggcgcgacgtactcgattatgtcgagctgcttgtggtcggcgcctgccagcagagaatgttccagcttgcattgctgggacgcttgaccgaacccggcaatgagcagcttcattaccttgcacaccgccgctggtacaccagcagccggcgcgcactctttgccgcgcacgagcacgtgaacgtactccagctgttgaatgatgtgagcgttctggatccttcgaacgccgagcttgcacggcgtatcgcgcgccgccgcttgatgttcgaccttgactgcacgccggcacttgagcgggatcgcacattgaccgcgctcggccggcagctgtggactcgattgcgcggtgcctgcctgtccgggcaccggcagcacgacgatgggcgcacctggttgcgccataccagatctgcatga

SEQ ID NO: 521962 - DNA, 867 bp, Stenotrophomonas maltophilia
atggagacgtcacagcttgctcgatcaatcatccgcacctggctcgaatcgggcatgtcgcgtgaagctgttgtggcaacattccatagcatgggttggcacccgcaatgtgtcacccaggcattggagcaggctgaggtggagtcggatgcactaccggctcggtaccacgcaggatcggcccgggagcggccctggctggatctcgacgcgcttcctacagaactgaacctgcaggggcgtcggatacgtattcaggcacggctgcgacggcccgagctgtgcgtgttctccaatttcctggacgcaaacgaatgcgaagcgatcatcgccctggcgcggcccgggcttcgtcgctcgctggtcaatgcgggtgaagcatcgggcaacagcgcccgcgtcgtttcctacgcgcgcacgagtgagcaggtctggattccccccggcgccgacacgctggtcgatacgctccaggacagggtctgccagttgacgcactggccggcggcccgcatggaacatctgcaggtggtgcgttatggcgtgggggcggacttctccccgcattacgactacttcgtcgaaggcagtaaagctcagcgcagcggtcagcgggtggcgacgatcatcatgtatctcaatacgcccgccggcggtggcgccaccagcttccccgacatcgaactggagatctatccgcagcaggggaacgcgctctacttcgcctatccggacgccacaccgtcggagcggactcttcacgctggcgtgccgttgatggagggcgaaaaatggatcgccacgtttttcctgcgcgacgttgcaatcctcccgctgcagaacccggcggcgcatgatggtcaatga

SEQ ID NO: 521963 - DNA, 2358 bp, Stenotrophomonas maltophilia
atggccatcaatgcctgcgtgttcgcggtggcctacagcatgatgtggaagccgttgccgtatcccgggcaggacaagctggtgcggctgaccatgcatgccaccaagatgggcatggatctcgactggtccattccctatctggatacgatccagcgcggcagcgagcaattctccgcagtggcggggtatcagtcacgcgaactgggccgcgcggacagcgccggcaacgtcgttggcactgtccaggcagtccttgcggagccccagctgttcccgatgctgggcgcgcgcgcggaagcggggcgtctgttttcggatgatgacgcgcgacccggagccgaaccggttgcgctggtcagcgcggcgctgtggaaatccgagttcggtggcaaccctgctaccctcaaccagaaactgtggctgggtggtgttggctaccgcatcgtaggggtgctgccgccctcgttctcattcccgcagcgtgacgtccgcatctggttgccgctgggcttcaccgaggaacagaccgccatgtccaacgcggggtccttcggcaaccttgcggcgatggcccgactgacccgtacgaccgactcgaacgcagcccgcaccggaatcaaggcactggtgggcgcgcagccgacgctggcagcgatcagcgagcagatcggcttgaagatcggcgtagagcctctgcgcagcatctggctggaagatcgcagcacgacattgatttcaatgatgggcgcaggattgctggtgttcggcgtcacgcttgccaatgtctacaaccttttcgttctgcgactgttgcgcaggcggcaggagtttgcggtcttggaagcggtaggtgcgacgcgcgcgcagcgcaggcgccagatcgcactggaatgcctgctgctggtggtggctgcgtccgcgttggcggtggtgctgatgccactggggcttaccgtgctgcagcacttcgacgtaatgcccaaaggcatgccgcagtcggttggcctggatgcggccaccgctctggcgctgctggccatgggaacggctgcgatgatcgtcctggcatcgactgccagtgtcatacgtgggcagagcgtctatgaagtgctgcggcagacaggcaacgggcagaccgcgagcgcgtcggtgaaccgcatacgccacgtgctggtgacggcccagatcgcgttgaccttcgtactcctgttcggaacgaccctgctggttcgaagctccggtcaactgctggccgaagacgtcggcttccgtcgcgatggccaagtgatcgcgacgctgcagtcctcaaatgtcgatcctgacgcggacgcatccacgctgagggcgaacgtgcaggactgggtgcagcgcgtgcagtcgctgcccggcgtgcgtcacgttgcattgagttcgtcggcgccattcagccgcaatgtaaccctggagaatttcgccgtagccggggccacgccggaagggcggggcgggcttcccaaggcgtatctcgcccatgtaagtgcggatctccctgctgcattgggcctgcgtatcctgcgcggccgcagtttcagtagtgccgaggttcaacagcacgctcctgtggcattgatcgacgatgctctggcccaacgctacttcccgggcagtgacccacaaggccgcagcctgcgggtggccggtgaagagggcgggccgaccgaccgcgtgattgtgggtgttgtggcgcgggcccgtcagcgcagcctgcaacagccggatgagtatccttccatctatctgcctgccgccgttccgctgctgctgccggggtcatcgcaggattcggcggaggtggtgatccgcggccagaatccgcagcagcttgcggtgacgctgcagcgccaactcaagcaatcagggctccctttgcggctgacgcaggtcatgaccatgcagcagcggatcgaggaaaccatcgtcgatcagctgcgactcaacgccctgctgcgcattctcagtgggatcacgctgctgctgacggcggtggggttgtacgcattgttggctcattcggtgacgatgcggcagcgcgagtttggcgtccgccaggcattgggtgcgagtcagcaggacattctgataggggtgctgcgccagggcctgcgcatgctgggccatgccttcctgctggcgctgccgccggccctgttgctcggggcgcttttgaagtcgcaactgcacaaggtttcctccacggatcccacgtcattggtcggggtggccctgatgctgctggtggtgggtctggtggccaatgcgtggccggcctacaaggcgtcactggtcaagccgatgtccgcactacggtcggagtag

SEQ ID NO: 521964 - DNA, 1251 bp, Stenotrophomonas maltophilia
atggatatcgcacggcccgaactgaagcagcggaagcgcaaacgcaggctgatcatttccgtggtctccggcgtgattctggtcggtatcgttgccggcgcggttgcactcaatgcggcatctccttccgtgcgccgctccgatctcgtctttgacagcgtgcgccagggcgagtttgtacgcacggtgcgtggccccggaaaactggtgtcaagccagatgcgttgggtgatcgccagtaccgatgccagcgtcgagcggctgctggtcaaacccggcgcaacggtcaaggccgatacggaaatcatcgagatgagcaaccctgaagtcgttgatcggcttcttgctgcaaatgcagagcatgctgcagcgcaaggcgatcacagcgcgctgcaggcacgcctgcaggccgacgcgcttcagctgaaggcggagctggccagcacgatgggtgagcgcgattcgctgcaggtggaggagcaggcggcacgacgcgcgctggacaagggcgtgcttgccgaggtcgactacaagaagatcgccatcaagctcaagcaattcgagcagaaggtcgccatcgcccagcagcgggtgcggcagtcggaagcgaacctggcggcacagctgtccgccagtcgtatgcgcttggaccagcttgccagcactcgggcattgcgtcagtccgaggcggatgcgctgcgggtgaaggcgggcatggacggcgtggtgcagcagatcagcgtcgaagaaggccagcgggttacggcgggggcaaatgtggcccgcgtggcgaagccgggggagcttatcgccgagttgcgcatccccgaatcacaggcgtccgaccttgccgccgggcaaccagcggtgctggaaatcggccgcgcgcatgtcaagggcagcgtgcgacgggtcaatcccgccgtcgagaaaggtgcgatcctggccgagatcgacctcagcgaagcgctgccgcccgggtcacgcgcggagcagtcggtggacggctcgattgtcaccgaacggctcgccgatgccctgttcgtcaagcggccggtaggtgtccacgccagcagcacgagtcctgtgttccgcatgaccagcgagggcacggccgcacgggtggaagcacgcttcggcaaggattcagtggacgagatccaggtgctgggcggccttgagaagggcgatcggctgattctgtcggatatgagtgatttttccgaggtcgacaaggtctcgatcaactga

SEQ ID NO: 521965 - DNA, 705 bp, Stenotrophomonas maltophilia
atgcaagcgccaacaccgctgctccagttgcggagcatctgcaaggtattcctgaccgaggaagtggagaccaacgcgctcagtgatgtcgacttccatgtcgaccgtggtgagttcgtcagcatcaccgggccttccggctgcggaaaatcgacgttgatgtcgatcctgggaactctggatgtgccgacgtccggcgagtacctgcttgatggagtggccgtgtcgacactggatgacatcacccgcgcgcacctgcgcagccgccagatcggctttgtgttccaagctttcaacctgattggcgacctgagcatcgtcgagaacgtcgaagtaccactgacctatcgacgtgatattcctcgttcggagcgtcgcggtcttgcccttgccgctctggcgcgggtgagcatggagcatcgcagcacgcattttcccgcgcagctgtcaggtggccagcagcagcgcgtggcgatcgcacgcgcgcttgttggcaaccccgccctgctgctcgccgatgagcccaccggcaatctggattcccacaatggtgaatcggtcatgcggttgctggaggagcttcatgccggcggcgcgacgatctgcatggtgacccacgatcccaggtactccgcccgcgcagaccgtgaagtgttcatgctggatggccggatcagcgagcggcacctggccacgcctacctga

SEQ ID NO: 521966 - DNA, 297 bp, Stenotrophomonas maltophilia
atgccggaggtgggtgaactgggccatgcccggtggcgcgaccctcgtcgttgcctcgcggcgtactgccgcggtgcgttcggcgggatgcctggacgctcacggccggcagtgtacccctatcgcagggcggggacaggcgccggctggaacccagcgtatcgtgatcgcttcgaagcctggtatgtgtcggatttcactgtcttcctgtacatggggctggcagtgggcgacaccagcggccccggcacggccgttcaagtccggtgtggctgggtgaaggaggccgtctcttga

SEQ ID NO: 521967 - DNA, 615 bp, Stenotrophomonas maltophilia
atgcacggacctgcaatgctccgctcgcccccgatccgtctggcaatttccgcgctggcgctgtcctgcctgccggcgatggccgcgtcgcccgccgccaagcgaccatcgccgcccagcgtggtacaggcctacctcgccgccgaagccaacctgcggctgattcccggcgacgacattgaatccgatttccgtccggtgtggaccgctgttgccgacctcgatggcgatggccgtgcggaggtcgtgtacttctacacgtccacctacaccggcggcagcttcgcgcaacgcaatgtggtggcggtgatgacggcgctgacggcaaacgatccgcgcggccaggagaacccgaacagcctgtcgccggtggaagcagaggactatgccgccatccgccagtatggctatggtgatgatgccggcatccaaattcctggcgcggtgcagtcgattcgaatcgatggtaaccggatcatcgttgccttcaccgttaccgcgggcgcaacggtctgcgaaattccccgcgatttccgccacgtctgcccgccggagggtcactacacctggacactgcgctggacgcagggaaagctgacccgcgtcaagaagtag

SEQ ID NO: 521968 - DNA, 858 bp, Stenotrophomonas maltophilia
atgcgagccctcgccgaccagctgttgcaggaaaccggcccacaaccgcccgcgatggtgaccagtgacgacggtgcggtggtgctgctgcgccaccgcttcgaaccgagcgaaggcggcctgggccatccacaccagctgcgcctgggcatggccatcgatggtggcgggcgcctgcagcagcgcagccagagcggtctgctgcagggcgtctggcaacctggtcaattcaacgtggtcctgcctggtgacatcggcacctatgccagccctgcagtggaagtgctcggccttgccatcgataccggccaccatccccttgaaacgcaccaggtgcacgacctgcaaccgctggcgacgcgcctgcagcgcgacccggtggtcacctcggtgctgcaggcgttgtggtgcagcgcgcaggccgatgcctgccttcccggatttctcgagcacggcgcgcaggtgctgctgcaccgcctgcaacagctcgccggacatgcgcgagcgacgccgccgagggggcccgcgctgtccgcgcggcagctgcagcacctgcaggaatacattgacgcgcagtacggacaagcgctgacggttgcgcagctggcggccgcactgcagatggaaccatccacgttcagccgtgcgctgcgtgcggccaccggcctgccgccctatgcgttcctgacccgacgccgcatgcaatgggcgcgcgcgcagcttgcgcaggagcgtaacgtcaccgaagttgcattggcctgtggctacgccaaccccagcaagttcagcgcggccttccggcgtgtagtcggctgctcaccatctgcatggatcacacagcaccgcaacccacgatag

SEQ ID NO: 521969 - DNA, 873 bp, Stenotrophomonas maltophilia
atgcgttttgccctgcttgccttcgccctggtagtcgctcttccggtcgcccacgccagcgccgccgaggcaccgctgccacaactgcgcgcctacaccgtggacgcctcgtggctgcagccgatggcaccgctgcagatcgcagaccacacctggcagatcggcaccgaggacctgacggccctgctggtggagacccgcgagggcgccgtgctgctggacggcggcatgccacagatggccggtcacctgctggacaacatgaagctgcgtggcgtggccgcgcaggacctgcgcctgatcctgctcagccatgcgcatgccgaccatgccggcccggtggccgcgctcaagcgccggaccggtgcgcagatcgtcaccaatgccgaatcggcagtgctgctagcacgcggcggcagcgacgacctgcactttggcgacggcatcacctatccgccggccaatgccgaccgcatcgtcatggatggcgaagtggtcacggtgggcggcatcgcgttcaccgcgcacttcatgccgggacataccccgggcagcacggcctggacctggaccgacacccgcaacggcacgccagtgcgcatcgcctacgccgacagcctgagcgcgccgggttaccggctgcagggcaatgcgcgctacccgcacctggtggccgactaccgtcgcagcttcgccacggtacgtgccctgccctgcgacctgctgctgaccccgcacccgggtgccagcaactgggactatgccgccggcagcaaggcaggcgccgccgcgctgacctgcaaggcctacgcggacgcggccgaacgcaacttcgacgcccagctggccagggaagcggccggggcgcgctga

SEQ ID NO: 521970 - DNA, 1452 bp, Stenotrophomonas maltophilia
atgacactacttagaaagactgcgggtccaagaatcgacgagtcggcaccctggaacgacgatccatttgagcgggaggcagagggagagatgcttgctcgactgatcgcatccagtaccgacgccccattagtgatctcacttcagtctccatggggcagcgggaaaaccgtattcctcaggcgccttgccctgcacatgaagacggccaaaggcattcccaccattcgaattgatgcatggaaaacagacgactgccctgatcctctcgtagcaataattgcggagctttcattgcatcttgagagattcaaaaaggaggaagagcctcttgcaagtgacgtggatagttgcatatcacgccttgcgaagttcggctccaagatcatgcttccagcaacctcaattgtcgctgatcttcacactcccggcagtggcgatgtactccgatctgcaggcgcattcgccgagcggctcctcgacatgcagaaggatcgaagctctgcagagaaggactttagaaatgtcctaattgaggcaaggtgcttgctgaccggcctagaccgaaaccgaaagcctgccccaatgctactgattatcgatgaacttgaccgatgccgaccagatcacgcaatcagaactctagaacgaattaaacactactttgatgtccccggaatatcttttcttatcgccactgatcggggtaatcttcccgccgccgtcaaatcggtctacggcacccatgtcgacggggaactttaccttaggaagttcttcgactatgagttccacctactcccaccaaacccaatagttttcgcaaagaacttggcatcagagtcaatccttccagacattgaccccatcatgcctgagaagccatttgttcaagcaagcggccacctggaatttatcgtcaatgccatgcgaggcagcagcaggcagatgctaaaaggcgagtacctagatgcattcccttccttttccgagtgcttttcattgacattgcgcgatcaagagcaagccatgacgatgatatcggcatacgttcatacccgagaacgtgagaacgagccattgcccgtcatcgactgctttctggcgtgccttcgcttcggccacccaccttctttcaaggcactagtggacggagctagagctatcctcctccagacatcaaaggatgagaatgacgtgacactgttccaaaaagtaagagccgcaccacattgggatgcaatttcagcaaccctcgggacacgtgttgtcatatcactgagtgatgagcctgagaacaaaaccatctcctccacactcctgaagggttaccagaacagcattcgctcagcgaagccaaatctcgcacttttgatgcttgccgcaaggcttcatcggcgtgaatttgacatctatagttacgcgtcctcatttgttcgtctctcgacatag

SEQ ID NO: 521971 - DNA, 585 bp, Stenotrophomonas maltophilia
atggctgccccgcttgcccgtacctgcctgtccgctctgtactgcctggccctgcccgccctggcccaggatgcatcgttcggtttcggccaacagaccacccgcaccgaccagaccacgcaatccagcagcaccgaaacccggaacacgggatcgatgaccacgcagaccaccactacggacagcacgcagtccgagtcgcgcagcgaaagcaaaggcatcgacgtggactccggtttccacgacagcaacgacaactggggccatgaccaccggcgtgatgaccgcgatgtgcgcgacgccgatctgttcggcagctggacgctgggccagaaaaacggcagtacctgcaccatcgaactgaagaacaaccagtggttcggtggctacagtgcgtacgtacctgccggctgcccggacggcttcttctcggccaaccggtgggtgttgtccggaaaccaactgctgctcaccgataccagcaacactgtattcggacggtttcgcgcgtcgggtggaggtcgctggtcaggctatcgagagtcggacggggcgcgactgtatctgaaccccaaggggcgctga

SEQ ID NO: 521972 - DNA, 606 bp, Stenotrophomonas maltophilia
ttgaacgagggcctggccgagtacaccggcgtgttcgtcggcaatccgacgccgtcgacacgtatccaggcggcactgcatgaccttcgcgcacacgtgggtgatcgcagcttcgtccgctctttcgcctatgccaccggcccggcctatggcgcgctgctggaccaggcggcacctggctggcgcggcgacctcgcccaccaggctcgcgatctcggcacgcgtctggccgaagtgacgcaggccccattgcagatggatgcgaccgcgctgggagcggctgccgcgcgctatgacgggccggagctgcacgaagccgaaacgctgcgcgagcagcagcgccttgcgcagctggaacacaaccgtgcgcgattcgtgacaggcccggtggtgcgcctggatctgcgcaacatgcgcatccatttcggccccaacaccatgcagccattgccaggccaaggcatggtgtatcccgcaatgcggctgaccgacgtatggggcagcctggatgtcaccgacggtgcgttgctgcagagcgactggaagctcgtattcgtgcaggccccggcaagtgctgaaccgccactggaggggccgggtcgctga

SEQ ID NO: 521973 - DNA, 1272 bp, Stenotrophomonas maltophilia
atgagcctgatcaccaaggcagagtggaaggagctgggtacgtacatctacagcaaggccaacctgttgggcgatgcttttggcattactggtggcattgctggagccccccactgcataaacgtcttttcctttgctccccagcttgagaaaagtgaaaagaccagcttcagctactttcttggcatggtctatgctcggtatgcgttggagcaagccattgctgtgcttccaggccatgtccatgtacaccgcattcttcacttccacacaagcgctacagcgccgatcaagatcagtggcgtggcggcggcgctcaccaattcaagcaaccccgatttcctcgttgaattgagcaacggcagttggggcttactggaagcaaaagggacattggatggtcgcaatacacgccatctgaagacggcagtgggccaggtggaaaagtacccgcaggtccacttctgggtgcctgcgccgccccctgcacctgcacctggcgcgccggccgccatcgcgcagcttttgaatatcaaactcaaagccatcagctatgcctacgtgcaggccgggaacctgcaggtcgagtacatcgatcctgatgaagatgatgatccggtggagcgggtgcgtaggggggacgcagaggcggtgccagtgttcatgccagccgcggattgcctccgattccttcaagcctgtgggcactttgccaaccaagcggaagatggcggcgaagccgagcagtacatgcactggacgcgcttcaaggacggtctctggttggggctgcccaatgagatgtggagcagatttgacaatcttgtcgccctgatgacgctgttcgaggcggtctttggaaatggctgcgtggacagttgcgcacccttgatcgaggagagctccgtcgacttcgatgtaaggttcagcgaggaagcaatcttccgcctacgccgtttggccggtgacgaagccttccccttccatcagcacgcatccgggttgcttgccagagtcggtgcctcacggcgctccaatgaggcgatcaggctgggagcattcgcacaggatgttgctggtccgaagaccgccagcgggatgattgcgaatctcaacgacctgctgcactcgctccgcaaatactcctatctgaagtttggggatgagtctgatcgtcacaccagattcctgtcgaacggcttgtgcatcgctgacgacgcagggcgacagttcctggattccaatccactttccgacatcagaaggttctag

SEQ ID NO: 521974 - DNA, 312 bp, Stenotrophomonas maltophilia
gtgaagctgaccctggatggcgctaccggaaagctctggcgcaacgcggacttcagcctgctgccgctgctgctgatcaccttcttggtgaagtacgctttcgaagtcgcatttgcagtgtcgccgtcgccgtcgccgtcgctgaccgccaacgccggcttcagtgccgcctacctgctgctggcaggcggattcaccggcatcttcttaggcaagtactgccgctacctgacctcgttgcgactggacgcggcaggtaaaggggttggggtcgcaggctggaaccagtttcgccgtgatgcgtcacattaa

SEQ ID NO: 521975 - DNA, 339 bp, Stenotrophomonas maltophilia
atgcatcgacctggaaccgatcctgcttcgccacgcgtgctgcgtgtcgagaacatgtccctggactgcggtggcaccgcagttgtggtagagcttgaccggacacccggacgggcgtggatgaagtcagtgaagcgagcccttcaggccgacatcgccatggagggggcgcaggcgaagtttgatggccagtttgtgtatatcgtgggcatggaggagagtgggcatcgcgtccagcatcgcgtggtgcaggcgctgatgtcggcggaaccggaccgggacccggccaagttcaaggatttcccgggcgcggcactccccagctcgatgaccgcctga

SEQ ID NO: 521976 - DNA, 273 bp, Stenotrophomonas maltophilia
atgatcatggcgtttgtcgtctttgcgctgccactggtgctgcgagtcattcgcctgctgtgtcccgttggggtttgcgaggtctggcttttctacatttgcgtgggctttgtaggcttctcgctgatgctggccagcctcgattgcgcggatgtcttctatacggcgttcgtgcttcctgatcccgcgttggcagcggcattgctggcgatacccgttgcggctttggtgctcgcttatctctgggccaaatcgcgcccaactgcgcgctga

SEQ ID NO: 521977 - DNA, 819 bp, Stenotrophomonas maltophilia
atgccagccgtcggtgcagggccgatcatcagcaagcgcgcgcagcgtgagtgccaagaggcactccagcagctttcgctgctcgccgatccgcatgccgcgatccattccgtccgcaagcacatcaggaaactgcgttcgctgctggcgctggtgcgcaatccagcgttcgatctgcaggacatggatgccacgctgcgccgcctgggcgtcagcctgtccgatgcacgcgatgcgcatgtcgtggtggaagcggcgcagcggctgcagcagcttcatccggcaccgggctgggcagcggtgatcgatgtgctctcggccaggcgtgcacgcattctcgagcagctgctgcggcgggatcccgggctgcagcgcagggccatgacgcttcggcgcgtcgcccggcagctgcaggaccagccctggcacgcactgcgccgtcgggacgtccgcgccgggctggagcggacccggcgccgggtccgcaaggccgcaacccgcgcgacccatggtggcaccaacgacatcgaaggcgtccaccgctggcgccggcgcgcgcggcggctgcgcatgcagctggaactgctcaaggacatgaagctgcgccctggacgctcccgcgaagggccggaacacggcaaggccgcccgatcgttgcatcagctcagtgatcgactgggcgacatgcaggatctgcggctcctgcgcaatctggtgcgggcgatgccctcctgcagcggcaaagcggtggtgctgcagctgatcgacgcagcgcgccacccgctgcccgtcgacgccgacgcagggaccggcgcctga

SEQ ID NO: 521978 - DNA, 492 bp, Stenotrophomonas maltophilia
atgttcgaggaccacgcgccgctgctgcgtggcttcttcgtgcggcgcggtgcgcggcaggatgccgaggatctggtgcaggaaacctatctgcgcctgctgcgtgcgcatgaaggcaagggcgagccgatcgccaacccggaagcgtacctgttcactgtcgcgcagaatctggcacgcgagcaggccgcgcgccggcgctggtcgacgctgtccatcgaagagatcgaaggcccgggccaaagcctggccagcggggaatgcgtggaagatgccgccgaacgcgaacagcgccgtcaacgcctgcaggcggcactgggaacccttcccgagcacacccgggcggtgctggtcatgcagtaccgcgatggactgagctacaagcagatcgccgaacgcatgggtgtttcaccgcacatggtgaagaagcacgtggtacgcgggctgtcggtatgccgccgggcgatggccgaaccggcggggaggtcgtga

SEQ ID NO: 521979 - DNA, 1044 bp, Stenotrophomonas maltophilia
gtggccattgaacacccgtcggcactgacccgggccgccgcgcactggcatgcgctgcagcgcgaaggtgacctcagcccatcgcagcagcgcgctttcatgcagtggctgctggtgtcccccgaccatctgcgtgagtacatggccatcagtgaggtggccggggcactggccgatacgctgcgcggcatgcccgatgacctggacgcgctgcttagcgcgcctgcgccaacccgcaacgacgtcgacaatgtagtgcggttgtcgccacggcccgccgctgcagcccgggaacgcgcggcacggccggtgcgggggctgccccgcatcgcggtggcggcggtgctgatgctggccgtcggggtgggcactaccgttgcctggccgcgcaccgggcactacgtggccgcacatggcacgccacgccagatcaccctgtccgacagcaccgtcgtgcgcctggatgcggaaagcgagatatccgtgcgcatgaccctgttggggcggcgcgtcgagctcgaacgcggccaggccagctttgtcgttgccaaggaccggcgccccttcgcggtacacgccgcgggcctgcaggtcaccgatatcggtaccacgttcgatgtctcgctgctgcgcgagcaggcgcgcatcggggtgagcgagggccgcgtgcatgtgcgtggcgatggtggtcgcggccgcatgctcgccgaccttggcgccgggcaggccgcgcaggtcgattaccgtgaccagcgcgtgcgcatccgcgatgaggacgccgccagcatgactgcgtggtggtcgggccgggtgatcttccgcgacgaggcgctgcgcgacgtggccgaccgcttcaaccggcgcaacgcgctgcgcctgcatgtcagcgacgacgccggcgcgctgcgcctgaccggtaacctgcgcgccgatgacgtggcatcgctgcgtgcgtttcttgaccagcagccgacgctggtcacgcaggccgatgcggatgggatccacgtgcggctgcgtgccgggtcgccgccggtgctgtaa

SEQ ID NO: 521980 - DNA, 3069 bp, Stenotrophomonas maltophilia
atgcgccgcacactgttcctttccatcgcccttgcactgcaggtcaccgccacggccggcgcccacgctgcagaaccggcccgcatcgccagcgaggcgatcgcctcgcagccattggatggggcgctcaacgcgttgtcgcgccagaccggcctgcagttcgtctacaacgcgcagactgccggcaatccgcgtaccgcgggcataccggccgggctgagcgcggacgcggcgctcagccgcctgctggccgggaccggcctgcgctaccgctatctcaacgccaccaccgtcaccatcgaagcgcaggatgcggctgcaccggcatccacctcggcgctggcaacgccaagccccgtgggcggcgcggtcgcggcatcggcgcaggcaggggcggcggcgcccagcgcgcaggcggccaatctggaaaccatccaggtcaccggcagctacagccgcagcctggagcaggcggtggacatcaagcgcgccaccgtgggcttctctgactcgatcgttgccaccgacgtggccgactttcccgaacagaatctcgcagaagcgctgcagcgcatgccgggcgtgaccatcgaacgcaacaagggcctgggcaccaaggtcaatgtgcgcggcctgccttcggagtacacccacgtttcgatcaacgacctggccaccgcttcgggcagcggcgggcgcgacgtggaattcgacatgttcgcctcggagatcatccagcaggtgaccgtgcagaagtcgcccacggccgcggacgaggagggtggcattgccggctcggtcaagatctccaccgcgcgcccgttcgactacaacgaacgcaagctggtgttctccgccgagggcgcgcacaacagcatctcggaggaagtggacccgcgctttgccttcctcgccgccgacacgtggggggactggggggcactggtgtcgtactcgcagtccaagcgcaccaaccggaccgactccacttcgggcatcaacttccgcccgtcgtcacgcttcctcacggcttcgggtacccgcggcacccaggcgcagtcggtgctgcgccgcgacgcaggcgtcaacatcaccaaccgcaatgatgccgagcagaccaaccgggtcgtgttccaggacaaggtcggcgaccgcgtctacctcaacgagcaggacaagtggggcgcgactggatcgctgcagtacaagccgagcaacaatttcagcctgaccttcgacgcgatggtcggtggctatgacagcatcgaggacgagtacgacgcggccgcctattccgcctccagccgcagcaccttcgacaccatccattcgtacgacgccagcaccctgtccgagtacggcatggtggtgctgcgtgatgtgtcctacaccgccacccagcacgagatgctgagcaaggagcggatcaacaagaccgactacagccagtacagcctggccatggactggaagggtgaccgctggtacgtggatgcgctggtggggtattcgggcgcggagaagacttcggatttctccaacctcaagcacgtggcctatgcgccgtcgcgtacccgctggaccggcgccagtggtgaaacccttcccaccggcgccgccggcagcttcgacatgtacaacgatccgcgccgctacctgttcgaggcctacgagaccacgctggagaaggtgaaggatgacaagtacgccgcccaggtcaatgtcacccgcctgctggagatggccttcctgcccgcgctgcacacggtccggttcggcgcccgttacaccgaccgttccaaggagcgccagtacggcgagctgaagatcaccgggccgactgcagggagcagtgcctgggtcaacacccgcacgatggccgacagtccgctgcagtacatcgacgacatcgtccccggcggcagctactccaacaaggggctggcctggcagcagatctccaatgactatgcccgcagcgcattccgttacgcgggcttccagaccccgttcgacccgggccagttctaccaggtcgatgagaaggtgatgagcttctacgcgatggccgacttcgccttcgatatcggcagcgtgcctttcactgtcaacgccggcgcgcgctacgtggatacgaaggtcgattcgttcggctaccacccgatccagctgcccaatggcagcaccggctacaccgatacgccggtgtccaaggatggcagctacgacgacctgctgcccagcttcaacatgaccgccgagctcgcgcatggcctgctgctgcgtgcggccgcgtccaaggtaatgatgcgcccggcgctgaccgacatcgcctacaagcgcactgccagctggagttcctaccgtttcaccgacggcaatcccgaactgaagccgacctatgccaagcagtgggaaatcgggctggagaagtacctggacaacggtgcgctgttcgccgccagctacttccgcaagaacatcgacggcgtggtgatcaattcgcttaccggcgtggtccaggatgtggcggtgtacaacgccaacggcagcctcaatggcatctatgatttcgacgtgtaccagccggtcaatgccaagggtgcctacgaggtcgacggcatcgaactggtggcgcagctgccgctgaacatgttcacgccatggctggacgggttcggcatcaacgccaactacacgatgctggacagctcgctggccggcgagtccgatctgggcatccgcaccccgatgccggggttgtcggagaagacctggaacttcaccgcgtactacgagaatgaacgtttcgacgcgcgcgtgtcctacaaccacaaggacgagtacgtcgaatcgatcggctacaacctgtacccgatctggcgcgatgcctatggccagatggacgtatcgatcggctaccgcatcaccgacaacatcaagatcagcctgaagggcatcaacctcaccaacgagcggacccgcggctacaccatggacccgtccttcccgaccatggatgagacctccggccgtcgcatcagcctgggcctgcgcgcggacttctaa

SEQ ID NO: 521981 - DNA, 1392 bp, Stenotrophomonas maltophilia
atgaagacccctctgatgctggcgctgctcgccgcagcggccccggcgttgtcgaccacaaccccggccgatgccggccgccaatggctggccggcgaccaccacgtgcacagcgaatggagcgtggactgggaccgcagcaccacgccgcccacaccggtccgcggtggtgactcgccctacagccgcagccgcaacgccgcccaggccagagcgttcggcctgcgctggatggtccacaccgaccacggtggcccctgccactccgcggtcacccgcgaccaggcgtatcccgcgctgctgcaggcgcgcaccgacgttcccgaggtgatccagttcaatggcatggaattcgacgtgcccgcgggcgagcacgcctccctgatcatcgcgccgggcccgcaggaacgggagcagctggtcaccgccgagcgggacttcagccgcagcgaaccgctgcacgatagccgcgacagcgaacagcagatgcaggccgcactggcctacctggggggcctgcgcccggcaccgctgatgttcatcaaccatccctcgcgcacggcgacggcgatggggcagtggggcgaggtgaccccgggcgagctgcgcggctggcatgcggccgcacccaatgtgctggtaggcatggagggtgcgcccgggcaccaagcgatccgcagcgaacgcgggctgtaccgcaacgcggccgccccaaccgtaggcggctatgaccagatgaccgcgcaggtgggaggtgtgtgggaccagatgctggccgatggcatccgcttctggatcaccgccaactccgactcgcatgtgaacctgcgcgacggtgggcgcgactacgacccgggtgagtacagcaagacctatgcctgggcgcgcccggatgcggaagacatcctggatgcgctgcgcaaggggcgcatgttcactgtcaccggtgacctgatcgatgccttggaattgcgcgtgaccgctggcgactccagcggcggaatgggcgatacgctggtgctgcggccagcgcagacgatgcaggtggaggtgcgggtacggcagccggccggcgccaacgcgaacgggcagcacccggcgctgaaacgcatcgagctgatcatcggcggcagggacggggagggcaggctgcagatgcaacggcgcggcttcgacgcggcaacctgggtgcgggagggtgactggatcgtggcgcgcgggtcactgccggcaccgccgcgcggcggcttcgtgcgggtgcggggcaacagcaccggtgcggtcgatgcactggcggacgcgcccggcgaggacccgtggcaggatctgtggttctactccaacccggtcttcgtcacgattgccggcagcgtcatcccgccgcagcggtga

SEQ ID NO: 521982 - DNA, 744 bp, Stenotrophomonas maltophilia
atgtatgcgggcaatgggccttacgcggtattcgatgcgtcagctggtgttgtcaagtactaccaggtcaacggttggggcgaagcgccggtcgagttcggtcaggaggccgaggtgatcgaatgggcaccaccaccgggcaacgcccaatgggccggggtgctgcgcgagtactaccagatctacggagtgccgctcgcgatgagcagcaatctgaacatcaacgatatccggccgagttatcccatcttgtatggccaaacgatcactgcctatgacgtggtcagcgacattaaccttagagtaggcattgcagctcgcgtcgacaacagtcttcgcaacaactcagacgcgcagtctcaatcgctgctcaatcggtttaccgacatggtaaacaacctctttggtgccaatgcaccggtcaacttggttatcaaggtgcaactggacgacggcagcagcgtagagttcaagaaagactcggtctcgggaagctattactacgtcaagggctcggctagattctccaacggcgatgttgtgccggaagttggcgcgcgtgacaaatccgattaccagggcacgtgggtcttccacagcagcacgagcctggacgatttctgggccgccatgagcgatatcggtgcacagctccacaatgtgggtggcggcagtgaacagaccatcatcgtctgcacttggcggcccaacgaaggcgagctgcactgcgaacgtaagatctga

SEQ ID NO: 521983 - DNA, 699 bp, Stenotrophomonas maltophilia
atgcggctcacgcccctgcgcagcctacccacccggcctctgacagtttccgggggcgttcagccacgcagaagaaagaagaagagcaaaagcgcttggctggccgctctttgtagagccgagcccacgctcggctgcctttcgatcagatttcgaatagtcgattccgatacagattcatccacgcatggcgtggatctaccgtgtcgaccaaggtcgacacctaccagcagcagggaactgtcggaggcggggcggtgtgggttggcaggtccgttggcgccatgggcccgaggcatgcctcgggcgggttgggcaggatccccaaccccggccttgccgtgtgcgcaggacagcgcacacgagcaaggcgccatcgagcccccatgggtgagggcgctttgcctgcgaggcatgcctcgcaagcgcccgaacgcacagccgccagcggctgggccggaccccggaggggggtttacggcggccccgcaaacccacagtgccccgccatcacgcaggaagcccgctgttgcttcggctgttgctgttgcttcagcccttgcctctgcgggtgccgggtgcaacccggccgaacccctccctcagggccaggcaggcggtgcggccgcccaggcctgctgcacctcggccagcgacgcacgctcatcctcgcgccactgcggcaacagctgcgcatga

SEQ ID NO: 521984 - DNA, 591 bp, Stenotrophomonas maltophilia
gtgaaccctgtgctgcttggaagcctcctctgtatcgcctgtcttgccccggtcgcggccattgcgcagaacctcgtcgccgagcccgctgccgcgccagacgttgcatcgcccaagacctacacgaaggacgggttgaagatgcaggtgcccgggaactggaccgtcgtggaagaccatgccgccgacggagagaaccagcggcgtgtgttcatcgaagccgacaagaaccgtttcgaagtattgaacctggatgtggcggtcattctgatctacacgagcgaggccctcacgttgccggattgggccgcctacctgtactcgctggatgtgggcgagagcgagagctacggaccgcccacgtacacgtccttccagttggcgccaggcctgaaggcccatgccacgcagttccagcacaccgttttcgaagacgaccaaccatatgcccgatgcctgcacgtgctggccgtcaagcggtgcggccaacagtggaactgctatgcgttcacctggacgctggacgcaaatcgccaggccgcggaagcaggcatgcgaaagatcatggagagcgtgacgttcgcggactga

SEQ ID NO: 521985 - DNA, 465 bp, Stenotrophomonas maltophilia
atgtgggcagtagtgatcgacacctccggcaagctccgctacgagtcagggcacactgacgagaaccccatcgtggccgttcttagcgagcgtgtttccggccactacctctcctacctccgcgagaagggtgtttcctacgtgttcgcaggccctgatggcagcgacatcgaccatgccgtgcaagtgctgggatcggagttcaacgttcagcgtcttctgcttgagggcggcggtgtcaccaatggtcacttcctttccagcgggttgatcaatgagatcagcatcgttgtgtacccaggcgtggatggccacgccggaggcccgacgatcttcgacgcgaaggttaagccctccaaccccgtactgacccgcgcctcgctcaagcacttgagcaccgagacgctggaacatggcttcgtctggctgaggtactcggtcgcagagactgccaagccgagctaa

SEQ ID NO: 521986 - DNA, 366 bp, Stenotrophomonas maltophilia
atgaagatggcgctgccaattttcatgggcgcattgatggtcacgggatgtacgaccttcggtggcgatatgattattcgggtgtctggctcagtgccggcgtcggggttgacggataaaccgggtgagccgtgccaactaggcatggtttccgcagagaccggtgagcagtcgccaacaagggatatccctgctgacttctctacaacaatgatggttgttgccggcccgaagccgaaaccctactacttcgtggccgaatgcgacgatggccgcaagttccgctcggatgaagtcaccatcagtagccgtagctcgtacagcaggaaatttgatctgggaacgcttgtcgagaacgacccgtag

SEQ ID NO: 521987 - DNA, 483 bp, Stenotrophomonas maltophilia
atgcgccggtacctcctcgccaccctgcttgctgccagcagcttcgccgccaacgcacaggaccgcttcgtgccggtcgagcaacggctcaatgcggcccaactggccgaagtggggctcagtgcggctcagttgcagacactgaaccgtgtgctgcgcgatgccgaggggcgctacacggtgccggtcactgcggttgcggctgcgccggtaccggccaacgtccccgccccggcggcgatgcacctgggcctggatgaggggcccgtcagcgctcgtgtggtcggagacgtcgcgggctgggaaccgggtacggtgttcaccctggacaacggccagcagtggcaggtgatgaagggccagatgacgctgcgcaagaccctgcagtcaccgcagatcgaagtgattccggggatcgcggggcgctggttcctgcaggtggatgaagacctgcccaaggcaagggtgttccgcctgcgttga

SEQ ID NO: 521988 - DNA, 441 bp, Stenotrophomonas maltophilia
atgagccggacttcccactccgcacacctgcgtgacggcagcatccaggacgccggtgccttgattgcgctcgacagcgtggcggccaacgatccaggccgggccctgcagatcggcgactggctggcacgcggcggcgtgcaggttgccgagcagaacggcagggccgtcggctacctcgtcattcatcaccacttcttcggcgaagccttcgtcgaaatgctgatggtggcgcgcgcacagcgcggccagggcatcggtaccgcactgctgcgccaggccatcgcactgcacggccggcgcaaactgttcacctcgaccaatgcctcaaacatcggcatgcagcgcctgctcgctgcgtcgggattcatcgacagcggcatcgtgcacggattggacgaaggcgacccggagctgatctaccgcttcgcgggtgcatga

SEQ ID NO: 521989 - DNA, 354 bp, Stenotrophomonas maltophilia
atggaacgatggtatctggcgacgctgttggcgttgatcctgcatcagatcgacgctgcgttctggcaggaatgggccatgttccatgtgcccggtggcatccagggcttcctgctgttcaacctgcttgcgatcggcttcgtgctttgggggtatcgccagaccctgctgggcacatcgtcggcgcgcggccatgcgctggtttgtggcgcactcggtattggcacggcgctggtccatctggcgtttgccctgttcggtcgcgatgaattccacctgccgctgtcgatcgccgtcctgctcgcctgctttgtgtcgggcggcggcttgttgctgcagctgcgcccgcgatga

SEQ ID NO: 521990 - DNA, 456 bp, Stenotrophomonas maltophilia
atgcccgacttgaatcgaggagacaatgaggcgttcgatgacctcaaggctgagttccttgaggaattcaatgagcatacggtgaccgagctggagatgttcagcgatgcgctcgaaaggcgggggcatgccgcacttcctgatcccgagcatggctgggaggggctcgatctcacgctctacaggctcatcgcacttctggatgaagctggcgaggaagaagaggtgatgcagtactcgagcgctcgatatttgggtgaggttatcaggcaccgcttcggtggcgaatggtcgtgtgtcgaactgaacgaaaatggcgtgcccgagcccatgttggttggccatgagatgcaatcaaaggaaccgttcaatccattttctgcgctggcttgtcttcgagtaagcaaagaaggggccgacatcaggtcgttcatcgagcaacgccttaaacgctga

SEQ ID NO: 521991 - DNA, 357 bp, Stenotrophomonas maltophilia
atgagtggattttatgtgcctattcgggtggatgttgataatggggatagtgatgagggctacttctcattaggctttgtgtttggtcacactgctgctgtggttccgcacaacatcgggctgtgccgtgacgaattggagggtgatccaggttccatctatatagaggcggatgaccaggttcatggttttacaaccaaggtagcgaagtattcaattgatgctggtgttttgacaataacgcttctggatgaaaatgttttctactgggatgaatcaaaagtggtcaatataaaaataagttcagaagacgctggtgcgatagagggatgcatgtcaaatatcttcaacgtttga

SEQ ID NO: 521992 - DNA, 267 bp, Stenotrophomonas maltophilia
atgttcttgtcgggtcgcatctctgcctgcgggcgccagtgcctagagaccgcatggcagtggagggctgcacgcctgcaggggcaggggccgtatgtgctgagcgaggcgccctgcgtggtcgactacatgccgatgcgctggtcgcgcaacatgcccaggcccagcgacacctgggcggtgctcaaggcgcatgccacgtcgatgaaggcgcgcccggcgttcgccgaagtgtaccgccgcgaaggcatcactgactggcgataa

SEQ ID NO: 521993 - DNA, 2769 bp, Stenotrophomonas maltophilia
atgatccgacccttccggctgagcctgctggccattgctctggcgaccacgccggtgtttgcccaagtggcatcgctgcaggccgtagccgctaccgaacaggccgccagcccgctcggcctggccctgagcaccttcgctgcccagcgtggtatcgccctgtccttcgaccccgcgctggccgccggacgcatggcaccggcactgtcgggtaccttcagcaccgaacagggctttgcacgcctgctgaccggtaccggcctgcgcatccagcctggcgcagacggcagctacacgctgcaggcggcgggcaacgttgtaccggtgtcagcagcgcgaaagaccctgccactgcgcgtgagcggtgaagtgcagccgttccgctatgccgaaggcctgcgcctggacgaggactacatgcatgcccaggccaccggcaacggtgacatcgggcgcctgttgaggatcaaccccgccgtccagttcgacaacgcccagttgagcagcttcacccccggcgacatctcgccggccaatgtaagcatcaatggtgcgccgttctaccagaatgccttcgtggtcgatggcatgaacttcaacaacgacatcgatccaggtggcgatccatcgccctaccgcctggcgaccgcccccggcaacagccaggccttcgccctggacaccgacctgctggccgacctgaccgtgctggacagcaacgtgccggcggcctacggcggtttcagcggtggcgtcatcgaggccaacgtgcgcaagccgaagaacgccttttccggcagcgtgtcctaccagaccacgcgctcgtcctggacccgctacctgctggatgaaagcatgcgcgaggactatgccaatgcttcttcgtggggcgatggtcaacccgagttcaccaaggaaacatggcgcgccacgctggaaggcaaggtgaccgatacgctgggcgtactggccaacttcacccgcaagcgctcctcgattcccacctacttctattccgcacacctggtggacagctacggctcggaacgcgaagtacagcgccaacgctcggaccaggcgatgctgaaggcggtctgggagaccagcgaccggctgaccgtcgatgcgtccgtcacgcacgcgccatcggagaaccagctgttccggtccaacatccgcggcgccggcgtgcgcatcgacagcggcggcacgatgatcaatctgggcgccacctggcaggcggactggggcacgatcacccagcgcctaagctggagcggcaccgagcagtcgcgtgatgcgcagagcgatgactatttcacctggctgcgctcggctagcaaggactggggcaccaacgcgtccacgctggaaggcgagttcggtgacatcgaacaacagcaacgacgtcttacctacagcgcgcaggcacagacccacgccttcgaccttggaggtggggtccaccagctgaccacgggcgtggagctgacccggcagaggttcgactatcgtcgcctgaccgagaacagcacctatgtcacaccggcccgcaccacgacgtgcaccctcaactccggcgagatcgataccgcctgtgacattggcctgaccgcggcggcaggctggccaggccagtacttcacccgccgtacccgctacgccaccggccacatcggcttcgatgtggagagcttcgccgcacacatcgacgacgacatgcgctacggcgcggtctcgatccgtccgggtctgcgcatcgagcgcgacagctacatcgggcagaccaccatcgcaccccgcttcgcgctgagctgggagccgcgcgatggcaccctgctcaccgcaggcgccaaccgctactacggccgcaacatggccacctggaagctgcgcgatggtgtaagccggctgcgctacaacaacgaacgccgtaccagcctgaacggggcgtggacaaccggcacccaggccggcaatgacacctacttcaacatcgacaaggtgggctatgccgatgagctgatgctggcgtggcgtcaagattgggcgggctggcgcttcaacctgaaggccgtcaaccgccggctgcgcgaccaggtcatcaacgtgagcgggcgcatcaccggcatcacacccgacgaccccacattggccggcaattacagcacctggtccagcaccggcagtggactgagcaacatctattccctgaccgcacagccgctgcgcggctggacagccggggcgacgcatacccaggcgctgctctcgctggactggaccgacgtgcgcaaggcggtgccgttctacgacgacagcgccgaccagttctacctgaacccatggatccgctacgacggccgctacatgcgctaccagcagaagcccgccgacaactacacacgcccgtggtcggcgcgcgtgaacacgatcacccgcattgcaccgctggacctgaccgtgaccaacatgctgacctactcggccggctaccgccggatcgccagaacttcgctgaccgagatgtaccagggcgagcgcatcgacgtatgggaggagcggcagttctccccgtcgctgacctggaacgtccgcctgggttgggagcgcgagctgtccgcccaggccggaacgatctacgcgaatgtggacatcaccaatgtactgaaccggcgcaatgtctacggcgcatcctccgccgttggcaacgcaccgctgtatgacatcggacggcagttctggctggaagtgggctaccgctactga

SEQ ID NO: 521994 - DNA, 981 bp, Stenotrophomonas maltophilia
atgccggctgagaccgccaccgcaccggcactggccccacgggtgctggaacaggccgcagactggctgatgcgcctgcacgaggacggcagcgtagcgcagcgtgcgcagtggcagcgctggcacgatgccgaccctgagcatgcacgcgcgtggcaacgcgcggagcgtctgctggcgctgagcgggcaggtgccaccgccattggcccacagcgcactgcaacgcgcgccctcgccgggccggcgcgcgctgctgcgcagtgtggccgcgctgctggtcgccccgttgggtggctggctggcctggcgcctgtacgacgatgcggcctgggacgccagcgtgcgcaccgccgtgggcgaacgcctgcgccatgtactggacgacggcagcgtgctgctcctggacaccgataccgccatggacatcgcctttgatgaccagcagcgcctgctgcggctgcggcacgggcaggtgctggtggaaaccgccgcagattcccggcgaccggcgcgtcccttcgtgctcgccagtccggcagggcgcatgcaggccctgggcacgcgcttcaatgtgcagcatgccgatgcgaccaccgtagtggccgtgctcgaaggaacggtacgggtcatgttggccgcaacagggcaacagcgtgtcgtcgatgccggaaggcaactgagcttccacgcagatgccttcgcgtcggtgcaggccatcgcaccggccgtcgacgcctggcgccacggcatgctggtggtcgatgcgcagcccctgcgccgcgtgctggaacagcttggccgctatcaatccggctggctgggctgcgacgatgcgatcgcatcccagcgggtgtcaggtgcattccccgtggatgacctggaccgcgccgtagccatgctggcagccgtccacggactggagatccagcgcggaccagcgggactgtggacgcggctgcgcgcaggaacgccacggtga

SEQ ID NO: 521995 - DNA, 663 bp, Stenotrophomonas maltophilia
atgcctgaacagtcgacttcgccaccatcacagcctctcccgccctcgaaagaacttttcaagatcctgttcgacagcggtcataagaccttcctgagtacctttgatcgcgtggtactgtcagtctatgcggtcttcctggtgattttgcttgcggtcgccgttgcatggggcttggcaccacatccggatctgcgccttatggcgtggggggttgcgatcctgatccttgtgttgggactgttgtgggtggtagccaccgcagtgacagccatcgttgcgctcttcaatggctctcaatccatgcatgccgcaattgatcgccgcagactgcatgccgaaagcgttttgcttgctctccgcccgttcgcccaatctgatttgaggctgcgcgcagagcagtacgtactggagtcgtcactggcgatgcgacgtcacggccttaccgcagttattgtcggcctgtctgcggcatcaacccccatttaccagaaaggggtcgaatatgggctctgggagcagtggaatcatttcccttacgccgtcgcgttctcgctgctgggtgcattcctacttagtgcagcccttatcgatttcacctccaaactcgatagggccgcagcgatactgaagcgagccgctgaatctgagccaactccgtag

SEQ ID NO: 521996 - DNA, 183 bp, Stenotrophomonas maltophilia
atgcaacaccgcaatggacgcaccggtgcactggccgccctgctctgcctgggcctggtggactgccagaccctcccgccgtcgcccctgccgccggctcagctgccgggcctggaacaacgcggcaccgacggcagcttcgagaaggcggtcgagccgccgttcttcattttttcagagtag

SEQ ID NO: 521997 - DNA, 735 bp, Stenotrophomonas maltophilia
atgccactgccccttgtgcgccggttgctgcggctggcgttgagcgcgttcgcgctgctgccggccgtctgcctggcggccagcctgcaggtttcgccgacccagttcgagctgcgccccgggcagaacgccgaggcgctgtggatcagcaacagcggtaccgagccggtgcaggtgcagatccgcatttatcgctggcaacaggtcgacggccgcgaccagctggaacccagcgatgcgctgctgcccagccccccgatgcagtcgctggccgccggccagcgccagctgatacggctggtccgtatcgacccgggcgcagcggccgggcagcaggcgttccgggtgatcgtcgatgagataccggcctacgacccgacacggcagggcatgcagttcgtgctgcgctactcgattcccctgttcgtgcagcccgaaggcgaggcaccggcgccgcagctgcaggcgcggctgctcgcggcagatgccggcccggccacgctggaagtgcacaaccatggcaacggccaggcccagatcgccgacctcgccgttgccatcggcgggcgcagcacccccctgctgccgggcctggtcggctatgtgctgcccggccagaccatgcgctgggccctgccgcaggcgccggcaggcctgaccagcggcaccttcagcgcgaggatcaatggtgggtcgcagcttacgcccctgcctgcaacgccgccggctcgctga

SEQ ID NO: 521998 - DNA, 2433 bp, Stenotrophomonas maltophilia
atggtgggtcgcagcttacgcccctgcctgcaacgccgccggctcgctgaggcctgcgtgctggcctgctgcaccggtctggcttccgtctccgcgcacgcggccggccgtgccctgagcgcgccgggcgctgatatcgccgccgaggcatcgctgccggcgccgaccccgctgaccgcaccgcaggcactgtacctggacaccacgctgaaccaggcgcggcgtggcctgctgctgttccatgaactggccgggcgcctgcaggcgccggcggcgaccctgcgccagctcggcttcccggtgcagggcgacgcgccggtctacctggaccagatcgcgcagctggtggttcactacgacgccagcctgcaggtactggatctgcaggtgccgctgcagcagctgcagctgccggtcacgcggctgggcaggagcgcggaagccgacgccgtcgcccaggcatcgcctggcatggcgctcaactacgacctctacgccagccacagcgacggcctgggcaatgtcagcctcaacagtgacctgcgtgtgttcggcttcggcaacggcagcctgcgcaacacggcgatgatgcgcagctaccagctgcctggcgaaggctggcggcaggagtcggtacggctggacaccagctggcggctggacctgcccgatcaggccctgagcctgaccgtgggcgacttctacagtggcttcctggagtggacgcgcccggcgcgcatggccggcgtgcagatcggccgcaactatggcctgcaaccctaccgtgtcctgacaccgacgccggccttccttggcgaagcggtggtcccgtccagcgtggagctgtacatcgacggcctgcgccagtacagcgggcaggtcccggtggggccgttccagctggcggcgcagcccggcatcagcggcaccggcagcgcccaggtcgtggtcaccgatgccttcggccgcatgcagaccctggatttcgccttctacggcacccagcagctgctcgccgcaggcctgtcggactggtcggccggcattggccgactgcgccgtgactatggcatccgctcgttccgctatgacaccgataccgtggccagcgccaccctgcgccgcggcgtgagcaaccgcttcaccgccgaagcccacgccgaaggtggcggcggaatcgtcaatgccggcctcggtggcgcctggctgctcggtcaggccggcgtgctcagtgccaactggagcgaaagccgcgacggtccccgcagcgggcgccagtacggggtgggctacaactggaacaaccgccgcttcaacgtcaatctcgccagccgccgcacccacggcgactaccgcgacctcggcagcctgcaggacagcgtgccgccacgggtcagcgagcaggcctcgttcggcgtcgacctgcagcagctggggtcgttcagcatcagctacctgcgcctggaccagccgcagccgctgctcgacgccccacaaccggcgccgccgcaggcactgccgttcagccgcagccgctacctcagcctgttctggtcgcgcgctttcggccgctggaacgcctacctgtccgccacccaggacatcgaccagcgccgcaatcgcagtgtctacctgtcgctgggcacccgcctgggcgaagaccgccaggccagcgtatcggcccagcgcaatggcgaccgccactacgccagcgccgaggtgatgcggccggtgcccggcgacggcggccgcggcggcccgggctggcggctgcaggcccgcgatgatggtggcggactggccgaaatcggcgcgctgggcacccatggccgctactcggccggcgtctcgcgcgacagtggccagaccttcgcctatgccaatgccagcggcagcctggtctggatggccggcagcgtgtttgccgcccgcgaggtcccggacgcgttcgcagtggtgtccaccggacgccccggcgtgccggtcctgcttgagaaccggccgatcggcgtgaccgatgccaagggcctgctgctggtcaccccgctgctgtcgtggcagcgcaaccgcctgaccatcgacaccctgggcctgccggccgacctgcgcgccgaccaggtggagaccctggccacgccgcgccagggcgcaggcatgcgcgtggacttcaccctgcgccagtcgcgcggcgcgctggccaccctgctcgacgcccagggccagccactgccgctgggtgcccgggtgcagggcgacggggtgacgtcgaccgtggtgggccacgatggccaggcatggctggagttcagcgccgatgcgcctacgctgctgatcgacagcgaacagggccgctgccgggtgcaggtacaacggcccgaggcgggcgtgcgacggcttgcaccggtgcgctgcctgccggagccgcagccatga

SEQ ID NO: 521999 - DNA, 1020 bp, Stenotrophomonas maltophilia
atgacccgcgtgctcggcctgctgctggcgctgtggctgggcagcctcgcactgccggcccaggctgccaccagctgctcactgaccagccccacgctgtcgttcggcccggtatccaacggccaggtcgataccaccaccacctttaccatcaactgcaccaccggtgcggtcgcgctgctggccaatgtccgggtgaccttctgcgtgggcctgccggccggcaccggcggcaccaccatcaccccctcgcgcacgttcgccaataccttcggcgaccgcctcaactatcagatctacagcaattccacccgtaccaccgtgatcggcagcagcagcgccagcagcccggcgtgggccatgtaccagatgcagtactcggttcccgcgctgggcggctccggcaccggcacggtcaccctgtatggccgctaccctgccaaccaggtgctgtcggccggcacgttcaccagcaccctggccgccaccttccagtacgcctacaacgagccagtgctgggtaccccgccctacccggccaactgcacgaccgccccgcccgccgtgaccggcaattccggcctgatcacggcgacgatgtcggtggttgccaatgccacggtcaacccggcctgtggcacctatgtgactgcaccgatggatttcggcatcagcaccggcgcggtgacggccaacatcgaccgcaccgccgtgttcagcctgacctgcgtcaaccgcagccccttccaggtgggactgaacaacggcagcaatgccgatggcagcggcaaccggcgcatgcgcatcggcagcaccggtgccaccgtcccgtacgagctgtaccagaacgccgcgcgcaccgtgcgctggggcaacgtgctcaacaccagcaccgtgcccggcaccggcactggatcggcgcagaccctgaccatctacggacgggtcgcccccaccagcgcaacgctcacgccgcccggcgcctacaccgacaccgttacggtcaccatcacctactga

SEQ ID NO: 522000 - DNA, 246 bp, Stenotrophomonas maltophilia
atgcacctgcgttcccttctcgcgctggcctgcgccgcgtcatcgtgcaacgcgtccgcgcaggcggccgatgcgcccgcgcaggttggcctggccatcaccctgcagatcaccgacgcgcgcgccgcgccaccgccccagcaacgcagcgatgccgccgaaacggtgccgccgcaggtccaggcgttgtcgccggcactgtccacggacgaggccgcacagcgcacggtaacggtgacctactga

SEQ ID NO: 522001 - DNA, 717 bp, Stenotrophomonas maltophilia
atgctgcgccggctctgcctcgcgctcgcgctggcggtgccggcgcacaccgtagcggcgctggaactgtccagcacccagctgcggctgccggccacccagggcgatggcgagctgtggctgcgcaatccagaggcgacggcctggagcggtgaggcgcggctgtaccgttgggagcagcagggcgcggatgaacggttgctgcccgcagacggggtcgcgctcagcccgggccggctgcagatcggtgccgggcagcggcaacggctgcgggtggtccggttgcgtccggcccccgtcgccacgcagcaggcctaccggctggtgatcagcccgacgcccggcccgcgggccgcatccgccatccgctactcgctgccagtgttccttgatccgcctgcgccgctggccgccgccctccaggtgaagctgcaggcggaggccggacagccgccccggttgtggctctacaatgccggcaatggccatgcgcagctggccgatctggtgttcatcgatgtcggggggcagcgccacccggtgattgccggcctggccggttacgtgctgccgggccggcagcgcctgtggcccttgccggcgcgggccggaggctacgccggcggccatttccaggcccggctgcaggacggccgcgtggtcgaactgaccgcgccggacccggcaattgcagcgagcgctcccagcgggctataa

SEQ ID NO: 522002 - DNA, 531 bp, Stenotrophomonas maltophilia
atgcttcgcgatgcactgatctccgcggtcaggaccgccgtcgccgagttgaaggagacgaatgagcacttctactacgttgtactcatgaccacgggcgaagcattggctccagcgctttgcgcctggtcgtcagaagcactgcaacgcactgccgatgctcgatttccgcttgacgcatcaggtgacttgaaatggagctgcatcgacgctccctacttcgatgtcggcagggaggccctcgatccggtgcatgcgctatttgctgcccgtccggccatgaacccgttcatgccggaagcagattggatggaggaatacgcaatccgacttggcgcgatggaggaggctctgcatgcgctggacactgaaggcttctttggaaccggctccactcgcgaaacggtgttgatcaatgtcgaagtgatcccacccgaccacagcaacgccctccgcgcgcgtcgtctgaatccaagggcggcgctgggccgctggctgtcggaagtggccgatccgacagatacgcaatag

SEQ ID NO: 522003 - DNA, 414 bp, Stenotrophomonas maltophilia
atgcagaccagcggaagcggtgcccacgaattgttcgccctttttcaagatgctgcgacaaagaaggatgtcgactatctcctgcgcatccttcagacgctcgacgacgattcagaggacgctgatctgatgaaggatcttatcggacttgcggaatcctatgatcttcatgactacattcaggccgtgctggatgcaaacgctcagcttacaattcaagcacaaggctggcttgacgtgattacgtaccggatcttgaattctcgcccatattgtcaacattacgtgcaactgttacgcgagcatcaggaaaaaaacgtgatcacagcgtatcttcgttgttttcttgagagaaatcccgagaagagacagtcggttgaagaagttctgcatcagaccacggagagtctctga

SEQ ID NO: 522004 - DNA, 1650 bp, Stenotrophomonas maltophilia
atgaagaaaaaacccagccgcaatgaaccttgcccatgtggtagcagcaaaaagttcaagcgatgccacggcggcccgaacgcagcgcacgaggaactctcttgcagaggcactgagcttgcacgacaatccgcaacagtccatcgcatccagcttgagcgccagcaaggcttgggacgtggcatcatttctgcggtttccagcgagatgcgcttggtcgttgtcggagctcgtaagctccggggcgactggcagacgttccacgactttttgtatgcctatgcaatggacgttatcggtcaagactggtttcgagccgaagcggataaacctgctgccgttcgccatcctatcttcaactggcatgcgcgactgatgaccttggctaacgccagccaatgcgtcagcgatcatataaaacggattccgctcacgggagccatcaatgcgtatctcaccctagcctatgacctctacacgctagagcacaatgcaagtcaggctcacacccccggaattaaggagcggctttttcatcgtctaaagcacccggatcagttcgtaggcgttcggtacgaggtccgcgtcgcggcaatgttcctgagggctggctttgatttaatttgggaggatgaaaccgacggcacttcgcgccactgcgagttcactgcgacctatcccaagaccggaagaagcttcgcagtagaatgcaagatgcgcaaccagagcacgggggcgaagtcacaatcaggcttcggaaaattcgtcggactggtcggtgatgcattattgaagaacacagacgctgaccgtttggtgtttgtcgacatcaacaccccagccaaagcacgtgccctcgacagcccctatgactggcggacagcggcggtgagtgacctgcggcgcttcgagggcagcaaacaagcagaaggactgcccagcgccttgatttttattaccaacttccctgaccaccatcatctggatgagtctgtcgccgacgccggctccatcttggaaggatttaagaccgctgactaccgaacgggggagcccactactattcgccagaagatccagctgcgggaacgtcttcctgaagtagaggcactttttgcttcaatgatcgagcatagcgaagtgccttcgaccttcgaaggtgagattgcgggcctagaagacacctctcgacttctcatcggccatcgctaccaaatggacgatgggcaaatcgggctactggaagacgtttgcgttcatgagcaagacggtcaggtgtcgcttgccctgcaaatggaggatggcagcagagcgatctatcagaatcaactctccgaagatgagttcattgcatggaaacgatacccagagaccttctttggtgatgtcaggcagcgtcaaggtcggatagacgatccaatggagttcttcgaccgaatgctgcaagtctactcgcagacccccaaagaaaagctgttgggattcatggcacccgagcctggcctcgtccgtgaagagctttccgccttggagcaacccgagcttgcaacgctttatgcggagcacatcaccaatgctgctttgctgcgagccggtccgcagcctatccctgccaacatgcggtggatgcgtaagcctccagcacgctag

SEQ ID NO: 522005 - DNA, 219 bp, Stenotrophomonas maltophilia
atgaataagacgacgttccgaggcaccctgaagtgggtcaacctcgtggtggtgctgctggtcatcatcctggcggtccgctacctgtggagccggaccttgagcggccagctgggcggcatgcacgatattgccctggctggattcgtgtttttctgcctgttctttgtcttcctgaccgttcagtcgatccgccgtggcagggcggagcagcgctag

SEQ ID NO: 522006 - DNA, 168 bp, Stenotrophomonas maltophilia
atgctctggaagggctgttcgggttcgggcggttgtgacctgcagccgggcatggcctggctctaccccaatccggcgccgacaggcatcattcaagcagcccctgctagcgtcggcctgtaccgccgcgtgttgcgtggccacctgtccgctggagcgctgtcatga

SEQ ID NO: 522007 - DNA, 261 bp, Stenotrophomonas maltophilia
atgaagaagttgattatggtagcagcgctcttgctactgactgccagcatctccggcactgcatttggcgctattctgcagatccagggatttggatccggccttagccaatctcaagcaacgcagattgcggcgtccaacgcttccaaccaatgcgccattcagggcggccatagtgtcggcttttttcacgtaaccatggcaacgcagaatgggcccacctggtttgtcaacggcgtacttccctgcgacgtgccttga

SEQ ID NO: 522008 - DNA, 1395 bp, Stenotrophomonas maltophilia
atgactcgtccggactccatttcggctgcggcttcggtgcgcgcgttgacgtggctgcgcagccagccgtggctgcgtgttgcctttcatctgctgcccatcgggctgcgcgagcgcgcattgcggctgttctcgcgccggttgcaggcacagacacgatttgtgcgcaccgcagcctggcagaggcagctgcgctctgccgatgaggtggttgtccgtgttgcaagcagtgcggcaggacagcccggggtcaacatcctgggctacatccacggccagttcgggttggccgaagctgcccgcagctatgcgcgcgcgctgattgaacagggtgtgccggttgcgcttcgcgatatcgatcttggcttgccgaacgctcgcgacgagcatgtactggatgcctatatcgatgatcggatgccgcatgcggtcagcatcatcttcatcaatccggattatcttgagcaggccttggccagtatttcgctggccagggggcaggggcgttacctgattgcctgttggttctgggagctcgaacgtctccctgacagctggttgccggcgctggagctggtggacgaggtactggtggcaacccgcttcatccaggatgcagtggcggaagcaacccgcaagccggtgacgcgtatcccgatgccgcttggtgtcctgcacgacagcgggctgcagcgtgcggacttcggcttgtcggaggatgcgttcatcttcctcacgtccttcgatttcagctcgcggatggagcgcaagaatccggaggccgtgatccgcgcatttcgggaggcatttccgtcagagcgccgtgatgtgcaattgctggtcaagagcagcaacggtcatcgcttcccgcatctgctcaagcacctcctggatctggccgagagtgacgagcgcatcatcatccgtgacgaagtcattgcacgcgagcacctcaatgcgctgcagcgatgctgtgacgcctatgtgtcgcttcatcgcgccgaaggcttcggcctgggattggccgagtgcatggccatgggcaagccggtcatcgccaccgcgtggtcgggcaatatggagttcatggatgcagattcggccgcgttggtcgatttcatacttgttccggtgcgcgacggcgagtatcccgcaggcaagggccagcgctgggcagacgcgcatgttccggcggccgcagcgtggatgcgccggttggccgacgacccggcctttgccacgaagctggggctggcaggacgcgggcgtgtcgaggcagttctatcctcccgcgccgccgcccgcggcgtcgttgaacgccttcgccagcttcaggcaggcgcccgcacaacgcaggacatcaatgcagacaatgaagtacgaggcaggcaatga

SEQ ID NO: 522009 - DNA, 921 bp, Stenotrophomonas maltophilia
gtggtttctcgttctgacctgagcggcaagcgggttctggtcaccggcgcgtccggcttcaccgggcgctacatggtggctgaactgcgtgcccgagggtgctacgttgtggcactggggagtcaggacacggtggaaggggcgcacgagaccgtcgtcgcggaccttcggaaccccgaggagatggtggcggctgtagctgcggcgcgcgctgaccgggtagtacacctggcggcgctggcgttcgtgggccatggcaacgtggaggatttctacagcgtcaatctgcttggaacccgaaatctgctggctgcactggagcagaccgagtacccgccggcccatatcctgctggccagcagcgcgaacgtttacggaaatgcatcagccggcgtgctggacgaagacacgatcccttctcctgccaacgactatgcggtcagcaagctggccatggagcatgtggctgggctttggcatggccgacttccgatcaccgtcgtacgccccttcaactacaccggggttggccaggcaggacagttcctgatacccaaaattgtttcgcacttcgcgcggcgcgccgagctgatggaactgggcaacctggaggtggcgcgtgatttcggcgatgtccggtcagtagtcgcagcgtatgggcagctgttgcagacatctgccgcaatcgggaggaccgtgaatgtgtgcacggggctgggccatacgctgatggagatcgtgcagatgtgcgcacggattaccgggcatgcccttgagatccgggtcaatccggcgttcgttcgcgcaaatgaagtaaagatcctggtcggggacaaccgcaggctgcgtagtttgatcggcaactgggatcctgttccaatggaacagaccttgcgctggatgcttggagcgagtgcctga

SEQ ID NO: 522010 - DNA, 2160 bp, Stenotrophomonas maltophilia
atgcgtgagctaatccgggcctcaggaaaggattcataccgatggcgcatactgctcgcgctgctgctcgcggcgctggcaacggtagcctattggtatggcaccggcatgcagcgaggctccctgtccacgcccatgtcctatgagggcgacgccctgcagtacggatacatcattgacagcttcgcgcgccctggcggacttgctcggatcgacaatgctggcgccccattcgggacccagaacgtcgactttccgaatggtgatttcagcaacatgctgctggccggcctgctattctctggcgggtacggccttggcttcaatctgttcctccttttgagcgtagcgacaacggcagtggccgggttcgctatttcgctccggtgtcgcatttctactggccctgctttccttgttggccttgcatttgcgttgcttccgttccacttccagagaattggccatctcttctacaccaattatgcaaccgcagccgttgccctctggctggcgctgaagcttgcggatcccttggtggacggaacagcctccggagtccggcggtggcttggaccgcttggactgctcgtggcatgcatctggtgcggtacgaccggggtgtactacgcgtttttcacctgcatcgtgctcgctgtcgccacgatcgtccaggttgggcgctttcgctcgattctgccagcctatcgcggtgccctctttgtttcagggatcgtactgtgcgtcgcgttgcagcttctgccgacgcagttccacaaccgcatggaaggtccgaacccctccgtcgggaagcgctcgctgatcgagagcgaaatctacggtttgaaactctcgcagctgctcctccctgtgcacggccacagatttggactcgccgctaaagagcgcgccaaatatgacgagcaagcactcacggtcaacgagaatggcaccgcaacgcttggcgccctaggtagtgctggcttcatgatggggcttctgatgctattcctcccatctgtccgccgtatgttcccggccgcgcaacagctgtgtgcggtgctgcttgtcgcgctcttcatctttgcgacaaccggtggacttgggagcctgttcgcgctgttggtttcccctcagattcgtgcgctgaaccgcatatctccattcattgcattgttcagtctcatcgtggctgcaggaacactccagctagcctggacatggatgacctcccgtggcaagcattggcacaaaagcggtgcagtgatggttgccgtgctctctctttgcatcatctacgatcaggtcagcccagcctaccgacagaccaggaattcgcggagtgaggttgccgcgcgatatcaaagcgatcgcgatttcgccagaggcatcgcagccaagctcccgcaaggagcgctcataatgcagttgccttttatcacctatccagagaatcccgagtcactcggcagctacacacaatttcggaacagcctgcatgcacctggcctgcgatggactcacggagccatgagggcacggcctgaatccaattggttgagcgaagtggcagctctgccagcgggccagttcatggaagtcgtgcaggcattgggcttttccgcactggtcatagacaaacgtgcggaatccgaggaaatccgtgagaaggcggcggccttcgccggtcttccaggcgcacagcagttcagtgatcgtgacaatactcaaaccgccatctttactggcaccacaggcgcaactgctcgggccttggtccgcgatggaggctggcatgcagtggagggcgatggagatcgtagatgggtatggtcggcagacaagccaatgctggcgctctctccctcgcctccaggcgtagccaattgcaagctgtcaatgtcgctttctgcaattcgcccaatgaaagtcaatatctccgatccctcggggaggctgcttgcagaagcatctcttcgcccagatcaggtgtcggtcgttgaacttacggttccggccagcacacgacgaatactgctggagaacgagattcctgccgcaccgccgggtaacggggatccgcgcccccttgcattgcgctgggattacactggaagccaatccttgttgtgcgccttcgacagacgcaaagagaactga

SEQ ID NO: 522011 - DNA, 927 bp, Stenotrophomonas maltophilia
atggcactcatcagctacgttgtgcccgtctacaacaattcaggctcgcttcggccaacctgggaatccatccgagatctgttccagactgaactagcagatcacacctacgagatcgtgttcgtcaatgatggatcccaagacaactcctgggctgagatcatggaactggccgcagaagacaatgccgtacgcccgttccgatttacgcggaatttcggacaggttcccgcgatcattggtggctaccagaaatctgctggcgacgcggtcatcaacatctcggctgaccttcaggatcccatagagttgacggtacagatggtccgaaactgggaggctggcttcgacgttgtcataggtcatcggaatgatcgcaatgactcgatagcatccaactttttctccaaagtcgcatacggcattctgcgcagttccaatcgtaatatccctgaaggcggcttcgatttcgtcctgatgagccgccgtgcaaccaacacgttcctgcagtacgaaggtcggaatcgctacttccaaggcgacatcctgtgggcgggctatcgaactgccctgttgccctatgccaggcgcaaacgcaccattggcaagtcccagtacaatttcggccgcaagcttaagttgtttctcgactacgtcatcgatggctcttaccttcccatccgcttgatgtcactgtccggcgtactcgtctctgcccttggcctgctgtacgcggtggttgtgctcggcgcttgggcattgcataccacgccattccctggctgggcaccactcatgatcgcaggcctggtgattggcggcatgatcatgctcatgttgggcgttatcggcgaatacctgtggcgcatcctggacgaagtgaagcacaagccgatgtacatctttgaggatcgaccggatgcgtga

SEQ ID NO: 522012 - DNA, 1101 bp, Stenotrophomonas maltophilia
atggacaagattccgctcctcgtcccgctcatgccaaccctcgaacaagcaaaggcctacttcgctgagatcgatggaaatcggcactacacgaactttggcccattgagtcgtaggctcgagcagcggctggccaatgatctgggcgtagagcaggaaaacgtcaccactgtatccaactgtacggtgggccttgagctggcgctacaggcgcgtgggctgccgttgggggcaagagtactcctaccctctttgacatttgttgcaacagcaaccgctgtcagccgagtggggatgactcctgtcattgccgacatcgacgcagaggggtggtcgttgacgccggaaatcgcgcgagatgcgacgctgcgcgagcgtatcgatgccatcatgccagttgccacattcggcaacccgcaggacccagccctttgggacgcgttcgaacgcgaaacggggattccggtgatcgttgatgccgcaggcgcctatggcaatcaatcagccggctcggcaatcgacgttgtgttcagttttcacgccacgaagtctctgggtgcagccgagggcggtgctgtggtttcaccggacccgcaacgcatccagcgcatacgtgcactatccaattttggcttggacgtccgaagcggtacgcttgtcgaattgggaacaaatggcaagatgagcgagtatcactgtgcattgggactcgcctcattcgacatgtgggagcaggtcaaagaagatcggcgcgagctctatgcgcggtatatggcgaggctgcgtgctgcctgtccatccctgcaattccagaacaagcccgaaagcggtgtgtaccccttgatggccgtgctccttccggagggcaaggatgcaatctccatcggcaaccgcctctcgaacgctggaatcgatacgcgtcgctggtacactccggcgcttcaccagcagccggcgctccgcgattgcaccatgatcggagagcccatgaacgccaatcgactggcaggtcgaatcattgggcttcccttcttcctcggaatcaacgacgcacagattgaccacgtgtgccagtcgctggcagccgaactggagtcctaa

SEQ ID NO: 522013 - DNA, 405 bp, Stenotrophomonas maltophilia
atgactttacctcgcatcgcacaactatatgccaacgagaagcttcgcttcctggttgtcgggggttggaataccgcggtgggctacttggtgttcctggtgttccatctcaccatcgaatcacgctggggcgtggcaactgtgcttatcgcgagttactgcgtggcgctgccacattccttcctgacccagcgcctcgcagttttccgttcaaagcggccgtggctaccggagtttggcagattcgtgctttccaacagctcgatctttatagccaatctcctgcttctcccgctggctattactctgaccggcgccaacagcgccttgctgcaagccgtattcctcttcatatcgaccgtagccagttacctggctcacaggcactttactttctcccggtga

SEQ ID NO: 522014 - DNA, 636 bp, Stenotrophomonas maltophilia
atggatgaacgcgccatcgccctgatcggcgcgggcggccatgcgcgcgaaacgctgctgctactccaacagtgtggggtggcatcagagcggataacgggtttcttcgtggatggtgagtactggacaggtgaactgatagagggctatccccagtacagactgaacaccttcgaccccagcatccacgctgccgtggtagcggttggcgacagccaagccaggcgccgccttgctttggcgctgcctgcaggaacctgctttcccagcttcgcgcaccccacggcaatcatcccggaatatcttgaactttcagagggtgtgatcgttcatgccagctgtattgtcaccaccaatgtcaggctggagcgccatgtccagctcaatcggtcaaccaatgtgggacatgactcggtgctgcgcgaattcgtgaccacggctccgggggcggtgatcagtggcaattgcgagattggcgccgccagctacctcggcgcgatgtgctgcatccgcgagaaacagagcgtcggcgcagaggcggtaatcggcatgggcgcaatggtagtcagcgatgtccctgcgcaggccgtatttgtcggcaatccggctcgtccgttggtgcgaaaatccaaatga

SEQ ID NO: 522015 - DNA, 1137 bp, Stenotrophomonas maltophilia
atgctcattaccctgctcatcctattcacggcctcttgcgttctggcagtgatctacccctacctcatctaccccgctgtgctggctgcctggaaggttcggcccgttcgccagggcccaccggattgcggggatggtgctgacttcaccctgctgttctgcgcctacaacgaagcaaccgccatgccacagaagctggccaatctaagggaactgcgcaagcagtaccccgcgatgcagttcatggccttcgacgatggctccgccgatgggaccgccgacctgatcgagcaaggcgcgccgttcgtcacgctggtgcgcggcggcggacggaacgggaaggcgcacggcatgaagctgatggccggacaggcaacgtcccgctacctcatctttactgacgccaatgtgctgctggatcttcaggcaccgcgcgcgctcttcgcatgctatgccgaccaagaggttggcggcgtctgcggcgccctccattatcttggcgcagatggatcggcaactgctgccgtgggcgggctctattggcggctggaagagaagatcaaggacctcgagtcccggagcggcagcgtgatgggcgcggatggctccatcttctcaatccgcacggcactgtatccgagctttcccgataccgtactcgacgattttacggtctcaatggaagttgtcttcaagggcttgcggttgatcaagtgcaacgatgtcgttgcctatgagcagcttgtttcggtgcgcgccgacgaatttgcgcgcaaggtgcgcatttccgcgcgcgcgtttcacacccacaccctgctgacctcaaagcgtcgcaatatgaagttcgacaaccgattccgctacttctcgcacaagacgctgcgctggttcggcggagccttcctgctggccggtatagcggccggcgtggctaccctcagcctgctctggcccgtgcttgggatggtgagcgtgctcgcgctcatcgccgtggccatcgtaggcacgaagacgaccaggggccccctctcctcacttgttgaggtcgtgctcgccatgctagccacgctgcaaggggtggcgcgcgcagtacgaggtcagacattcgcagtgtggaatccggcgaagtcccgttga

SEQ ID NO: 522016 - DNA, 777 bp, Stenotrophomonas maltophilia
atgaaagcagtcatcctcgcgggaggattgggaacgcgtctggccgaagagacggccgtgcgaccgaagccgatggttgagatcggcggccatccgatcctctggcacatcatgaaaatctactcggcacatggcatcaacgagttcatcgtatgcctggggtacaagggctactacgttaaggagttcttcgcgaactatgccctgcacaactcctcgatcacggtcgacattgccaaacgctcgctggaattcaacggcgattcgcaacttccgccttggaaggttcacctcgtggataccggcaccgagtcgatgaccggcggccgactacgccgcgttcgcgactacctcgacaaggatgagccgttctgtatgacgtacggtgatggcgttgccgatatcgatatcacctcgctgctggcattccacaacgcccatggcaaagacgccacgctgacgtcggtacgcccggcgggccgctttggtgccacggtcatccgggacggaaaggtcacagagttcacggaaaaaccggccggtgacggtgcacagatcaacggcgggttcttcgtgctacaccctcgcgtcattgaccgcatcgcgggtgacagcacgatatgggaacgcgagccgctggaagggttggcacgcgatagccagctggccgccttcgaacacaagggcttctggcagcccatggacacactccgggacaaacagtctctggaagcgctttgggacgccggcaaggccccatggaagatctgggactaa

SEQ ID NO: 522017 - DNA, 1068 bp, Stenotrophomonas maltophilia
atgccgaaccgtgatttttggaacaagcaacgcgtgtttctcaccgggcacactggcttcaagggcagctggaccgcgctttggttggccagtatgggcgcgcaggtgcacggctactcgcttgcacccgagaccacccccaaccttcatgacctgatcggcaacgccgcgggcatgacctccaccatcggcgacattcgcgaccctcttgcgctccagcaagcggtgaatgcctgcgacccgaccgtggcgatccatatggcagctcagcccttggtacgtcgctcctatcgggagccagcagaaacctatgaaatcaatgtcatgggtacgctgcacgtgctgaacgcgctccgccgcgcacctcatctgcgcgcggtcctcgtcgtcaccacggacaaggtctatatgaatgacgactccggccgccctttcattgaaaccgatccactgggcggtcacgacccctactccagctccaaggctgcgtgtgaggaactggtctcctgctaccggcagagctatttcgaagaggccgggatccgcctggccacggcgcgtgccggcaacgtggtaggcggcggcgactggtcggaggatcgcctgattcccgacatctggcgcgccatgctcgccggccagccggtgaccctgcgcaaccccggcagcactcggccatggcagcatgtcctggacccggtgtccggctaccttgattatgtcgaggcactggcatcggacgctgccgcggcgctccccaatgcgctgaaccttgcgcccgcgacagattcgcccatggatgttcaggcggtcactgagacgctcggaaaggcacttggtatgcacgaaacatggcgcctggacgaaggtgacaatccggtcgaaatgaagatgttgactctggacgcctcgttggccacccgcgtgctcggctggtatccacgcctgaccgggcgccaagccgtcgaatggtctgctgactggtacatccggcagcaccaagggcaggatgccaccgccctcacccttgcccagatcgatgaatacgaaggactggcgacgcactga

SEQ ID NO: 522018 - DNA, 579 bp, Stenotrophomonas maltophilia
atgaagttcacccccgccccgctggatggcgtatacctgatcgatctggagccccgcagcgatgatcgtggcttcttctcgcgcctcttctgtcaagacgagttcgccgagctaggactggagacgaactttctgcagttcaacacctcgttcacccgggcacgccacaccctgcgcggtctccactatcagctcggcgattctgccgaggtgaaagtcgtcaaatgcacggccggcagcctgtacgacgtcgtgcttgatctacgccctgactcgcccagcttcggcaaatggttcggcgcagaactaagcgcggagaaccgccggatgatgtatgtgcctcgcggctgcgcccacggcttcatgtccctcaccgacgatgttgaaatgctctatttcgtcagtgcggcgtacgacggccagaacgagcgctgtgtccgctggaatgatccgcgtttcgatgtggagttcccgcacacgccgctctcgatctccgagaaagacgccagcgctccggacttcgacccggcatggcacctgaacactgccgtcaccaactccccattcccgcggagctga

SEQ ID NO: 522019 - DNA, 900 bp, Stenotrophomonas maltophilia
atgcgaatcctgctcaccggcgccagcggcctgatcggacaggccgtgcacaagaacctctcccatgacaacgaggtagtcaccctcggccgcagcgcaagcgcggacgtacgcctcgacctggcagacgtagacggcctgaactcagtggccctgccaccggctgatgccctggtccactgcgccggcatcgtcgacgaagacttccgcgaagatcccctccgtgctgccagaatggccctttttggcgctggtgccctcgcgcgccaagccgtcgctgcgggcgccacacgtcttgcctacatttcctcagcgcatgtgtacggtccgatgctgggccacatggatgagcgctcaccgcctaatccggtctcggactatgcgatctcgcattacgccaccgaacaggtgttccgacggtacgcacagggtgcagtgacttctgctgcattccggccatgcgccgtgttcggcaccctgggtgatcttgatgcattccgtcgatggacgctgatccccttctccttcccccgcgaagcggtgatcgatcgtcgcatcgtcatccgctcgaccggacagcagcggcgcaacttcgtgggtaccgaagacatcgcggacagcgtacgacactggctagatgccacagcttcgggctggcaggtgatcaaccccgttggcgaaacctcctgcacggtgttcgaattcgcccagcgctgtgctgccatctccgacgaactggccacaggtacctgcatcgttgagcgccagcagccgtatgagccgcaggccggggacgactttgaatacgcttccaccctgcaaccgaacgctgctcgtcagtccattgatgacttcgcccgcggcttgatgagccagttgctactcaaggccgtgccatga

SEQ ID NO: 522020 - DNA, 900 bp, Stenotrophomonas maltophilia
atgaagccgcgcctgaccatcggccttatcatctacaacggtgtggacattgcacgccgctgtatcgacagcctcatctcgcagacctacacggactttgtcctacttatccatgacaatggatcgaccgacggtaccagcgagatctgcgccgagtacgctgcacgtgatcctcgcgtgcgacatgtgcgacacccccaaaccattccgcagagcgataacttccgcggtgtactgatgtctgcggacagcgagtactacatgtgggcagcggacgacgatatctggtcgccacagttcgccgagctgtgtatcgcccagctcgacgtcaaccccgatgcggtggcgtgctgcaccgaggtgaatttccggtaccccgatggcgacgtgcgccctgcacgcggcacatttcccatcatcggcactcccgacgagcgggtgcgcacctacctacacaatccgcgcgacagcgcccggctttacggcgtgtaccgaaccaaggctctccaggctagctatcctgccggattgaacatgtttggctatgactggttggtggtctgcctgagcatgcttcacggccaccacttgcaggttgacggcgtgcagctgctccgcagcgggcatgcccccgggaagtacttcgagcgctatgaccgtcatttcgtccgcgatactggcctggctggacgcctgtcctggttcctgccgctattgcctctgtcgcaggccctgaaggctcaccttccccgcagcgcatggagggcctcacgacttcgtgttgcgcggctcaatctgatccaactgctgttgttgctgaagtggaagtggcccgtattgaacaatacgttcttgcttgcgcgaaaagtcgatcgcctctttaccacgaagcaaccctag

SEQ ID NO: 522021 - DNA, 1062 bp, Stenotrophomonas maltophilia
gtgagcatctcgccacaccttgacaacaacttcaacctgcttcggttggttgcggcgtcatccgtcatcttttcgcatgcctatgacatcaccacgggactgcatgatccgctgagcgccggaatcggctattccgccggctgggttgccgtgtctgcgttcttctccatgagtgggtaccttatatacaagtcggcgctccgcacgccttctgctgccgattacatgtccgcccgctgccttcggattcttcccgggctctgggccatgctcatcatcacgacgctagcactgtcgtcaatctcggcactgtccctagtggactacctgggaatgtccgagacgtgggagtacatcctgggcaacgcgatcatgtacatgcctcgctacgaactgcccggcgtgttcttggacaacccgttggccggcgtaatcaatgggtcactgtggaccctgcgatttgagttcacctgttacattatggtcattgccctcagcgtcagcggagttttctcccgcgaacgatggttccgactgttcgcagtcactgtccttgctgggtatctggcgttcattgcccatgctctgctgacgagtaccacccaatcagcgctctttgacggaaacagcgctgccaagttccatcgtctgggtttggcgtttctgcttggcatgttcttcgctcgctaccgcgatggcacgccggtctcgtggggaatgctcatcagcgtgtatctggccgcagcgatcctacggccaaccccactgttccagcccgccctcatcgtggcgattgcggtcacttgcttcaagattgccttcgcaccaatgccctcacttaactgggcaaaaacaatgcccgatgtcagctatggcgtgtacatctacgcgtttcccgtccaacaggttttcgcgtacgccttcccacaatggagtcctttgcagaactcccttgcaagcctccctgccacgctgctgccggccattctctcctggtatctagtggagaagcccgccttgagactgaagggaaaatttttcttcacgcgggcacgtgcctga

SEQ ID NO: 522022 - DNA, 1293 bp, Stenotrophomonas maltophilia
atgcttggcgtctggtcgattgtgcttgccacaacggcattcgggcgggttgccgatgtcggcatttctgctggcctatctaggttcattgccgctgcacgtgggcgcgaggagcatgacaaggtctcgctctacttctggacagcactctccaccatcgccattctcatggccgtcatcgcccttctcgggtggctgccattgaatgcggcgttgggctttgccctgagcggcgtagagctgaccgcggccaagcaacttctgccctgggcgttgttcacattctggctactcaacatcaatgccgggctggcggcaacgctgctcggcattcagcgatcagacctacgcgccgtttcctccattggaggcatgatcatccaggtggtcgtgtcctatcttctggtcaagtcacacggattgctcgggcttgcttgggcacaggctgcgcagtacctctttaccattgccgcttcgtcgatatttgcgaacagatcacgcgccatccttggtcctccccggttctcagccttggtcttgaaggagttgttcggctttggcgcaaagctgcagatcggtacgatcgcgaaccttctgtttgaacccctttccaaactagtccttggagcagtagccggccccgcacctgtcggcatcttcgagatggcgtatcgaatggtctatcagatccggacagtcgcgatcatggcactccagaacctcgtgccagcctttgccgagctctcacagcgtgattccacagcaagcaacgccctcttcaacaaaagcaatcgcgttgccgccctcgcggggggagggctgatgatcgcggccattagcgtagcgccattagtctcagttctatggctgaaaacatactcaagcgagttcatgttactggtcgcgatgatctcggtctgctggctgatcaacatcctctgtgcgccctcctacttttggggaacagcgcacggcaccatcaatgcgaacatcggcggccagcttctcaccggcatcctctctcccgcgctggcttacgttcttggcaatcagtacggcccaactgcggcagtgattggcatcctcgccggcaaggcgatcggtgacaccctgcccgccatattcaatcgccccgcccccgcctggtcgagtgccggcatcgcacaaccatggaacttactggcattggccgcgaccctcttttcggccaccctcgcacatcatatctgggggagaatggccggtgatttcctctcatcgcacgatgtccttaaactgatcacgtcatcatga

SEQ ID NO: 522023 - DNA, 1365 bp, Stenotrophomonas maltophilia
atgaaccacgtctacgcaacgcccaacgcgcatggaagcttcagccgctcgacagtgggattggctctgctggtcgcgttcttcgtcggcgcacacctcaggctgtccatctacagcggcggcagcgtactgattcctcagtacatctgcctagcggccggcgctgcgcttgtagcgctgtatcacaggacgcttcttaagacgctgccgctgatgcttctacttgcagcggccctggtgctcgcccccattctgaacagtgttctcctgtccacctccgcgttatttgagtcgtacaagggcggcattcagttactgatatcgatgacgctcatgctcgctgttgccgtgctagtaaccactgttgaaccagcacgacttgccagcctctccacccgcctctggctgttttttgtgctacttgcacttcttgaattcgtcgccatgcgcgacgtattcgaagccattagtcaagcgatctactccgcatctggccgtggcctgtacacaggcgtggagcgcgatcaactcatgtatggccagatccggcccaaggtcatggccaccgaaccctcgttcctggccaccaccttgctctgcctgtgcaccatggcgatcctcagcatgcgctcagcaggcaagccgcacacggtgaggaatggcctgctcatgctcacggtaacttacctggtctgccccagcatgatcatcgtgttcttcatggccgccatcgcgacgtggatgtactggccgcgcacaagaaaggggcgtgcattggtcctattccttctcagcggtgcattggtttcgacgctgatcgcgcagtcgtacatgacccagctcgccgccctcagcaaattggtgctcggtgatcacggggccaccggaagcttcttcgggcgcattgccgtgggaccaagcgttggcatggatgttattgagcgctatccattgctgggtgtaggcgtcggtaatgcagaggccgcgcgccccatcatcgacaacaactggctcaataagggggctttcgcgctgttcccatggtttgcagatccaactttgcgggcgaacgatctgatgtcaaacggattctggtggcagtggatctacctgggggcagctggaggcctcctattcatagccttgaccaaagcactgctgcgcagaatcggtgtggaactaccgttccgggcgattgtgtgtgcgtggattgtctggtatgccggcgcggcattcgttgatccgatttcctggttcgcgctggccatattctgtattcctccacgcacaaattccgaatatagaacccagctctcggacaatgatcgcgctcctatcgtgcccggagccatgcatgcgcgataa

SEQ ID NO: 522024 - DNA, 876 bp, Stenotrophomonas maltophilia
atgcgcgataattcccgcactccgcatgcccggttgggcctcggatgcagccgactcgggtcggtgaatggcgtaggcggtccagatgccacccgtctgcttgcagtcgctttggacgaaggctatcggttctttgatacatctaacatctatggtcagggagatagcgagcgactgataggcaacgttatcggtaaccgcagtgactgcgtggtgtgcaccaaggggggcaagtacttgcccttctccaaacgtattctagtaccggcaaaaggcctgatccggcttgtcgcgcgacgatccaacacagcacgaaacggcgtcagcagtctgcgcagtcagccgctgcccacgcgctgggacgctgacttcatttccaaggcaatcgacgaaagtctgcgtcgactgcgacgtgacgcaatcgatatctacctgttgcacggcccgcaggtaagcgcgctgcgcgatggagaagccatccagacgctgcacaacgcccagcaagccggcaagattcatgttcttggcgtatcggtcgatgacgtcggcacagctatggcggcgctggcggatccgcgagtaggcgccttgcagcttccgctccatcctaatgccaacgattacgatcaggtgttggcacaagccttccagcagggcgtgaagatcatcgcgcgtgaagttctgggtggtcaaagcgggatagccgtcgcacaggatccctcggcattcgccgcggcacgcatccaggtcctgcaagatgatcctcgtatcgccactgtcttggtaggcactaccaagatctccaatatgaaggtcgctgcgcgggctgctggcttgaccgcgagcacacctacccgaccgcaacgcggaagctga

SEQ ID NO: 522025 - DNA, 1290 bp, Stenotrophomonas maltophilia
gtgaacattgcaatcgtgggctgtggatttgtcttcgacatctacatgcggaccgtcaaggctcatccggagctggccatcgtaggcgtcttcgatctcaaggccgatcggatggatcgcgtgtgtgcctactatggccttgagcgctatacctcgctggacgccctgatggaggacgtccgagtggacatcgtggtgaacctgaccaatatcggcgcgcatttcgacgtgagccgccgggcattgatggcgggaaagcacgtttacagtgaaaaacccataacccgggatctgcgtgagacccaggaactgttcgccatcgccgcgaccaaaggcgttcgcatgtacggcgcgccctgcaacatctacagcgactcggtaaggacgctgttcaaggcagtcggcgacggcaccatcgggaaaccgcttctggtgtacgccgagctggatgacaaccccatccacctgatggagtttgagaaggtaaggagtcctacgggcgcaccgtggccgcttgaggaggagatccttgaaggctgtacctttgagcatgtgggctaccaccttgtttggatctgtggcttgctgggcccagcaacggcggttaccgcctactccaatgagctgatcgagaccaagtcagcagccatgcctggccgctctgggacgccggactattcggttgcttgcctgacgttcgccaatggcgcgtcggcgcgaatcacctgtagcgtggtggcaccccgcgaccatcgcatgcgcgtgatcggcactgaaggagaggtatcgaccgacagttaccgccagtaccgttccccggtccacttggagcgttactccaaaggcagcctgagcgcacggaagttgcaggtgctgcgcaacagccgcctgctcggcaggctgttcggcatcggcggacgccggatgcgactggtacggaactggaagtccgtcgcggtggaaaaggaccaatcggtgcgttcttccctacgaactcgcgtcaaggaatgggtccggcgcaaggaagtttacgcgcaggataaattcgtcggcattgcagagatggcgcgcgagataagaagcggccaaccgcagtatctttcacccgacttcataacccatctgaatgaactgacgctgctgatccagggcgcaggtcccgagggcttggcgacgcgccctaccacaacgttcgcgccgcttggcccactaccagggacgcaggactacgggacccggtatctgaagcgcctacaccccactctgctggagcggatcgcatcccgatga

SEQ ID NO: 522026 - DNA, 1569 bp, Stenotrophomonas maltophilia
gtggcgttcgtttcccgattctatcgggacgaatatctggacgatatggatgaagtggctcgtggacacttcaacttctttggtcaatccatggatttcggcagcatcggagcgatcaattggcaccacaccattcccgtcgagaaagatcttcacctctggcggatgaagctggcgcacttgggattcatcagtcccatgctggtttccggcacagtcacgcatcatcaggccgtcgaagcgatcctggctcgcttcaatgccagcagcagcttcgcggtgagcggatgtttcagttcctactggttcccgtatagcgcgtcgcaccggatactcagcgtactcagtggctaccttgtcgcgcgccaggagcgttcgctcgcgccttcactggtcgctgccattgaagcgtttctccgtcgcgatgtcgccttcgtgctggacaacattgagcatgagctcaagaacaatcacgtcgaacgcaatctggcggcgctgtgtctgtactacagccacgcagaagaggttccgacgtcgatcgcggcgcgcctgaaccgcgacgtgcatcggatcattctggattgcgtcctcgaagatggactgctttccgagcgctcggccatgtaccagggcttgaccgtcatggccttgcgcgtattccgggacacccggttcctcggtgccaccacgcgcgaacttgcctgcgagcgcctcgcattggccgagcgtgcttgggcggtaatgtctcatccagatggcgagattgcgctgttcaacgacagttggttcggcgaagttccgccggtcgctgaattgatggagcccccttcactgcagccacttgaagtgttgccccatgccggttatgcccgcctgcaggatgaaacctgcttcgccctgtttgacgccggtgccattggcccttactggaatcccggtcacgggcacgccgacttcctagcgatggagatcgacctgcacggcaaaaggttcattgtggatccgggtacttatcagtattccacaggcgagcgcagacgctttgagcgctccgcggccagccacaatggtccaggctggcacgaggtcgagccggtcgagtacagcggctgtttcaaagtgggtcggatgagcgcggcgcagctgaccgagtgtggtcagctcgcgggcggacatcgcgtgtccgggtcactgaatctaaagcatggcagcgtagatcgcagtgtcatgcttctaaacggttgcctgcatgtgagcgaccgatggcatggggacattccccgaccgcgcaccaacctgctagtcagcgccgattggcacgtggtctcgcgcaaagagaaccatctgcagttcgcgcaggatgggatcatcgtcgatctggtgatccgcaatggctacgtggcggatctccgcgcttcatcctgggccagccactaccttcaggatcggcaaggatggttgataacactggagcccagcgatacagccgaactggactgggacgtgagtagcccagttccgtcccccatctgcaccaaggaacagcacgatgtcgtccgttcgccgtaa

SEQ ID NO: 522027 - DNA, 1203 bp, Stenotrophomonas maltophilia
atgtcgtccgttcgccgtaagcgcattctcatcctcagccgtctcttcccatacgcaccggcgcgcgggggcgacatgagctattccaggggactggccacctcgtttgcccacgttgcggacgtgaccgcagtggttgccaccaatggcgtgctgcccgatggtccgctcgacaaagacggggtccggtggatcatcgcaggcgctccgcgcaagggacgcatgggatcggtcgccacccgcctgcctaacattgcctggcgcggacagaccactgcttacacgagagccgtagaactagcccttcaggaagagtgggacgtaatcgtcatcgatcacattggctcctaccatgtactaccccaggtactggcgtaccgcgcccgtcgcccggcaacgcgcgtctcctacatttcacatgagcacgaagcctccgtgcgggtggagaagtacgcagcgtatggcggcaacccgctgctgcgccttgccctgaaactggatggcatcaaggtgggtagggccgagcttgacctggtgcgatcggcggaccttctgtctctgatcaatccagatgatgccgcactctacaaggcccagttgccaggtgtgcagtacgtcaccctgaccccgggctaccagggtaatagcacgatccaacgccggatcgatgcctcggttcctcgacgcgtcgtgttattgggcgggcgtgaatcccgtcagaaacaggtgatcctggagcgctggctggaccatgcagcgcccgtctttcatcgcgcaggcgtcgagatggccgtggttggaccgattgatgatgcgctcggcgacacgttgtccggccgctacccgaccgtacgattcatgggctttgtcgatgatattgacgcattccttgctacctgccgtgcaagtgtggtcgccgacttcctcggcggcggattcaaggtgcgcttgctgacctacgtcttcaatcgtttgccaatttttgccatgaaaggcgccgtttctggcttgggggtgagcgcgcccagcgcattcgtcgaattcaacgaccttgcggcgctggcgcagggggtttgcgaacgcattgatgatttcgactacctcaacagcctgcagaacaatgcctatgagggtacccggggatgtttcgattggaccgatcgtggcgtgcgctttctaaaggccctggacgcaggccagtga

SEQ ID NO: 522028 - DNA, 984 bp, Stenotrophomonas maltophilia
atgtttcgattggaccgatcgtggcgtgcgctttctaaaggccctggacgcaggccagtgactgcacacttgacgacggtggcgccgggttccgggcgcaatcagggcattgagctggcacgcgttctggccgcgttcgccattatctggtaccactcgaaggcaccgggaagcgagatcagctacagcggtctctcggtgttcctcatgctcaccatgctgttcgaggtgggcagcaactggtcacgacctgtccggatcgcagagttggcgcgccgtctgctgattccgtgggcattctggttcctagtgtttggtgccatcaaccttgcacgccataaacccttgataccgctggattacagcgggggctgggtcgccggagttctcgctggcagcagcatccatctctggtacatcccgttcatctttgccctgatcgtgatactggcgctgataaagcgatttgttgatcgccagatgctgttctggctggtagtgatggcgactgtcgtgaatctggcaacggtctggcaatgggaaccctggtcgcgccaggtcggctaccccttggctcagtggacgcaggcttccacggccgtgctgatcgggctgttgatgggcctacaccgaagcacccgatggggtgcgcatgcgcttgctgttgcactgatgatggtggccgcgacatgggtgctctcttctttgcctggcgtggcactgccacacttgattgccgccttggtactgctggccgcgctgcgttggggacgcaggatccccacattgaccgtgatgcagacgctggccaatgcgacgttcggcatctacctgtgccacccgattttcctcggggcggccaaacagcttccaatccatgtggcgctccgggtcaccatagctttcgtggcgtcggcctttttcgtagtcggctaccagcgcctaagggcgcgactgaagcaaccggcgttgcccgtcgcctga

SEQ ID NO: 522029 - DNA, 495 bp, Stenotrophomonas maltophilia
atggcacaccctctgtctgcgctcggtgcgatccacaccgccatcagtctggttccgatcctggccggggtgtacggcttcctccgccaccgcgcgatcgatccggccacccgcgcgggcaagctctatctgctgggcctggtgctgtcggtggtgacctcgttcaccgtgtccagcaccggcgggctcaatcccggccacgcgttcggcgtgatcgtgctgctggtggcattcggcggagtgctggcggcgcggctgcgcgtcctcggccgcgccgcaccgtacctgtccactttcgcgctgtcgttgagttttctgctgtcgctggtgccgggcgtgaatgaaacgctgacgcgccttccgttgtcgcatccgatcgccgcggcgccgctggcaccggtgatcctgcacacgctgctgggctgcgcggtgttattcgtgatcggattcgtggcgcagtgctggcggatccatgcgcgcggcgcacgccggtaa

SEQ ID NO: 522030 - DNA, 456 bp, Stenotrophomonas maltophilia
atgctcgagatcgctcacagaatcggcatcaaggcacccgtcgcccaggtctaccaggccctggccacccccgagggcgtcgccggctggtggaccgaggaaaccgaaggcgaccgccacccaggcggcacgctgcaacttcgcttcaccgccaacggcgaagaccgcggcaccatgcagatgaagctgcgcgaactgcagcccagccgcctggtgctgtgggaagtgctggccgggccgccggaatggaccggcacccacatccgcttcgccctgcaccaggaaggcgaatacagcatcgtgctgttcacccacgatggctggggcgagcgcgccgagttcatccgtcactgcaacaccaagtgggccatgttcctgatgagcctgaaatccctgctggaaaccggccgcggccaacccagcccgcgcgacatcaagatcgacgagtggaactga

SEQ ID NO: 522031 - DNA, 246 bp, Stenotrophomonas maltophilia
atggtgatagtcatggcttttgcctcccctcctgttccggccacgctccgcgaaatgctcaaggactatccggagcatatcgagaggcttcaggaagtactaaatcgttcggttgagcgatctcgcaagatcccgttcatgccgttcgataatgcgatctgggccttggaagggcgattgcagacgttcgccattgaattcatcactccaagtacagatactcctgaaaacatgtcaaaccgctga

SEQ ID NO: 522032 - DNA, 1428 bp, Stenotrophomonas maltophilia
atgagtacactggttccccaagcagcaatgcagttgattgacccacaggcgcaacttgtcgtcgattttctacagcacatggggctaccgcacgacaacatcatagcggcccaagatcagcggtcgatcattggaaataacttgcctgcatacattgcgggcttgcctgctaacgtcaagcaagatgcaaggtatctatcgaaatttgttgtgggcgctggcttcggactcttcgactattcgctgaacgcaatctggaacgaggtagtgttagatcttcataagaaggtcatcgcctatggtctcgatatcttctacgatgctgcagtaggtggcaaagctcgcgagttctaccaagtcgaagacgatctgcgctccatcaaggatgcagtcctactcgacacgtgcaagaaacttgagctaataagtgaaacgacccacaagaaactcaagcacatcttggacatgcgaaatgatatcggtatttcgcatccgacgaactacaccatcaatgcctttgaactcttgggatggcttaccacgtgcattcaagatgttctgaacgatcgaccaacgccggccgcacttcaagttcaagcatttattcagaacttgaagaagcacacgcagcctctagatgccgcgaatgttgcaaacattgcgaataagatcaatgaactggcatctcatcactgcgggaacatcctgcgcaccatgttcggcatctatgtagcacaggatacagacccacaggtcagaaagaacattgcgttgctcgcagtctccgtttgggcagctagtagtgaccaagctaagtatgccctgggcctgacgcttgagggatacaacactaatctctaccaagataaatacgtcttgggcgaacagttctttcagtcggtgcaggggaactcgttccgatcaaatgccgaacgcagcataattgttgatgctttaattgatgagctcttggcgaagcacaacggctgggacaactttcatcatgagggcccagcagctgacgcagtaatgtcattcatcaatggtcagcaggaccttttgccgaacttcgcattcaagctagttaaggtattcttactgtgccggattggccggggtattccgtacaatgatggcgtttcgccacgcgggcgcctttactatgatcgccttctcacattgcttggggatcagtatgcggcaatggcgctggcggcgctgtcgcactatgagatccaaaaccaacttgaaaaggttatttgcaggcagcaggccgttgcagcgctgcaggtgctgaagacgacggttgttaatgatcgtctaattgaagccatagactttctgctagctcacctgcccgctaacggcaaggccgtgtttgacgcgcggttcaagacgcttacgtccggctacatcacttggagttga

SEQ ID NO: 522033 - DNA, 513 bp, Stenotrophomonas maltophilia
atgccgatcagccaggaagagatcgatcactctgccctgttgttcgaagcacagcggctagctgtcctccttgagccttatcccaacaacaacatgatgttccattcgcgccttcagcgatttgaggccgacgatcacatgttggcaatctttggacaggtattgggcgggctcttcttcgtggacctcaaggatggctctgtagggctgctcccaatcgactgtgaagtgtcactccagtactgcaattcagatctgaggagcttcgcagctgtccataccgcgttcatggcggaaatccgacctgcgctgaactccaacgaaggcatagcggagtccactctgatggaacttgaggcctcgttccgcaactgcgatgccacatcaatggcggacgagaacaacctctggcccacatgcctttatgagctctcagaggggttctttcctctttcatccaagaaggtggaactacatcgttcgctcggaatcgatctcaaccatccctggtag

SEQ ID NO: 522034 - DNA, 546 bp, Stenotrophomonas maltophilia
atggcgacgctagcaccaaagaggaagatacgggaaactggaactatcggcgaatttctcaacggctggaccaagaagcgtcgaacaatgctccgcttcatccgcgcgggcgacgtgttctcctttactcgcaatgatgggttttaccacttcggacagataatttccgagattcccattggccattccgcacatatctttgggacccgccgcagggagacgatcctcgcccttgccgatctggagcaagctagaccactaatgaatccagtcatcctggatagctactcactctttgacaggaaaagcgatcaggatgcggactggcgggttatcggtcgacatgaacttatccatgcgactggcctggagaactacttcttcgtttacggcaccccagggatctggcacaagagaaacgcaaccaactccattcactgctctgcaaccgaagaggaagcggcggttctaccctccctgactccgttgaacaacttcaagatatggagggcaatcgacgctctctctaatcattgggcggagtag

SEQ ID NO: 522035 - DNA, 477 bp, Stenotrophomonas maltophilia
atgctccgcttcatccgcgcaggcgacgtattctgctttactcgcaacgatcggaaattttactttgggcagatcatatcgaaggcacttataggccactgcgtgcagatcttcgatctatgcaaatacgcacctgagatcagcaagaacgagctactgcatgtcaaggtgaccatccccccaatcattcttgacagctacgcgatttttgaccggaaggttgacgttcatggtgactggcgagtcatcggccagtcggatattggcgatacatcccgcttcgaaagctacttcttctgctatgggatagagagcaattggaaaaagatcagcgccatggggtcagacgagcaggccatctcggatgaagaggcaatgactcttcagcctctccttgcattgaccaacttccgtttctggcgttcatttgatgccttccaggcttcagtagatggaagttggtcgcaccagttctga

SEQ ID NO: 522036 - DNA, 1374 bp, Stenotrophomonas maltophilia
atgcgctgggtatacgcgcacgcctttgttgcagtcgcgctggtggtgttgggcctctggccggagtcggctgctgcgcgcgacgttgttcaatgcaatagccagcgtaatcccgcatgcaccatcgccgaggcaaaagcagagtgtgcaggctatgacccgttcccgtatggcaactatgtcgcgatcatcagccggcgttgcaccgtagaccagcgaggtagcgattacggctgggtagtctttgaagcggacttcaagctccacaacggttcttccagtggctggattagtaatcagaccttcaattggaaacaggactgtacaaaggagcctagctacaccggtaccggcccatggtccacggaaggcgctgcccgctcgggctcgctcgggtgtcgcaacagctgcgacggattttggggtaagaacgcggactccacgtacacgtgggagaccaccgggggcatttgcccaaacgatgaaaagaagaactgtgagcttctcggctccagctactactggaattcaatcctgcgcgtttgcgagccgccagattccaagtgcaagggcggtgcaaagccgaattctctcggtcaatgcgcgcccgagccttgccccgaaggcatggggcagcagcccgatggaacatgcaagaagaaggagaacgagtgcccggctggtcagattcgttctcccgatggcaagtgccttcccggtgatggccagtgcgctaagggcgaagttcggggccaggacggaacgtgcaagaaggacgccgacaacgacggccagccggacccggtaaccgacgaatcgttcagcggtggcgatgactgcaatgcgccgccgtcgtgcagcggctcgcccatcatgtgcggtcaggcgcggattcagtggcgcatcgactgcaacacccgtaagaaccgaaacatcgccggtggcacttgcgcgtctatgcccatctgtaccggcgacaaatgcgatgccatggagtactccgcgctgctcatgcaatggcgatctgcctgcgctctggaaaagatggaacagggaaacggcggcggtggtgagaacgccgatgtcaaggcgattcgtgacgctctcaccggcaccggcggcgcagtgacaacggcgcccgatcggcctagctccgatgtatgggcgccgcgtagcggtacgccggtgaagcctgacacgggcggatacggctgggggcgtacttgcccgcagccgcccagcttcgaagtattcggaaatgtcatccagatcaacacagcaccgctctgcaactggctgattctcggtggctacttcgtgatggggctcgccgccctggcttcgcttcgcatcatcgcatctagggacgcttga

SEQ ID NO: 522037 - DNA, 2451 bp, Stenotrophomonas maltophilia
atggcgagtaacgttcaaacgacaacgatcacgatcggcggctcggtttcccggtcgttgcaggacgcattgtccttcagcaacgatggcctgaagcgccttggcgatgaagccgacaagctcgagcgcaagctcaatgtcatgggcaggtcgagcaaccagttcgcccgcatgcgcgccgaggccgatgcgttgcgcgcttcccaggaagcgctgcagcggatcgaggacaagcgcacagcgaatcttgagaagcgcgagaagctgcgttcggcgttcggcgatgcgcgcggcatgctcggcagcgccatcaccacgctggccaaaccggtggagaatgccgccggcttcgctcgcgagaaccaggccatcggcaacgccgccaacctgacccgcgcacaggtcgctgcgctgggccagaccatccttgccgaatccagccgcacccaccagggcgcgggcgagctgcagcgcgcggtcagccagctggtcgccgccggactggatgcgcagaccgcgcagtccagcctgggtgcaatcggccgcaccaccaccgctaccggcgagagcatcgacgatgtcacccttgctgcgtcgggcctgcagcaggcgttgatgatcgaccccagcggcctgcaatcggcgttggacgtactggtcgtggcgggcaaggatggcggtgtcggcctgaaggacatggcgggcgcgctgccggtgctgggcagcgcgttccagtcactgcagatgcatggcaatgcggccgcagccaccatgggcgcggcgctggatgtcgcccgccagggtgccggtggcgccgacgaagccgccggcaacatgcagcgcttcatggccagcattctctcgccggacctgcaggccaaggccaagaagggcttcaagctggacctgcgcaggatcatcaatgaggcgcagagcaccggcggcaatccgttcgatgcagcgatgcaggcgatcatccaagccaccgccggtgaccagacgaagatcggcaagctgttcggcgatgcgcaggcgcagaacttcgtgcgtccgatgatccagaactgggatgagtacatccgcatccgcgacaaggcgctcaacagctcggcgggcaccaccgacagcggcttcgcggccaagctgcagaccgacccggaaaagatcgaaggcgcgaagatcgccgtcgacaacctgtccaaggccttcggtgccgcgctgctgccggctgtgggtgaggcggcggtgaagctgaccgaactgctgaacggcgttgcgtcgttcgtgcaggaaaacccgaagctgatcgccaataccacccaggtcgtggtcggcctgatgggcatgcgcaccgcggtactcggcgtccgctatgcgtggacgttcctgcagggcccgatcctggcggtgcagaaggccttcgagctgttccgcggcggcagcctgctggcgcagatggggcagttcggtccgacggcaatgcgcctggcatcggggttccgcgtggtcgccaccgccgtcggcgccatcggcggtggaccgatcgccatcgccatcgccgccatcaccgccggcgccctgctggtgcgcaagtactgggagccgatcaaggccttcctcggcggcgtctgggatggcctcagcggcgcaggaaccaccgccatgggcgaactgatgcgcgccgtcgagccgctgcgcccggcatgggaagcggtcggcgggctgctgggccaggcatgggactggctctccagaatgctggctcccgcgcagtacaccggcaacgaactttcgcgcgtagcggagatcggctcgctggtgggcacggcattgctggccaacttccgtctggtcatccaggtgatcggtggcgtggttcagaccatcgcctggctgggtgacatgctgggtatcgccgccggctggatcaccgtcacgttgggcggtgcctgggacgcgatcatggcatcggcaggcgcggccatcgactggatcatgggcaagctgcagccgttgctcgatggcatcagttgggtgtcggagaaagtgggaggcggcctgggctttctcaaggacaaggccgtcgaaggtgcgggcatcgccatggaccgcgcaaacatgggcaaggcggtctacggctccatgacagccaacggcggtggcggcatcggtgacatggcacgtgtcgcgtacgcggtcggcaccaacgacagcgatgtcctcaagcggcgcatggcagacttcggcagcgcgcagcagggacgacaggcaccgtcgatgccctcgggcactcgacgcatgcccaccaccgtgcagcagcaacagaccaacaacatcaccatccaccagcaaccgggggaatccagcgaggcactggcgcggcgtaccgccaatgcattgcagcaccagcaggccgtacaggcccgcgccaccctgggagacaggaactaa

SEQ ID NO: 522038 - DNA, 468 bp, Stenotrophomonas maltophilia
atgaagcgcgagttcgtaaccgcaaccctcgacaagctgctgtccggcttccagagcaacgattcaggcaacgcgcccgtgctgctgatgctgggcggcttcaagttcagcctcaacaccgcggtgttccaggagatccagcaatccaacgagttccgttggcaggcgcaggagcgggtcggccagctggccgcgttgcagtacaccggtccgggccaggccaccatgacactgccaggcgtgctgaaccacgagttccgtggcaagggcaaccagatgtcggagctgcgcaggctggccgcacagggcaagccacagcggctgctgaccggccgtggtggcaatctcggcctgtgggtaatcgacaagatcgaagccaccagcaagcacttcacgcccgatggcgacatccgccagcagaccttcaccctctccctgcggaagcacagccatggcacgaacgtataa

SEQ ID NO: 522039 - DNA, 651 bp, Stenotrophomonas maltophilia
atgccaaggccacgacggatcgatgctcccggttacccgcaacatgtcgttcaacgtggcaacaatcgccaacccgtgttcttcacggatgacgaccgcgtggcctacctgcgtctgctgtgtgatcacgcggaccagcagcactgccgggttcatgcctatgtgctgataggcaaccacgtacacctgctggtgacccccgatgcaccgggcgcgatgtcccggatgatgcaggcggtgagccgcacctatgtgcgtcgtgttaacgaacggcagcagcgcacgggaaccctgtgggaaggccgcttccattccgcgctggttgataccgaacgctacctgcttgcctgccagcgctacatcgaactcaatccggtgcgtgcggggatggtggcgcatcctggggactatcgctggtcaagctatcgcgccaacgcacagggacgggcaaatgcactgctcgtgccgcattcggaattcgagctcattgctgctgatgtggatgagcggcgcagacgctatgcggagttcatcgcgcagggtattcctgccggggatctcgtggcgatacgtggcgcgctgcactcgcagcggcggctgtcggggtcgttgatggggtcagagccctttcgcgatgcgaaagggatctga

SEQ ID NO: 522040 - DNA, 786 bp, Stenotrophomonas maltophilia
atggctgagtcgctggctaccctgcaacagcgctgggccgaccatgtgcgcgacccatcaatggccgcacccgatggcatcgaggcgcgccggctggcggtgtaccgtcgcctgtgcatcgacagcctggacaccctgctggctggcaccctgccacgcctgcaacaccagttgggcacgccgcgctggcgcgacacagtggagcgctactatgccagccacacctgtcgcaccccgttgttcccacagatcgccggcgaattcgcagcgtggctggcgatgcaggacgcgctggcactgccggcctgggcagcggaactggcgcactacgagagcacgcagcagtcgctgcacattgaagcgcgcgccgccgggcgttcgctgcaccacgttccgctggacagtgatgtgctggcggtttcgccgctggtgcgggtacttggctaccggtggccggtgcatgtggacgagatgctggaaccgatgctggacgcagctcccacgctgctgctgatgcgccgcatgcctgaattcagtctgcgtgtcgaggaactggccccgctggcctatgcggtgctgttggccttcggcgatgacggcacacgtgtggatgacgtgttgcagaccgtggctgaagcacatggtgtcgcgccggatgaactgcgtgcggcctgcttgccagtgctgcgcgacctctgcacggcagccgttctggttgcgtcgactgatccccgggaacgccggccggcggccggcactacctcctctccattcttcgaggcctga

SEQ ID NO: 522041 - DNA, 522 bp, Stenotrophomonas maltophilia
atgcagaacaacagtgcgcgagccacacttcagacctgcctgaacgaactgctcaatgtagaaaatattctcgaggcgctgggcgacggaactcgagctgctccataccttaaaaaatactcagtcatcagagcatctggaagtattgagttggcattcaagaccatcatcgcagacaaggtagatgaaggcagtcatgctcagctgaaaaatttcataaagcgaaagattagaaattcatcgagcaatccgaagttgggagcaatatccggaatgcttgctgaatttgattcgcgctggaaaaagcgatttaacgagttaatggcatttgatcggccagccttcgagaatgctatggaaaaacttgttgatgctcgtaatagctttgcgcacggcggcgactcgatgcttagcatccaagagaccatagcccacttcaaattaggcatcgtcttgatggagcgcctagacgaagccgtacagtttgaggaagaaatcgctccagtagaggagcaagattag

SEQ ID NO: 522042 - DNA, 1668 bp, Stenotrophomonas maltophilia
atggaacagttcaacagccttaaggatctaatcctcaagcttcaggcaatgggcgcgaatagatttttcttcaaggttcttcaagagaatgacaacagcaaacagcaaatctacattgctgatcgccctgcttcgatctcattccttgatccagaatgggccatggatgccgagacggcaattccgaaatcgtcggtagatttcacatgggtatctcccacgacaaaatccatcgctccacatgccaaacttatttactacccaagctatcccgaggtcaggctgtccggactgcttctggactcgcctgccgctcctagccagcacatgcagcctatcccaaaagatcggagaaagggtgctgataggcgcgtattagtccttggcattactgagaccgggggcattctgggacatcttgcgcttcccgacagcaaatgctccgacgaagcgattttgcttcggggagagaatgtgctcagtgagattttcataggcacagacggcaatacgatcgagattgttgaaacagcagatgccgagccgcaggtcgacgcagagtttggcgtggctattgaacagtccgacgatgagagcgaagacgactacagtgatgatgatctctttagcatttcgtcttggggcgcagacttgagcttcagagaattaatagctcgatatgaagagaacgagctggttaagcctgagctacagaggcattacgtctgggacaaagcggaagcatctcgattcattgactcagttcttctagggcttcccgtccccagcattttcttggcaaagaccaaggaagagaagctgctaatcatagatggctaccagcgtcttatgactgtaagagactatgtcctgggtgtgttctctaaagacaaatcagtattcaaactgtcaagaacagataaaatccacgaaagatggcggggtaaagcattttcggagctcactgatgatgagcggagaaaaattagaaacactacgatccacgccataatcttcatgcagcaaaaccccaaagaaggcgacactagcctgttccaggtctttgagcgaatcaactccagcggacgaacactgcttcctcaggaaattagaaattgcgtctaccaaggtccatttaactcattgttgatggagctcaatgatatttctgagtggcgtgagctttggggcagctcgaatcgagatgacagaatgagagatatagagttcattcttcgattcttcgcactgtcggacgacgcgattatgactagcgcgaaagccccgccgcgaatctctctcaaaaaatacctcaatcagttcatgggagatcacaacaaggatgcattctgcgcttcgttcagagagaggttcagcaggacagttaagtttatccacaagaacatcggaaagaacgccttcaacaatgtctccttgtcggcgaatcccagatcggcatccactttcagccccactgtattcgattcggtcatgatcgcaaccgactctgcgctcagggattcaaagtccgtccccacaattaaacttgatgagaagcggacagctaaactgcatgatcccgactatcaaggactgctttaccaagaaacaatgcgagtcccgaatatcagactccgcgtacaacagatgaagaaagcactctactga

SEQ ID NO: 522043 - DNA, 1251 bp, Stenotrophomonas maltophilia
atgaaacaaggaagtttgtcggagtattttcaaggcgtagcggcaaagcgactgactgaagttgaggcaaatgtcctcatttccaatcagcacgaattcaatggtgtgagggcgctgcgcgagatgctgggcgagccaaaccagcgggtgccatacccttcgaaaatgatgtacctaagcgatgatcagaacgagccagtcgtggaggatgctgtgctcacttggtacgacgctcgtcagaaggctcgggaagagcgtggcgtgatgcgcggagagtatcgcctttacttccccagcacttcggtttctgcaaatttcggcactggcgacatcttggttattgcccactgccaagatagttcacttcttctgattgttgcgaaagacggctcaagtataggcaagcagatcgagtggctgttcggcgtcgatacaagtcactcacagtttgttctcaaatctgaaagtgaattcgataaacacgagctcggtttcgcatctaggctgattcttgaaagcattggactggataccagctcaattgacgacagccatctcgatgagatgatcagtctcttcggcgcatcctttcctaccacactgcaattctctgcgttcagccgctccaagtgccaagaagccgatccgattgcagaccccgatctcgccctcatggcttggatggaaaaggaagagcaactgttccgcacgcttgagagatacatcgtatcaaagcgtttagttgacggatttcttggcagagatggtgagccagacgttgattcgtttgtctcctactctctttctgtccagaaccgtagaaaaagccgcgtaggcttaacgcttgaaaaccatctcgagcaaatcttcaaagcatatcgactaaagtattcccgaactgccaggaccgagaaccgctcgaagccagatttcctgttcccgggccaagacagctatcttgactcgggcttcccaagcaatcgcctgctcatgcttggagtcaagtcaacttgcaaagaccgttggaggcaagtcttggcggaggctgatcgaattggaaataagcatctgctgacgcttgaggcaccaatttcaatgcagcagacgcgggagatgcactctaaaaatctgcatttggtcatcccaaagaagctgcagttcgcatacctagatgaacagaaaccccaccttctttcattgaatgatttcttggatcttgcgcgacaaaatcagagcgcaatgaccgcgtaa

SEQ ID NO: 522044 - DNA, 801 bp, Stenotrophomonas maltophilia
atgcgcatttctgccaacaatgcccttagtcatcgagtcgttgcgatagccgccaccgccggcatcattgcgctctccggattctggattgcggccttggacagggagtgggccggctctggccggctagtgctttggttgaacacttcagccgtgttgggacttgcgatcagtcttgcaggagttgtctggcgcaagcacatgagcagcagtcgggttgaggtcgaaggttcggccgtgagtccccagaccctacgaggaattagggaggaactagcgcagcgcttccttagagcgcagattgacggactggtgcttggtctaggcaaagtggggcttggcctgcgcagcgcgcctcaggcggctggggaggggctgagccgtgtcactgacatcactccaggtgaaagcgacatcatggtccgggggttaatggagagccgcattcgctacctctatccgctcatcgacgctgccggcgttgaatacgagctcgagcgctggaatctggatggtggcagcttcaagctgatgtcagagatggtggaagcgcttgaaagccaaggctttgcaatcttcgtcaccgatcctgccttgaatgaacggtgtcgtgttctggagggtgacgagcaacggattcaatcatcgttctccgggctatccctcgaagacttggaccttggaccgttggacctgggtggcattgtgatcgatgacctggcagcgctccttctgccggacgtagaaccgcttgttgcgccgtggcccgacttgacacccagcagggcgcaacaggactga

SEQ ID NO: 522045 - DNA, 408 bp, Stenotrophomonas maltophilia
atgaccgcgatgggacccagccagcacttggtggcgtttctcaagggaccaattctggagcggctgaagaacatcgaggtcgtactgcgaggggatcggtacgccagcgagagcgaaggccggcgtaccaccggaatttgggctcagatcgatgagaatcgggcaattttggagctgctgcagcgccatgcgccgcagctgctcgtcgagcaccctgaattggtctcaatgctggcccaccgtgacgcctggctagctgatctcgctgaagctgcaggggtaaccaatccatggtggctgcgcccacccaagggctggccacgtccttggccggacgccaccgaggcgccgggcgatgcccttgatacattagaactcgcagcggttcggttagaggagggcggctaa

SEQ ID NO: 522046 - DNA, 513 bp, Stenotrophomonas maltophilia
atgaacgcggatggaactgctatctctgatacgcaacggggcaacacctacaagttggcgtggactgcgtacgtcggtccatcggtgatgctgctggtgtggtgcgcattttcaattgccctggcacctataggttggaagctgaccgttgctgcgctcgcgatcggctttggccgattcgtttaccgcgtgctttggctgaatacggtcgagcttttcaccgatgcggccggtgtctgggtgcagcgtggactgctgccatggaataggggtgcatatggcgttcgctggcatgacgcggaggatgctgtgatgttcaccgggctaccgtcctggttgacgaagtcctatcgtgtgaaggtccgcaatcggtttcgtgggcattccgaaattgatctcaagcatgtgcgtcagggcgacgatgctgtgagacacatcaatcagcgtcaggagtcggagcggcggctggatcggctcgagtcccagctagcgcgcgaaggtgctatccaatga

SEQ ID NO: 522047 - DNA, 1254 bp, Stenotrophomonas maltophilia
atggcggagattgacgcaaagaatggcctggtcaagatcgatgggcaggaggccagcgctgttgactacacccgggtggtcgacggagaccgggtcacgtatgacctccgattccggatgggcagaaaagtagtccaccgcgtcaaggggattgacgctaatgagatggtccacacgctgggcgttgagaacgcggggaagatccaccgaattgcaggtgagaagggctcattgtccggaacggatctgtcggtgcacgaggggctgtcgccgcaggctcaggagagtgcgattgaacaggcggtacagatcgagctgaacaagtcgtcggtgaaggaagcggatgtaggcagcgccactgtcagcccggacaagaagcgtttcttggaaggagtggcgcgtcgtgcttccgatcagcaccatgaggaaggcaaagggcaggaagagaaggggccaaatgcggctgtcaaacagccgaatccggaacctgcgaaagcactgacccacgaactggaacggcgtcgatctgcgcagcttgaggcactcaagaagcagttcatcgtgatggactcgcgatactacttcaaggacaaggccaacaccctggcattccaggacaaaggctctcgtctagtcactgcagagaaggggcccgcggtggctgaggccttgatcaaaatgatcgtggccaagggttggacgaccgtgaaagttaacggctcgcacgaattcaagcgtgacctctggatccaggcagaggcgaatggggtgaagatgcctggatactcgccgaccgatgcggaccgcgcggcggctcttcacctgatcgaggctcgttcgaccaacaccgtggaaaggggtagggagccggaaaaagcgcgcggcgagcagcggggtagcgtgccgcaggaacagggtaagaagggcgaaccaaccaaggaggagatcgacgctaagcgcaagcaggcacagcggattgaggactacaacccgctccgtcctggagatacgcccatggtcgacaaagcgaaggtcatcggccgagtggtgcactcgattgctgcagcccggatcaaaaatcccgagacccgacagagggtcgaacaggaagttcaacgacgtctggcacagcttgaggcggctggtgggcgtgttccaaccatcaaggtgtttgatcagcgagcaccgtcccagaatcgtggcgcagagaaggccaaggctgctgaccaccacagagcggagcgtacgcgatga

SEQ ID NO: 522048 - DNA, 2046 bp, Stenotrophomonas maltophilia
atgtccaccaccaccctgcccctgtcccagctggtcgtttccccgaagaacgtgcgcccggagcccggcgatgtgatcgcgcttgccgcgtccatcgcggcccttggtttgctgcagaacctcgttgtcagtccgaccgagaatggcacgtatcaggtggacgccggtggccggcgcttcgctgccctgtcgctgctggtggaacagggcaagatcgccgatgacttcccggttccggtaatgatgattcccgccgaggaggcaaccgccgcaagtcttgcggagaatgtccagcgcgaggccatgaacccggtggacgaactgcgcgcgttcaagcagctggtggacgaaggtttcaccatcgaccgcgtggccgacaccttcggtgtcaccccgctggtggtgcagcgccggttgaagctggtggccgcagcgcccgaactgctggaactctaccgcgccgacgacatcagcacggaccagatgcttgcgctctgctcgaccgacgatcacgaagtgcaggtgcaggtgtgggaaacctacggcagcatgagctggaacaacaggcccgccgacctgcgtcgcgccgtcctgacccgcgaagtcgaggccgatcgcgatcaccgcgtggcgttcatcgggggcgttgccacctacgaagccgctggcggtgaagtgcgctgcgacctgttcagtaccgaagggcaggccgcgatcctgaccaacccggaactgctggacaagctggtggccgacaagctggaagccaccaaggaaagcctgctggccgagggctggggctgggtcgaaatctggcctacctgggactactccgccgactacacttttggcaccctgtcgatggttaccgttgacctgccggacgaaacagcacgccgcatcgccgcgctcaacgaagaagccgagcagctggaaaccgagaaggagcagctgcacgaagctgccgaagaacgtggcgacgatggcctgaccgaagaggaatgggaacgggacgaccagattgacgagcgcatggaagccatcaccgctgaaatcaaacagctggaaggcgctcacaagcagtacgcgccggaggcgatgccatcggcaggtgtgatcctgtgcctgcagcagtcgggccttcgcatcgagcgcggcaaggttcgtgccgccgaccgcaagaacgccgccgccgccctgggcgatgctggcgcaatcaaggggggccgggaaactgaaagcgcgggccgtccgaagggcgatagcgtgtccgacgcgctgcgccgctccctgttgggtcaccgcaatctggctgtgcagaacgtcattgccgaacgtccggacgccgcgaaaatcctgctggcttgctggaccgtgaaggaactgcgcggcagcagccgcgaggttcccaccgacctgagcatctctaatggcggttacggccacggcacccgcacctatcacccgatcaccgacgacgcgggcaaggccagcgccgacgccttcctcgcagcatgcaaggcggcgatcaaggacttgccgaccgctgacggcaagctgtgggatacgctttcggaaatgaagcccgcgcagctggataagatcatcgcgctgggtgtcgccctgaccgtcagcgtcaacgaggaacacaagggcctgaccgcgaagctgctggaaaccctggatttcgacgtggccgagcatttcgagccgaccgccgacaactacttgggccgtgtttccaaggccctcgttgtcgaggctctgaccgaggccaagcaggtcaagggcgaggccgacagcaccgcgctcatggcgatgaagaagggcgcgcttgccgccgaagccgagaagcgactgaccggttccggctgggtgccgaagggcatccgcaccccgaagcagaaggcgaagaagcaggccgagccgaagcccaaggcagaaccgaaggctaaggcggaagcgaagggcaagcccaccaaggtcgggtcgaaggcgaaggctcagaccaaggccgcagccgaggcgactcaggccgccgcctaa

SEQ ID NO: 522049 - DNA, 264 bp, Stenotrophomonas maltophilia
atgaccgcccagaacgatccccacgctctcgccgaacagctgaccgcagctacccgcagcggaagcctcagcgccgcatacagcgttctgcaggccgttccgggcccgatgttgaaggaggtgggattgctcaccggcttcgcagcgaacatggccaagaagccccgcgacgtaatggccttcctgcagccgcaggtggccgaggccacccgccacggaacagacggctacggactgcgaaaaatcgcgaaggccgccccgtag

SEQ ID NO: 522050 - DNA, 213 bp, Stenotrophomonas maltophilia
atgcaccaccagacccacgggcggctgaacccaatcggcgtcgagccggacccggcacacgccgccgaagcctgccgcattctcatcggcgcctacatcgaagatccctcgcacgtcgattggggcgacgtgcaggaggcgttggctaaagctcttgccgcgttccagctgcccccggatttcatagaaaccgagggcgggcgttggcaatga

SEQ ID NO: 522051 - DNA, 444 bp, Stenotrophomonas maltophilia
atgcaagagtccaccaagctaccgtctgttggagccgtaaccgcagcggtcatcgccgcatttcatgcctggcatgaacgctggggaacgccccacgacctggtgcagagcctttcatcggtgataggccacgccgccaacttcgatctggatcaggccgaaggtgattgtgcaggcctgagcatctaccagattgatgttcatcggggcattgaatcgcactacgtcggcgtgctctatggagaaagcgtcctgtcgatcttcctctatggcccccgcacgttcacgttgagtaccggacgcgccgaatctgcggacgacgactctggcgaaatgctcacttttgatccacacagcatggacgagctcgacgcccttggcatgttcagccaagtaccgaagtgccgccctcgccagttggccatggtggatttggggttctga

SEQ ID NO: 522052 - DNA, 261 bp, Stenotrophomonas maltophilia
atgacccatgacgagacgaacagaaatgctgcgccggcattgacccggtattatcacttcatgcgtgaaacctacttgtgggttccggctgttgcaatgagctactgcatcgccatctatatcctcgctcgcctcggggcctttgatccgctgccactaagcgcaagaaatttgatcgcatggtccatcccgtttgcgctcctgctgggtctcgtcccagcatttctccctcccaggtctattcggcggatccatcgttaa

SEQ ID NO: 522053 - DNA, 1692 bp, Stenotrophomonas maltophilia
atgcttgacgcctcccctgtgacctcctgcaacggcgaaattctcgaagcggacgagttcttcgctcccgcgccgttcgacctgttcaacacgttgattgggcagtatcagagcacccggcatcgcctcgccgaaatggcaagcgcggtcagtgctgaggcttgcgcgggcgttctgcactacttcgtgcaggcgaacacgccggagagccgttacagcatgcctaccaccgtggcggagttgttcgacctggaccgcgctaccgcatacctcgatgcagatttctggcagcgagcgttgaacatgaccgacgtgctgcagatcatgccgcagaagcgcaaagacgagtggtatgcgcagatccatgagccgctggggaacggcaagacccgtcgtccaggtgttgaagccatcgagcgtcttcccgagttcacggaagacaacgtccgggcctcgctggaatcgctgatcgccatgcgtggccagttcttcgccgagcgcgtggatggccttttccgggcgctctcccgcaagcacgtcaccaaccagcccgagggcttctccaagcgcatgattctccgcgtcctggacgagtacggaacccgcaactcgagtgcatgcggcgttatcaacgacttccgcgcagtagtggccaagttcatgggccgcgatgagcccgtgcacggcaacagtgatgcgctcatcgatgttgttcggcgaaagcagggcgaatggcaggacgtggacggtggagcgttccgcatccggatctacaacggcgtggggacagcgcacattgaagtgcatgagtcgatggcctggcgcctgaacgctgtgctgcacagcctgtacccgcaggcgattccgtcccgattccgcgagccaccgaagaaggcgcgcaaggtcacctcggcgccgctgttctccaagccgctgcccttcgcggtgctgcatctgctggccaacatgaaaccgggctatgagcccagcaacgacgagcgttggaatgcgccgaagttccgcaacatcccgcgcactttgcgtttcgagtacagctcaaccgccagcgaggcggcacggaagcaggccgagcaggtcttggaggccatcggcgcagtttgggagaagcaggggaacgtgggccattggcgctttgactatgagccgggcgaggtcattgactcgatcgtctgtagcggcatgatccctgaccaggtatcacaccagttctaccctacccccgcccgagtggctgaaatggcaatggcacaggcgtatgagggtgccaccgaaggcatgcactggctggaaccgtctgcaggcaatggtgccctggcggacctgatgcccaagggggccacgtgcatcgaggtgtcagagcttcgcgccgcaattcttgccgccaagggtcacgacgtacagtgcaccgacttcctcgcggtgcctagcaccctccgcatggaccgaatcgtgatgaatccgccgttctccggcaaccgttggcaggcccacgtggagcatgcggcgaccatgacggctccgggcgggcgattggtagccatcctccccgcgtcggcacctggccgcttcacactgcccggtttcacctgcagctggtcacagaccatcgccaatgagtttgccggtaccagtgtaagcgtggtcatcctgacagcggaccaggacgcctaa

SEQ ID NO: 522054 - DNA, 222 bp, Stenotrophomonas maltophilia
atgcatgacctgtggcggcttgcccaacccgcattcaccgaggaaatgcttcagcttgagctccaacgtgacgaatctcgggccagtgaggagctcgcccgggtctacctagtctccctctgcaacagcggagccgacctgcaggccgtcatgagtgaagtttttgcagttttggcggagagagacgctcgctctccccggcagatcactgccccgcgttag

SEQ ID NO: 522055 - DNA, 879 bp, Stenotrophomonas maltophilia
atgcacgatttccttcctaccgctgcggtcattaaagttggccaggtgatctataccaacctgtattcgcgtggctacggggttgtagtggccaccaagggcaagcaaagctgcgaacccggcgctacgccgcaggaccgggcaaccttcgacattgtgttccgttccacgggtcagcagtccaaacagctgccggaatccatcctgcgcggggtgcagtggatggtgttcagtgaagtggcaaccgctgcagaggttcaggcattggtgttccaggcagagcaatacgcggaacaacaggcctatgacgccgcgagcgaacaggcgcgccacgccctcgcagttgctcagctgcgggtagatccggcctatgagtaccttgagcagaccgccgaggcaggttgccattcaaagctggcggtgcggaacatccgcaaggccctgaaggccgcttttccaaaggtcaagttcagcgttcgcagtgattacagcgccgcccgcgttcggtggaccgatggtccgaccgtcgccgccgtcgacgacgtagtgaagcgattcaaagctggcaattttgacggcatgacggactgctacgaatacagccgcagcccttttggcgacgtgtttggctcgatccagtacacgttcaccagccgcgaatactcggattcgttgattcagcatgctatccatcaggcgtttattcgtcatgcggaggacctggccggcgtagattcggcgtcggtggccgatttccgaaacggccgtctgagtcggatctacgtcgagctgccccgagcggctgatctgcagcagctggtgtggcagctcctcggactgagccaggtgaatgcaattggggttgtgacaaccgcatag

SEQ ID NO: 522056 - DNA, 735 bp, Stenotrophomonas maltophilia
atggctaaggccaagaatgccgcttctcagacgccagcggcaggcgaacaattggttgaacaagcaaaagcagagcgcaggcctgccaaggggaaggccgtcagggaaaagggtcctgaagcggcgaaggagcctgctcggaacgtggctgatagccggcccgcggtggaggagaaagctccggcgatttccaagccttcagtaggtggccgctatgtgatcgaccacaaagagattccgaaggaaatcctggcctttgtgggccagaagcttggcaaagacgccagcgtgaaccccgcccgagaggggggcggctataagggcaaggttctgttgaacagcggcgactacctggtgcaggctgtcggtcgcgacggcggttctgccgtcgtgcatcggaaagcagatttgaccatggtgggctcaaatctcgagtggagaaacacgaatgagcgtctgcaggcggtagatgtgcagatccactacaccggcgacaaggccaaggttttcccctggaatcgcgagcgtgaagaccagctccgctttatgaacagggcaaaggactatgcgcagaccattaagagcgataaggagcgcggggtgttcttgaagcacctggagcggttcacgggtcagggtaagggatctgagcgttcctccgaaaaggcgtctgcaagagcacctgagcagatggcttctaagtccaagggccgtgaggcgggaccggagcggtag

SEQ ID NO: 522057 - DNA, 2346 bp, Stenotrophomonas maltophilia
atgagtgcgagaaagaaggtggggatagcggttgccatagttttggcattcggcgtgcttacggttggtgggatatatctcgcgggcttgatatacctactcatgaacaagcagttccccccacaaccggagttcacgacctggtactcatactggttgcattatggatcacatcctgccgtagcgaagaagctgaaaattgctgcaggaatcagcggcgccattgtctacctggtgccggcgttcgtagtgctccaagggttgcggtcacggcgagagctgcacggctctgctcgctttgcctcacatgaggaagtagcgaaatcacagctcaacgggagcaacggcgttgtggtcggcaagcacaatggccgatacctcatatttgagggtcaggagtttatcttgctggccgcacccacgcgatcgggcaagggtgttggcttcgtggtgccaaatctcctccagtacgatggctcatgcgtcaatatggacatcaagcaggagaactttgacatcactgccggcttccgcgcgttgaatggacaggaggtctatctgttcaacccgttcgctgaggaccttcgtactcatcgctacaacatgctggagtacatcagcgacgacccgaagttccgcatcagtgacattcaggccattggtttcgccctctatcctgatcccgccaatggcaaggatccattcttcgaccaacaggcccgaaacctgtttatgggaattgcgttgtacctctgcgagacgccagctctgccacgcaccatcggtgagctgctgcggcagtcgtcgggcaagggaaaacctatcaaggagtacttacagggcatcattaatgccaggaactttgtcgaggaagatcgcgaggaagacgttctggacagtgacggcgttcctaagatagacaaggaaactggggaaattaagcgtcgcactgtcaaggtactagtgccccgagtgtgggttgaaggagaccccggggacccgcttctttccgaggcctgcatcgacgcactcaatcgcttcctgcagacatccgacaatacgcttagcagcattcttgccagcttaaacgcgccgctttcgatctgggctaatccaattgtcgatgccgctaccagcgccaacgatttcgatctgcgcgatgtgcgtaaaagaaagatgacgatctacattggcgttacgccggatcatctggcggaggcggccttgcttatcaatgtcttcttcacgcagttgatcaatctcaacaccaaggaattgccgaagcagaatgaggcgctgaagtaccagtgcttgctactgatggacgagttcaccgcaatcggcaaggtagggcagatcgcgacggctgtgtcctatatggccggctacaacatgcggctggcacctgtcattcagagcatgtcgcagctggcggcgacgtatggcaaggatgttgcgaggaacatcgcgaccaatcacgcgctacagattgtttacgccccgcgtgagcagcaggacgcaaatgaatactccgagatgctcggtacattcacagagaagaacaaaagccgtagtcgacagctcgggaagggaagttcgagtgagagcgtgtcggatcagcgtcgtgcactgctgctgccgcaggagctgaaggagatcgggaagtggcgtcagatcatccttcttgaaaatctcaagcctgtgctttgcgacaagatcaagtactttgacgatcctgttttcaaggctcggattctgccggcgccgcaggttccaaagctggatctcgatcttcacatagctatcgtcgagcaaaggacccgtgaactcactgaggcagacatcgagggcggcgtcgatctttcaaagctggccgtgaacctcaaccttctgccgaggctcgatcaggagggcgaggccagcgcagaagaagtcagtagcgtcatcgatggcatttttggagcattgggattcggcgagttgggcgatgaaaattgtgcggacgaagacgatagcgcgcacgttgtccctgaggctgatggtgagccctgggaaagcactgaagaggccggtgaagtctacgaggtctacgaggacgttggccctgaagaatatgtggatacgatagtatccacgacgcatgcggtggaactcgcggcaatcgaggtcccagcggtcgctacttcagtcacaactgtagatctgagcatgctcgaacgcgactcgttgcagcttggcagccatgatgatcaagagggtgccggcgttgacctctctgtcctggactgggacgacgaagtccactatgtgtcgtcggacgagccgccaaccgaccctgattactga

SEQ ID NO: 522058 - DNA, 1059 bp, Stenotrophomonas maltophilia
atgacctcgccgcacagtaacgcaatgaaaggcgacgaaacgcttaaggttctgcttgagccactcgatcgctttattgacgacagcgacgtcaccgagatatgcgtgaacaggcccggagaggtgtttgtcgaggcaaacagcaggtggacgcggcacgaggtgccggtgctcagctataagtacatgactgatcttgccgttgctgctggcgtatacaagggcacaaagattggctcggacaagcccgtactgtcggctcaactgcctgggggggagcgctgccagtttgttgttccagcggcgtgtgaggagggtactgtgtcgcttacgatacgccgcccctccctcgatgtacgacgtctggacagctattccgaatctggctttttcgaccacgtcattccgttaaccgatgggctgtcggagatggatatgcgactacttcaactgaagcagtcgaagcagtttgaagagttcatgcgccttgccgtggaacaagagaaagtgatcgtggtcgccggcgctactgggtcaggaaagacaaccttcatgcgcgcattgctgcaggaagtacccaagcaaagccggtgcatcacgattgaggatgtgcatgaactgttcatgccaaatcatccaaatcgcgttcatctgttctatccggcggatgctgcgaaggacgccgtagtcacgccgacgatgttgctgaagagttgtttgcgaatgaaaccagatcgaatattccttgcggagcttcgaggcgcggagaccttcgacttcatcaacgtctgcgcatccggccacggcgggagtatcaccagtatccatgcagggtcggccaaccttgcgtttgagcgtctcgcgctgatgattttgcagaacgagatgggacggacactgccctatgacgtgataatgcgaatgctctacatggttgttgatgtggtagtacacgtccacaacgacaccaccggtctacacggccgccatatcactgaggtttggttcgacccaaaccgaaagcgacatcagggtgccgctcaggggggcgggcgatga

SEQ ID NO: 522059 - DNA, 1197 bp, Stenotrophomonas maltophilia
atgtcaactgaagccggcgaactgcctgaagagcttcgtggggagcggaaaatccccggattgaacgcgaagaagcccaaatcgggacttcgaggcgccttgtggttcggtttgctgctgatcggcctcgtcggtctcggtggcgcatatgcctggtgggcgaagaatctgaaggcggaagaaaccactgcgcccaagaaggaagcggagcgagccccggtggaagagaaggagtttggtgaagcgccacccgaaccgccgccgccgccgcccgaactttctgaagacgggtcgttggaagtagttccggccattgagacggtcgacgcgaagggcacgaaaggcgcggcggcgccgccgacatatccagtgcaacagtcggagagaggcccggcgcggcaggtgctcgacaagagcgcggccgcgctgatgatcgggtcagctggcggctcgggcgcaacaggcaatgccgccgccgtcgaaggcgggttcgacccgcgggtggctgcgatgattgcagaggcgacgggacccgctgcggctggggggagcgacgagggtggtatggccgagcttctcaaaggcagtaggcctgcaaagcgaaaggcatacgcgatggggaatcgaaacttcctgctgtctgcaggaacgttcattgactgcgccaatgtcacccgaatcgattcgacggttgccgggcagttgatttgtcaggtgacgcgggacgtgttcagtgacaacggcaaaaccgtcttggtcgagcgcggctccagaatgaccggcgagtacatgaatgcgctacagcagggccagaatcggctgtttgtggtgtggacgacgctccgaacgcccttcggcatcgaagtgccgcttgactccccaggtaccgatccactcggcggggcgggcctcccgggcaaagtgaaaacacacttttggaagcgatttggcgccgcaattctcgtaagcatcgtggacgacgccggaaaatatgcaacttccaggcgatcgggtggtggacagacgaacgtgaacctgggttcgacccaggacgcagctggggacatggccaagagcgtcctcgagaagaccatcgatattccaccgacgctctacaagaaccacggcgaccgcatcaacatcatcgtggcgcgcgacattgattttggagacgtgtatgacctcgccgcacagtaa

SEQ ID NO: 522060 - DNA, 1098 bp, Stenotrophomonas maltophilia
atgaagaagagctatctcgcgttcgcattgctggcctcgtttccggtgctggcgcagcaggcttctacaacccgaacagcagacggagcaattgttctcaagcgctccggaccagcatcggggtctacggcgccggctggcgcgccaccactggtcatcgttagcggcaagcggcagctcggtaccgactggatagcaccacagtatggggaattgactgttggcacgtctagcggcaatcaaagagtaaagctgaatccgaagggggcggatgtcgatctcagccgcggtgctgcgaccagcgcgcctaccgttgttcgacggggcgccgcatcacggtggtcgtccagatctagagcctgccctgcgcactacaccggcgcagtgacctggcaggttgaggagattcagacggtaaccaacccgacatggacagaaaccggccagatccgaagctatgcggagaattgcacggcggtcgttgaaacgcgttggattcctcaatcgagtagctgccccagcgggcacagtggtagcaacacgtgggaggttgaagagcggagcatcggcgggggggcatggactgccacaggcgcaacccgcaatcacaacaacacatgcaaggcgccacctccgcccgagaatccgtcgccgggtccggggtgcacgaagggggaggcatacacattcgtatctcaaccggatcagtggatcgtttacccgccggcgacctgtaacgccagcaatcgcgggcagcatgcgcttacgacgtactggatccaaccgcagtattggtttgcaccaagcttcagttacgggcagtactgtggcggtggcgcccctgggccggtgcctctctccggcgcggcttttgtctgtacctcaaacgggtggcgaatcacttccagaggtaccaactgcacgggcgacaacaactaccttcccccggtggagtacgtcaatcaagatagcaactggaacgcattgatggaggcgtaccaggctgaagttgacgctagcgcagcggggttcccgggaatgccggccggagcgaattcgctggtcaagtacagctgcacgcgcatcatcaccgagtaa

SEQ ID NO: 522061 - DNA, 564 bp, Stenotrophomonas maltophilia
atggcattgaatctgaccgatctgcgttacgacaggccgggtgtctattggggctgcgtagcggccctggtcgttgctgcagcgctgggctccttcctcgtactgccggcgaacgacttttttcgcgctttgggtatcactgaagcgcaggaccgagcccatgcgctgaagaacgcggggtactggtactcgcgatcgctgatccatgcgtcgtcaaaagaccttgctttccaggtcagatacggaaatgtcgtgcatttcgatggtgaagcggtaatcacctcgattcctgagggcgagcgtttcgaggaggtggcactgcatttcgcagatgtcgtagtgaagtcacccaggctcgcggatcaagctgtccgcgaagcgcgcttcaagaacgctcggtttgagatttatgaccaggataaatccgtggtctggatcgatggaaaacctctgaacatcacgctcatagagattggggcagctgaccccgatcccaccccaccgacgaacatcgtcgacctcgcttttgcctcgtactactgggccaagctcaaaggagactga

SEQ ID NO: 522062 - DNA, 510 bp, Stenotrophomonas maltophilia
atgaatctgcatcgctctggacttttccgcactctggcttgcgtctctgtgggcactgccatctggctgatagcgggggctgccaacgacagcctgaacaggttgcctgtccaccaggccgcacaagtcgatcagacctcatcgccgatggtcgtgaaggccatctacccagtctgggtggaatcggctgtcgcgatgtcagagcgggaggggcagggagacattgaccaggcgtttggcaagcggcgtgagcaggaagagcaagtggctcgccccaactacgccgagatactgcgaccgagcgtgcgggtggcaggtatcagcaccaatggagcctacgtgaatggtcagttctactctgtgggtagcagattgccggcgctggccacggtaggggacggtggcgaatcggtcgttccacgattgatcgccgcgcggagcgatcgcgtcgtaattgatgtcgcgggcgacgccttggtggtactgccgggggtcaacggatggcattga

SEQ ID NO: 522063 - DNA, 534 bp, Stenotrophomonas maltophilia
gtgaacaagctggctctgttgggggcagcggtgctctgtattggcgccgcgatggggtacaaggggatgctgcagctgcgcacaaaggcagaactgcaggcgcaagcgacggaagcggtggctcgttggaagcagtcctaccgcgcactggaaaactcggtgtcacagtggaatgacaggtacgcgagcctttctggctacagcgatacgcttggtctgtatcgctcgctgcggctgcaggtctacggccttacagccaatcccgatcgcttggccatcgtgagcaaagagtccgtcagcgccaatggcgtcgagctggggctggcgaagatttgtatggcttcggcggctgacaaaaatgctggctttgagctgcaggcggccaactacggggccctcctggatggcgtaggacggctcgcgcagcgcaaggatgtctatatgggtggaatgaagttcatcggagacggagacagtcctacagcttcgatcaccgatttctgcattcttctgcgaatggagccggccgcatga

SEQ ID NO: 522064 - DNA, 897 bp, Stenotrophomonas maltophilia
atgcagcacggccgcggtaccacggtgctgctcgggggcgcggaagacggcggcaccacctatctggacgtcttcatcttccaggaacgtacgctggtagaggtctggaatcgcgagctgcctgggcaccaggaggtcggattcccgcggctgctcgatgcgctggtggaaatgataggtgatcggtacccagatgcccgtgtggttgcggccgggccgctgccagactgggagcgtgagggaatcgagtacctgggcacgcagcccctacggtcgcttagcttcgccccgctcagcgccaagctgggcacagcaccgggaatgaagcatgcgcttggcctggcattcgcaggctcggtgctctacgccggccaggtggcttttggttggcatagctataccgatgcggtgcaggcgtaccgcgcagaaatcacggatccgcagctcgagaaggcgggggggatttctaacggaatgttggaggtacttcagcagaagcggctcttcatggaggtacaccggcctcaggagctgctggctgcacgtgggcgccgaattgtgtccggtgtcgcggcagtgcctggcgtgcagatcaaatcgctcacgttccacgctggcgcggccggaagcgagccagggcagtttggagcgccggcggccccggcgcctgaacctgccgcgtccggggatgtgggcgcagccggcgtggaagacgaggcccctgatgtatccatggaattggtggtgcagacgtcgagcggattcgcgcttgagcaagcgaaggtcctgatgcagcaggtgggttccagaacgggtttgtctctgcgtatggcgtccgctgctgaagaccaaggtgctggcactcgaacattcaaactacaggggtacatccggtga

SEQ ID NO: 522065 - DNA, 1047 bp, Stenotrophomonas maltophilia
atgaaccttggcgagctgagtcggagtgctagccatattcgatcccagatctccactggcatcccgttggctacggccgtcgatcgattggcgaagacgcagcccaagtacgcagagttctggacgacgacggcgaaacggatgcgaagcggggcggcactttcgactcagctggtaggcgtctggccaacggaaggtgtcgccgttgtccgcgcaggggagctaagcgggcgcctgccggctgcgcttgatgagttctgctcttccgtggacctgcgccggcgcctggctgcgacggccaaaaagttgtactaccccgcaagtgtcattgccgcgtcgatactgatcacgctcggcattttcgcgttcgtcgtgccgacggttgccaagacgaaggcaggcgcttcgggaacgggggccggcatcacgggcttcgcagcggcgggcgcggcttttcaaggatggctgggcgatcactggctgctggcgcttgtcgcgagcgccggcgtgatactcgcgatggtgcattggttgagcaagcctgctgtgcgtggggagctctattcccagctgctcgcactgcccgtatttggaactgcgttgactcgactcagcttcggcttgtggaccaagtatgtggcgatctgcgttggtgcaggtctgtctctcatcgatgcactgcagagcacggttgacgtgcttccgggagcgttgcgccccggcgtacatgcgctcattagagacctgaacatccatcacaagcccctcggccaatctgtcgatccggagattctggccaatggagatccccgaattctatggccggacttcgtctcggacgcgttcatgcggggcgaggagacggggcagctggatcatcagctcggtgctgcttcgcgagagctcgtccgcagcggggaggaggattttgaaagagctttaggctttggcaatacgtttgcaacggtcgtcgctggcgtgctgattggtgcctcgatgctgatcacgtatgggccggtgttctcgagcatgtccgggattcggtga

SEQ ID NO: 522066 - DNA, 1875 bp, Stenotrophomonas maltophilia
gtgacggattcccaagcgctgtgttctttgtggggctggagcaatcctcccgaagacgtgatcaggatggccgagatttccagccgctgtggcggcaacgaggagggtgtgctcaaagagctggcggtgctcgacgcaaccactttggcgcggcttgcctcaaccaagcctgggcatatgaccttcattgaacatgccgcagaagaacagccggccaaagtacagcctatagtggagaaggtcgtagcgttggcacatggaacgccgttctacgcgcagctgagactacttgacgcgcatatggcgatgaagtcgccaagcgttgttcagcgctgccgggccctcgactgcgtgctgatgcttgtggaaggcacaaggccggtgctggtgttctccaaccacaagtcgatggtccgattccagatcatgggaaggcatgagcgggagcgggagccgctggtaaccgaggcgggggatgcgccgttgctggcggtgggttcgagagacgacatctctgcgatcatcagtcaggccgacagtagtggagacagctacgcactcaaggaggaccaggtctggcattctgcctcccgcgagacgcaggaaagcgatgcacagcgtgagctagcccgtttgctggatcatgccattgaggcgggtgcgtcggatattgctctgcgccctaaccgggatggcacttaccgtgtccgcctgcgccgctacggcattctcgtcagcccgcggaccgctgcaacttggagccagcaaatggcctccgagatcatcggtgtcctcctgaacaaatcgcatgccaatgagagctcgacttacttccgttcgccccgggacgggcacatcagctaccgatcgtcggtgggcgatgcatttctccgcgtctcgtttgttccacgcaaccatcatggcgatcttgttccgcggcattctgtcagtatccggctgttctcgtatagcgagaagagaattgacctggacaagcttggcttgccgatcgaagctgtttcggcaatcgatgacgctgtgaggatgccagccggtctcatcctttttaccgggccgatgaactccggcaagtccacgtctgtagctggtgggcttggcaggcacgcagaaatctacggtgacaagcagaagcgggtgtcggtcgaggatccaattgaacgctacttgcctgaccttgatcagatcaacgtaccggcaatcatcgtgaaggaaggcggaaaggtcgtggatgatgatgagcgcttcaccctgattcttcggggtctcaagcgtcacgacatcgacgttttctgggtcggtgaaatccgcgatgccgagactgctgagttctgtgtcagcgtggcgaccacaggctgcctggcgttctctacgatccacgccaaggacacggtattggccatggatgtgctcagtcagtgggttccggagaacaaacggttccagctgtctgaagctgtaaatctaatcgtcagccagcgtctggttccagcactctgtcccgcgtgtaagagagcgcacaacccggatgaagatgatcaacgccagtggcagcgctacatgggcatcgtcggcgaagagctgtcactgcctgagttgttgtaccaggcagtatcgaacgctgaatctggctgtgaagagtgcgacgaaggctacatcggctactcggtcctttgcgaggtgcttccgttcgatcgcacggttcgaactgcggcgggggccctggtgtcgcgagggggtgatgtcgaggctgcgcggcgaaagatggctgaagcccgcaagttgaccatggtcgagtgcgctcggcgccggctggctgaaggtgtagttgatctgccgtcaatcctctatctgtga

SEQ ID NO: 522067 - DNA, 801 bp, Stenotrophomonas maltophilia
atgtggccaatctgggtgttggtggtgttcatgatgatcgccggcggactctacacattgaccgtcgatcagctgaagcgcaatcgactgtcggcagaacagactgctctcgttgaccaaggcaggattgctgagggcatcgttcagtacacccaggtaaagggcagggctccggagtcactcgattctctgggacaagaggacggcttcgagcaccttcgtggatcgcgccacgcaacccagagctatgtccgcgcgacgggcctcaatgacggggtttggcagttcgagcgggcggcggcctggacggttgacaggaaggacggtggcgcttcgtatcgctccgagaatgcgtgtggccacggtgacgtggccaccgcatccagctggtgtggctctccagacggtgtgtggcaccgcaccgaaacgagagagggctacaacgaccagctgtccagccagcgtgtacggatgatgcgaacgctgcagcatcttgccgattcgtattctgcgcggcaggccttccctgcgatgggcaacgatggtgcgtcgctatcacctggatcgcagagagcgttggcatcgcttgcgggatattccggatctgccagtggatgcagtggcgtccacgtgtggcaaggaattccattggactgtggcgccctgtttgactactggggcggtccggtcttgtaccagtatcagtcgtcaacgtacgtgatcttgacgacagaaaccccattcaaatcggccagcgggcagccagtggttattgcaagccctcttcagattcaggagtga

SEQ ID NO: 522068 - DNA, 624 bp, Stenotrophomonas maltophilia
atgaaagcacgtactctcaacgcctgtgtaagcaccagtggctcaggtcggctccgcggtcgacgcggtcaggcgggtttctcgcttatcgagctgatgatcgtaattgtcatcattgcggtccttattcttgccgtcgcccgaagcctgaatggcagcacggatgagccgcgagcccagatgctggtgaagactgcatccaacttcacgtccaactggacgctcatcgccgcaaagtgctcggtgtcgcagacggtggccggaagcgcaattccagtaagtggcaaaaacgcattggatgtcgtcatcgagggggatagtgcagtggcaccggcctacaaggagtgctacgcaaagtcctccgcccgtgcgctgcgcgaggttgccaataagaacggtgctggttggcaggtagagtcatatcccgtcacgctcacgggcggcggtccgaatagcaagctgatcgtgacgtatcagcgtgtgccggatgaagtggttttgaagatggctcaggggttcaccacgaacctgaatgcactggcgtcgtctgatacaaccagtgacgtactgcagtactccgcggctgcggccaacctgcgctcggtcatggtcaggctggactga

SEQ ID NO: 522069 - DNA, 1017 bp, Stenotrophomonas maltophilia
gtgaagcgagcagccagcaagggtttcacgctcattgagctgatgattgccatcgtggtgatcgccatcatgactgtcgcagttgcccccttgtttagccagtacttcgcagcacagtctgcggggtatcaggagcaggcgcagcaggacaaccaggcgattgtcgacgcgcttgtcctctgggctaggaacaatggtggtcgactgccggccccgtacaccggtgccggctacacgatgacggtctacaacccgagcggcacatcggcacaagagcaatccttgaggtcagctctggccgacatagcgattgctcgtggcggcgtcaatgacgatggaagcggagcaaggaacgtcagggtctaccagcggatctcgggcttgaagaaagcggtgcctctgtatggacgatcagggccagcagtgaagcttacctacgattttgctgcggtgtatctaacaacgtgcccgctcgttggaagcggctgcaacccgtcccctgcgactggtattcctggcgcttcctccgcactggtcgcctccaacagagctacctggtcggcggtgtggccggatatgggcgcgcggtttggatcaacccttccacatgaaatggaaatgttgtcggcgactgctcgacgggccgaccgggtgcgcgatgcactcctagcgtattaccgcggtaagcaggtctcagcggcctacaccgacacaacgaactggtacccaggaggaacgatggcgggacggacacctggctccaatcaaggctgccgagacgggtggtacgagctcgatcgcacccagatcttgcctctcgtcggcttgtcgcaggaagagttcggcgcaacgacttggggtgggcgatttgagtactgcgccgatttcgacgctctcggcaccaagtcgccaaatgcccccccccactcagcagcaatccgttttaacgctgaggtatcggccggcctggcgccggatcccatggtcatctccaacaacgttctattgactctctaa

SEQ ID NO: 522070 - DNA, 1788 bp, Stenotrophomonas maltophilia
atgcgacatacgttcatgaaaaagattgccagcgtcccattgctggctttcgcgctcgttggctgcatgtcgacggaagtgcggcgagagatcgctacccaagaagaggatgtcaaagcagcttttgcgcaggcgccggttactgcggcggcgagctttgtccaaagcagcgatgcgatcttcatcccggtacgtcgcgagaaggtggttggttctcatgcgcgcagcgcatggctcgcatcaattcggaccaacgtgaagctcgacgagccgacgacgctgaaggcgctgatcgctgggctgagcgatgatggtgtgaacgttgtcagcgatgtatcgctggacaactacacctgggcgggccaggtgaagaatgcgagtgtcgagacgatgctgcgcgttgtgctgggcaatctcggcctggattacgatgttgatgacgcacgtcggctggttacgatccgtccggtacgctcgaagacatggaccctcaacgtgggaccgcgttccaccacgtattcaagtggtggtgtcaatgcaaacagcctgactgcaaacgattccgatgtgactgcagctggtggcggtggcgtcggtgggcgagcgtacagttccagcgtcggtgccggaacgggacaggacgccagtactggcgctcggattcacgcttcggacaacttctggcagtccctgcgcagcgaactggataatcggctgcaggtgcggctgccggtggggcaggggtcagtagttggccaaggtaacgggccggctgcggtggcacccgctgcgccgataaccggcggtgccagcggtactggtgctgtgacggaagcatcgtccggtcaaggtgctcggaactgggtcggttcctatgcgctgaatccagagactggatctgtcaccgtctctgctccggcgtgggtgctcaacgatctagacagctacatggccaaggttcaggccatgtactccgcgtcgatttcgttcaaaggaaagcttctgatggtgtcgcggaagcgtagcgactcggaaggtgtggacatcacgtcgttcgcgaagttcgcttcagggcgctatggcgccgtgatccagaacggcgcccttggcggcgtacaagtatcgatgccgagtgccggcggattgccatcggtcactgccggtgcacagaaagttggcggagcattgattggcgtgacctccgctgcagactccctccaggtgttcaatgcatggttgtcggagaacggggaagtatcgattgttgaagagccggtggtcacgaccacgtcaggcgtgcccgcggagttcagcaacaagctgccgacctactacaacctggtgtctcaaaaggcggcgtccgggggcattagtggtgccgtgaatgcgacagaaaatacattgatggcgaagtcgttcgggacgcagatgacgatcaacccgcgattcgactactccaccggcctgatccgcgcgcagatctcgctcaatcatgtgatgccaaacggtagccaggagatcaaacaaacgatcacctcgggcaactcggttacgacaattcctacagtgatccccctgggcacggaaatgtcttacagcggcgaagcccttctgcgcgacggtgatctcatcatcattgggggcctgagcaagcagaatcgaacactcagcgaggatggactgccgggaaggaaagctccgctgagcctgttgacggggaagaagtcggtgtcgcgagatcagcagacctactacttcgcccttcaggtcgagatcaaggagcgctag

SEQ ID NO: 522071 - DNA, 468 bp, Stenotrophomonas maltophilia
gtgaagtacgtaacgatgaagaacatgagcttcgccattgcgctgctggctggcatggcgctggccaccggtgtgcaggcatctacagcagatgatgatggcttcgtacttgtggagcagggtgcttacaaggctccgcctccgaagagtccgccgaggctgcttcggcagtggaaagttccagcgaacatgccagttcgccaggtccttgaagcctgggcaaagccggagggctggcaggtgtactggccccgggccgacgagaccacagagctggttaccgaagtcgaagttagcttctccgcctttgatttcgaggacgcggtgacgaagtttgcgaacggcttgcctcccgaggagagggtcgcagtgaccttcaatcgcagcaacaccccgaagctgctgcatgtcagcggatccacacgtaggcagaccgtcatcaatgacgggacagcggagagccggtaa

SEQ ID NO: 522072 - DNA, 1440 bp, Stenotrophomonas maltophilia
atgaaaagcctcctgctgacctgcgcgctcttgggctgtatggcgtctgcgcacgctctcgacgttccgctcggctcgacctatgacggcagggtcaagcaaattgagtacaacgagcatgacgttgtcgctgtgtattcctatccgggaatagctacccagatcgtgtttgcggctggggaggaggttctggataaagcatcgggcttttccaatggttgggagttccaagaccgtcggaacctgctgttcgtgaagccgaagtctgtcgaagttgctggcaacgagggcgaggtcgtggtgcttccaccgcaacccggcgagtgggacacgaacctgattgtgaccaccaacaagcggacgtacatcttccagctgttcttggtggcggcgcggagcggtaccaagaagctggagtacgacccgagaatggcgttccggattcagttcacatacccggccgacatcgccgctcttcgtgtggcctcgagctcacgtgcggagacgcaggcgaggctttccgcaagcccgcaggtcaagaacctgaactacagcatgaagcaagctcgacgctcttctgcgatcgcgccaactggcgcctacgacgacggtcgattcacctacctgcagttcgctgcaaatggtgagttgccgacagtcttcatggtcgacgagcgtggtgaagaatcgctggtgaacacccacatgagcggtgattcgttggtggtccatcgcgttgcggccaaactgatgttgaggcttggccgccaggccgtggcgattttcaacgaggcttacgatccgaacgcggggagcgcgccaagcggatcaacagtgccgggcatccaaagaacggtatctgtgcctgagaaccaggacgcgccggttgcaccaccactgatggctgctgcgggcattgcccgggacgccgtcatggcagcgaaggtatgggctgaatctgaggtttcccataaaccgacaggtactacagcacctgcgcaaggacaactggagccaggtcccatcgaggtcactgttggaacgccgtcaccgggttcgccggcagctccagcagttcaacccatgcctgcagtggcgcccaggatagttgcaccgccgccaccgaccttctccagtgttggcaatgcgcgtgtgcaagacaccttgcgatcctgggcgcctgagggttggcaagtcaggtgggataccgatgctgacgcacgtgctccagcactcgctgcaagcggcgacttcctcgaagcggtcagggccctcaccgcatcacgacgtagttggatagcgccaggtcgagacttctctgcctcgccgcttcaggtgctggtttacaaggcagatcgcatcattcaggtacgggacgcacccagctcaacgaacacgccgccaacaatggccgaaccatccccgggagcagatcggtga

SEQ ID NO: 522073 - DNA, 747 bp, Stenotrophomonas maltophilia
atgttcggtaaaggaaagggcaaggtcgatagaacgagcgcgtctgcggacaatgcggcgctggaggctgcgccgaaacggcctcgcgacgtgttcgatgatgggttgtcctgggaagccgagcgcatggcacagattgcccagtcggagacacgggcatggggggtcgtgaagctcatgggcttggtcgttgcgctttcttgggcgggcattgtgctgatgatgccgctgaaggaatcagttccgtacgtgctgaagcaggcagcagatgggaccgtcactacgctgacccgagtgaatctcaaagagatgacgatcgatgaagcggtcgtgaaggcagacgccgcccgctatgttgccgcccgcgagcgctacaactggtacatcctccaagatgactatgacttgatcatgctgttgtcttcgccggacacggcgaaggagtacagcgcgatctatgaaggcagcgaaagtcgcgacaagacccttgggaatcgcgtacgggtcaagatcaaaattctgagcgtcgtgccaactgggaacgaggcggtgacggtgcgctaccagctggagaagggctcctatgacggaacgggcaagcccaccactgaatccctggtcgcgacgttggggtatgagtacggggcgatcgatacgctgcctgaagacaagcgctggttgaacccatacggcttcagggtaattgcctaccgccgcgactctgagcagttccagggggcacgatga

SEQ ID NO: 522074 - DNA, 1092 bp, Stenotrophomonas maltophilia
atggccggcatacctcagctgcctgcaccgatggtcttccggttcgtgggcgactcactgtcgaacttggctgatggatacatcggtcagacggtatccaagctggtgtccatgttggggccgatcgcgctcgcaggagttacgatcttcatcttgctgtacgccattctgatcatgctggggaagatctcttcgccggcaagcgacttcatctggaagatgttcaaaatcgcgtgtgtatccacgatcgcgctgaatgccggcaactatcagtcattcgtaatgcagccacttcaaggcttggagaccggccttgtggaggctatggctggcaatggagagaaagcatcctcaacatttgaagcgctggacaatgccttggggaaaggcaactctattgtggtctactgcgcggcgaagagcactgagaagtctctgaatatcgcttgggtcatcgcgtggaacgtggcgggtatgacggtttctgctggcgtggttctgttcgtcctggtcgggggggccatggtggtggccgccaagttcatgctggctattttgttcggaatcgggccgctgttcgtagcatgcctgctgtttccggtgacggcgcagttcttcgataggtggcttagtcaggtgctgacgatggtgttcacgatcgtgttcatcactgcagcgtttggcgttggcctgcaggtattcaacgcattgatgacctcggtggcagccagccagtgggagtcgccgatgttcatgtccgtacaggtgttggtgatcaccgcggtgctggcatacgtaatgtatgaggcgggaaggaaagcatcggcgctggggggaggagccgcgactacggccatcagttttggccagatggcggggttcattgcttcgccggcggcgagggcggcacaaatgatcaatcccacatccaaccggcttgatccaaagacagggcttcagacctcctcttcccggcttgaacatttggcgatgggacgatctttcgtgtcaccgaatccttcctaccggcgggcggtcatggatcagttccgggagtccatgggccggaagaaccaagtaagcggccgataa

SEQ ID NO: 522075 - DNA, 222 bp, Stenotrophomonas maltophilia
atgaataaggcagcgatccttattgcagtcgttgttggcctgtcggcatgctctaagaatgagccggaagctacgcagtccgcgccctcggtgtcggcgcaggaccaggccgacctcaagaagatcacgggaccggataagccactagagctgaagccgattggtagtaaagacgcttcaccggcctcgcccagcaagggtgagggcgactcgaagccctaa

SEQ ID NO: 522076 - DNA, 735 bp, Stenotrophomonas maltophilia
atgcgcatcaaactgaagctggtggcgatcatcacggcggcggcaatggccctcggagctgcgccggcaggcgcatctggtgtgccaacgatcgacgtcgccggtctgacgcaaggtcaggcgaatcagatcgccaacctggccaagtacgtggagatgatctcccagtacaagcagcagatagaccagatgaagcggcagtacgagtcgttgaatggcaagcgcatgctgggtacggtcatgaatgacccgaagttcgccagctacctgccggcggactggaagaaggtctacagctcggtgcagaacgggggctataaagggctttcaggcagcgccagggcgctacgcgacgctagcaccattctcgatgtctgcaaggatctacaggatgcgagccagaggcggatttgccagcagcgagctgacaaggccgcgttggaccaagacaacatcagccaggccttcgacaaggccaccgaacgctgggaccagatccagggtctactgcagcaggtgaatggaaccacggatcagaaatcgatccaagagctgcaagcccgcatcaatggtgaggtcgcggccctgcagaacgaatcgacaaagatgcagatgtacgcaatgctgagcgctgcccaggagaagatcttggatcagcaggatcgcgagtcggtaacgaaagcattccgggaatcgcggtccgtcgacctcaaaccagtggagtttcgcaaatga

SEQ ID NO: 522077 - DNA, 2589 bp, Stenotrophomonas maltophilia
gtgggattggcatcgccgcgattcagccgagaaaccgccaacgaggtcgggatcgctgatttcctcccctacaaggaacacgtcagtccaaccaccatctcaacgagtggtggggatctgttacgcatctggaagcttgacgggttgagctttgcgacggcggatcatgacgtgatccatcgacgcaaggaagaactggcgaacctgtaccgcggtataggttcgccacacgtgtctgtatgggttcatcaagttcgccgacgcatcagcgaccggttgcatggcaactacgacaatgcatttgccaaggcattcgacgagaagtactacgccgagctcgacgaagagcaggaaattgctgccctggatgccgccgagaaggccagagccgccggcgctacgttggaggaggttgaggacgctaaggcgcgtgcggctatggactgcgcggtgatggccaatgagttgtacttgacgctggtctaccgtccgtatccgacgcgtgcggagcgaatcaatcgcgttggtacgaagcgcactgtgcccgagttgatgcaggatcgacgcgactcgcttgccaaactggacgacctttcccaggagcttgaggccggcttgcgtcagtatggtgctgaagtcctgtcaaccttcactgctgcgaatggcgccctgtattcagagccgctggccttcctgaacctgctgattacaggtgaagtccaagatgtccgggtccctcgcggaccgattgatgcatatctgggtaacgcatacacgcttaccggcaacgagactatgttcatccgctcgccgacgcgcgatcgttacgcgcagctgattgacctgaaggactatcccgagtcgaccgatagcgggatgctcaacaagttgctgctccagaaggttgaattcattactacgcagagcttctcgttcctcaataagagagacggcgagaagttccttaaagtgcagcgcaatcagctacggtcgtcgcaggatggatcggtgacacagctggcgatgatggataaagccatcgatgagctgaacaacgggcggttcctcctcggcgagtaccacttcagcatcatggtgttcggtgacaccctcaagcgagttggtgagggcagtgcaaatgtactgaacatcctgaaagaggagggattcttgccggtcaagatctccgtcgcgaccgaggctgggttctatgcccagcttccggcgaactggaagtatcgaccgcgcgtggcgcggttgacgacgcagaacttcgccggcctggcgcccttccacagcttcccgcagggcaagcgagacggtaatccgtggggtgaagcggtaatgctcctcaggacgccctcgcaccagccgttctacttcaatttccacacttcgaaggaggacgaggattccttcgataagaagacgcttgccaacacaagcatcatcggtgcgtccggtactggtaagacggtgcttcttagcgtgatggagacggcgctgatgaagtatcggaccccgcaacgtttgattgaccagggcgaaaagtcgaactacggagcggtcttctttgacaaggactgtggtgccgagctggcagtgcgcatgctcggcggacggtactggactctgaaagatggcgtaccaacgaagttcaatcccttccagcgtgagccgactcccgcgcacaagctgttcctgcattcgtgggtgtgtgacctgctgcggcaggatggaatgcctatcaccgctgttgacgacgcgctgctcacacacgccattgatgtggttacgcggttgcccaaaaagattcgtcggctgggagcgctgttgcagagtctgccggaaggcgactcagcggcagagcgggagaacagcttgcgcaggcgattggccaagtgggtgggtgatggtccattcgcttgggtagctgataacgaagaagatcgccttgatttcacggcaggtgacatcttcgggttcgatggaacctccttcctcgacaataaacaggtttgcggcgccatctcttcctacctgctctattgcatggaagagatgcttgacggtcgccgcatgcactacacgatggacgaggcctggaagtggttcagtgatgacagcccttacttccagaagtttgccggcaacaagcagctcacgatccgaaagcagaatggtttcggcatcttcgcaactcagatgccgtcgagcatgctcgaatctaagatcggatcagcgctggtgcagcaatgcggtacgcagatcttcctgcccaacggcaaggccgatcgtgatgagtatgtgggcggcttcaagctcacgcataccgagttcgacatgatcaaggcgatgccggacgagtgccgcatgttcatggtcaagcaagggcatcgatccacgtttgccaggctggatctgagcggaatggacgatgaactcgcgatcctttccggcagcacggacaacatcgagatcctgcacgacgtcctggccgatgtcggagaggatccgaaggtctgggctccaatattccaccgcaagcgcaaagaacgcgcgaagcaaacccgcattcacattcgatag

SEQ ID NO: 522078 - DNA, 300 bp, Stenotrophomonas maltophilia
atgaaggggcatcacgggttcaaaaagaagctggtaccgcttgcggtactgctggtcatgtcgctgcttctgccagcggtagcggcggcggcgggcattgaagaggtcaactcgaggatggccaactgggcgaccgctttgaaggccgttggcatcgtcgtcgccacaatctctgggctgaacatcggctacaagatgcagttccagggtgtgccgttctccgagctcggaacgaaggctattggcatggtcatcgccggggctgcaaccgccatcgctggttttgcgatgagtccctga

SEQ ID NO: 522079 - DNA, 279 bp, Stenotrophomonas maltophilia
atgcacgtgtcagcagtagatattctttcgcccgccgtgaacgcagaagcccttccgggtcgtgcgctggatcgggttgatgtgtatccgtcgaaggacggatacaccgtcgagatccttcgtcatgacgaagtttcgggtgaagcatctgctgagccgatcgcaatgcgaaacggccggccgcgcaagtggcgcgacctggacaacctcatctcctatgtgctccggaacgtcagtagtgaaccgtccatccacgtacacatgggagcaaggcaatga

SEQ ID NO: 522080 - DNA, 348 bp, Stenotrophomonas maltophilia
atgcaaaccaaaccgaacaatgtagtcagcctgcataggcacggcttcccatgtatccacgcggatctgattgaaacgctcttgatgatggtttgccagggcgacgagatccccatcgagaacgtgtcgcaaacgcccttgtcgattgagcagctgattgagcgttttcagtgcgagccggatatggttctgaaggggctggcaatgccggtatttcgctggcgctgccaactcaatagccactacacggagctctttgtagtggatgcagggccctacagggcgttctacgacaggtctggtaagggcgctgttgacctctcagcaggccgaacggcccagcgctaa

SEQ ID NO: 522081 - DNA, 594 bp, Stenotrophomonas maltophilia
atggtcattggatcggttgtcaccaaccgcgtgtcgccacttgcgccgatcgagtatttcggcaatggagacgacctgttgatggggctcctgccagagcgggggccggccggcttattgagcctggatctcagcatgccaggtttcaggcgccggctggcgctactcaaggctgtactggatcttgcgccgctgctgccgatattggtctacacgtccaatgattcgccgctgatgatgatgcgcgcgatcgacatgggcgcgatgggctatgtggtgaaaggcagccccttcaagacgctgatcgagggttttgagagtgtgctgatgcacgaccgattctatgacccgcacgtggacattgtcgaagcgggcaagcatcggtggtggtcactcagcccagctgagcgggacaccatcgtggcccttgcgaagggggcgactattactgagctggcgaaggaacggggccgctcctacaagaccatcgcagcccacaagtacaacgcgaccgagaaactcgggatcacgaacaacacccccttggccatgtacctggctggtgaggggctcagctttgagcttgacgactga

SEQ ID NO: 522082 - DNA, 2169 bp, Stenotrophomonas maltophilia
atggataaccttgtcatcctggaatcaccgaacaagacggtgaaggtccagtcgtacctgggcgctggctggaaggtggtcgcgtcgaagggtcatatccgggacctgccaccacgtgaccttggcgtggatgagtcgacctaccaactgcagtatgaaatgacggaccgtagccgcagtgtcgtggcggcactgaagaatctcgctgggcaatcgggaatggtctatctcgcaaccgatccggatcgcgaaggcgaagcgattgcctggcatctgaaggatgcgatgggtctgagcgactcgcagtgcgtgcgagtcaccttcaacgctttgaatgctgcagcagtcgctgcggcagttgctaagccgcgcgctatcgacatgggtctcgtacacgcgcaagaggcccgccgggcagcggatcggctcgttgggtatctggtctcgccgacgctgtgggacagcgtcgggcaaaccgcatctgcgggccgtgtccaaagtgtggccgttcggcttgtcttcgaccgggaaaaggcaatcgccggattcaagtcgacaaagcacttcactgcgaagctggtgtttgacggcatgagctgggccgctgaatggcagacctcgagcttcctgcagcatggccaggaatacctgctggaccgcgcgatggccgaagccgctgctgcgtgccgacagctggtggtggtgagcagcgaagtaggggagcaagcagagaacccacctccgccattcaacagcgcttcgcttatgaaggctgcgggaccgcagctcggtttcagccccgaagccgtcggtgatcttgcgcagaagttgttcgaagggcgcaaggaagacgaatcgggtcacatcagctatcaccgcaccgactcgatcaacctgagcgccgagtcgattgaagagattcggcgctatgcacgagggcagggctgggaggtcccagatgccccgcgcaagttcaaggaaaaggacggtgcccaaaccggccacgaagcaattcggcctacccatctggacctgaaggaagcgggcacaggtgcggaggaacaggcgctctatcgactcatttgggaacgtgctattgcctctcagctgcaggccgcaaagtaccaggtcgtcaccctggttctggaagctgacgtggggggcaggaaattctcgttcaaggcgagcagcagaagactggtaagcccagggtggcgagtgttgacttcagccgcatcgtcggccgcagctgacgacggtgacggtgacgacattgccgccgactgcggtcaagtaccccggttaaaggagggggagattctggttgcccaggacggccaggtcgtcgagaaggctacccgtgctccgcctcgctacacaaagtcgtcactggtcaccgagctggaatcgcgcggcatcgggaggccttcgacctacggggcgatcacgaagaacatcacagagcgagcctacgtgctggagaaggggcgagctctgcatatgactgagttgggcaatgagctgatcactacgctcctggcggcgcgctttgggttcatggagtatgacttcacgcgtgagctggaagatcgccttgacgcgatttccgccggtgacagcagttacacagctgtggtggaggaagtacacgcctcgctcgtaagagatcttcgcaacgtcgcggctgctggtggggtgaagccaaagcacccgtgcccggattgcggtcgggcgctacgccggcggaagagtggtacgggcttcttctggggatgctctggttatgctgatccagacaacccgtgcaatacggcgatggacgacagcgccggaaagcctgtgccgcggcaaagccatccgtgcccggactgcgctaggccgatgtatcggcggaaaggcagttcgggccatttctgggggtgctcgggctatagcgatggctgcaaggcaacgttgccagatgtgaaaggaaagccaggcaagcggccggcgccgagcgagcacaagtgcgagtgcggaaagccgctggtgcgtcggacgaaagcggcaacgaagggcaagaatgggacgaagggctacgacttctatggctgcaccggctacccgggctgcgataggagttacaacgtcggcgagaagggcgtccctgtccctcggggaggggcatga

SEQ ID NO: 522083 - DNA, 789 bp, Stenotrophomonas maltophilia
atgatcgagctcatggctttagcgcagcaatgctcaccgaacgtcgcacctgagaccgtgcttgcaatcgccaaggtcgagtcgaccttcaatccctttgcgattggagtagtcgggaccgcgttgaagcgccagccccagaacctgcaagaagctctttcgactgtcgacgctctcgaaaaacaggggcgcaatttctcgatgggtcttgtgcaagtgaaccggtacaacctgccgaagtacggtatttcgtataggcaggcgttcgacacctgtgaaaatctgagggtcggtggccgaattctgcaggactgctacgccagggcgctaccgcgccacgccagcgagcagcaggcgctgcgagccgcattcagttgctactacagcggcaatttcatacgcggtttcaagccggatcgccccggcgatccgagctatgtacagaaggtagtcgctgcagctctgagcccctcgtcgtcatcggttcgggtgccggcggtgcgtagcctcggcgacagcctcgctgttgaggcggccaggcctgctgcaaagccggcctggcctgccgacggcccggttctggtgtcggcccccgcccagggcgggttgggcagcacaccagaacctttgatggatgagggggccgagcgaggctcggaccccgctccggcgatgaacaggcccgtgcgtttgaaagcgcgaaggctgggagccgaccccgagcagctcacggcaaccaaaccggcggctgaacctgcaaaagtcattgattcaaaggtggttttttaa

SEQ ID NO: 522084 - DNA, 396 bp, Stenotrophomonas maltophilia
atgcgtgcgcgcgttttcctctcaacgctcattctgggattgaccgtcgccgcggctgaagccatggccgacgagaactatgcctgcacgattgcgctgtgcatggccaatcccaacggaccgcgcgcagttgcagagtgcgtgccgccgatcaacaaactcatgcgagacctcgcgcgtgggaagtcgtttccccgctgcagtttgagtggcggcggatctaccgagaagcgcggtagcgagatccacttcaagcttcctggtcagcccaccacggtattcaattggaagaccggggaaagctacaccgcacctgaaaagggcaagccaagccggcccccgcgctctggctggccgacgtcgagtggtaaggcgtccgtggaggagctgaggtag

SEQ ID NO: 522085 - DNA, 210 bp, Stenotrophomonas maltophilia
atggagcggctggccacgacatttgagtcgatcgaatcggtgcagctcaaaatgctgtcggctgacgagcgggcaaagaagatcaaggcacagcctaccgatcgtagaccagggcgcccgccaggcaagaaggtcggcgcgaaggcggctgcaccgactgtgaaggcagggaaatcccgtgccaaaaagcaggcctctgcaaccaaataa

SEQ ID NO: 522086 - DNA, 546 bp, Stenotrophomonas maltophilia
atgaggaagaaccggagtcaagaacaacagcaacagccggcgaagacgcctagcaaagcagctggtgagcaaagcgaactgcatgacagcgatttgcccttcatcgatgagatccgtgcttgccaccaaatcgagatccgcaggttgcgcaaggccatctctcggtcgcggcgccagatggcctgcaggaaaggtcgcgagccgtttctgaagctgctgggcatgcggcgacatctgctgcaacagcaggcccagctcctggactacctcgcaatggccactccggcgccagctcccaccaccaaccgcacgaggtcaatgaagatgtccacgttcacccatctcgcactggtagtcctggccaccaccgtaacagcctgcagggctccggcgccgtccatcagctcggcctcggtagaccaggtattcagcacccacgttgtgtgcgagcgctatgcagacctgcagcctatcggcgccgcccgccctgatccggcagcccagtcggccgagtactgctacccgagccacatcgaccgtaaataa

SEQ ID NO: 522087 - DNA, 687 bp, Stenotrophomonas maltophilia
atgaacaacatgacgaagagccaggccgcaccgcagatgactgcagcgattgcggagaagtacacgccacagggagcaagcgaagagaagacctattggaccgaggtgggtcgcgcgtttccgcacgcaaagtcggatggctggcagctcgtggttcgcaccggcctgtcggtgagtggaaccttggttctcagccaggtacgcgcagagggcattgccccactgcctccgaccagatcgcactttgttgcgtacgtcgtcgacgaatttgatgatgctgccggagataagcgcaggacatggacagaggtcggccgcgcgttccctcataaaaagggctacggcttcaacttgataattcgccgaggcctgagcgtcagtggcacgatcgtgctgcgcgctcctacggagaccgccccccgcccttttgctgacggcgccgccctaaatagctcctcgctgaagcccggtgcgagtgctggggccgcagacctggccaagctcctggcactgtccgccgccaatacggacgccgtggacctcatcgggcggctgttaggcgaggacgaatttgcggcgcctgaattcgatctctaccggatgcaactccagatcgtttggatgctcctgatggacgccgcctccccggggagcccatgcgacagcgctgcggagctccaggcgtga

SEQ ID NO: 522088 - DNA, 417 bp, Stenotrophomonas maltophilia
atgcttgtggaatgcaagacgagccggtccgatttcctcgccgatcgcaagaagcgattccggcagcgtcctgaaagtggcctcggcctctatcgctacttcctcgccccccagggactgcttaagcctgaagaactgccccctcgctgggggctgctcgaactggacaaaggacgtatccgggtagtcgctggaaagcggccaaagacctggcacagcccaaacgatccttgggcatttcccgagcgcttcgtgcaaggggaaacccagatgcttctgtctgccatgcaacgcatcaaagtgcggctgggcccggccgagttccacaccttgatgcatgaacgcctgatgcgtcctgtgcacgacccacgcggccccatgcgtttggctcaatcgaccccagcaagcacctcatga

SEQ ID NO: 522089 - DNA, 225 bp, Stenotrophomonas maltophilia
atgacttccacctacctccccgccctagcccttcttgccgaagtacgtcgaaacgcaaaggacatccgtcgcatcgatgccctctccgcacgtatcgaggagctcgtgatttccgctgcccagggcgtcgaagccctgcagtctgatagcgaagctcatcccgaccgccggcgagctacccgccgactgcaacgtgccctagcggcgttccagcgcccgatctga

SEQ ID NO: 522090 - DNA, 495 bp, Stenotrophomonas maltophilia
atgacattggatcccctgccccgccctgcagaacgccccgcggagtacttccgggccctgcaagcccttctagtagatcagcggtatacgaagctggagctgatcctggttcgatcggatcaaaccgacaagtacacgtacttcgcgatcgtcttcggtgcattagcgacatcggccgcctacgcccttcagtacttgcttcgattcaactggtggctcacggctatgactgccatcgtcgctctgggcgccaccgtcttggcctcacgccatctgtcacacctgggaaagctcgcggccaaagactttgaccctctgacttcagcacaagccgattggatccagcaaatcagcgccggcgacgagcacttccgaaccatcgtagctcgctgggtagagcacggtacgcccatcctgcagcgcgactatcattcattgaagcaactcgaggttcttgctcgggtgcagttcgacaaacgatgccaggaggcctaa

SEQ ID NO: 522091 - DNA, 297 bp, Stenotrophomonas maltophilia
atggacgtgcttgatgcccaatccttcaaccaggccattcgccggttgaagcaccggccgcggcccactgccctccaggttcgtgatggcgcctccaaactcctggacaccgccggcatggccgagatgcagcgaatggccgcggatctacctgacctccagtccatgctgaccgaatggaccgctagcgatcgcccgctcaccgcgcaggatcttgcagtaatgcggcaagcccacgtgctatggctgcgcttcagtaacctggtctatgagcgtgccttgcataaccctggctga

SEQ ID NO: 522092 - DNA, 756 bp, Stenotrophomonas maltophilia
atggacctggtcgaacaggctcagcagcgcgcaagtaacaagggcgacctgctcgttgttcagtcgaacaagatggtggagtcttctcacacgctcactttgaatgagaagcgtctggtgatcatggcagcagcgcacctggattcgcgcaagccgatgccggaaaagaacaccgttaagatctacgccagtgatttcgcgacgctctacgatctgcacggtggccaggcctaccaagccatcgagcaagcggctaagaagctctacaacaggaacatccgcagtatcgagggggatgccaagaagggctcgcgtgagcgcaatgtccgctgggtgtggatgtgcgagtaccaaaagaatgaagctgcggtggtgctgggtttctcgcctgtcatagccccgtacctgaccatgttgaaccagcagttcactaagtacaggctgcactcggtcagcgcgttgtcgacgttctacgcaatccgaatgtatgagttgtgcactcagtaccgcaagacaggcgaacgcaggttgaccctggagcgaatccgcgaagtgctggatttgggcgacaagtaccaggatgtcaagaatctgcgaatgcgcgtgctggatccgtcggtgaaggagatcaccaagctcactgatctggatgtgtcctatgagccgattcggaaagggcgaaagatcatcgggttcgagttcgatattcgggaaaaggaacagctcggttcagtggcagaggatgaggccgcgtga

SEQ ID NO: 522093 - DNA, 327 bp, Stenotrophomonas maltophilia
atggccagaaaaaagacgatgaccgaagaggcctttgcgcaagcaatccagtctctcgatataagcgagcggtcgatggacatagcacgacgtgtgctggtcaccggcgagcaacagaaggatgtagccaaggcctgtggactaacccctcagaccgtaagcgatcacgtacagcgtgtatggaaagcacattgcgcaacgatcgatcttccaccaggcacaagacgcatcaccgtagtgctctccgaggacaaggcgaacatcgtccttgcctgggagcgagaagagcagatcaaacgaatcgcgctgcctagcgctgattattga

SEQ ID NO: 522094 - DNA, 774 bp, Stenotrophomonas maltophilia
atgaaaacactcgttgtctcgaatcagaagggcggcgttggcaagtccgctatcgtcacgcagctcgccatgtacgctgtcgagaagcgcaatctccgcgttctggtaatcgattccgatcagcaaggcaattcaagtaagcccctgctgaaatctggcctggtggccgccggcaagcccttcagcgaataccttctgaacaagggcaccacggtaccgcacgcggactttgttctcctccctggtgatccacaactagggaagctcgagaagaacgcggccatgcacaacaccatcgcgactaacttccgtcacctgctggccagtgtcgataacgactttgacctctgcattgtcgataccaaccccttccctgacattcgccttaccgcggcactggtttcagctcagtacgtgctttcgccgattcagctcaaccaggaagccatcgacggtatcgcgaagctgagggccgacattgccaatgtccaggcgactctcaatcccaagctgaaaatgattggtttgctccccaatctagtgctgccaacacccttccagaagaacaatctgagggatcttgcccagcactttagcaacttgctgatgaaaaccccgagcggttttgcacacgtcaaggaacgcactgccattgcagaggctcagtctgccggcatgccgctctacaagattccgaagaccagcgctcgtgatgcttacaaggaactcgcagaagtgtttgaccatgttctgactgcaatggaggtgaagtga

SEQ ID NO: 522095 - DNA, 1086 bp, Stenotrophomonas maltophilia
atggctctcgatcttgctgagctcaacctggacgttctgggggccccccccgttgctgacggcaaaccctttctcgtcaagctcgatgacattcgccctgatccagaccagccgcggacggaaaagaatgaagaggacattgctgaccttgcagagaacatcagcgaacgcggtgtaaagcttccgatctctatccgaagcgacgccgagaatcccggtaagtggatcatcaatgatggtgagatgcgctacctggcttctcagaaggccggtaaaagcgacatcccggctgttgtcgatgaagatttcgacgactttgaccaggtcaacgccaacgagaagcgctatcgccttagcccgatggacttggcgctgttcatcaagagcaagatcgatcagggtgtcaagaagaacgtgatcgcgaagcggctcggcaaaagctcttccgtcattgccgaatacctggcgctcgtcgactgccctgagttcatcctggagctctacaagcatcgccgtctgacttctattcgcactatctacgaactgcgccagctccacgacaagttccctgagcaggtcgatgaatatctggtagaggtcgagggggaggttgagcgcaaggatgtcgcagcccttgctgcgcgactgaagaatcccggtatatctccagctgcaggatcaacccaaggtggaccggtagcggcaggcgctgtggcggctcccgttgaatcgccggcagcagtacaaccggattctgtgactcccctgccctcccctaccgaggttccagtggatggcacggccggtggtaatgggaatcaaacgccgcccgagcctaccaagatcgttgcccacaaccccgcgcatcagggagcattggaccccaaaccatctcgaactccagaccccacccgactgaagaagccggtgatgcttgtcgagttcgatggacgcgccgctatggttctgctgtggaaccgtccgtccaaccctggactgctgagactcaagtttgacgacaacgcagaagagctcgaggtcgacgcaggtaggtgcaagatcaactgcctgatcgaagccagttga

SEQ ID NO: 522096 - DNA, 627 bp, Stenotrophomonas maltophilia
gtggcaaagaaagggagtcggggggtcggaagaagcggtagcgctgtctattccgtacgcgttcctgctgatctgcgttcggactgggacgcgtatttagaagagaacaacgaggacgcagctgaggcactgcggacgcttatgcgccacttggtgaaacaccgccaacctgcctttgtccaggacaagcagtccttccttgcctcaggcgagatggcggcaatcgatcaggtcgacagaagccccaagaagccagtcaaggttcgcttcactgagtccgaattggaggccttgtatcgagtcgcggatcagcatgactgctcaatccaattctggatcattgcattggttagagcggcgctcactaacgggaccgccatcggtggcgctgaacttcaagcattggggaagtccaattaccagcttgctgctatgggacgtaacctcaaccaggtcgttcaccacatcaacgcagatccagccaagaacttgcatcgggttaccgaacgctcgattgaacgcctgaccaatgcgttcgagcaacaccggcagcaagttcacgcggttatcgccgcaaacactcagcgatgggtgctacagcccatgcagaacgcccgtactgaatga

SEQ ID NO: 522097 - DNA, 963 bp, Stenotrophomonas maltophilia
atgagctcgggtagtgcacgggaggctttcagccgccttgcccgtaaggtgccggaggtgatggtcaaaatcacccaaggcgagaaggatccggtgactggaaagcgcaacgttctctgcaaggacatgaaggccattaaggcgcacatggactacatctctcggaacggggaagttccgcttgaggacgagaacggccagatcatccacggtactgacgctgtacgttccgtacgcgacgattggaaaagcaccggcggctatgccatacctttggaagagggctatcgccgcgaggcctacagcgtcgtcctctcgatgcctcctggaaccgaccggaaggcggtcctggacgccgctcgcgatttcgctaaagagaccttcgagggtcatcagtatgtgtttggtcggcatgacgacgagtcccatccgcatgtgcatatttgcgtccgtgcagttggagacgacctggtcagattgaatccccgcaagtccgacctggtgcagtggcgccagcgttatgcggagaagctgcgggatcacggcatcgaagctaacgcaacttcgcgtgtactgagggggaaggcgcagaagcctgagcgacaggtcgagcggcatctgagaaagcgcggcatgcagctgcggaaccaacaagcacgtcgcagctatgcagcggaagtgccgctttctgccgacaaggagcatcccgttgaggccaaactgcgtagcagtaggaaccgggttatcgcgggtttcgggagtgtggccaaagctctcgcacagtccccgaacgctgacgaccgtgcgctggcactagggctggctcgccacgccgaatcaatgccccctgcgaagactatgcaccgcctgctggttgagggaagaggggagggtagggcggagcatgaggggcggcagattgcgcgcgacgtcagtaagcctggcaaggagcgaggcgattaa

SEQ ID NO: 522098 - DNA, 393 bp, Stenotrophomonas maltophilia
atgtctacgaaaccaccgcgaggaaggggggcaagcgctctcttggcctcagatccaacactgctggcacttaagaagaagctgaagcagcctacttacccgctggatgtggtcaaggcggaagttctagctaggaaagagcattgcttcacgatgtcatcgttggagacgatcgccgacgagctgctgttgcaggtttcagaagctatcgagctgatccaattgctgagtgtggatgaccacttctacaagacgatggaagccgagaagatcccaggtgcattccaggatgtgtaccacctgccaatcgacgacagtacaaccctgtatatcaaggttcagctggtcgaaggcaggtccgaggtagtgatttcgttcaagagaaaagactaa

SEQ ID NO: 522099 - DNA, 885 bp, Stenotrophomonas maltophilia
atgaccaagtattgctctgaatgtggttcggcgaacatgttgcgatttgagaatcgcagccgtacgcgtactgtggccggagtttccgaggttgttgacggactctctggatgggagtgcggcgcatgcggtgagtacatggtcctggacgaagacagccagacccgatacgcggcagctggtgaccgcttggtgctggctgcacgctcacaacgtgcgaatgagttcaagaaggtccgcacgttcttgggcgtgacccagcaggaggcagccgagatttttggtggtggtaagaatgcggccaatagatacgagaagggtcttgctgagccagttgcgtcaaccaagcatcttttgaagatcctctccgtgatgcctgaggctgtggatcttcttcaggacgtgagccctgagatcagagccaagattctgaagaagcatgggagctcctctcatgcggtgctgcctggcgtaggtaccctgcaagtggagatcgtccagaggggtagggcgtacctgaagaaattagccaaggactttggtggtaacgcacttccagtgctcggattctctccctcgcccaaggaagctggcaaatcgtcaacggtaatctatggtggcacctacccactgagctacgtagcggccgacgatgctgtccaaatcaaagactatgcggtgatgatgaaggatcctgcggagaagtttggattcgctgatgcgagctatcctcactccgacgtccttgtgatcggacccgatcatggcggtaagaggccatctacatcttcgcgatcagcagatcggtcaaaggtcagctacgcaaagttaaagatttccgttgacggtgaacccgatacgtccctcagggctgagactgcctag

SEQ ID NO: 522100 - DNA, 276 bp, Stenotrophomonas maltophilia
atggcgacttacgaacagggcttgctctacgaagcggcctgcgagctgttgaacggtgctatcggcaccctaagcacagagatccgtcaggcagaagagtcacccgaccccgatgtagtctctatcgaagaactgaggcgtgagcagttccggctgggtgtcttgcgacaagacctggacgctggagatgaggcagccgtaaatgccgtcattcagcaataccgcaagcccccccgggctgccgaagtaccccgcatcgatggggctgattcgtga

SEQ ID NO: 522101 - DNA, 990 bp, Stenotrophomonas maltophilia
gtgacagatttcgctgtcgaactttcggacgctgaaagcagccgggtattcaaggagcggatccttccggtgctgctttcgtcacggagcgcacgagggcctctacctcagcagcccacagcgcttcttctgggcgggcagccagcggcgggtaaaacacctcacttgaatgacgccgctcgcgaattctcaggaagaggggcaacgtgggtgctcaacttcgacaacctacgtgcataccatcctcatcatgatgagctgattgcacgtcacggttcgcgcgaagcccttcatatgatgaagggggaatccgggaagtggttcaagatgctgctggctgaagcgcagcggcgccaagtcaacatcgtgatggaaaccacgatgcgacagccagatgtcgtcgctaagcaagtcgctgagttccgcggcaatggttacaaggtgcacgcacgggtcctggcagtgccagagcaggagagctgggtaagcaatcgttttcggtatgagcaaatgaatgtgttaggtacagcagctcgccttacgcccaggtcaattcatgacgaaggagcgaagcagctgctaacaacggttgcggcgctggagaagggcagggcggttgacattgtcgagattcgtcgacgcaacgttcaggacgttcctatctaccgcaacgagctcattgctggagaatggagtaaggcccccgctgccgcacaggccattacggcagagcgtgctcggccatggtcaccggagcgagtccatcatcacgacattgcctggaacaccgttgagaagctcgctgtggcaagactgtgtcgtgcggatccggaagcaagaaatcgtgagctggatctgatgcggagtgagcgattagacgcaaccaccaggattgctgagcgcaacgcccgtgcagctctacccaaagagatgcagcggattgatacggggcgtgaggcgcagacgcaatcgcaagacaggcagaaatga

SEQ ID NO: 522102 - DNA, 276 bp, Stenotrophomonas maltophilia
gtgaacgctacccatcaggatgcgcattcccagctggtacaaggatggttgccacagtcgatccctgagggatatgaccgcatcgttctgtgcgaatacggattcacaagagagctgaactatctcaacaacgacgccgacatcttctactcagaggtggccggcaaggccgccccaatccagtggccctggaaggagggattcgatcctcaggcgttggactggaagatgatcgacgtcctggtcatcgacttctgcaacggagccacgaaatga

SEQ ID NO: 522103 - DNA, 168 bp, Stenotrophomonas maltophilia
atgctctgggtcggattggccgggttgatcttgcaagcagtgctggtgacgttggtgaagccgtacatgcccgggttcgcggtcacttcgcgcaagatgctgaaggtgtcgagcgggatgaactcaatgccggcgttcttcaggccaccgtacagagcgctgttgtag

SEQ ID NO: 522104 - DNA, 684 bp, Stenotrophomonas maltophilia
atggctaaccgcgccgcgcctctagccgatcaacaaccacttccaccaagagcgcttcttcggaggagagaaaatcaattcgttcatctgattggaagccttaacaagggacaggccggcagtccccaagtggcgacggaagacgtcaagcaccgcatctcgatcagtttccccctccttaagcgcagttcgaaccttacctttcatcctattggcgtccattacgcaagcgaccgcaatactcagttcgcgcgcaggagcgtcaagttcgtggatccggtgaaggttcttctgaatcaagggcggcacccggagaacgttgccaccttccggctcaaaactctccacgatcgcaaatgcgtgctgcttatccacgtggtcgaccagagttcgaatattgtccagccagtcatcaatctcctcgacaagaagggtggtcagtcccagtgcccgatccaaggactcttggcgtcgtcttcgctgctcccccagtgctatgcgcagggccagataggcggccagaaaagtacccaccgcagcccaagcatcccagttgacttggcaagtgtcgcttggaaaccagcattggctaaagccgttaaggaaactcatcctccgccctccctgtggactcgcgacgattctgccacggactcacgcaggcccgaggtcgcccatggttga

SEQ ID NO: 522105 - DNA, 357 bp, Stenotrophomonas maltophilia
atgagcgccgagctagttgtcgatcagggaagtcgcgagccgcagaccggcgtgcagcgcctgttcaagggtgtcgtgctctccgcaatcgggatcatcgatatcagggagctcgccagcctgaaccaagtgcacgaatgccttacctccttccggctgccacgcctcgacgtaaatgttctggccgtagtagctggtcctcaacgaatcgctctggatctctggcttcatgacgctttccttgatgtttcggagatgctcaccggaagccaggcgttggtcaatggcaatccgtacttggcagctttcaaagtagcattcgcggtgttcggcactcaggcggtgagcaatggctaa

SEQ ID NO: 522106 - DNA, 300 bp, Stenotrophomonas maltophilia
atgagcgcccaagtcgaattcaccgccaagtgcttcggcgcgaacctcgcgctcacccgggacagtgacagctcctggcgtatgtcgctctacaccttcgccgggaaacacaagctgcaccggaccattgccttcgcctgcgccggtcccggccaggtgccgcgcgtagatacccccgatgctgataccgacaccactgccgctctgtggcttggctcggcctgcttcgatctgccagccgctctcgccccgaaggtcgaagccttcctcgctaagcatgccaacggcggtgctgcatga

SEQ ID NO: 522107 - DNA, 183 bp, Stenotrophomonas maltophilia
atgaagatcatctactggcttggcatcgcgttcatgtggatgctcccaatgaacgtcctgctgctgacggtcggcaagctgacatctggcgaagcgcttggagaagaagagcttgtaggcctgggtatcgcagtgtttggtgcagtagcgggcgggattctctatcgtcgccgtcctctgtag

SEQ ID NO: 522108 - DNA, 246 bp, Stenotrophomonas maltophilia
atgcattcttttccagattggagaggacgccgggcgtgggtgtccgtcgaaggattcctccgcaagattattgcttccattgatcggtcggccgtggacgaggacagcgtaagagaactgatttcgctgttccaacgctatggaatagacatgcgccagctgcgggaactggagacgacagaattcaggaaatggatgaggaacagaactgcctattggttcaagtcgatgcatccggatcaatga

SEQ ID NO: 522109 - DNA, 534 bp, Stenotrophomonas maltophilia
gtggaggctcgctccattcacgaatgcatcatcgttccgcaggccacgatcgtcactcacatgccggttggcctggacgagttcgaacagcgtctgtgggtggcaaatacaggtcagggggtgcgccaggggacggataccctccttctgctgcgcctcttctcggagtcgccgggcgcgatcgactcccagcagtacatcaagatcacaggcagcctgaagggatacacgccttcgccggaaggaacgccagaggtagtggatgcacgcctcaccagtggcggcgcgggctttgcgcacaagggagactactggctgtccgattcagtggacgtagaactacatcagccggatgagcgcgatagtcggatggaagtcaaagcgacggctgtcggatggaacagttatcgaaaagaagaccgttccttctatctccagttcacctgtccgctcaaggaaatctccgtcgagaagcttagttcttggcaaggcggcaacggcaatctctggggatcctttggaccaatccgatag

SEQ ID NO: 522110 - DNA, 417 bp, Stenotrophomonas maltophilia
atgaaggcctggctggcaaccgcggtcgcactgctgctcggcggcaccgcctctggcgccaccgtgcaggaccatcgctgcctgaccggcggtcgcaatgacagcatccacctggaatggcgctggctggcggacggccagtccgacgtgcgctacgccggccatcgcgagcgactgccgctgcgccgggtttcgctggaaaccacggtgctggccgaggatcgtccctaccagctcgacagcatctgggaagagcacgtcgatggccgcctcaacggtcgctacctgctgagcacgcagggtgcactggtgctggatctgcgctacgaacgcgcccgcgacggccgcggcaccagcttccacgatgaccccgaagcctggcaggaagacggctgccactggcccagcgcttcctga

SEQ ID NO: 522111 - DNA, 243 bp, Stenotrophomonas maltophilia
atgaaactgcaactggcaacgatggccgccctggtgtttgccgtgggagctttctccatcccatcccaggccgccgccagcggtggcggaggtggtccggagaacacgaactgcgtcccggtcaagatggggccccattaccatcagcgttgcgaagtgacgtacttcaacgaggacggcacttcctacatccaggtgtactggattgaccagaatggccagtggtacctgcctgccgactga

SEQ ID NO: 522112 - DNA, 339 bp, Stenotrophomonas maltophilia
atgactgcgctggtgccctcgccgctggaactggaacaggcgcggtcactggccgcggtcggcagcatgctgcgcgacgctgcatcgccgctgggctacgaccgcctgctggtgttcgccacgggaacctggctggagcgcgacgcggcgatggcctgcacggattgcaggtaccggtcttcggcccgaccggtctggaaagcgcggtcagcttcgccggcacctcgattgatgcgtctgccagcgcacgcccgtaactggatgctgctgcaagcgcagcattccgaactgcacgccgtttggccgaatcgcccgtcacgctctcgggacgagcgctga

SEQ ID NO: 522113 - DNA, 135 bp, Stenotrophomonas maltophilia
atgaccccgtactcgaccttgttggctaatagcggtaccgaaccggccgtggtcgccggcctgctctcgtttatcggtgccgactacgcgtcgcggaaagccttaaccgctcaattctgtgttcggatgacttga

SEQ ID NO: 522114 - DNA, 633 bp, Stenotrophomonas maltophilia
atgcccagcgtctgctggccggaggcatccacccgggtgctcagaagaaggtgccgtcctcgcccactccgccctcggttcagacacgcaagccgatggatgctcatggagttccctcgcaactgtgtctgcaggtcacctttgccttctgggttgccgattacccatccccttcgacacactaaccctgcatccagttcatacgtctggcttccctggattcattcatccatcacgacttgtcttagggagcactttccgccgatcagcgacaactgtcacaaaatcgggcatccacggttcagaagctccagcaaagggccgctagacatccttgaatccaaagcccaagtgaaagttgacatgaaatcggcaaaattcctattccttgcaatagcagtgagcgcattagccgcctgcgccccagtcaatcacaatgttgtgtctacagacccaagcctcatttttgtgggcgagaatccaccgcccggcttccccaaagagcacattgaacacaaagaccgattctgcagccgtatcaaagagtggtgggaacccggtctcatggtgaagggccagaagacttggcgaaagatctcaagggtggaaaccgtcgagtgcccggcaggttga

SEQ ID NO: 522115 - DNA, 927 bp, Stenotrophomonas maltophilia
atgttcggccttcttctagttgcagtgtccgtcgtggcggcggcatcaccggcgacgcccgcgaagcgtgcagtagccgacaaggtgactggcgtgcgagaaggcatggagtacacacaggtacgcaggctgctgcttgacgcagggtgggtcccgctggacacagagtacctgcggccttggccggcttatccggactatccagaggttgcttgtggctccgggtggcaggctatctgctccgcactctattttcgcggagattactacttcgaagtgggactgaacccgcgagagacacgacgccatctgcccgtggagtcgacgtggaggtcacgtgatccggccgtgttggcacgcgaccaccgtgttgtgaaagcgctcatcagcgagacgcgccaaggcagcgtgcagatcgaggaaaggtcacctgtgatcaaagcggcgtgcggaacgaacaaggtctggctgtcctggaacagcgcagcaccaaacgcaacattggtgacctgcgactacggcggtacggcgcatgacaattggggttggttgatcgagaccgggctggatgacggtgagacgcgggtgcgccgtttctctctgggcaaggtgaccagcgtcgcggagttcaagcggattggcgcgcaggtaccggatgctttgacctcgcatccctggtgctcaggcgtcaagccgaagacgccattgaatgcgctatttgcaacgttggtgaagacgcccagccagcgtggagatgcgccgtactgcttcatgccccacttcttcacaggaagcgcgggtactcctttgcggaagtttccggcggcggacgaagtatcgccggacgttccgtgggcagaagccggcctgctcgcgagagaggtcgagattctgcgtgacttgaggcgggagtttgcgcctgagtag

SEQ ID NO: 522116 - DNA, 339 bp, Stenotrophomonas maltophilia
atggccggtgcccaaaaggtgatgggcaagtgggtgcgttacatcgtgctcagggaggactcggcttgcatcacggttcagatcttcaaagccgccaacatggaaggcctcgttcgccagaagacaatctgttcgcttggcaatatgcactttcaatatgacttcgcgttcgtcggcgttcggaaaatagagtttgagccagatcgactatcgctggagatggatttcttcaaccttcgcgggggtgcccgtaaggatggcaattgctcaatcgcaatcggaaatgggtctatcggagatctggaatgttcactcgagtacggaagcgagtactactga

SEQ ID NO: 522117 - DNA, 441 bp, Stenotrophomonas maltophilia
atgttcactcgagtacggaagcgagtactactgaccacgccctggcttgctcttcacgctgcgtcattcctgtcgagcaaccccgccgaagccacggagcggcacatcgattactcaaaggtcacgaaggccgatatcgcgattgtccaggagcgcgctgtcaggtacgtcgtaattgctgacaatccatgcctgacagttcagtcgttcaggctaggccatccaggcgagtatcaccgcgagaagttcatctgctccgtcggtggcgcgcgtttcgatcgcgacttcgccttggtcgacttcaagacactcgatttccacgatgaccgtctggatgtagacatcgaattcgttccatcacgaagaggacgcaaggcgatcaggtcgtgctccatcgcgctgcagcctgattccatcggcgacctggtgtgcaatcgataa

SEQ ID NO: 522118 - DNA, 678 bp, Stenotrophomonas maltophilia
atggtcgcagtgctttctctgtcttccgcgtcgaatgcacacctgctgccccatgcagatttcgcgctggatgcagagcgtgaatatgtcccgatggtgggcgacagcctggcgtcgctggtgggcgaactggacggcgagtccacctctggcgccgccatcgaccgggtgctgaccgcattggaagagcgactgaagcgcacctcatgcaagccagaagacccggacaatacgcagtcgcagccacgcgacatcatctgccacgcacctgatgcagagctcctctttccctactacgcggacctgcgacgggcagagacacccgcagagcacgatagtcggggccatcgctttctggaagcctatgccaccttgctcagggatgcaccggatgtcgccctcacgcgaccaagcgaggatgaggcggcagatgggttgttacatgtgctctttccgttcgaggcctgggacaaaaagctgaacatcccacgccatcaggtgcacttcccgtttgttcctgtgtgcaacctcgttgtcgctcgcgctgcgcgttgccttggggctgaccatttacgcgagcagattgagcaggcaggcgatgagggtgaccagcgctcgttctgcatcagggagttctcagggctgcagcctaagctgagagctggatgctcggggtag

SEQ ID NO: 522119 - DNA, 150 bp, Stenotrophomonas maltophilia
atgcccgctctgctgcaccgtcacacacaggatgtggtcacggtgtcccgtctccgcgtcgctgatcgcgccgcattccccgaattcccggctcgcgccctggtcacgcactcctgcgtgcgccgcggcgtggccgttgtcgattgttga

SEQ ID NO: 522120 - DNA, 300 bp, Stenotrophomonas maltophilia
atgaacaacgtgatgggaatcgccctcagcggcatgcgtgcggcccggcaggacgtgcaggtggccgcgcacaatgtggccaacctggcgacccccgaagcccagcgcctgcagctgcagcgcggtactgcggagcagggcggggtgcaggtcgcggtgacccccatcggcgctgatgtcagtgcaccgctgggagatctgctggcggcgaaagccgaggtggtggccttcgctgccaatgctgcggtgatccgccgccacgaccagatgctgggctcgctgctggatcgggaagcctga

SEQ ID NO: 522121 - DNA, 846 bp, Stenotrophomonas maltophilia
atgctcaacaatgactacgccgggggcccgcgcgtaggcaacaccagcgtcgatgccatcagccagatgggatgggcgaaaggtggccagtacctgacccggttgagcgcgctggaagccacccaggcactggagggccgctcggcggtcgatccgaacgtcatcggtggcaacagctactacgcgatgtacttcgaagccgacaggaaatgggccagcgtcagtgcgggcggcggccacctgtcgctgcgcgagatcaccgatcccgcacgcatcgccgaactcaacgacgcccgcgaggttcgtctggagcggcaggagaagcgcacccagttccacccggacgacccgtaccggaccattacccgcagcccgcttaccgcagcggtggacgccgtgccggatcccgcacaggcaccgacccgtctggccgacattggtcccggccatcgtgagtacgcattgatgcagcaggtgcgcgaaggcgtggccgcgatcgatgccagcgcaggacgtacccacgatgagaacagcgagcgcctcgtggcgagcgtgatggcattggcgcgccgcaaccagctcgaacgtgccgaccatgtgctgctgagcgccccgaccgccgatcacccggccggccgcaacgtatttgtggtgcagggcaagttgaatgatccggcgcatctgcgcgccgccatgcccacggacagggcggtgcagacaccggtcgagcagtcactgcagcagatccaggcggtcggtgcggatcgtgaacaggtacacgcgcagcgccatcagcaggaaatcgaagtgcaggcgcgcgacaccccggccatgcgcatgggctag

SEQ ID NO: 522122 - DNA, 1530 bp, Stenotrophomonas maltophilia
atgctgtacgacgtcgtcattgccggggctggcccggtcggcctgttcctgtcctgtgaactggcccaggccgggtgttcggtgctggtgctggaacaggccaggtttgccggttcaccgttgaagcgcctgccattcgggctgcgcggcctgaacgcccctacgctggaggcattggatcggcgcgggctgttggacgcggtcgccgcgacacaggtgctcaagcccgagaagggggcaccgccgcccggcaccgcccattggctcgcgcagccgcgggcgctgggcggccacttcgccggaataccgtttgcgttggacgacgtcgaccgcacgcgctggacctggcgcctgccgtcgcgggtgggcacccagatggcggtggagctgcaggccctggaaacggtattggccgaacgtgcgaccacgctgggcgtgcgcatcgaacgcgggcgtgcggtacaggcggtgcgcgccggtgccaccgaagtggagatcgagaccgttgacggagcggtacgtggtcgctggctggtaggttgcgatggaggccgcagcacagtgcgcaagcaatgcggtttcagtttcatcggcacggatcccgaattcaccggtcattcgctgctggtcgatctggaagatcccggagcgctgactccgggccgtcagtacaccgcgcagggcatgtgcaatttcaatccacccggtgtgcttgcgcttgccgatttcgatggcggcgccgggcatcgaaagcctcttgcgctggacgaagcgcagtcgctgctgcggcgtgtgtctgcccgcgacgtggccctcaccgcgctgcatctgcacagcacctggaccgatggtgcgcgccaggccagcgcctatcgcaacggccgcgtgctgctggcaggcgacgctgcgcacgtgcattccccgttgggagggcagggcctgaatctgggcatcggcgacgcgatgaacctgggctggaaactggccagcgtgatacgcggtgacgcttgcatggcgctgctggacagctatcacgcggaacggcatccaattggcgccaacgtactggactggtcgcgcgcgcaggttgcgctgatgcgtcctggagccggttcgcgcgcgttggcggcggtcatggcggatctggccgatacccgcgatggtgccacctatctggccgaacgggtctggggcgtgtcgcagcagctcgatctgggcgatggccatccactggttggtcgcagcgtgccggacttcctgctggccgatggtcgccgcatgggggaggtgctgaggaccgggcaatgggtgttgcttgtgctcgatgagaactgcgcttcgcgcgaccttgccgaccgttggcggcagccgttcacccgagttgtctcggcggtagacgatgcgctggggctgggagcggtattggtgagacccgatggaattgtcgcgtgggcctgcgacgcgggaggtgaagtggcagggttgcaccaggcgttgcagcgcgggttcggactgccggaagcaggctga

SEQ ID NO: 522123 - DNA, 627 bp, Stenotrophomonas maltophilia
atgatgtttttgttacagccgtattacgaccatgacagaggtgtcctggatcacgttctgacaagggtttcacggggtcgactgcggtcccggagacccccggagaccccgtatctgcgcaccggtatgacggccggggctctacaaacgctcttgcctttgctcatgcctttcatgacccaccgcgcccccgatgaactgtcgagaggcggtgggccagggcgtgcaggaccgtccacggcatggatgccgtggccgagcccccagggacggctttgcggcgtgtcctgcacgccctggcccaccgactcccccacggatcagcgaaggcgcagcgctcttcacgaccaacccccaaaaacaagaagagcgcgagatctcgaggatctcgcgcccgggtgggatcggcgggggagagaggacccgccgatcccgttcctgcgggggaacgcgcttacttcaggttctgggtccagtaggtttcgatctggcgcaccaggctgtccggcagcggcacgtagtccagctggcgggcctgcgcgtcaccgttcttgtagacccagcggaagaactcctgggtcgccttgccgttggcagcgttcttcggggccttctgcaccaggatga

SEQ ID NO: 522124 - DNA, 207 bp, Stenotrophomonas maltophilia
atgctcgactgctcttcgcgagatgcggctgagcatggctcggcgctacagaagaacgaacggcagtcgagcatggctcgacgctacaaagagcaaacagccgtcgagcagccgcgtcgttacaactggatccaggtggccttgatctcgctgtatttgtcgaacgcatgcagtgacttgtcccgcccattgccggactgcttgtaa

SEQ ID NO: 522125 - DNA, 159 bp, Stenotrophomonas maltophilia
gtgccgggcctgaacttcgacaagaactacgccaccgtggtgctgggtgcgcgtaccgagctgttcggcctgcagggcaacgttggcctgagcaccacggccgcgcagaagcaagcccgcgacatgaccgttttcgcaacggtttccggttccttctaa

SEQ ID NO: 522126 - DNA, 684 bp, Stenotrophomonas maltophilia
atgaccatcagaagatctgctgaatccacccgcttgcagctacaggatcttgtcatcgagctggccagccgtgcgcacattgcgccccctcgggtcaaactttggcggaaacgtaacgcacgctacaacgcggctacccactgcatcgcggtatctgtggcgctcgcggatgggctcaatggagcgcaactccgtactctgttggctcacgaagtgggccacgcaagtcgtcgggtaagaacgctgcggcgtgtactcaagtacctctttccaccatctctgattttgcttgccacaggcgtccttgcattccatgtcggtggcttctcatctacgcaggacgtggccacgggtttgcgtgcttggggggcgctgctggtgactggagtgggcacgctagtggcagtgcgggtccatgagcgcgttgaaaagcgagcctggcgcgatgcctacgcagaggaactgcatgctgatcggttcgctaaacggcatggagatccatccgcagatatcggctccgtgttggacgcgtgcgcccggatagaggattcggggacgctcgggcccgaggcaatgcggcgaacacgttttgtgatggagcacgtattcgtgttacctcgaagtcttttcatttcaacagtctacagacgcagacctccaatccctaacaagctgaataggtga

SEQ ID NO: 522127 - DNA, 663 bp, Stenotrophomonas maltophilia
atgagtgttacgaccaaggccaggcaacgccgactaggtgtgaggcaagctcggacaagcaactcggctaacctctggacgctgcagtctcctatggcggagtgccaggtgacgctgagtggtgacctgaggatgaagctcttcttctattgcgaaggcgacgcaagcgtccgtgacgcagagtatcgcgagcaactgatacaggtgtctctaggcagcggctcaatctgccttgatgcgcttactaccctgactgatggctctattcaggctcggatgatcgacgatggatcggacagagccaggcgagatatcgaagcactgggcacggagtttggatattcagtctccgtcttgagcacacgtgagctgggtcaggccaagatgaggatccgcaactggcaggcggcaatatctgcctttcaccggtgccgcggttcggatcttacttctttggcaaaggaagtcgaatcggcggttcggcgacgcggcaagttgaccttaggagaggtcatacgaggacttaactcaaggcacccagcagcggtggtgggagctgcggttcttgcgctgcgcgctcgatccatcggctcggatatggatgcacatccatggtctgtgcacacaaggctgctcaggtgtgaacatgaccgctcaatctaa

SEQ ID NO: 522128 - DNA, 1938 bp, Stenotrophomonas maltophilia
atgaccgctcaatctaagttcaaccggagaacgcttccggcaaatcttgcgaactatcgtgagtggccggcttgcgaaaccaatcagttggacccggctgatctggcgctgtttgagcaaagacggaaagccttagttgcgtacttaggcggcgtccgaactgccgagattgcctcgcaattcgggatcgagcgaactgaagtcttgcggtacctcaatcgatgcgtggcggtcatggacgatggccgcattgcaggttgggccggcctcatcaagggatttcgcacgcaagcgccaacgcggatcaagcccgtaggcgcgatgccaagccagtcattcggcggctatacgggcgctctgtcagcattacttgattcgcagcccaatgtgcacctcgccctggacaagtacctcgccactggcgtcactccagacggggaaaagcgggggcggatcaccaacaaggaggcacatcagatctttcttaacctctgtcgtgatgccgggctgggcaagaatcaatggccgttctgtgtcggccggtatggcagagaggcaatctgggtttacgtgaagcaatttttcaattcaaaccacgagaaggttgcatccctgcagtacggcgaagagtgccggcagcgctcaaggaggccgggcaaacaacccgaggggcccattgccctggcgccatttgagatagtagaggctgacgagcatacggccgacatcatctttgccgtgggtgtgaatactccaaagggaatcaagtacgttcccagccgtcgtatgacgcttatcgtcatcgccgataggttcaccaacttcattctgggctgggacatcgttgtccgccggacagtttccagctccgacttcctcaggtgcatcgatcatgcgtcagctggacagtgcctatcgaaccagctgcaacacgcactggaagccactctctcagtagaagctggcgatccagaattgcgccttggttttggcagcctctttgtagacaacgcgctcgcgcacctatcagacacagtagccgacagggtcagagcggaaactggcgctgcgatctcgtttggcgcaattaggcgaccgaaacgccgttcgctcgtcgagcgagtgtttggctggatggcatcgagtgtttttcagcaatcaccagcgaccacgggaaacagcccaacggacccccggcgcaaccagccggaacgtcaagcggtcaggcataaggtgacccttgaaaagctgatggaagaaacggccaaggccgttgcgcactggaactcaacgcctacagaggccaactacggcagcagtcccactgaccaaatgcttgagtactacgcccctggctccggttgcttggccccactggggccgccgcgtcccgtgctgacacctccgcttcgagtggatgtggcctcagccacggtcagggggtcccagaagaagggcagactgcctcgtgtcagctacgcgagcgtcgagtacggatcccccatcctggccacgcgctgggatctgattgggcaggcggtcacgctccatgcagatccctacgacatctcacgtgttcatgcatatgtaggtgacggacgggagcttggtgagctcgtgccactgagcgcgcggtggcggtatccgcactcccgagagctccgaagactgctcagatccaagatcgaaggcgctcgggacgcgccctttgccgacatcgttggcgtggagcttcaagaattagctcagaaagccttggatacttgcgcaagagcgccccgtacaacgcacgcggcgactgtcctggccgaggagaagaggaaggggtacgcgccgagcaagacgcctacgaacgccggaaagcgtgtcaatacgcagacactggcgtcccgtgttcgcaagtctagagacatcgacttctccatcatcggaaagtga

SEQ ID NO: 522129 - DNA, 1011 bp, Stenotrophomonas maltophilia
atgacgagccacgagagcattgccgcaatccaggcaacctatccatcattacgggatcggcaccccttgctcatggcagcggccattcttcccaccgcgccagtcaaagaggtggctcgtctggtctttgatcgagcgcaacggtttcgctcctcaatagcattctgggcgcacccgttgtgcggcaagtcctcctgcatctctgcgctggaaaagctggcccctacccagtacccgggagcggcttttgtgatctacgagccttcgtccaaggacgtggccgctgagggtgctctgatcgaagatatgctctccgcaatcgacttcgaaccacgtgcattgcgttccctcgcgggaaagcgcgatcagttgctgcgagccctctatgccatgtcagtcgctggcagacacctttttctggtgattgacgaagcgcagaacctgcacgtcaaggacctgggctggctcaagcgcatggtgaactggctgaacacgcatgaggtaaaggttactgtcgtactgttcggtcagagtcagttgtgcacgatgcatcaacgcttcatggccgagatgccagatctgaccatcaggttcatggcggagcttgttgagttcagaagtctgcaagatgcagcagatctgcacgtggtccttaagtcatgtgatgacgagactgagtacccccgtggatcgggctggtcctatacacagtacttgtggccaaatgcacatgccaatggattccgcttggcgcgcagcgccacagatttgtacgacgcgtttcgctctcagtccggaggtgcagttgaccaagagggaatcagcatgcaatgggtggctgaggccctgatgttggtggggcaggatagtgagggcagcgatgctgaagggatgaatatttcgcgggaagtttgggagcgcgccatcgttgactcaggctatcggagcaggacgcctgccgtgctggctgcaacggcaatcgggagaggccgcgcacggaggtcgccgtga

SEQ ID NO: 522130 - DNA, 1401 bp, Stenotrophomonas maltophilia
gtgattgcatggagtcgagctctgatcgatgcctactgttcctcgtggaccgtcatccagacgctggaactattcaacggcttcgatgccaagtggatgaatggtcgccaggactggtgccttctgctttcgcgctccaccgtgtatctctcggagcagaggcttgacgagcagcgcccgcccaactgttcggagcagctgcgcgatgttcagtcagtcctgggtgagcgaatcagatggttggatgctgaagctcttcgttactgtccagcttgcatccaagttgggagacactaccagtatcaacaagatgaccgatttgttcgctgcgtcctgcatcgagtgagattgaagaccggctgcccgtcctgtggaattgctttggacacgaaagggactctggtgcacggattcacatgtaaatcatgcgggagcaccttgctggagtccgacgtttccggtgaattgaccgctcgcaaggctgcgtcatacgcgcgaaccctagacaaattgcaccagtggctcaggaccgcgaatgactcgctcgccggttgccagagggctcacagcggtctaacgacaatacgctggaacgggaatcacgctgtgagcaacgcaggcagttactggtacgcactgatccagctcccgaacacgatggtacgcaacgcgctgttgccaacaccaacctccttcacgcagcggccaaagaccgcactcttgctaccccttcctgccgatgatcacgagactgccatcaggccgtacgaggagcttcttaggtgcattgcacgtcaaattaggcgcacctatctcaggggacactccagctgccgagtccatgccatgagaacagtaggcggcggccgcactcagcgaaacagatgggctccagtgactctaaggccgcacctatgctgtagaggccaggcatacgccgtatggctactgcagcggcgcgaggagcttcgcgagatctccgagcggatgagcgtgtctcgcatggatcgtctccttgggcatcgacgctctgaggtccctatgcggttgccagatctgcacgcaacggcgtccagttacataagctcgtttgaggcgtggattgcaaaccttgcccgtctacattcactgatcgaccgttccaacaggcaatcggtgctgtatgagcaattccgctgttctccgaactgggcgctgcatcagccgggtgccagcaaaagctgccctattcacctgcgtctggaccaacagaagaaccgtgcttattgcgacaggggccgcgttcgacaggaggatctagcgtatgtcatcgctctggggcgagaaagggagcggattctcaagcgggtcgataagatgcgcgatgaccccacggacatcacgccagacatccttctctga

SEQ ID NO: 522131 - DNA, 480 bp, Stenotrophomonas maltophilia
atgacgccatctggggtcgccagcatcgaggagttgggccttcgtggcacccttttcctagccgcactgttagccgcgcagctacgacgcctaccggtggcgcccacacgccgctccaccttgctggtgctggacacgctgcgagacttggccttgatccaagttccctggccagcggatcgatggcagatccgccccgatgccgaggtcacgcccatcgaagatctgcaatgggctttcgcctggtctacccacgagcgcaggcacctgctcccggtgctggaagaccaactcggcgatatggcacacgatgtagacttggcggacgcgaaactggagctgtgggatgaacttgcactctgggagaccgagcagtttctggagcagcaattgctcaaacatcacttcgacccaggctgggcacgtgatgtggggttcgtctttcaatccggaccgcggggcttgccgatcgcgcggtag

SEQ ID NO: 522132 - DNA, 288 bp, Stenotrophomonas maltophilia
atgcccaaggcctgggtggtgacggtgcggcgatgggtaggactgggaggcggcaggaatgagcggcgcatctcacgcaagaccgaaatcgtgggcgtccacggtaggcgccatgcgtcgccagagacatacaatttctccgaaagtgccctgtccacaaaaaacccccggctttcaccgggggttcttcgtttcaacgggatgccggccagcggccggcactaccctcaggcggcgaccgtcctggccacgtcctggtattcctcgatctggtcgaagttcatgtag

SEQ ID NO: 522133 - DNA, 2091 bp, Stenotrophomonas maltophilia
atgacacacgaacgcctgatcgccccccatgaacgcccggaagtggctgacgccgtcaacgtccgtaaaacggcccgggagctgctcctgtccggccagggggagggcctggatgcgctccttgccgatcgtgacgatctggatgggccgcggaccgggctcgggtcggcacagtggctgatgcagcaattgatcgccccatggcttgaacaagccccgttgatgcaggccttgcaggcgtgggttgtacagcgccctcagagctaccatgcttggttggtgctgggtgccgcctgggagcaggctgccgcacgcatccgctcagggcgttgtgcgaaccaggtggagcgcgcgcagtggattggcgcgggcctggccagggaccaggctgtggcctgtttcctgcaggcgttggcctgccattgcggtggtcgactggcatggcatcgactgcttcgggtcacctgctatctcggcgaaccacaatggctgctggcgcagcaggctggcagggtgcctgacgcctacccgcctgcagatgcccatgatgaactgacctggcaggcggggttggcccatgtggccccccttggcggggctctgcagaagatccccagcctgccggcctgcctggcaccgcgactgccgcatgaattcggggacggtaagacctactggctgcggcaggcattggcggtcagccccaacgacctggacctgctgggtgactatctttatttcctctatccacgctggggaggaagccacgagcagatgcagggtttcatcgacggtccgatctgcgcggggctgaccgaggcgcagcgcaatgatctgcgcgagctgaaggagaatgactggatcgggatgatcgacgacagtgaagacccggaggacatcgcccaggtaagggaaagcctcgatgccctgctggcctcggacctgctgcccgaaacgcgtgcacgcgcactgcgggcctattcccggcatcttgcctatcagtcacggacggagatggacggcaaggtctgctggaacaaggctgaaatgcagcgtgtgtacgcgatgttggcggaaatgttcgaactgacgccttacgcattcgccgaacggagtctgtatatgctggaacagtgcgtcgcgcacgttggaatggaggacggcgctgatctgatgcgccgctgcctggagcttgaagagcttctgcacaacgatgcgtgtgcgctgttgtggctggacgtcgctcgccagtgcgatgcctttggtcttgttggcgatgcgcccttggcggctggctgcagggaagctcgcttcgatatggcgctgcggatggcggaggctcaaggcacggatgtgggccagcacgcgttcaatctgtacgacggcatcgattcggatgccggaatcgcattgttcgagcgcctcatcgcacgtggtcacgcgggcgccatgctggtgtactccggcgagctatcgccagatgcaccgcccaccaagtgcggtcgtgcggtcccggacgcggcccgaagcgcgacgctgctggaaaaggccgcggccgcggatcacccggttgccctgtgtaactgggggctcaggcgtgcaaaggccttctataacgatggttgtcccgaggcgcgcgccgaggcgttgcgttgctatcggcgggtcaacgacgttgcgctgccgcacgaagaggcatggtcctacgccatgaagaccctggtacggatgctttgggaaggaaccccggaagagcagcatgaggcggtgcataccgtgctgcttcgtatctggctgcaggatgacgccgatctggaggcatgggcatctagattcttcgccgatgccttcctttcgggcattggcgtcgccgttaaccgctggctggcgagcgtctggctggagcgcgcgtgcgagcgtgaaccggacgatccggacattgaagatctgcagggtcgacttcagatgaaaggggagtggctgggtggcctgcgctggcgccgcgcagtcgaacgtgaccgccgtcagattgattccgcggcttatgcgttgacgttcggtcaggccccgccaaatcccaatgcaggctga

SEQ ID NO: 522134 - DNA, 417 bp, Stenotrophomonas maltophilia
atggatgagcgccatctcaagtacctgtacaccgccctggcggtgctgttcggcctgcccagcctggcggtgggcggcatggtcgcagtgatgttcctggtgctgggcctgcaatccctcggtcgcaacaccgaacccaacgttgtgctgttggcgtgggggctgggcggcgttgccggttgcctggcgtggctgtggctcagcgccggctacctgttgcagggccgcgctggcctgcaggtgcacacggtgtggtggtggctgctgctggccggtggcctggccgcgctgccggtcatcgccctggcggtctcggcgggattccaggagggcagcaccgcgttggagattgtgctgttgggcccgtcgatgctggtgccggctgcgatgctgctgtggatcaaacgccgcgcatga

SEQ ID NO: 522135 - DNA, 657 bp, Stenotrophomonas maltophilia
atgacggcggatcgagcagtggagttggcccggggacatatggaaagttctcaggctagcaacttccctccaagggcattgcccggtagtttcttgggagttttttgcatgagtcgagttcttcttctggcggttgcattcttcttggccccgcttacagctctggcggaagggcggtgcccgccagggcaataccctgtgggtagtgagcaaggagtgctgggttgtgctccaatccctggaggggctgcggggacgggtgaaacatctgcccctgtgccaactgggaagtgggaaactcgttggggtgcggttgctgaagatcgggaggctgagccgggtagtccgatgtctactggggctgtaataggccagaagtcgaagcgggccgcagaggcgatagcgcttgagcgatgtgaacggagtggtgggaaaaagtgctacgttcgaatggcctactacaatcaatgtgctgcaatagcggacgttgttcttagtgggagtatggctgccggaaagtcaactgcagtaagtgcagagactttggagaaggctaagagcttggctttgactcagtgttccagcctcaatacgggggcgacttgcgagattgcctattccgcctgcagcatgtctgagttcaagtcattccgctga

SEQ ID NO: 522136 - DNA, 159 bp, Stenotrophomonas maltophilia
gtgccgggcctgaacttcgacaagaactacgccaccgtggtgctgggtgcccgtaccgagctgttcggcctgcagagcaacttcggcctgagcgcttcggccgggcagaagcgtgcccaggacgcaacgctgttcgccaacttcagcggcagcttctaa

SEQ ID NO: 522137 - DNA, 468 bp, Stenotrophomonas maltophilia
atgctgatctggaaggtgaccggtcccgagggaggcagcatcgacgctgtgctgggcggcgtgacgctggcaaccgctgctacaggcgcgttcttcgacacgcgggtacatcggatcggggagaagcgctttcgcgcgctctatcaggtgtttgattcaaacgcttccaacccgatggggcgctgtggcgcggggcgcgagatccatctattcgtctacgaattgaccccgccgaagcccattgagcgcggcagggtattgatcagcagctgccttgagaccctgtctttggccagccagaactcagggcgaccccacagtgaatccgacttttcctccgtcatctggcaggacgacgggttcaccatcgagtggtggggtatcggacccggcggcgatgcgtcgagccactacgttctccgaaatgaccacttcgtcccgactcaaccgggtgaggggaatcgctga

SEQ ID NO: 522138 - DNA, 1014 bp, Stenotrophomonas maltophilia
atgaacgtcgtacgcgctgtccccctgatcgtcctggccaccgccctgagcgcctgcggcggcaagcccgcacgcagcgatgcaccggcggccagcaccgtggttccggccagctcggccgccgaggccccctccaccgccgataccggcatggccgaggcggcaccggtgacgccggtgggcgctccgccggccgccgctgcatccgcacccgcctccccggcaaccagtgccgatgcggacacggcgaacaccgccaccgcaaccgcacccggcggtgacgacgacttcgatgccctctatggcggtgccggcaacaccggcagcatggcggcctacgatccgtgggaaccgttcaaccgcaaggtgcacacgttcaacaacgcggtcgaccgcggtatcgcccgtccgctggccaccgcctatacccacgtggtgccacgctttgcccgcactggcgtcagcaacttcttcagcaacctgcgtgcaccggtgaccatcaccaaccagctgctgcagggccgtggtgccgatgcctgggatacgctgggccgcttcctgatgaacagcacgctgggtatcggcggcctgttcgatccggccagcaaggcgatggttcccaaccgcaaggaagacttcggccagaccctgggcgcctggggctggcgtcgttcgcgctacgtggaactgccgttcttcggcccgcgtaccgtgcgcgatgtgttcggcctggccggtgacattccgctgtcgccgatccgcaacatcgaggaggacaaggtccgcatcggcctgcagggcctccagctggtcgatacgcgcgcgcagttgctggcggtggatgacctgcgcgactcggccgtggatgagtacgccctggtgcgcgatgcctggctgcaacgccgcaattaccagatcgagaacgatctgcgcggcaagcgcgagcgtggccaggatgatcccaattcgccgatcccagtcgacgccatgccgatgccgcagtggggcaattga

SEQ ID NO: 522139 - DNA, 603 bp, Stenotrophomonas maltophilia
atgctcaccctgtacggaaaggcgacctcgatcaacgtccgcaaggcactgtggctgggcgccgtgctggatctcccgctccaccacgaaccggcgccatcgtcggcgctgctggccacgctgaactcgaaccggcaggtcccggtgctgcgcgatggcgacttcgtgctgtgggaatccaacagcatctgccgctacctggccacgcgcgccggacgcgaggacctgctgcccgccgcggcgcaggtccgtgcacgggtggagcaatggatggactggcaggccagcgacctcaacagcgcatggcgccatgtgttcatggcgcgcgtgcgccagcatgcggactatccggatgacgcccgtgccgaggccagccttgcgcagtggaaccggctgatggcgatgctggatgcgcagctggcgcgccacgcatacgtggccggcgatgacttcactctggccgacatcgtgatggggctttccacgcagcgctggcgcagcacgccgggcgggaagccggtgctggcgaatgtcgatgcgtggttcgagcggctgcggcggcagccggggtttgctgcgcacgtcgacaacggtgttgcctga

SEQ ID NO: 522140 - DNA, 822 bp, Stenotrophomonas maltophilia
atgcacgccgtcggcgaacaggtaggtgttggccgcatccgggctgacgtagctggtcggattgcagccgatgatgctcgcagtggaattgttcggatcgatcttgcaggccgtgctggtgacgttggtgaagccatacatggccggattggcggtcacctcgcgcaggatgctgaaggtgtcgagcggaatgaattcgatgcccgcctgcttcaggccaccgtacagggccttgttgtagccggccgacagtgcggtggcggcagcggcgttggggccgcggaactgcggagtgatgcccacgtccggcagattcggcaccagcacatactgtgccccggcctgcttcagtgcgcccaccagggcgatctggtcggtgacggctgccccgatgatgccttgcacctgggcctgcgatgcaccgccggccgctgcgcgcgtggccgcgaacaggtcattggcaccgccccagacggtgtacagggcattggcgtcagccttgccgccatttgcggcaaggtaacgggcggcctgcgacttcagcgacggaatggctcccaggccacccgcttcgtcgaccgatacacgggcgccgccgacggcgtagttgtcgccattctggccattaccgttgggcgtgccatcgaggccgtagtaattggccaactgttgcgaccacacccagcccgggttggtggtgaactggccggtgaccggctgcacgcccggcgacagcagcgggcggaagtagccggcatcggtgaggctgtcaccgaagaacacggctctggaatacggcgattcgcctgccatggccggtag

SEQ ID NO: 522141 - DNA, 4314 bp, Stenotrophomonas maltophilia
atgaaccacatctaccgccgaatctggaatcgcgtcaagcagtgctgggtggttggcagcgagttggcctgtcggcgccaaggacgttcacgcctgatagcgcggcgtgcctcagcggcaatcgcaatgctatgcctatcgaccaccagcgtcgcagctactgagagaggcgatgcgttggaagcgcaagcagaggaatcacctcagcaacggacggattccgaaacggtctactacgcatggcgattgatgctgccagtggggaactctgcgtactcaaacatcacgttcgctggagcgatggtgccccaaagcatacactatcagttcgccatggtaagtgactacgcgtacagcgaccttgacatgactggaaaccggaccatcggtctgggatcccgaaccatcgtcgaaggcaaccaggcagcggcctatggcaacggcatccgcctgtatggcaacaacagcgtcgcggtcggcgactctgtgaccgtggatacttcacacggcactgccgtcggggcgctctcgcgcgcagcaggtggctatggtgctacggcgtttggcaacgacgcgcatgccaatgggggcaataccatagccatcggcagtggttcgcgggcgggtagcggcagcagtggtaacggggcgattgcgctgggggccgatgcatctgctggaacgtgggggcacgcgggtgccatggccctgggcaaccaagcgcgcgcaaactacgacgcattggcgcttggttacaaggccagtgcaaacagtgctggcgcagtggcgatcggtgcaggttcagtcggcgaagaatccaacgctgtctctgtggggagcagcagtatcaagcgacgagtggtgaacgtgcaggacgcacggcttaacagtacgagctcggacgcggtgacgggcaagcagctcaatgagaccaacagtaatgtcacagcagcgcggtctgtggctgaaactgccaagcgcaacggtgagatagcacttgagaggaccagtacgctgtctggccttctgagccagacgtctaccagcggcaacgtccgtgtgggcgcaagcaacagtggcaccgtattggacgtccgaaacagcgcgaacgccggccgcaagatcaccggcgtggcggacgccacgctaagctcgggaagcactgacgcagtgtctggcaggcagctgaacgccaccaacgtcaatgtcacggccgcgcgatccgtcgctgataccgcgaagaccaatgcagacagcgcgctgacaaaggccaataccctctctgggcttctgagccaaacctctgcctcgggcaatgtccgcctgggtgcaaccaacagcggcaccgtgctggacgtgcggaacagtggcaatgcgagccgcaagatcaccggtgttgccgatgcagcgttgtccaccactagtaccgatgcggtgaccggccggcagctcaacgccaccaacagcaacgtcagtaccgcactgagtgatgccagcgcggccaagaccagcgcaaacgccgctctgacccaggtaggaacgctcaatggattgctcagccaggccagtgccagcggcaatgttcgcgtgggtgagaagaacagtggcaccgtgctggatgtgcgcaacagcgcgaacgcgaatcggaagctgaccggcgtggccgatggtgcggtcagcgccagcagctacgaggccgttaatggcaggcagctcaacgccaccaatgacaaggtggcgacggtggagggcattgccaggtctgcgggcacggaagctgccgtggcaaagagggatgcagccacggcgctgggcgagacagcagtgctgggcgggctggttgcgcaggtatccgcgactggcaatgtgcgcctgggtgagaagaaccgcggaacgaccttggatgtgcgcaatagcgccaatgccaatcgaaggatcagtggcgttgcagatggggcggttagtgccgatagcgctgaggccgtttcaggtggccaactccacgcgacgaacagtcgaatctcggatttggagagcaccaatcagtatgtgagtgtgggtgttgactcactcagtgagcgcgcagaagcggcgttgcttggggtggctattggtgattcagcgaaggccggagctgagggaggcaccgccttgggcgccttcgcaacagctcttggaaagaactcggtggcggttggccgtggtgcaggggtctcgggcgtcgcatctggtgggtttgcaatgggagctggggctcaagtgcacgcaatcaatggtgttgcgatcggggcgggctctattgttggagactcggccgcgggctcattggcaatgggggcggggtcctttgcagacgaagcaggtactgcatcatttggtaacgctacagatcaacgtcgtatcaccaacatcgccaagggcattgccgagcacaacgccaccaccgtctcccagctcaaggattccctcgccacgctcggcggcgccgcaggcatggatgccaatggcaacatcatcgccccagcctacacggtgcagggcggaacgcagaacactgtcgaagatgcgctgatggcactcgatggcgccgtcatcaccgccggccgtcgcgcggacaaggtggaaggtcagctcagctcgatcttccaggattcaccttcggcgcgtaccgatggcatgagccagatcgcgctgaatggcgttaacggcatggtgctgaccaatcttgccgacggccgagtggccccaggaagccgtgatgccgtaacaggcaaccagctgtacgccgcagagcagaagatctcgcagaatcggaatgatctggaggagatgcgcaaggagcgggagatggggcagctggcaatgcgtgggttggatacgagcgtcatcgactacggtggtgcgcgtttgactggtgtggctgatggctccatttcggcagatagtcgagacgtcgttaccggccgtcagctgtttggtgttaatgatcgggtatctcggatggaataccagaaccgcttcttcaagatcaatacggatgagctcagtgaagacgcgtccgctggcttcctcggagtggcgattggtgattctgcgcgagcaggaattgacggtggaactgcaatcgggtcctacgccgcagcgctgggagtgaattcggttgctcttggacgtgggtcttgggtctccgaagaatcgaggggtggcttcgccgtgggcgctggtgcgcaggtgtgggagcgcaacggcatggccattggtgaaagtgcaattgtcctcaagggggcggatgggtccctcgcattgggagctggtgcggtggctactgagagtggtacggcctcatttggtagtgagggtgttggacgccgtctcgtaaacatcgccaacggcaccgccaaccacaacgccgccaccgtcggtcagctgcgcggtgcgctttccgcccttggtggtgaggtggatgccaacggcaacatcgtcgccccgcgcttcaacgtccagggccagacgcagtccacgttgaatggcgcattgcaggccctggatggtgcggtcgttaccaacacctcgcgcgtggacaaggtcgaaacccagctccgctccgtcttccaggacacgccctcggtccgcgccgaaggtgtcaaccagctcaccctcgctggtgccaacggcatggtcatctccaacgtggccaacggcctgatcgcggccggcagccgcgatgcggtcaacggtggccagctgcattcgatgcagcagcagctcaacggccgcatggacggtctggagcagcgcatcgacgaggccccggtaccgcgtgcgctggcgacgtcctcggtgccgaagccgcaggccgaagagacccccgtagtgccggaaggcaaggactcccagcaggtcgcctcggtaggcgaaggtgacaagcccacaccgcagccgaaggccaacaaggacgactcacccaagccgcaggtggacaccgctgagctggagaagatgctggcccgcgccaacgagtacaccgatggcgcgatcagcaacttcgagcgccgcctggacaagatggacaagcgcttcaaccgcatggcggcgatgagcagcgcgcagacggcgatggcgatgaacaccgccggcctggccacctacaaccgccttggtgcgggcgtgggttacagcgagggtgagtcggccatggcggtgggttaccagcgcgtgctcaacgagaagggctcggccaccttcagcctcaatggtgcgttcaccaacagcggtgagcgcagcatgggcgtcggtgtgggcatcggctggtaa

SEQ ID NO: 522142 - DNA, 198 bp, Stenotrophomonas maltophilia
atgcgcgggcagttcggcttacgcgccgagcgcgtaaccaaactgctgccggcagtgtcgaccaaggtcgacacctaccaacagcattcccggcagcgcgtcgggtggaaagcccccttgttgttcaagggggcgcgccgaaggcgcggggataaggtggaatgcgcgggcagttcggcttacgcgccgagcgcgtaa

SEQ ID NO: 522143 - DNA, 1974 bp, Stenotrophomonas maltophilia
atgcctcgagctgtgttgctgtcgctgtgccggcgtctgtgtccgatcgccgcgttcttcctgtttggcctggtggccctgtcgctgtcgcggctggggctggcactgtggcatgccacgcgggtcggtgctgccgacggttggtcgacgatcttcctgcagggactgcgtgtggacgtgtccacgctgtgcctgctctttggcatccctgcggtgctggcgctgctgctgccggtcgaaggacggttgggccgtgcctggcggcatgtcctgcgcgggtggctgatcgtggcaagcgtgctgctggtgttcatggagctggccacgccaagcttcatggccgagtacggcctgcggcccaatcgtttgttccttgagtatctgatctaccccgaagaagtcggaatgacgctgctgcgggggcatctgctggcggtggtgatcgaagtggtcgccgtgatcgtgctgtgctgggcgctgcttcgcggctcgcgtggctgggtggaaagccgcccggcggccgtggccgaagccgggtggctgtggcgattgccgctggcggtgctggtgctgctgctggcggcgatgggggtgcgttcaagcctcggccaccggccattgaatccggcgctggtggcgttctccaccgaccccaccatcaacgtgctgccactcaactcgctgtacaccgtcggctatgcggcgcgccagctggccgcccgcagcgagacctcgcgcatctatggcgagctgccgttggcgcaggtggtcgacgagctgcacgcgaccagtggcctgcctgccgcggcgtacgtgtccgaggcgctgccgagcctggcactgcgtccaccgctgcaccagggcaagccgcgcaacctggtgatcgttctggaagaaagcctcggtgcacagttcatcggcagccttggcgggcggccgctgtcgccgcattacgaccgcctgagcaggcagggctgggcgttcgagcggctgtatgccaccggtacgcgttcggtgcgcgggatcgaagcggtgctgaccggcttcccgccgaccccggccgaatcagtggtcaagttgccggccacccgtcagcgcttcttcaccctggccgatgtactgggccggcatggctacgacaccggcttctactacggcggcgaaagtcacttcgacaacatgcgcgagttcttcctcgccaatggcttcacccgcatcgtggatcgcaaggactaccgcacgccgacgttcgtcggatcatggggggcatcggacgaggatctgttcaaccgcgccgatgagcagttccagcagttgaatgcgcagggcaagccgttctttggcctggtgttcacctccagcaaccatgatccgttcgagttcccggacggccgcatcgaactgtacgaacagcccaagcagacccgcgacaatgccgccaagtacgccgatcacgcgctgggagcattcttccgcaaggcgatggcctcaccttactgggaaaacaccgtgttcctggtggtggccgaccatgactcgcgcgtgttcggcaaggacatggtgcccatcgccaacttccatatcccgggcttgatccttggcggcggcatcgagccgcggcgggatacccgcatcgtcagccagatcgatctggcgccgacgctgctgtcgctgctgggcatcgccgaccccacgccgctggtaggccaggacctgaccgacatgcggcggctgcaaccaggtcgcgcgctgatgcagtacgaccgcaacctggcatggatggagggcgacgacgtcgccatcctgcagccggacaagccggcgcagggattccgctacgacccggcgaccgaccagctgcagccacacccactgcggccggagctggcacggcgcgcacatgcctatgccatgtggggcacgttggcttacgagaaagagctgtaccggttgccggagaaacccaagccctga

SEQ ID NO: 522144 - DNA, 618 bp, Stenotrophomonas maltophilia
atgatcgcgacgggcagcgcagtgcatgcgttgtctgcgatcaggcactgggtgttcgacatggacggcacgttgaccgtggcgatgcatgatttcgcgcggatcaagcgcgaactggcgattccggcgcaggacgacatcctcacccacctggccgatctgcccgctgcagaggccagtgccaagcacgcctggctgctggcccacgagcgcgaactggccacagcctccgtgccggcgatgggcgcggtggcgctggtgcgtgcgctgcagggcgccggttgccggctgggcatcctcacccgcaacgtgcgcagcctggcccaggtcacgctgcaggcgatcgggctgggcgatgtgtttgccgaagaggacatcatcggccgcgacgaagccgagcccaagccctcgccggacggcctgcagtacttcctgcggcgctggcaggtagatccagcacaggtggtgatggtgggcgattaccgcttcgacctggaatgcggccgggctgcgggcacgcgcaccctgctggtcaatgctccggacaacccgtggccggacatggcctgctggcacctggccgattgtgcggcggtgctggagcattggcagcgctag

SEQ ID NO: 522145 - DNA, 516 bp, Stenotrophomonas maltophilia
atggcccagccagcagttttcgcccgaaataacgtcgcgttcaacgattcctcgccaccggcgccggtcgatctgattgcagcgatgatgccgggcagatttcccggcagagatgacttcatcgaattctattcgaagcacaatggtggctacttcgatggcggcgccgtgttctatcgggacacgttctacgaagttgccacagaagatcgcaatcggcttgagctggaggcattccattgcatcgaggtaccgggtatgccacccaatcctcggcttgtgtcaatcgttgatgtgatgggatggagggcagaccgccatcctgatgctctggcgttctttgaatctcacatcccatttgcgggtgactgcggagacaacgactattggcttgatacgcggacaggcagtgtgaaattcacaattgctggaggacatatctgtgcggacgacgcgattcctgtcgccccggatttcctctcgttctgtgagaatattcaagtcatgcagcggtag

SEQ ID NO: 522146 - DNA, 561 bp, Stenotrophomonas maltophilia
atgagtgccatccaaggtgcaatggctaggctagtggcaagcccggccccgcaggtgcccggagtgcccgtcaagaaggccgagcccgatccgctggcgaagctcagccctgagcagcgctacgtcgcccagctgtcgaaatcgaaccgcatccgactggcgcttacggcgtcgtttggtgagcgccaggtcggcatggtcgagtgggtagacagcagcaacaacaccgccgatcagctgagctttgatgccctcattgcgatgggctaccgcgtgcgcgtgtacgcctacggggccaagctgaccgccgaggatttcaccgtgatagccaccgcgtggccgcgtcaggcgccgcaacgtgacgtggattcgcgcctatatcgcctagacgacgcgagcgcgggcgcgggccttgcgaccgcagggagtgaggccggcgccggcgtccgcgtcagcggcgggcagggctcgtctaccgcgaacggaagcacgctggtgcgcgtcggtgatcgcccaatggggacattcccagagtcgaagccgtacccagccagcttctaa

SEQ ID NO: 522147 - DNA, 954 bp, Stenotrophomonas maltophilia
atgcacctggacgccctcgccgccgcccgtcgccacgaacaccgcttcgacgacggcaacccgctggccgaacgcaatacccgccgcgccctgtggctcaccgtcagcatgatgctggtggagatcgtcggcggctggtggttcaactccatggccgtgctcgccgacggctggcacatgagttcgcacgcgctggcgctgggcctctcggtgttcgcctaccgctgcgcgcgccgctacgcgcacgatccgcgcttcgccttcggcacctggaagatcgagatcctggccggctataccagcgccatcgccctgctcggcgtcgccgcgctgatggcggtgcagtcactacagcggctgtgggtaccggcgccgatccactacaacgaagccattgccatcgctgcggtgggcctgggcgtgaacctgctctgcgcctggtggctgcacgacagcccgggccacgcgcatcatcaccacggacatggccatgaccacgaacaccacgatcacagccatgcacacggtcacgacctcaacctgcgctcggcctacgtacacgtgctggccgacgccgccacctcggtgctggccatcgtcgccctgcttggcggcaagctgctgggcctgacctggctggacccggtgatgggcctggtcggcgccgtactggttactgtctgggcgatcggcctgctgcgcgacagcggccgcatcctgctcgacgcgcagatggacgcaccggtggtggccgaagtacgcgaagtgatcgaacagggcccgtggccggcacgcctggcggacctgcacgtctggcaggtgggtcgtggcaagtacgcggtcagcgccagcgtggtgaccagtgataccagtctggatgccgataccgtgcgcaacgcgctggccgtccatgaggagctggtgcacgtgacggtggagattcaccgcagctga

SEQ ID NO: 522148 - DNA, 1008 bp, Stenotrophomonas maltophilia
atgttcaactacagcaagctcaccgacgagcgcacccagcaaatccgcgactactcccgtgaacacggccaacttccttggcggcgggggtggaacgaccccaacgcgaagccgggcctgctgactggcgcatggaatcccaccaccgggcgcagttaccgcggcatgaaccagatttcgctgctggccgagcggctcaacaagggttacgacgactcgcgatggatgacctacaagcaagcactttcggtgggcggccaggtgcgcaaaggggagcgctcgaccaccatcgttttctgggatttctccaaagtgaggggcaatagccctcagccgcaggagggcgagggctcggaggatgagcaaaagttcaatcgtccaatcccccggcctggctttgtcttcaatgcggcgcaaatcgacggcctgccgccagcgcctaccctggtgatgcttgaaagcattcgaaacctccgcgtgcgcgagctgctggagaggcacgcccccaagttgcaccacgacggcggcaatcgggctttctacatgccggtgaccgatagcatccatctccccaagttccaggcgttcgagaccccggaggcctaccatgcgaccctgctgcacgaactgtcacattggactggaagccagcagcgcttggctcgggatctgacggggaagttcggctctgagcggtatgcccgtgaggagttgacggcggagttgagctcggtgctgatccaagatcgtctcgggatatcgcctggagctgcccacttcgagaaccacgtggcctatatccagcattgggaaaagctcatcaaggacgacagtaaggcgcttttccgagccgcagcccaggcggaaaaggtcattgggttcttgggcatctccgaatacgaataccccatgttgccggccatccataaagagcaaggtgcagagcacgggcaggagaagcggagagtagaaaccggaagaatctcccggtcgcgattcaaggagtga

SEQ ID NO: 522149 - DNA, 621 bp, Stenotrophomonas maltophilia
atggcgttaaaggtttcggccgctttcagtgcagtcgttgtggtggtcttgtctgtcctcgttgcaatcccggcgactcgctatcacacgctctggtggacgtccgagctggtccgagtccctttggatgtatttcctgcccactctcgctatgtccccccaatagaggtggtgtccgacgggctgtctatccgccccaccaaggcgcggttgacggtctctcagttgcgacgttttgatctcaacgtcctcaaggcgggaaaaagctggacgcaaatgaatgctcaagagcgccgcacgttgctggcggcctaccgtggcaagaccgcatttgactccagagaggagttcttgttcttgcgtaaggatgagatggcacggttcgatgaggccttttccgagatgatcaacgatgccgctgcaaaaagtcaggccgtggccgatcgggctacccggctgctgggcggaatcggcgatctagacgatgccgcatgggatcgcttaggggagacgcccttctcgggaaactggcgatctcgcattcagtggctttcgaatcagttgatgttcgaagcggagcgcgccagaaggatgcagggatactcgagtatctctttgtag

SEQ ID NO: 522150 - DNA, 423 bp, Stenotrophomonas maltophilia
atgcgcaatctttgcttgtcggccatcgcgggcgcgttgttgctcacggcgggatgtgccagccagcccggccctgctccactcgacagtgaagccgccgccacgtccgtgattctgctgggcgaggtggacttgcccaaggatgccaccttggacgatttcccacggctgctcacgtctggtggcatgtcttgggagaagttcgagggaacggtccgcttggatgggccgttcgggccttttgatagcaatccgacttccgggcgctcccttgcggtagtcaccgatgttttaagccagacgacccgcttggttgtgagggccggcgatcagccgaagctctcaacccttgttgtttgtgtcagagggcagggactgacagcaaccgcatcggacatgagggacggcgatgtttgtgagtaa

SEQ ID NO: 522151 - DNA, 507 bp, Stenotrophomonas maltophilia
atggctgaaatccaaagctccggacgcttccaccacgtcatcgtgttgctcaaaggaagcgacaagaagaaggccttgttcaccgatttgacggcagctgagctaaagcggcgctttgttaggccatacaagcagggcaaaccggtcctcctgccggataactcggttgtccaaacgcgggacatcacttggaccgctatacgagccactgtcgaagccgccgcgcccactttggaggcgctggcagaggcgagtcgccgcaatacagatgagctcaaccgaggtggcggagtggtgttcctggggcgctactcttggggcaacgaagatctggcggaagaagggcaggacgtcacatcgcgctacatccaggccccgccgggggaggatagcctttaccgccgcttgggttcttggctggcggacaacttgggcaaggccggcatcggcctcctgcttgccgttgtttcggcggtggtgctcacgtggttgggattgaaaaggtag

SEQ ID NO: 522152 - DNA, 282 bp, Stenotrophomonas maltophilia
atgcaaaacaatactttcacggctgaagaatccgtcatgatcggcttggggctgaaccctggcctggtcgaaaactatgctgaagtctcccttgagcccgtcagcttcgagaaggaagagggcttctgttggggttcgcgctggaccgctgtccacgatgcgcgttaccacaatggcgggaagatcatgggagacggacgagagtttatcgtcactaaggccaacccgacgttcaaaacattgctcaacgcttggcgtgaggagcagcaaaaagctgggtga

SEQ ID NO: 522153 - DNA, 489 bp, Stenotrophomonas maltophilia
atgaatccgctgtccctggcccgcctggccgtgaccctgagcctgggcaccatcgccacgctcgccctgccctccgccccggccgccgcgcaaagcggggtgatccgttgcgagagccagaacaaccgagaacgcgtgtgcaacacaggctggcgcaatgcccgcctggtccgccagctgtccggcagcccctgcgacgaaggccgtacctggggcagccgcaatggcagcatctgggtcagcaatggctgccgcgccgaattcgtcgaggcccgtggtggctggggcggcggcaacagcaactactccatcacctgcagcagcaacaacaaccgcacgcagaactgcgactgggatgagcgccagggccggccggtgctgcagcagcagctgtccggcagcgcctgccaggagggccgtagctggggctacgcacggggccaggtgtgggtgagcaacggttgccgggcgcgcttcggtacgcgttga

SEQ ID NO: 522154 - DNA, 459 bp, Stenotrophomonas maltophilia
atggcaaccaagaaagctgcgaagaagaagcccgccgccaagaaagcggtgaagaaggccgctgccaagaaggcagtgaagaaggtcgcgaagaaggcgactgccaagaaggcagtgaagaaggcggcgaagaaggtcgccaagaagaccactgcgaagaaggcagtgaagaaggcggcgaagaaggtcgccaagaagtccactgccaagaaggccaccaagaagactgccaagaaggctacggcccgcaagccggccaagaaggtcgcaaagaaggcgactgccaagaaggccgtcaagaagaccgccaagaaggcagtaaagaagaccgcgaagaaggctaccaagaaggctgccccgaagaaggcagcgaagaaggttgccaagcgcaagccggccgcccgcaagaagaaggccgctccggtcgctctgccggcaaccccggcgccgctgatctaa

SEQ ID NO: 522155 - DNA, 1047 bp, Stenotrophomonas maltophilia; identical to SEQ ID NO: 521072

SEQ ID NO: 522156 - DNA, 501 bp, Stenotrophomonas maltophilia
atgagcgagacgatcattgccaaggtggtggaccgcgcgcaggcggcgatcgatccggccgagggcatcgcggcggtgtccgatccgggcttcggcggcatcgatgtgttcatcggcaaggtgcgcgatgtaaacatcggccgcgcagtcaccggcatcacctacgacctgtttgaaccgctggtgctgaacgaattcaggcgcctggccgccgaggtcgaagcgacgttcgggccgaagctgaagctgtatgtggcccacgccaaggggcgactcggcatcggcgatgtggcggtggtggtggccgccggcagcccgcaccgtgacgaggcgttccgggcctgccggcagttgatcgaggtggtgaagcaccagtgcccgatctggaagcaggagcattacgaggacggcgacagccagtggagcgaaggttgcagcctgtgccatgcggacagctcatccgcacatgccgatgaccacacacatgaccacgggcattga

SEQ ID NO: 522157 - DNA, 261 bp, Stenotrophomonas maltophilia
atgagacaggtgaatctgcagttgttcggtgcgttttccgatctggatgccagccgcgaaatcgcggtggaggtggctggcggcaccgtggccgatctgcgccaggcgctgcgtgagctgctgccgctgcgttggccggatttccgtgccggcctgctggattattcggcgttcgccgatcagcaacaggtgctgcgcgaccacgacgcgctgccggacgatggccgggtggcgatcctgccaccggtaagtgggggctga

SEQ ID NO: 522158 - DNA, 198 bp, Stenotrophomonas maltophilia
atgtgcatcatctggctgtggttccgggtcgaacggagcgacagcttgggccccttgcttggccagttcagcttttctggcttctgccagttggccgggggcgcctgtaacaacgcggtgcccgtgggcgagcaggaagatctccctattgcgaatgggaaaatccgcaagccacgcagacgccttcaagtcgagtga

SEQ ID NO: 522159 - DNA, 186 bp, Stenotrophomonas maltophilia
atgggatcgcgtgagtggttgggttcagtcacgctgcccgggtgttccgaaagccctgtctccatccgttttagtcaactctgcttgggggttctggaggacgagtgctggggttgttggttttggttcgggtgcctggaaagcgttgaccccatctgttttagtcaagcgagtggccccggttga

SEQ ID NO: 522160 - DNA, 270 bp, Stenotrophomonas maltophilia
gtggtgttctcgaactacgccttcaacgtaatgagggacccggatctagcgatgaggctcattcgtgaggccgtgcaaatctcaccgaaagacctgggatgtcggctgtggctgttgaggatggggttggcatcgaacttgcttcaggtcagtgaggctaggcaaggattggggatcctgcgagccgtcaatcatcgccatgcatatgaccgggacattgagggcctggagcattggctggtggcgagccaacaaacaacaggggagtag

SEQ ID NO: 522161 - DNA, 219 bp, Stenotrophomonas maltophilia
atggcgtggatctacccggagctgccgttgagtccgccttcaagcgagccgagcaccgcaggtgcggcgagggcgaagaggcgcgggtgtctgagcgtagcgagttcccgcgccgtccctcgacgggccgaggagcgcagggaaccggtgcgtagcaccggctcgcggccggcggagcgtttcttttggttacttttcttttcgcgaaaagaaaagtaa

SEQ ID NO: 522162 - DNA, 1047 bp, Stenotrophomonas maltophilia; identical to SEQ ID NO: 521072

SEQ ID NO: 522163 - DNA, 243 bp, Stenotrophomonas maltophilia
atgcgcgggctggagaagcggctggccgagcgtgggttgaagctggcggtctccgatgcggcgttcgatctgctcggcaacgtcggcttcgacccggtgtatggcgcgcgtccgttgaagcgggcgatccagtcgcagctggagaatccgctggcgcagcagatcctgtccggcgcgttcgtcaacggtgacaccatcgaagtcggcaatgagggtgggcatttggtcttcaggagtacctga

SEQ ID NO: 522164 - DNA, 342 bp, Stenotrophomonas maltophilia
gtgctggtgttccatggcagcgccgatctcaccgtcaatccggtgaacggccagcaggccgtgcgccagttcctgcagaccaatgacctggccgacgacggcctggacaacgactcggtgaagtacgtgccgaccagcacctatcacggacaggtgccgggcggccgcgggtataccgtcgacacctacgcctacggtggcaggacgctggtccagcactacgtggtgcagggcatggggcatgcctggagcggcagccagtcgggcctgccattcaccgacccgaaggggccggacgccacgctgatcacctggttgttcctgaaggactaccagtgctga

SEQ ID NO: 522165 - DNA, 600 bp, Stenotrophomonas maltophilia
atgacccctccaactatctttgtcagctcatctgtatatggccaagaggcgttactaaatcagattttcgcagtacttcgagggtatggctataaggtctggatgtcgcatcgcgggacgatgccggtaaatccaggcctgactgcattcgagaactgcattgccggagttgaaaaagcggacatcgtgcttggaataataaacgggcgctatggaagcggcatagacggcgatgagccctccattacccacaaagaaattctaaaagcaatagaactaggaaaaccgcgctatctggtagcccatcgagacgtggtaacggcgaggcaccttctgaagcaatttagaaaggaagcggacggcaccccccgtcaccacaccttctttaagaagaccccagtcatcgacgacatccgcgtaatagacctctatgacgacgcgacattagctgatcggcccatcagcgaacgtcagggcaattgggttcaacagttttccgacgacacatcattgcttgagtatatagaaagtcagttctccgaagtctcgcgattccaacacccgaccacaacttcggaagtgacacaagctcatgaataa

SEQ ID NO: 522166 - DNA, 1338 bp, Stenotrophomonas maltophilia
atgaataagagtacaagccatatcgacaacttagttgtctttgagaatttttacattaatgatgtagcagccgcggtatgttccttggcgaatggttcaggtggccgcataatgctgggcgtctctttggatgggagcgtgcaggggattcccgagtggcacgaaaaagaggaaatctcctacagaattcgagacatcattagcccccgggctgcattttcagtgatcgatcggaaaatcaaagaacgctctattatcatcattgatgttccacccgggacggatcgcccctatgtcgctgacgatggcatttacatttggcacgagggcgctgtgaagcaggcgacacctcgtgagatatcgtcaatgatctcatctcgagcagaggaaccagtgcgctgggaacgccaaccagcgtcagggttggactacgaggatctcgacggcgaccaggttctcaacacttggcgactaatgcttgatcgcccgggtggagataaactgcacgctcgtgataagacggacgcgcttgatagcatgcgtgtatctgcatcgggccaaatattcaattcggccgccgtacttttcgcgaaggccggaatagggcttgaccaatcaaaggtgaagatcgccgcttttgatgggcctgatcgatcttcatttagagacagcaggataattcagggcggacttttccacttatttgatgagataacatcattccttgagcgacacattccgatttcgtcccacttcgatggatacacacggcatgacaaccgacagctgtcagcctttgtaatacgggaatcggtgatgaatgccctcgttcaccgcgactactcgcagaccaacgcctttgtgatgatctccctccatcccaataggctggagatttggaatcctgggaacctgccggaaggaatctctgcggagagcattgcctccattcaagtatcccgccctgtaaatcctgacattgccaatatagcccatgtaagaggcctcgttgagcaatggggtagcggggccggacgcatcgtctcagaatgccgaaaatctggtctccgagatcccgtgtgggcttcagttggcgatggagtaaaactcacgatttcgctcgccccaagagcacagcgcgatgatgaacttaacgcaaagcaatttgcggcccacacgcagcctggtgaagttgtgtcgactcaagattacatggaatcgtatcctaatatcagccgcaccagtgccttccaggatctggaagacctggtggagcttggttatttcgtaagaagtccacacgacgactattatgttcgtacggaccaaattttatag

SEQ ID NO: 522167 - DNA, 396 bp, Stenotrophomonas maltophilia
gtgtcaattgtagtgatgaccggaaatgctgagacgggcagggaaggctttgatgatcctaccaatcaggccgagaagggcgctgtcgcagaaggttacgtgcagagcaactaccagcaacttgagctgttcaacggtaattcgctgaaggttgctagaagaaaggggaaggagactcaagtctgggccctgctttatcattacgatcggagtttgcaacaggttcgcttcgagctttccttgccgactggatttagtaggaagaagatcacgcagtggggagagcgcttgatttttggagccgttcctaacggccccgatgagttcatgattccgaagggagagccaaacatcccaaccacggttgaagttgtgcccaagaagggtgcgttttga

SEQ ID NO: 522168 - DNA, 429 bp, Stenotrophomonas maltophilia
atgcgctcgatccccctcgcccgcccgtgccgcaccgctgcggtggtgttgatggcaaccctggttccgctgctggcctgcgcagccgaaccgcttgaaggcgattaccgcagggcctcggtgcagccggtcgaagtgagcccgcacggcgccaaccagatcaggatccgctacagcatgccgggcgaaaccctgttctactctcccggggtcgattaccgctccgaaggtggcaccctgcaggttgcgatccgccgctgcggcatcaaggacagcggctgcaagccgatggccaaggccacctcgcccaaggacaatccgtggcggcccgaagtcgtactgccctaccgcggcgagaagatcatgatgatgtacagcgatggccagcagcaggtcatccctgcaccgccggccgcgggctcacgctga

SEQ ID NO: 522169 - DNA, 891 bp, Stenotrophomonas maltophilia
atgatgaatctcgcgcattggcggctgctggttgcggtggctgacgagggcacgatctcgcgcgccgccgagcgcgtgggcatcagccagtccggtgccagccaggcccttgcccagctggaatcctcactggggtttgccgtgttcgtgcgcgaacgtcgccaggtggatgtcaccgcgctgggccagcaggtgatcgaacatgcgcgcaccatgctgggtggcctgcaggccatccgcgcgctggccgacgacagccaggggctgagcggggcgcgcatccggctggcgacgttcccctcgatcgtttcaaccgtgctgcctgcgctgctgcgcgacttccagcgccgccaccctggcatcgaagtggtcgtggtggagggcacggacgaggaggtcgagcagtggctcgactcgggcgctgtcgacgtgggcgtggtgatgaaccccgcactagcgcggtcacccgtggccctgggcagcgacgcgtgggtggcggtgcttgcacagacccatccgctggggcgtcgtgcgaccgagcgcgggatcgcgctggatgaactggccgccgagcccttcatcctcgccaccggcggctgcacggtgaacggccagcggctgatggaagacgcgggcctgcacttggccgacgcacggatcacggtgcgcgactgggccagcgcctgtgtgctggtgcgcgagggcctgggcgtttcgctggtgcccgaatcgaccttgccgacggaccgtcacgggctgcgggtgttgcccgtggcccccggcatccgccgcgtgttcggcctggtctgctcggaggtggggcgtgcatcgcgcgccacgcaggtcttcgtgcaggcgctggctaccgccgctgcaggccgcgcgtcctga

SEQ ID NO: 522170 - DNA, 270 bp, Stenotrophomonas maltophilia
atgagggtgctgctgctggtcgggttggccctgctggccggcccggcactggcggaaccgccggcaccggcaccgtcctcggcgtggctggaacggcagcaggcggccgctgccgatgaggcggatgcggccgcggctcgatcctcgaaagcgcccgttgccaaagagagctgtcgggtcgtgaagcaatggaaggtgggggacaccgtggtcaagcaccgcgtctgtgacgacccgccaaagccggcgccgccggccaagcaagggtag

SEQ ID NO: 522171 - DNA, 216 bp, Stenotrophomonas maltophilia
atgtccgattccctcgctacctcccgtatcgtgctggcctcgcgtccgcagggcgcaccaagcgcggccaacttccgcctggaacaggctgcgctgccggcattgggggatggcgaagtgctgctgcgcaaccgctacctgtcgctggacccgtacatgcgtggacgcatggacgaggcccctcgtatgccgcgccggtggcggtgggcgcggtga

SEQ ID NO: 522172 - DNA, 339 bp, Stenotrophomonas maltophilia
atgtttcgacaatttgccgcggcgtcggttggcgcactgttgctgtccgcctgcagcatgacgctgcctgtccgcggtcagatccaaggatccgatgagcagttcactggcaccgccaccggccgaatggacggcggtggcgagctatccatcgtttccaacaagggcgccacctgcaaagggacgtttgtctatgccgaacgcaggaagggcgaaggcgtcttcacctgcgatgacgggcgcacaggccccttccaattcgtatctaccggcacgcgtgggaccggatacggcgacctgggtggccagcgcttcaccttcacgtttggaaagatctga

SEQ ID NO: 522173 - DNA, 702 bp, Stenotrophomonas maltophilia
atgaccaccaccaacggaaacaccagtacgcgttccgcggctgagacgcgcgcgggactcaacgcacgcagaagcgagcttagcgccagcatccgcgacctcatcaaggcacaggagcgcattgccttggaagcggcggaaggcgatgtagcagcgccgcagcgcctagcatcgaactatgcaggtgtgaacggcgcaaccaacgaactgcgtgccattgaagccgcgctgcgcgcgctggatcagcgcgatcacaatgagagcatgcgcgccagccttgattgcatcgagtcagatcgggcgaaggcccatgcttgcgtgcaggcagtgcggccggcgtttgatcgcgtggccactgccttggagacgctgggccgggaatgggctgcattgcagcaggctcaggaagctgcacgccggatggaacgcgcgcaccgcggccaaactcacaacgaccttgccactgctggtgcggcttcggttttcaacagcgctgcgagtatcgacgcgactccgttggtgcagggccggctttggctggcggttggccacctggatccgaatcatgagatggtcaaggccactcccgccgcgctggatgcgcagatcggcaaggccctgctgaccatcgatgaggggctgcgtcggcgggagcagtacattcgccagcagctggccgacgatcccggccaggctgcgtga

SEQ ID NO: 522174 - DNA, 501 bp, Stenotrophomonas maltophilia
atgagcaggtttcagaagggccgcagcggcaaccctgccggacggccgccaggcacgaagtcagccccgaatctgattcgtgacctgctgcgtgacggcgtggtcaccgaagacgatctgcgcgcagtcgtggccgctgtcatgacgaaggcaaaggatggtgacctggccgccgccgcgctgctcctggaccgcacgattccgaagctgcgtcctgcagtggatgcggccgaggaagaagaagtcgccgccgctcgtgcgcgcggtgccctgtccgcaggctttggcggctcgaccctggaagacctggtggcgggttctctttccatggtcgtcatgaccaggcccacagagcagcctgcagcttcccagcacgccgcgacagtgctgccgacacaggcatccgcggcagcaccacctgcgaaaccagcaccgcccatccgcatcaccgtgccggcggcgccggatgtcgaccacggtgaaccctacaaccccctctga

SEQ ID NO: 522175 - DNA, 879 bp, Stenotrophomonas maltophilia
atgaccgaccacccgaacgatgtagctgcacgccaggcggcatcgatgtatcccgacatgacgactcatgcacccgccaacgactccgggcgcaccacttcctcgtccgctggctcagacgctcgcactcctgcggcacgacccacgcctccggccaccagcgcctcgccgcgcgatctgccctgggaacggatgtatcccgagatgaagcgggatgagggtgctgtgacttcggctgcagtgaacgccgatgcgaagccgacgcaggacggatcgaagttcgacacgatgtacggcgacatgcatcgtgagccggagcagccggatgcaacggttgatgagcttgtcgcgcagccgctgaccgatgcggaccgcatgtatccggatggcgggcgccctctcgaaagcgccgacgactacgaccagcagacgctgagcgagcctttcgacaccctgcagatgcaggcccgctttgacggcaacgaagaagaggcagcgattctcgctgaggggcggcagcaggccgcggctgtgctccatggcatggcggtgccttccgaagcggcacgcgagattgccggcgagcttgaattctggaacgcgcgctggatcaagggcgatctgcccggcctggacgagatggattccacccgtcagaagacggaggcctcgctgcgcaaggaatggggacccaaatacaacgccaacgtgcagttggccaggcaggcttatcaggacgcggccaagcaactgccatggctgcgcaacctggtggaggacgccggggccggcaacagcgccgcgctgctgcggcacttcgccatcatcggcctcaacaacgcccgcaacaggcggggatcagggagcaacaggaaatga

SEQ ID NO: 522176 - DNA, 624 bp, Stenotrophomonas maltophilia
gtgcattcggccgcgccgactgcactgcatgccgatgatccggagaagatcgacagccaagggggcgctggcaatacgccgacaccgggcgcgcctgctgatgaactgcctgtcgatccggcattgccgaagcgcatccgcggcgagaagccggcgcagaccgcggcacggtttcccgagttctgggccgcgtatcccgttaagaagggtcgcgcgaaggcgctggcgaagtggaaggcgaaagggctggacgcgcacgccgacaagctgatcgcccatgtgcgccgcatggaagcagaggatgaccagtggggacgtggcttcatcccgcatggcgacacgtacatcaacggtgagcgctggacagacgagccgatgaaagacaagcaggtgacggcccaggcaccgccgccggaatcgttcggcgcgaaggccgcactggcgaagtcagaatccaagctggaaaacgccctggcgtggatccggcagcagcgcagcatcggcgcctatggcgagggcgaggcggccgacgcggaaatgcgcaaggccatggcggaagcaaccgagaagcatcgaaacacggcagcttcgagcggggaagcgagacggcccgcgcccacctga

SEQ ID NO: 522177 - DNA, 246 bp, Stenotrophomonas maltophilia
atggatgcccacgcgcacgtcgccgcgctggcggcgctgtaccgccatcggcagccggatgcgcaggaactcgcaaacgacctgcaggccttgggcgacgagattcatgcccggctctcggcgcttcaccgtgcgccgaatgcagacgatgccgaacggctggctgtgggcctggaaggcgcacggcgtcacctgctgcagcttgccgaagcgatcaggcgggaggtgccgcgtgctggcgcctga

SEQ ID NO: 522178 - DNA, 204 bp, Stenotrophomonas maltophilia
atgcagcagaacactcagtccgtccgcctgtccgagcgtgacgcggcctctttccttggcatcacccagcgcacgctccaagattggaggttgaggcgtcgtggtccggcctacatcaagctcgggcgccgcatcgcctacgacaggaccgacctcgaacagttcctggcggccaatcgcgtcgagccggctcagggttcctga

SEQ ID NO: 522179 - DNA, 642 bp, Stenotrophomonas maltophilia
atgaaaggcaaggccacagtcgtcgttgaatcgccgcccgccctgcccacggtactgacgagcgacggcggggagagagacgcggcgttgttggacgcatatgcccgctgggaggcggaacgcaggggcgcgactcttgccgggtcgatggcgcatgcagcagagcagtggaaggatgctggactcgatcccagcgctgtcatgcaggccatcgcggacggtggagaatccatccttgccgaagcggtgatggcgctgacgaagcgaccgcaggtcgaggtcaggaagccccgtcaaggcaagagcaaatggacccacagggaacaaggagaactggtgctggcggtgtggcgcggcctcgtccggaagcgaggcaccgcgtcccctctcgaacccaatcccaaagtcaccatccgcacggtttgcaacgggcttgtcggtcggaacggtcaagagaaatggcgcgggatgtcaggtcaaggattggaagcccgccaccgggaggcgttgaagtccccggctgggctcttgcttgatcgtctgctgaccgaggcggcgcgcgctcgtttgcaggggaagatggacgccgacgaactcgccgttctgatcggttacctggatcgcttcgtcgcttcgctgtag

SEQ ID NO: 522180 - DNA, 1308 bp, Stenotrophomonas maltophilia
gtggcagaaacgatcaccttcaccgaggcgcgcgtgcgtgcgctgcgagatgccgcccgagtgggccgcgttgagtaccaagacggcaaagtgccagcactgcgcctgcgggtcagcgctacgtcggccagttggtcggtgttgaagcgcattcctggtggcccgatgcgtcgcgtgcagttggggtccgcggatgacttgccggtggagcaggcacgcaagcgcgctcagctggcggtcggggccatgctggaagggcgcgacctgtctgccgagaagcgccagcgccgggtggagtctgagcgcgccagcctgacgctggctgatgggctggcgatctatctggctgaaaaggacggactgcggccggcgacccgctccacgtatgagcgagacctgcggaccacgttcggcgattggtgggacaagcccctggccgaaatgacgccggagtgggttcgcgaccgccaccggaaccggaagacgcgccccattaccgctcaggctcgcgtggggcacgcgcgtgaccgcgaccgcatcaccgcaagtccggcgcgtgcggacggcgctgtgcgagcgctgagggccgtcgtgaactacctgcgtgccgaacgtgacctggacctgccggatgttgcgcgccggatcactgccaccaagggctggggcaacgtgccgcggcgcaagcgcgcgctactcgggcaggcgctggccgagttcgtcacgtcggtccgtggattgcccgacgatctgccgcccgacctggccggcacgcagcgcgaccttgtactgctgatcctgtgcaccgggctgcggtggacctctgccgctggactgcattggaccgaagttgatttcaaggccaagacgatcaccgtccctgccgaccgcatgaagggcaagctgtcccatgcactgcccctggggccggcaatgctggcgatgttgaaggcgcgggcggcagcgccaaggtcgcccacgctggtgttccccggcctggatccggacaagcccctgggtcgcctgtcagtgcgattcctggccaagattgcggatgccgaaggcaaccccatcacctggtcgccccacgacctgcgtcgcaccgcgctgacgctgctggaagcgatggatgtctccgcctacgccttgaagcgcatcgccgcgcacgcgcagtccggcgacgtgaccgctggctacctcgcagacgatgtggaacggctgcgggtgccgatggagcggttggaaagtgtggcgctggctgagccgcgtgacggtaacgtcgtccctttgcgtgtggccggccgatga

SEQ ID NO: 522181 - DNA, 393 bp, Stenotrophomonas maltophilia
atgaacaatccgctcgataccacggggtctcggccacagctccaaccggaagaacgggaatccatccgcaggttgattgccttcgtccgcgaaggctgtccagacggcgcttgtcctcccggctttcctgctgaccggaccgacgacttcaggcgcgcagccctcgagtacttctccgatccgccagatcccatcaatcatttccggattgatgtccccagcgatgagtacatccgcgccgaggccctggtctatgagcacccatcgggtattcacgtggagttggatctattcgctgatggcgagcggtgcgacttgaccgccacgttcgatcttgatcgtgagagtgcagtgttcagtgggcccaggttgtacgacatgcacgtgatgtag

SEQ ID NO: 522182 - DNA, 900 bp, Stenotrophomonas maltophilia
atgattgcgctcctgcatagcgaggtcgtgccgtggctaaaatcgatcaacacgaagccgcatcagaaggacacgtttaaaccctccgataagaagttcgacttctcaattaattacgatcctgctcaaacgagcaccatggcaagctacaccagctacgatgtcgcgccctcaaaggaggtcaatccgctctacaaggcgctcaaagcgaagactggccagttagaagggtctcatgagggcacatttaaactcttggtggcctgcgatggtgactgcgggctgtttcgtagcagtgcatcgatggcatcgatgggcggcaccttcaccgaccgacaggtcgtcgaccacttcttgaccaagcactccagcattgatggagtgcttctcattggcgttgaggagaagcgcgacttcttctccggccggacggacagaaaactgcgctttgacctcagggtacgcgcctcaattgatcttaagcgcctcatttccccctacgcggaactggatgaactgattcgaagtgcctcgattaattttccagagccgcacctagcgccttataacgcagctcgtcgctgcctagatcaagaggccaagcacagagtacaaggtcgatatcggttaatcactagtggagtaggaggcatgagcgttggcatttcttctcgggatctgatgatgctgctatctggaaagttgtcacaggaagacttctgcaaggcgtatcggttcgacgccccgcacgtcaatccctttacccttgccctctcccaggggcgcttgatccaacttgcctcattgagcaagttggatgacgatgatgatgacttggtgatcttcgaatttggcgagattgatccagccatagcccccttctttatgcctggggattag

SEQ ID NO: 522183 - DNA, 675 bp, Stenotrophomonas maltophilia
atgaagattaggtcaattggagatctgactgactaccttgatgatgacttggcatggcgccgaaaagagattattgaactgcttgcattggccaaatcatctaaagcaaagaaggcggatgttcatgttcgtgcaggtgtcgccatgctctacgcacactgggaagggtatataaagaatgcttctaatgcctacgtcgcctttgtgtctactcggggaatgaagactcgagatttgcaggattcatttattgctcttagtatcaaggccaagctcacatcggtgggggacagtggaaagtcttcggtagcagtccctgcaatctcgcacttgatgtcgttgcttgataagccagctttgctccccgttgctgggattaccgcggatggaaacctaaaatcggacatatttattaatattgcgggctggttgggtgttgatgtcgcccagtattcggcgcgtttcaatttgatcgatgagaccttgcttgcctcgaggaacaagatcgcgcatggagagtacttaagtatttcctcggggcgttttgaaaagcttacggaggagatactggagatgatggtgtggtttaagactgatctggagaacgccgcagcaagtaagtcctttcagcgggtcggtaacttggttcctgtccgcttggctagccaagcataa

SEQ ID NO: 522184 - DNA, 1116 bp, Stenotrophomonas maltophilia
atgagtattcaggatcttcaggttgagttggagaaggcaaagcggcaagtcgttactgatggctacgagatgtcgcttggcgaaatcgcaagtctctataaaaatgatgagctgatcattgctcccgcttatcaacgcctaattcgttgggaggaatcacagaagacccgctttgttgaatcgattctgctcgggcttccagtccctccggtgtttgtttttcagcgcgaagatggtgtatgggagctgatcgatggtcttcagcgtatctcgactgctctgcatctaatgggggtgttaagggtaaatggaaatcttgcggagcctttgattctatcaggcactaatttccttccttcgcttgagggtatgaaatggcatagtgatcaggttggtgatatcaaggtgttcaatacgccgctgcagcttgagatcaaaagggccagaattcgagttgaaattttgcggaaagaaagcgatcaagacgcaaagtacgaactgttccagcgcctcaatactggggggtcgaagctgagtgatcaggaagtgcgcaacagcgtgctggttatgcttaatgaagattttttcaaatggattcgcgatctttcagccaagcctgagttcaaggggacgatccaactcacgcccacgcaagaggagttggcgcaagacaatgaaatggtacttcgttttgtagcctaccggcgtgcgacctacactaagggattggatgtcaatgagtacttggacctggctgcacgtaaattgagtgcgatgaccgagaaagatctggttgatgaagcggaagtattcaattggacttttgatcttttgtggcaggcttttgcaggagatgcgttcaagcgatgggacggcactcggcacactggcagatcaatgcttgcagcctttgatgtgattggttatggcgtggcggaaaatcgcaaggaaataatggcgattccagatgaccgtcagcgtcagaactggctcgtggaaaaagttcatgcgttgtggacggaccaaacctattcaaactactctggtcagggtgtgcgcggaacaactcgcatggctaatttgctgccctttgctgtcgagtattttaaaccatga

SEQ ID NO: 522185 - DNA, 255 bp, Stenotrophomonas maltophilia
atgaactccaactgccgctgcatcaaagccagttacgcccacggatcggaccgcaaggtctctacgctgattcgcgtgggttgggtcctggtctcgctcactgcgtcggtcgtcgtaccgctgcgagtcgcagagatcgttgccgcgaaccgtcccggcgccgttttttgcgttgctgcaccgagtgacgcatctaccccgacctttgcagtttctcacgccaaccagaaccaaggaaacctgaaaagtgagtag

SEQ ID NO: 522186 - DNA, 249 bp, Stenotrophomonas maltophilia
atgcacgcaacaagggacacctggcgcagtaagcacaggctggtgcgccaactgaacacccttcggaagcgctatgagagccgtcttccgaaccgaggcttcagccttctcgatcatgccgaccaggcgactgtcctggtcgcattcccggacgtcgatcccctactgctgccggttaagcatcgtctccgctgcttgcaaggcggattcggctatcgcctagggacgcgcgcgaggttgccggcatga

SEQ ID NO: 522187 - DNA, 504 bp, Stenotrophomonas maltophilia
atggccgacgaccagcagctcgaacatatgaggcgcctgaccgcggcgaatggatggcgggcagtcgtcgcccgcgcgctgaaggatagggcgcctcggttcgacaaggcggcgttcgacacatactgggtcgaaggtggccaccgggtacgcgagcaagtcggggatgaccaccagctggctgcattcctacggctcagcctgtcgcgctataaggccgaggcgggcacgaagctggagctgtacaggggagagaacgtcgaccggctgaggctgggccaactgggcttcgcctggacgccggatagagaaactgcggagatgttcgccagtgggttgaatgcctgcggcagcggcggggttctcctccgcgcgctggtcggcgcagaaatcatcgcaggtccgtgtgcacacagcctgtaccttggcgagcatcagtacaccgttgatcccacggcagggttcccggtcgagacgctcgccgagttcccgccgaccttctga

SEQ ID NO: 522188 - DNA, 153 bp, Stenotrophomonas maltophilia
atgaacgacaaatggaatccgcggctgtggctgcgagactggttgaacaagccttcgaaggcagaaaggagggccgaagatattcattcggccctcatggatcaatgcaaagagacgagccttacggatcccatccaacagttgctgaaatga

SEQ ID NO: 522189 - DNA, 300 bp, Stenotrophomonas maltophilia
atgactgaaattgttggttttgacgagaagagcttcttggcgggatttgaggcacaagggaaacaacgcgcactcgagctgttgctatccgcgctgattgccacgcatccagagcctcccaagttccggatcgctatcgaccacttgatgagggaagaggagaacctcttctacaaggccgctgagtcacttgaaggcgattccgtctcatccgcacacgccatcggcaaagccaaatatgccgctatgcgcgacaaagctgaaaaggtcatttcagcaactgttggatgggatccgtaa

SEQ ID NO: 522190 - DNA, 429 bp, Stenotrophomonas maltophilia
atgctggacccactacgcccttacgccgacctgctcaagctgctggcggtcctggcgctggtcggcggcttgttcgttacgggctgccagcacggcagcgaccaccaggctgccaaggatcaggaaaccatcgccaaggccgacaacgcgcgcgctgccgcagaggctgacgctgcagagaaccttcgtgcggccaacgcctgcggcctcctgctggaggacgtgaaccggcagacgcaggcattgatcgatgctgcagcacgtcagagggcggcagccgatgaagctgcgcgccaggcggaagcggcggcagccgagagcaaacgccgtgccgagaaggcggagcaggcgctgcaggccgccaagagcaagccggcatgccggtcccaactggagatggccctatgcgccgacataccgctgctttga

SEQ ID NO: 522191 - DNA, 279 bp, Stenotrophomonas maltophilia
atgcgccgacataccgctgctttgatgctggtcgcggcactgccgctgtgcgggtttggcagctgcagcaaggctgccaagccggacattccgaaggtggtgtacgtcacggtggagaagccggtggcgccgccggcggcgctcacccagccgtgccccattgccagggcgcaggagcgaacggtggagcaggtggtgtcggcctacaacgccaacatcctgagcctgcagcagtgcaacaagcagctgggggagatccggcagctgggcagcaaatag

SEQ ID NO: 522192 - DNA, 516 bp, Stenotrophomonas maltophilia
atgtccaacatcatcaacctcgacttcaaggggagcgccgttcggttcaccgatgacggctggttccatgcaacctcggccgccgaccgtttcgggaagcgcgtccagcactacctggacaacgcagagacccaggaatacatggctgagttgacccgccagctaaatcaccgggattccggcgatttgatccgggcgactcgtggcaggggtggcggcacctggttccacccgaagctggcggtccacttcgcgcgctggctgagcaccgagttcgcagtctggtgcgacttgcagatcgacgagctgctgcgcaccggccagcgccgagctatgacggtctggcagcaactacaggcggcccaggtggcagagaaagactctgctgcgaagggctcctacggttcccgcctgatgaacaaccggaagcgagagaaggccgggctgcagcgtgagctggccaggctggaggcgcaggtggtcatcccgctgttcccgaacgaggctgcggcatga

SEQ ID NO: 522193 - DNA, 171 bp, Stenotrophomonas maltophilia
atgaactgggttgagggagttgtgtgcatcgccgccatcattggcctgtgcaccatcgttggtgcgatctgcacaacggtgcggtactggtgcggggagcgacagcgtcgctattacccgataccggcgccgccggaacggggcccgaccgctccacctggagaggaatga

SEQ ID NO: 522194 - DNA, 204 bp, Stenotrophomonas maltophilia
atgtggcagaccaaggacgtgcgtgcgtccagcatcaggcagggtatgcgctacgccgaacgctggtgcgcggcgagattgtacccggagatgcacctgcgggcggctttggcccggctgctggaaaccactccaagcgaaccgctcgaaccgcctccgggcctgccgccaacgctcgagcaacaccaacaagccggcgcctag

SEQ ID NO: 522195 - DNA, 750 bp, Stenotrophomonas maltophilia
gtggtcgcacaaagcagttcatcggtggggccgggcagatgggctgcacaggggccgctgcaagtacgtccctgtaagctcggtcgccgcatccatgcggctcacgcccctgtgcagcccatctgcccggccacggacacgttccgtgcgcgtccaccctcggagaagaaaaaagatcaaaagcgggtcgcgcgctgcgcttgctcgtgtagagccgagcccatgctcggcctcacggacgggccggaaagcagccgagcgtgggctcggttctacgaaaaatggcctgccaggctgcctttgcttttgatcttcttttctcttccgtgggtgacaggccaccgaaatctgtcagaggccggtcgggttgggtgcgcgggggtgtcagccgcatgggcccgaggcatgcctcgggcgggttgggcaggacgcccaacccgggtcttgccgtgtgcgcaggacagcgcacacgagcaagcggctgccaagcctccagggacggattcacggcgtcccccgcgcacccaactcgaccgacccgctcgcagcttctgctttcagcgaccaacccaaacccacccacgaggggctgcgccgttggctggaaactacaacccgatgccggcgtcgccctcaggctccagcgccttcaccagtaccgctgcctgtgtgcggctgtggcattcgagcttcttcaggatcgcagtgacatgtaccttcaccgtgttctcggccaaccccagcgtgtag

SEQ ID NO: 522196 - DNA, 177 bp, Stenotrophomonas maltophilia
atgaccgggttgcgtagcgcgtgtggcagcggtgggatcggcatcgggatcggcatcgggaccggcatcgggaccggcatcgggaccggcatcgggaccggcatcgggaccggcatcgggaccggcatcgggaccggcatcgggaccggcatcgggaccggtagagtcgactgttag

SEQ ID NO: 522197 - DNA, 600 bp, Stenotrophomonas maltophilia
atgacgcgcccaagacacggcgcgctatcacgcgccgtgtccgcgcatttttccttatccccgcgcctgtcggcgcgcccccttcaacaggaagggggattttctccagacacaattcctgatgcttccatccacgcatggcgtggatctaccgtgtcgaccaaggtcgacacctaccaacagttgcgcagaatgacgttcggacagatcgccggaacctgtcgaaggctgggtgggtccggttgcaggggcgtgagcgccatgggcccgaggcatgcctcgggcgggttgggcaggacgcccaaccccggtcttgccgtgtgcgcaggacagcgcacacgagcaagcggcgaccgagcttacagggacgtacttgcagcgtcccctgcaactggacccaccctgcctccccgcaggaagcccgctgttgctgttgctctagcctctgcgggtgccgggcgcagcccggccagccctctcaggcgaacagcggggcctggcgttgttccagccgcagcagcgcggccttggtttccagtccgccgccgaaaccggtcaatgcgccgttgctgccgatcacgcgatggcagggcaggatga

SEQ ID NO: 522198 - DNA, 507 bp, Stenotrophomonas maltophilia
atgagcgacgaagtccaaggatggcgctggaagctggaccgggacgggcagaggaagatcctcgaacggcttggcgatgactacccgcaggaagtgccggctgatttcctctatgagtgcgtccacccgaacctgctgctggcgaacatctcctaccttgaagagcatgagctgatcgctgcgacgtaccacgggccgaagtggcgagggaaccctgttctttcagcccggttgacgcataaggggttcgacttcattcaaggcgatggaggactcggcgccatccttggcatcgtgaacgtcaagatccatgaggacttcatcaaggatctgctcgccaacaagatcatggcatctgagctatcccagcctgataagcagaaatttgtcgatcagcttcgagagctgcctggcgagaccaccaaacacctgatgctgcggcttgttgatgcgggtctagagaactggcatcgagtacttccactgctccaaaacattctggcttga

SEQ ID NO: 522199 - DNA, 324 bp, Stenotrophomonas maltophilia
atggaaaccgcgatacttggagttgcagggacgatcgccctggccgttatcggctgggccgcaaaggccgccgtcagtgacccgcgcacgttccaatcagtgcgaccgttcattctggtcaccttcgggatgctggctttcttcggcctcgggctgctcgccgctcagtccatctcgccgagtggcagagtcctcgtcttcattggaagcagcgccgcattcggcgcccttctgctcctgcacgtccttgccacccacgtacaagccgagcgcgaaagccgaggacagaccgacaagaacggccagaagaacctcgatccctga

SEQ ID NO: 522200 - DNA, 168 bp, Stenotrophomonas maltophilia
atgggcaccatcgacagcaagacgcgttggcaggacaagaagggccgcacctggcgcgtcattcagaacctgcatttcggtcgttacctgtgcgcccttgaagatcgtccggccctctcgggctactggacctccaaggacattcgcgccgcgatggcggggggctga

SEQ ID NO: 522201 - DNA, 330 bp, Stenotrophomonas maltophilia
atgaacgcccttctcaacccgcacaacaccgagacgacctacgacggccgcgtttacccgtccccggcgattcaggacaggacggccgaggcggtctcctggctctgcacctcgccgagcgtgatgggcgagctggtgctgaccgacgacgaactgaccgcaatgtcggccgcactcaaagggtctgacgcaatcgaattcactcgcctgtatcaggccgcgatggaccgccacgttcaggacgaactggacgaatacaaggaccgctgcggcatccgcaacgagtcggactacgaggctgctactgccctcgtaaggattcactcatga

SEQ ID NO: 522202 - DNA, 366 bp, Stenotrophomonas maltophilia
atgaccgcagacgacttcatcacctacaccggagattccatccttcagccgccacgcgagtgggcgccaatcggctactcgccgaccaagttcatgatcgtcccagttactccgaacgaggaaatgcgcctcgctggggcagcagagcgcggcggctatttgcatcagttcgcggccatgttgaaggcgagcccatcggctaaatccatgcaccccgatttccgcttgcagctttccgcttggattgatgcaaacaagcaggcggccatcaattctccgcaacacgcagattggtcaaacggggtcgccgagggtgtgcggattgccctggaactcttcgataagcattgcggaggtgtggaatga

SEQ ID NO: 522203 - DNA, 297 bp, Stenotrophomonas maltophilia
atgaatgaccgcgttgatgtgcttggaaccatagtttcagcgcgagcaaggctcgttgattcgatccccgtacggcaggtatggacgaaggatcagatcgaggaaaacgacaacctgctcgaaacccatgaagtcgtttccgcgcttatcgaggctggcgcacgggtaaccgccgccttccgcaagctgggtgaaaccagcagtgcaaccaaggcgcgaactattcgtattgaatgcgaagatgcgatggtcgcactcgataatgccgtctcccgcgtcaaaggcggtgccgcatga

SEQ ID NO: 522204 - DNA, 300 bp, Stenotrophomonas maltophilia
atgaactgggaacccatcgagactgcgcccaaggatgtgccgctgctggttgcgtgcgccacatcctcggggaagcttgtccgcctgatcgccgccttctgctccaagcacacgcaggaagccagcgacgagtacatcgacgccgactggtgcgactacgacgagacaaccgacacctactactgccccgaaggctggtacgaacagatccggaattgggacgagctgagcgcggtacacatcagcgacatgaagccggtcctgtggcagcagctccctgaactgccggaggccgcatga

SEQ ID NO: 522205 - DNA, 255 bp, Stenotrophomonas maltophilia
atgaccacccacaacaagaccctggctgttgatgtgctggcggtgatggctcgggatgccactgcggcatggaatgaccgccgaggcgaccgagaaattcaggaatttcttggcgaggaatccaacgaagcccgcgctgcagtcgccgagctgatcgaggccgttgggctcctcagtgactccgcaaacccagagattgctgggtggagtgaagccgtaactgccctcgcccgcgtcaaaggagaatcagcatga

SEQ ID NO: 522206 - DNA, 264 bp, Stenotrophomonas maltophilia
atggctgatcctaccgaccaccgcgaggtcggccggcagctggccagcatcgaaggcgtgaacctggaatctgcctcgtcggcaacgcttcgcctgtgggatgcccgtggcatcgccctgatggctctagcacgaggcgaccaggccgaggcggagaaggtgatgcgccagttcaaaccggcaacgcgatcgtgcggcgggtgcggcgagacgaatcctgacaagcgctgtatcggctgcctgcatgacttcggggacgcgtga

SEQ ID NO: 522207 - DNA, 414 bp, Stenotrophomonas maltophilia
atgagtagggccactaccttctacgttgcaaagatcatggcccatgggcgttcgcgcgacctcaaggcaatgctcggcctctacctgatggtggagaagatccaagacaacggacagttcgccgtcatcggcacacagatgatgcacctttgctgctggacaaccaccaaagccacagcagaggggatgaaactggcggtagaggaagaagctatcgagcccgactcagtgcctggtgaggttgtcattcagtcgtcgtggccatgcgatgtgtcggggtggccgtcagctcgttccattgacacccctggcatagtgcaccttccccccgacgtcatggcggagttgtgccgtggacctgtcggcgtgaacactaccgcgcgcggagaggacgatagcaatggccgagcatga

SEQ ID NO: 522208 - DNA, 198 bp, Stenotrophomonas maltophilia
atgcgtaaggaaaaccctacccagcaaggaccgggagtaaaccggcccgccggatcgaaggtaatcaaccagagcgagggcggactgatccgcatcggcgacagcatcgacgttgtcgttctcaaggcacgcgacggccgcgcacgagttgtcatcagcgcgcccaggcatctggaaatcgccgctccaaaacagtga

SEQ ID NO: 522209 - DNA, 561 bp, Stenotrophomonas maltophilia
atgcccccgaagagtctgacgccgcgcgttcccggcgaagcgctgccgcccgccgagaccgatgcggccaccgccgccaacgccgctgaggctgtggatgccgccggcgtcgccactgaccatgccgaccagctccgcgcggaactggaggccatcgcctcgctcaacgtgcccgaggtactggaggctctgacgaccctcaaccgcgacgagctgatcctgctccacgccattgagacggacgggaagggccgcgtcaccgtgctgggcccgatcagcgaccagctggacgttctggcccagggcgagaacgaggccaacaccgctacggccggtggcaccggcgctgccgctggccagctgtccgacgcgctcggcaacggtgccgacgctgttggccctcgccagaagagcaagggcgaggttgctgcggaggctgaagctgcagcggcgtcgatccgtcggagttcaactggcggccccgtcaccaaggccgagcagccagccgccgtgctgaccgccgacggctgggtggtgcccgaacccgagccgaaggcctga

SEQ ID NO: 522210 - DNA, 315 bp, Stenotrophomonas maltophilia
atgggtcaaggtgcaatattcgcggggatgatggcagaggtgctgattccgcttctgctgctgttcccattgagctactacggaatggccaagcgtcgtggtcagaattacgggtggaagaggatcaccgcggcgttcatcgcggctcttctgggaggcgggctggtctacgcgactctttgcactgctctaggagtcggcactatgtcgccggagccgaccgtggatctatccaacatcctgatcctcgtggtccctctgcttgcatccgtccttgccctttgggcattcaagtcgaggccgccgaaggggtaa

SEQ ID NO: 522211 - DNA, 216 bp, Stenotrophomonas maltophilia
atgaacgctctcgccctgaatgctgccgtcgccaacgacgatgcggccacgcatgacctgttcagcgctgtgtgtcagttgcagcgcatccatacgatgccgatggccgcactgtcgcagctggtgaacgcgctggaacgccgacccggtgcactggaagcactctccgtaggccagttgttggccatggtccgtgatgcgcaggtgactgcatga

SEQ ID NO: 522212 - DNA, 285 bp, Stenotrophomonas maltophilia
atgagccaatccagagccttcctgcgctgcccgcattgcgatacgcccgccatcgtgcgcaccagcgtgctgcattccaaactgttgcgcgaatccgtgctccagtgccgcaatgcgctgtgcggtcacacgttctcggcctacaccgaaatcgtgcgtacgcatacgcagagtgcgtgcccgaggggggacgtctgcctgcccatcagcagctccgctgaacgcgccgcgctcagtgcacaggccgcgccagaacccgtgaccccacgcaaggcacggcgatga

SEQ ID NO: 522213 - DNA, 612 bp, Stenotrophomonas maltophilia
atggaagccacatcatcagacaagtacgtcgaagtcgggggtgatttcgcggaaatatttgatcaagccactctgctttcgatgctcaattctcacgatgaagcggcggtggctttgaaattccatttgatcatggaggagttcatcaacatctggtgttcaaagcgcacctacacagatgacttatttgcaggcatagacttcgttccattcaaaacgaagctagcgattgccaggaatctcggccttgagatcggaatcttcaaagccttggacaagttaaatactgcaagaaacagatactcccatcgactcaagtacaacatggcggccaatgacgttgagtcgctttcagctctgatcgataacgcagcaccagaacatcctgtcaacagctgctctagtttcgtcattgagagctccggcatcgatccgcaaggtcgcttggcgaagcagactcacagttggaactccggcaatccaaaaaagctattcatcatgtgcgttacattgacaatgaagacaactctttggattcagaaggagttcgacgatcgtggaatcagttacacacttacgacagggttgccgaagaatataaatctgtcgtga

SEQ ID NO: 522214 - DNA, 786 bp, Stenotrophomonas maltophilia
atggatggcataggcatagcgatggcaaagcttgcgggcatcaggaagggccttatcgccgccctggacgaaggtaagcggggcaatcccgccaaccctttcttgaaatccacctatgcccatccagatgcttttccctactttatgggcgtcgtcaaccaactgaagattcttaaagctgcgcaccccgacctttttggtgactttagggacatcgcggttctgccattggcaggagacaaggatggtaggcccactggaaagtatgcgcgttatcagcttgagcgactggttcgatcaattgatgaaattttcgagatccgcgcgaattgcgagctaactatgcctgccgcccttcccgcccaggttgagccacgtgtattcctaagccatggccgggcaccagactggcgtcaggttcagtcgttcatcgagaaggatgttggtatcccgaccctcgagcttgcccaagaagcaaacggcggcgccactatcatggaaaagctggagcgcggcgcagcccaatgcgatagcgcagtgattgtcatgaccggcgacgacgctgacagcgatggtcaagctcgcactcgcgagaacgtgatgcacgagatcggctacttccacggtcgctacggtaggtcgcgtgtgatcctcctgcacgaggatggcgtgagcattcccacgaatctggcgggggtggtctacgtgccattccccaaaggcctgatcactgccgttgagggcaccctgacccgggaactgcgcgcaatatacggcgcacggtaa

SEQ ID NO: 522215 - DNA, 318 bp, Stenotrophomonas maltophilia
atgacccaggtacatatcagccacccggaaggggtgccgaactgcgccgccggccaccgcgcgcgccacatccacgacaagcgctgcgcctccgccggcggtggccacctggtcgagtgcgcctgcaggtcgaccagcaagcatgccgatcccgacgcagccatcgcggcatggcgccggctcaaccgtccagagcgcagcgcgcgcccagctgccctgcctgttgcggccgacaacgttgtgcagttcaagctcggcttggcagaacaatcgtcgccgataaagcgcgaggcgggagttggctatgggcgcggctga

SEQ ID NO: 522216 - DNA, 195 bp, Stenotrophomonas maltophilia
atgaccggtgccgccctggccaagcacgtcgcccgcgtgctgctgaccgaatgccgggcacggcggaatggccatggcttctggttcgcgttcaacgctgcacagcgtgcacgcatgcgcgccgctacccccaccccgccggcggcaccgccgcgcgcgccggcactgcctgcccaactggacctattcgcatga

SEQ ID NO: 522217 - DNA, 1104 bp, Stenotrophomonas maltophilia
atgagcaacgacaagacaaccctggcggacgtgcagcccggtgggatggtgaggctggggaacggatggaccggctgggccacccagtaccccggcaagatgccgaagctctacggcgcacgcgaaatcgccgaggtgaaccatcacccggacgaaggacagtggctgattttcctgtcggagaatccagtgcacgtcgggaatctggttgatgcaacgcgcaccgctctcccgtttgtggccttcgcatactcgaagggcgtggacggcgccgaggaagctggtcgtgccatcgaagccgccctctccgcccagccctccccgggtggtcagcagagtgcgtggatcctacccgacgatgcccgcatcgtcggcgtcatcgcggacaacattgagcggggcaagctcgatcatccgggcttctaccggaacacccaacttggagaggttctgcggcgcgtgctctctgccgccctcgccgcccgccagccggtggaaactggtgacgcatacgcgaccatccttgacgccgttaaccgtagctcaccgaagcgtggcaacgattgcgattggccggggacgcaggttctcaccgagcgtgagcgcgagttcatcgcaggcgcggtgcattccgctgtacatccgatgatcgcccgccagccggtgggggagccggtggccttccaactcgctggatcggaaccgctgtggtgcctgcatgttctcggaatggatgacgtgcacccggctccgagcaaggcacatgccgagaaagctgctgcgtggcacaacgagcagttcaaggaccaagctgagcgcctcggtatcagtattgaggccaaagtggtgccctggccgcatagcgctgaatcccacgctgccggcgtggccgaattcatcccgcaatggctgatcccgcaatggcagttggacgcgctggaagcaaacgccgcccagcccgcgcaggcagtggacctggggctgttccgcgaggcggttgcatacgccgctcgttcggccgactttgccactcacgtggaaatcgggagcaagctgcgcgaactgctggccctgatcgacagccaggcggtgggcaatggctga

SEQ ID NO: 522218 - DNA, 246 bp, Stenotrophomonas maltophilia
atggaaacccctgtgtcgagttcggggccgcaacctatgactgatttttcgaaattcgatgaccggctccgtgcggtcgaacttgatgttgcgaccatcaaggagcgcatcactcatatgcccactaccatgaagatgtgggtggcgattgccaccatcacgattccggtgggtgctgccgtcgtgggcatcttgagctgggtccttcagaacatgcttgaaccgcttttgaaggcggcgacgtaa

SEQ ID NO: 522219 - DNA, 468 bp, Stenotrophomonas maltophilia
atgcaaggcggcaaaattatccccatccgatttgtcgattcactaggcaatcccgccaaccccattggtgattcccagcacgcgattccggttatggatctgcgtattctccattgggataccgatttcttgtcggtcaatgcttcaggaacagatgttcgcgccctcgtcgatacaggcgcagacttcaattacgctcagcgccatttcgtcacacagcacgggtgtccggtgcagtacgacctggacttgcatagcgctacgcaagtggcgcaggccagttcgcttcacaaatgcatgctgcgttttcgccatttggcactgaacatcgagaccgacatagtgtcagctgatcttcgcgggagctccgcctaccagatcatcctgggcaggctgttcttcaagctcggtaggctcactatggactatccaggccagcgcttcgagtttgagatcccggcagcctga

SEQ ID NO: 522220 - DNA, 969 bp, Stenotrophomonas maltophilia
atgctcggcggcgacggccgaaacaaccagatcctgctcgccctatggaaggccaggagcgtgctggagcacgaccaggataacgaggcagtcatatactgcgtagaggaacctgaagcgcacttgcatcctcatcaacaacgaaagctagcgagctatttgattagtgctctgcccgggcagaccatcgtcaccactcattcaccacagattgctgctagctaccgtcccgattccatcgtgcgcatgttgcggaagaatggggcttctagagcagcgagcaatgggtgctcgtcctgcatcaatgatgcgtggacgaagcttggttaccgcatcagcatcctccctgccgaagcattcttcgcatcagcaatcatgcttgttgaaggtccttcggaaatgcttttctacggtgcattggcgagggtgaacggctacgaccttgactacagcaacgtctcaattctttcggttgatggggtcgcatttgaagtttaccgacatgtgctggatgcattggagattccgtgggcaatgcggacggacaatgatgtttccgacctaaagctaggtccccgcgatgcgcaagtgacgcaccgccagttggctggcatcaatcgtgctctttcgcttgccggcatgcctctcaaggcccaccagttgcccccttacgatcaggcttcgaccttgacggatggtacgtggcaggacgtcagcaatgccgtttctcctttcggaatctacctatcgcaggtagatcttgagaacgacattgccatcgaattacctcaactcctcaatggctttggtgggaatacccttcagcaggctatccaataccttcaaaagaagaaagctacacgtatgcaggagtttgttgtccattgtggtagcagccttattgcctcgccacaggggaacctgcttaagccactgatatattgtatgagcgcggcggagcagacctag

SEQ ID NO: 522221 - DNA, 1629 bp, Stenotrophomonas maltophilia
atgaactcattcacaccgagcgtggagcaagacagggccgtcctgtacaagggcgacatggtcgttatcgctcgccccggaagcggcaagactagcgtcgtatctcgcaagatacgggataccgtatctcggctaaaaggtcatcagggcatcatcgccatttcgtttaccaataaagcgagcgacgaattggagcgacggtgtaaagccggtgccttcgacgttaagggctcattcttcggaacaattgatgaattttgcctccgagagattgtgttcccgttctccaagcacttgatggcggtcgctaccgaaatgagtacggcacgactgtccgaactccccggaacattgtgctcaatgcttcccttgaaacctctccaggacgcaacgttagaggaaacaagagactaccttcccttcttgcgtcaggcactaattgacggctatgtgccgcttgaaggtgtgggcatgcttgcgcgatacgtagtggagaattcaattgcgtgcaggaggtacctcgctgcgcgctacgaggctgtttacgttgacgaataccaggacagtggatacttccagcatcagcttttcctcaagctccgtgacttggggttgaccgctgtcgcggttggcgatagcgaccaatcaatcttcggatttgccaagaaggattccgtccacctgctttcgctggcagcggagagcagtggatttgcccagttcccaatcaccacgaactttcgcagccaccgctctatcaatgatttcgcgcttcgccttcttgacgccaaccatccgattgctccaacagatgatatgcgtgtctttataaaaaaggtcattggggatcagcgagctatggggaattggctaacttcagctatccccatatatatgtctcactatgcggtctcttcggctgatagagttgccgttctgtgccgtcatcagcactctgcgcgaatgatcgcagatgagctgaagattccatatcatcttgttgaagatcggccgttcaacgcaacccctgggggcgaggccaatcttttttcagatctgctcagactacgccacgactctctacttacggcggaagcgctgatcgataggtttgtgcgcagaaagctaccgctcaaacatctccgcgtgatccgaaagatggtgctgggctgcaggagctgctctgaacaggatcttgtcaggacggtattgaatgcgtcggagaccttgctggacaaaaagccttcagtggagggggagcaggagcttatggcgatctgtgatgactacgcaaagcttcgttggttcagcaccccgcccagcgatgctgtgcagatcatgacattacacaaggcgaaagggctcgagttcgacttggtgttccatgcagacctttacgatcacgtgatgccaacccgccggtatccaccgaatacgtatggccaggtcatttatgagaacgaaattcagtgcttgaacctgcattacgttggggttactcgcgctattcaggcgtgtactctcatgacatctagctcgcgcgtcaatagccaaggggcagttaagtccggagctccctcccagttcataggcagacatggcaccaacgcgatagagatttcttggtag

SEQ ID NO: 522222 - DNA, 312 bp, Stenotrophomonas maltophilia
atggtcgccaccaaagtccccctgtctgactttccgctatccgtgatcagcctcgcagagctcctgcgcgagggcagagacggagaggaggcgacgttcacagaccaggccatcgctgattggtgctacgagctattcgctgcaatagatagctggactgaagtcaggagcgggcacgtcgaggttgtgagggcgcgggaagttgcgtacgacgtcgcattgcagttcgaagccgattttcttaacgccaagggtagggatttggatgctgagctctatcaatcgtggctgaaacggctagaacacaggtag

SEQ ID NO: 522223 - DNA, 1275 bp, Stenotrophomonas maltophilia
atggcagctaggttggttgtaagggatttccttagtattacaagcgcagacattgagctctcgactctaactgtcgtcatcggaccgtccgcgagcggaaagagtgttctttccaagctcgcattcttctttaacgaactcttcaatgagcagtggcaggttctggaagaatccaagggactggaccacttcaagactcatgtgaaagaaaaattcaaagaatggttcccggtccaggcgtgggggcaaggaaagttccagctcgaattctatgcgggcgattttcaggtaagaatcagtcgaattgagtatagaaagaaacttggcgagaacatgagggtttggttctctccgtactttgaagagcaatacgacgcagcattggctatgacaaagcaggcatcgaggctgtctgacgatgcggtggaatctcatcgtgccatggcagtttcttatgagcttagagagaatgtaaggaagctaaatcgccggcgtttgggtgagaatttcagtgaaagtcagatatttatccctgctggtcgatccttcttcactagtattgggaagagcatcgtagctttcgagcacggtcgtatccttgatcctctcattctaaggtttggtaggttctattctggacttagagagaggaggtttatgccgcctctttctcgtacagcctctcatctcgcatcaaaattggatgctcttatgagcggaacgctggtagttgaaaggaataaggaatatctaaagacagctgacggacggcgagttccgctatcagcgatgtcgtccggtcagcaagagctgatgcccctgatggtcgctctcaagagtaggattggctacgctgagaggtttgggttgcgccagcagatttttatagaagagccggaggcacatttgtttccatcggcgcagagtacccttgtggaggtgttctcccactttatcgccttatcaaaaggacggtcaaagttgatggtaacgacgcacagcccttatgttctggccaaaataaataatctaataaaggctaggggtgtcgctgggcgcaaggggtctcgccggcattcggaggttcaggagatagttaaggaggactactggcttgatggtgataaagttaacgcttacgcgatccaggcaggcgttgtaacgagaattcaggacgaagatgacggaatgattgaggctgattatcttgatgaggtatccggtcagattgcttcggaattctcaaggatccttggtgtggagtattctcgatga

SEQ ID NO: 522224 - DNA, 369 bp, Stenotrophomonas maltophilia
atgagcgcaacgaagctacccggtgtgaacacccgccgcgatccagccaacgccgatcacgagaatgacccctcgccctttcctcttggatttgtcgccacgctgcatcgcattggcgcgggcgccgctgccgacgggcagccttggcccgagcgcaatctgagcctggggcgcagcacccagatggctgatgcggattgtgcgctgggcggtttacgcgtggtggcggagctgatgctggcggcggagcgcacgcggcagaatgggtcagacgaagagtatgtgggagatcgggtgatggaggggctgaagatggcttgtgtggcgttgactgtgatgattactgagcggctgcaggtgactacttag

SEQ ID NO: 522225 - DNA, 309 bp, Stenotrophomonas maltophilia
atgctcaaggactatccggagcatatcgaacgattgcaggaagtcctcaatcgatcagttgagcgatcacgccaaattccactgatgcctttcgatgacgcgatctctgctttggatggaaggctgggaactttcgttatggaagctcgcgccgaacttgcggctgccgagaaatcggcagacccaaaggcgatggctcaggcccatgagaaggagcgactgatgtcgttcgctaggtcccgcaacatcggcatggccgaaattgacgatttatgggagtactttaaagtcaacttcaggagactgtga

SEQ ID NO: 522226 - DNA, 189 bp, Stenotrophomonas maltophilia
atggtcaccgccatgcccggtttgaccacccgtgcattgcgcgcgccgctgtcagccaccagtttcttgatcgtggcttcgtcggcggtcctgccggtgaaggcgtccagcgcctccggtttgcattcgtgcgcggcatcggccacgggcgctggcgcgggatcatgggaggtgctgctgccggcatga

SEQ ID NO: 522227 - DNA, 519 bp, Stenotrophomonas maltophilia
atgccgatctccgcaacgccccgtccaacgggatcttcgggcaacgcacctgccgtcaccaacggcaaggcgctggccgtggtcaccacgatcttcttcatgtggggcttcctgacctgcctcaatgacatcctgatcccgcacctgaaggcggtgttcgagctgaactacgccaaggcgatgctggtgcagttcaccttcttcggcacctatttcctgatgtcgctgccggcgggtcggctggtggcggcgctgggctacaagaagggcatcgtggccggcctggtgattgccggtatcggtgcgctgggcttctggccggcggccgagctgcgcgtgtatggcgccttcctgggcgcactgttcgttctggccaccggcatcaccgtgctgcaggttgctgcgaacccctacgtcgcgctgctgggcccggagcagaccagctccagtcgcctgaccctggcgcaggcactgaactcgctgggcacggccatcgcccgatcttcggcggcatgctga

SEQ ID NO: 522228 - DNA, 1080 bp, Stenotrophomonas maltophilia
atgtctggcacctttgcccctagaacctttgacgcctttcggactcacgccccccgatttccgtacggtcaaggcgccaagcacggcaccctctttccaatagatgacccctttggtttgcgccgggcggtcgtacccgtgttccagcgcgatgtggacgggtctatacgcggagctggcaccgccttccatgttgacggctggggccgactactgactgcggaccacgtagtggactgcgtccgcgcccggcatctgcgccagatcaaaccggatgcccgaatcagcgcagacattaccaagtcgccccactccaccgttctacttggctatggggttgtatttggaactgtgggcatacctgagccatgttgggcccctatccagcgtgtggacgccatcgttgcgcagaagagagctaatccgctctcagagctacagggtgatgccggctttcaaattggccccgatatcgccggcgttagcatcttgctagatgctgacgcaccttcgttccacacagtggccgtgaatttcggctaccgccccaacgttggtgagatggtgttcgcggtcggataccccgagcttcacttcgaggcaatgagcgcggatgagatcgcgcgctatctgcgagagggaatgttcggggtctacggaaccgtcacagatctgttccccgatgggcgaggcgcagcacatccatcaccagttttcgaagttgaagcggattggccgtccgggatgagcggcgggcccgttttcaataggtttggcgaagtgatagggatagtcagttcttcatgggagccgagcgacggagcgccgggccttggctacgcaacatgcttggccatggtcccagaagcgcctcaacttgccccgacgctagatgacacaaaccctggccgtcgctggggcttctgcgtctacaactctgaaaccttccagctcgcggacgtggcaagctcgcaaggtcatgccgaagccttgttagcccagctgcctcccggccacctagtccggcggggaagtcacctgatgggcggatatgacttcatgactggcgacgctgagtga

SEQ ID NO: 522229 - DNA, 348 bp, Stenotrophomonas maltophilia
atgagcaagaaccagcacatcggatcaagctttgacgacttcctggagtcggaagggctgcttgaagagtccgcatctgtcgcggtcaagcgtgtgatcgcctggcaggttgctgaggccatgaaggtggccaaggtcagcaagtccgacttggccaagcgcatgaataccagccggtcgcagttggatcgcgtgctggatgaggcggataccgggctcaccctcgatacgctcagccgtgcagccaccgcccttggctatcggattcacgttgacctggtcccacccaagcaacagggtggcaagcagcgaaagaacgtggccgagcccaccatctgcgcggcatga

SEQ ID NO: 522230 - DNA, 648 bp, Stenotrophomonas maltophilia
atggcgcagtacatgcgtcgtggtgtgcaacccggtgagttctttcaggtgcgagccggacgggccgagcgtgaatttgcacctggctcggtgcaccagctgcgcgaggccgataccgatcaggaaatctacgggttgccggaatggctggccgttgtgcagtcggcgctgctcaacgaatcggccacattgttccgccgcaggtactacaccaacggctcgcacgctgggttcatcctctacatgaccgacccgcagccggagggcatggacgtggatgcgctgcgtgaggctctgcgagactcgcgtgggccgggcaatttccgcaacctgttcgtgcactcgcccaacggcaagaaggatggcttgcagctgatcccgatcagcgaagtggccgcaaaggatgagttcaccggaatcaagcgcgtgacccgtgatgacattctggccgcgctgcgtatcccgccgcagctgctgggtatcgtcccccagaatgcgggtggattcggctcgatacgggatgcggcaacggtgtgggcgtcgatggaactggcacccctgcaatcgcggatggccatggttaacgaatggatcggcgaggaggtcattaccttcgccccgtttgacctggcgcctgtaacaacctga

SEQ ID NO: 522231 - DNA, 318 bp, Stenotrophomonas maltophilia
atgttctctgccacggcttgggaggcttcgtcagttcagatgaagtccaccgaagtgcgaaccttcagccatcccgagaaacagctcaagaagaccttctgcatttcctgcggcgaggttgtgttcggcacgaaccgtctgggtatgtgtgtagtgtccaatgccatgcttgcccgcgcagccggtggggggctggacgtggcagtggcgcccacgatgcacctctactatcggcagcgggtaattgaggttcttgatgagttgccgaagtacctcgatggctgggacggccctacgtaccagcagccggcggcatga

SEQ ID NO: 522232 - DNA, 504 bp, Stenotrophomonas maltophilia
atgcgctcttccaacggcttccgcactgccccgatcccctctggctgggtccagaccggcgagcgctgggcgctttggtacaacggccgcgagacggccagcgtcacgcccgacggcggtccgggggtgcgcctgtggatggaaggccagaagttctgggatgtgaaggaagtacgggccgccaacgtccggcaggcaaagcggtatggcgagcgctggtgcgccgcccggctgtatcccgagctgcctctgcgcgaggccgtcgcccggctgaccgactgcacgccgatccagctgcccccgccactgcctggcctgcctccaacccgcgagcagcggcaacaggcccggcgcctggcggaggccggagcgaaggagatcgagcggatcaaggcagcgctggagccgcgcaagccgcctgtagagacgaagccccgagcgagggacgtccgcagcaaggcgcggttgagggcagggctggagcagcttcgtcggggtgtctga

SEQ ID NO: 522233 - DNA, 1122 bp, Stenotrophomonas maltophilia
atggctggcaggtcgcgatttctgagtctcgcgatctacccgcccctccggcttcccaggcgcttggctccttgcacagttcctgacctggcaactgcagccggtcattcctgtgctatgaatacccagccttgcttcaaggctctttcagagattggaaggatgcgcaggttcgggggaactgcaggcggcgtgtttacccgcttcaggagatgtggagatcgaattcgcaagctgggggcatcaggcgcctggctgtgttgtgtgctgctgatcggccttggcctgtcgccaatcgcagtcgcccagaccactgtgacgtacatccacactgacgccctggactcggtcgtggctgagagcgatgccaacggcaatgtgatcaagcgctatgactacgagccctacggggccgtggtcggtggtcaggtcacggacgggcctgggtataccgggcatgtgagcgactcggctaccgggctgagctacatgcagcagcggtacatggacccgcagttgggggtgttcctgtcggttgatcctgtgacggcgtatgagcagcctgtggggcagttcaatcggtaccggtatgccaacgggaatccctacaaattcaccgatcctgatgggcgggccgtcacgtgcgatgaaaagcggtgtgctggtgaggtcaataccatagccgatgctctagctcttcctgtcattctaacggtggcctacggcggtcggttgctttcaaacctgatcgatacggttcaacgaaatgagtcggctgatccgtccggctctacagcagcccccagtggcacgaatccaccggcattgccagtggatctggtaggtgatcagagcagccccttggcagggccgaataagaacggcacgcggcatacaagtggcaatctgaagccggagttcggtggcaccgggaactacgacgaagacctcgagactctcgccggagaaacaaggcccgcggttcgcggtgatagtgctcctcccggggcacagatcggagaaaatggtgtttttggtcgccagacaaacagttccggtggcaagagtatcgacatccctgcaaacggtagtaaaccgcatgaaaccctacactacgattga

SEQ ID NO: 522234 - DNA, 3069 bp, Stenotrophomonas maltophilia
gtgaggagaatgcgaattccgggagtacgtcgcgaaacctggttcgccttccttcttgcactggtggcgatgctgctgggggttggggacgcctacgcgcaggcttccttgcgcctgaccgcgcccggcgggacgaccttcaccgcaccttccggcttcgatctcaagctcgaggccagaagcggtggcaatggcaaaacaatggaggtcgtggagttctactggctcaagcgcaacggggttcgaatcgattttgatgaggcgttgcccacacggatctattcggaaggcgagttgcctgctggcgtgtatacctacacgcttgaggggcgcgccatgtatcacgacccggtcaatggcaatgagcgatacaagaccatcttcccgattccaacgctgaccatcaccgttgttgcaggaagtggaggtattagcgcctcatccggaacctgcaccattccatgggggcagagcagttgcccggtgacgatcagctggaactccaatgctcccgccgcgcgcgtgctggtgtctgcgctggacaacagcggtatgcaggtgatcgggcaagggcaatccggaacggtcaccggctgggtcacggcggccgggcagcggttccatctgatgaacggctcggcgacgttcgcgacgaccgaatcacgcggcgtgccgaccatcaatcagcctccggttgtgagcgtcgcttcgccggttgcaggcgccatgttcccggcaggcgcgggtgtccctatcaacgtgtcagcgagtgatggcgatgatgggatcagtcgggttgagctcaaggtggatggcgccaccatcgcgacgttccaatcgccgccctatgccagtcgcatagccagcctggcgccggggacgcacaccgtggtggttgtcgccactgatacgcgtggcgcttcgacgacgtcggtaccagtcagctttacggtgtctaccgtgccaggtgtgacgttgacgcgtcgttacgtctacgacgggcagcaacgactgtgcaaagtcatcgagcctgaaaccggctcgacggtgatggcgtacgacgcagcaggcaacctggcctggagcgcagccggcctggatctgcccagcgcgacaagttgtgatctggccgttgccgaagccagtggacgcgtggttcgtcgcagctacgacgcacggaatcgattggccacgctgcgcttcccggatcgcaatggcgatgtcgactacagctacaccgccgatggactggtacagcaggccatcgcctacaacgacgctggcagcacctcggctaccactcagtaccagtacaacaagcgacgtctgctggtgggtgagaccctgtcccagtccggtgcagtgccgcggagcctggggtatacctacaacgccaatgggcatctggcgggtcatgtctatcccgctggccgcccggtcgactacgctccgaatgccatggggaagccaacgcgtgtcggcgactacgtcacgggcgttagctactatgccaatggtggaatcaaacagttcacgtatggaaatggtgtggtccacacggctacccagaacgcgcggcgccttcctgcgcgcattgtggacagcaacatcgttgccctggagacatcgtttgatccgaatggcaacgttgtcgccatcgcagacctgcagttgggcaccgactacagccgccagatgcagtatgacgatcgagaccgtcttgttgtggccggaagcccgatgttcggcggagcgggttggcaccgcttccgttatgacgccctggacaacatccgcagttggtcacttgatggggtcaaggccgaccagtactggtatgacgcgcacaaccggttgaccaacatccgcaacgacaacggggcgaccactgttggcctggcctatgacgtccagggcaatctggccaacaagaatggccagggctttcgctttgactatggcaatcgcctgagggaggcggtgggcaaggccagctatcgctatgacgcggacgggctgcgcgtgcttgccacgcggactgacggggcggcagaggagtctctctatcgtcgcggaggacagctcgtctatcagttcaaccgtggtagcggcctgcagaccgaaaccttgtatctggacagcaaggcagttgcgcagctggagacggtgtctggcgcaaccacggtcaagtacctgcacacggacgcgctgggcagcccggttgccagcaccgggagtgcgggacagctgcttgagcggacgcactacgaaccctacggcaggcccatcaatcgaacggtggatggggtcgggtacaccggtcacaagatggatggcgataccgggctgagttacatgcagcagcggtacatggacccgcagctgggggtgttcctgtcggttgatccggtgacggcgtatgagcagccggttgggcagttcaatcggtatcggtatgcgaacgggaatccgtacaagttcacggacccggatggaagagtcccggtaatgcccttcatctacggtgccgtcttgggcggccttgcagatatcgtggtccagaaggccatgaatccggataagcccattgataaagtggaggttggcattgccgccgccgttggctctgtttccgggggcgctggtggactagccgttgctgcggtcggttccggcacgatttcggttgggcgtgcagttgcaatacaggccgtggtcaatgcggttgcaggtggtgctggttccgccgcagagagcgcaatcaaaggccagcccatcacggcggagggcgtcgcttcaaatgcgattggcagtgccgttggaggattgggagcctccggtgttggcgttgccatgggtgatttcgctggcccagcttcacgaggaacactcaaaaggctgagtcaatcccgcggcccaggcggaccgaacatggcaagtgccactgcatcaactggaactgcaattccgaggcaatcagcattccagggcggggcttcccaagcgggccaaggcgtcgcgggagcaggggcaactatcgtacagaaagatctggagaagaagaaatga

SEQ ID NO: 522235 - DNA, 759 bp, Stenotrophomonas maltophilia
atgaaaattgacttcgttcaactcaagcaataccgaaactttgccgacgcccacatcaatttagcgaagaacagcttggtgattggcggtaacgacgtcggaaagacgaacatgatccatgcgctgaggctgcttctcgacaaaagtctgtcggacgctgatatcgagccatcggcgcacgacttccactgcacgccaggcggcactcaagctgacgcgtttactatccgcgtcggcttctcagacgtaactgaggatgcagtgctctcgcagctcaagggatttatcagcgcggatgcaaggttcttccttgaattcagggccttcagtgatgattaccggtatgaagttgcggcagggcatgatcctgatgccttggaggtaatccctagtcgcttttacctgaagtatctacatctcaagtacattcactcccaacgcgatcttgctcgatacatacggtccgagaagaggcatctgctaaggctctctcaagcagcgcgagcgcaggaagctgcggaagccgacagcctgaagatggagagaatcaacgatctgttgggctcagtgaaccaaggtgtgagggacttacattacgtatctgaggcaacgaaagagctgaatcaggagctcaaagcgctttcccaccatcacgcggagtacaaggtttcgctggataccggcgccatcggcgtggagcagttcatcgagcaattggaactaggtggggttctaccccgaaatcacggacggttgtaa

SEQ ID NO: 522236 - DNA, 627 bp, Stenotrophomonas maltophilia
atgccgctgccgaagttcgatgatcttcctttcaatgcgcggccagatctctcgccgtatctgatacaccttacaaagaacaccaagaaggatgatggctacactgcatacgacaatttagttcatatcctgaagacaggcttgatctgggggagcacgtcgcagagcgggatgattaagggcaagagcccggcagcctgctttatggatgttccgctgtcctcactgaagtacgtactgactccagaaaattctgatccacaaaagccaaggtacgagccatacggaatcgcagttacaaagaggtacggtcacgagaatggatgccgcccggtgctgtatttgtctgatacagagacaaaggaccttgggattcctgctggcgagctgtggcgtgttgtgaggttcgaggtcagtaaggacggctgggtaagctggttgcatgagagagaatggaggtgtaagggcgacttctccctgcctgagtccattcaggctgcctttgttcgcaactcgaaagaagcaagcaagctaaccaagctcctgactgaaaagcctgacgagttcaagtgcattcctaggtcggttatccccatgacggttctttgccaagggcttttgaaataa

SEQ ID NO: 522237 - DNA, 786 bp, Stenotrophomonas maltophilia
atgacccacattcgtcgctacttcaactccatctccgactcaatctatgcggccggcacccgcgcggggtccgccactcatcgtccgggaataggcacaaaacgtgagataatcctaagagactttctggcaaaacatttgccgcgtcgcctggccgcaagcctagggggtcaagttatctcgcatgcaagcaattcaatgtcccggcagattgatgttattgtcaccaatgacttaggagttcgcttcgaagaagatgaagcaaccctagttacagcagagagcgtcgcctcttgcatctctgtcaagagcgcactggatactgcatcactcaatgacgccttaatcaatcttctttctgttcccgatccgtcatcttcagtagtttctttcccggccctcaggaatgatccctacccatcttttcttaagagacatcctacttatttcatctttgcctacgatggatttagtgggaaagcgtgccaagaggcactcaataatttcgtcaaagcaaatccaaatacgccctttcaccggcttccgaaagctgtaattgtgaacgcgaagtacatgattacgttctctgtcaatgcgcgcacagaacacaatggcaaggcgattcctgccaactcatttcattgggcggatacgtctggagaatacagagggtttcccttctgcgctctattgagtgatatctctagctatgccagctggctgaatcatatggatacttccatttacccttacttcaatgccggctacgaccttgcatccgtatag

SEQ ID NO: 522238 - DNA, 672 bp, Stenotrophomonas maltophilia
atggcaaaggcagcggtggagattctgagcgacgctgggaccatgctgattagcgaggacaccccgtcgctcgtactgaagcagaaaatacgcatcgacgtttcaccggtgatctaccccggcaataacccgggtggcaactggaagtatgcggagatggtgatcaatgctgaggctccgatggtggcattcatcggcgacccgtacccgttcttcccgcagcttcaggagatcggtgcgaaccagttcaggctgacgctgtggacgaacacgcccgcgcgcctgcagggctgggcctacgtgttcgatcgccccgccaacgaggatgcgcagtatctggcattgtgggatgcgaacggccggctgacgtacgcgctgggtgcaaagcccatgcggatcatcggtgtaggcggcgtcttccccaatggtggtatggaagaggataggttccctgacttcaccggcaagacggtcgccggggtgatctgcgcgccggcgaccagcacgttccagaacagcttcaccgtgatggggatcggcaacgggcagggcgttagcgggaagcacggcctgttcggtaacgccatcaccattccgaagattggaacaggcggctcgccaaaccaggccgtggtcgggatcgtgatggcggtggacgtgacgaactactga

SEQ ID NO: 522239 - DNA, 759 bp, Stenotrophomonas maltophilia
atgggttgcgtctgcacggggagtcgttccgatgcggttattggcagcgtcgaagaactccatctgcgcaaacactgcaccgcgaacgttgttgcggtacatgtctacgcttccggtgaacggagtgtaggaagctccaccgaaggggactgcttggaacaggtagcggtagtcaccagggcgagcgaggagttgcagaaatgtaccgctccaatcggtgtagctaacaataatcccatcagtacctacccaattcgtcagaccgtccgaccacttcgggttctggagcaggttcgggttggacgagtccaaccttgcctcaagccggcctgtctgcgtcgcctgcgcggcgaggccctgttcagtctccgtgacgcgcgtcgtcaacccgccaatcgccgatgcgttggcgttggtcttgccatccacatcgccaacacgcgacgacaactgcatgagctgctcagcctgactgtcaagtcgcccaccttgctgtgtcacctgggtggtgagcccacggatagccgaggaattggcaagttccttgccttccagatccgtgaccttcccgcctatctgagtgagttgctgtgtgtgggcggagatcgtatcgccgtgctggcttaccgtagatgcaagcccgctgatagccgacgaattggcggcgacgccgccctccgtgaaggccactcgatcggtaaggctggtgaggctctgcgagtttgcccgtacctgcccgtcgatcgtattcacctctga

SEQ ID NO: 522240 - DNA, 453 bp, Stenotrophomonas maltophilia
atggataccgccaacgatctgcttgacaaagtgaaggccgcttgcaacttcccgtccgacaacgttttggcgcagaagatcggacttacgcgagcaatggtcagttcgtggcgacatgggcgccatccgatcccggatgagcgaattgcgcagatgtgtgccttggcaaagctcgatgggccaacgtggattgccatgctccacgcggaacgtgcgcagactgcgactgagcgtgccttgtggcgtctcatgctggacaggctgagcgcggcggctgcggtcgtcgcgctggtggcgctgtcgttgcccagcatcggaaacgcaaaaaccggccaaaatcaggcggttagcgcgggtctactgacccattctgtatattatgttcgaagcatctgggccagactggcacggagcttgcctcgaccctcggccctgctgtggcatggagcctga

SEQ ID NO: 522241 - DNA, 1293 bp, Stenotrophomonas maltophilia
atgatcttcggccatgaagggttgccgcgcagcggcaagagctacgaggcagtgctccaccacatcctgcccgcgctgcgcgctaagcggcacgtgtacgtgcgccttaacggcgtaggtgagaggctggacaagattgcggctcacctcgggatgcctgaggaagaagtgcgtgatcttgtccacgtgatgggcgacaaggaggtggttgactggtgtgtatgcgacacggacaacgacggcgctatctcgttcccgcacatcgagaagcatgctctagtcgtgatcgatgaggcgcatgagtactggcccacgaacagggccaatttgccggagcgcacggccaacttcttcgcgaagcacggccacattagcctggacatggtgatcatttcgcaggactgcaaagacctgcaccggctgatcattcgccgcatggcgaagaagaacacgtataccaagctcgatgcgctgggctccgatcagcgctattcggtgaggttctacgccgccaccggcaccggcaagtacgagacggtaggcaccgaggttcgcaagtacgatccggccatctgggagctttaccacggcgtgcagccgggcattgagtcaaacgaggtctacaagggcaacacccgcaccttgtggaagacactgcgggggccctcaatcgtgatggggcttgcactcgttatcggcgttgtcatgttcctgcgattcttcttcgctggtggctcaaccggcgaggaaagcaagctgaaagaggttgtgaagtcgcagaaagccgcgattccggcaatcgcgcaagcgcccggcgcacagccggccaccgtggtcacgaaggtggtggacaccccgaagtccaaggagaaaatgcccgcaggcgtgcagtacatcctcgacatggcggccaatgccagggcgcggcacgcaggttggtacgggcaccgggatatcgtggagttccgagcatcggggggagggcaggtgctcgacagattcactacggagcagctgtgggcgctgggctggtccgtaaaacggacagagtttggtgtgctgctgtcagcgaaaggccatgagatcatcgcgaccacttggcccgtggatccgttcggcgaacagtccgattcaactaccgagcgcataagggctgcggcggggtcgcctgtgacgagcgcgagcgagacacagccgaccaccgccgcggcgaacgggagcaccctgattgcagttggcaagcgcccgctgggcacgttccccgaaacgccgccgtatcaggccagcttctga

SEQ ID NO: 522242 - DNA, 399 bp, Stenotrophomonas maltophilia
atgaatcggaaacatctgatcgtgttggctgcagcgcttcttgtgttggcgctgtcggcatcatgggcgtatgccgaaggcgtgagcccgattactgcgatcaccgcatgggccaaggagcagatcacgtcgctgtgggcggacttctccgatttcatgacggacctgcaaacggacttcatcgagctcgtgttgtcgttcgtgaaggcgattgtgtacctgatcccggcaccggacttccttacgcaaatcagcttctgcgcgatgctcaatgcggccggcccatggaccgccttcatagtcgggcagctgcgtgtcggagaggcaatcgcgctgttgaccgcagcccttattttccgccttgtgcgggtgttcctgaccgtattccagtggacgtaa

SEQ ID NO: 522243 - DNA, 270 bp, Stenotrophomonas maltophilia
atggatttcagtggggtgtttctcgggctgtccgtcgctcaggccgtcgccgcaatcgtggcggctgggacactgatggcactgccgtggtttggccggtggtgtgttgacaaggtcgcgggcttctttgaagaccgtgaggaccaagacgccgacgaacatgccgacgatgaggcaggcgaggtagaggaggccgtgtgtggtgacaccggccacgactatgacggcggggaatgcgtctactgcggcgcgccagagagggaggattga

SEQ ID NO: 522244 - DNA, 135 bp, Stenotrophomonas maltophilia; identical to SEQ ID NO: 505956

SEQ ID NO: 522245 - DNA, 516 bp, Stenotrophomonas maltophilia
atggcagacgtcccattgatcacgatgatgcgcgcccccgttgttgcagcaagcgccgccctgtgcacgctgctgcccatcggcgatgccaacgcctacagcggattcggcgccgccgtgatcgaggatcgagagggtaaaccctgctttggcctgccgtcgcgggcactggaatggatgcgatcaccccgcagattgcacgcattgatggtgtatcagggcgacacggcggaaacctggtcgttcatgtatgactcggctccctcacagctgctcgcgaccgggcagtgcatcgtctacggcgctcttcccgcatccgccaaactgctcaggtctccgcagccattgcttcctggaacgctgtatgaggtctacctcaacgctcccacgaatgggccgatcagaggctacagggccaggttctgcctgaaagctgcacccgatggatcaacccgggtgatccccgtcagccatgacaagaacactggctggagcgcggccgtctgccagccctga

SEQ ID NO: 522246 - DNA, 789 bp, Stenotrophomonas maltophilia
atgattagtggcgcacaacgcaagatcgagctgttctgggctctgtctcgacgggaaattacggcccggttcaagggctcctatggtggcctttcctggtatgtcatccagaatctgctgctgctgacgctttactcgtttgtgttcggaacgctgttcaagagccggtgggcgcagggggatcagcccgcaggcaacttcaccatcgcattgttcattggcctgattgtcttcaatctgttcgccgagtgtgtcacgcgtgcgccgacgttgattctggccaatgcgaattacgtcaagaaggttgtgttcccactggaagtattgcccgcggtcacactggccacggcaatctttaatgccttcgtcgccatgctcgtactggtggcggtgtcctggtatctcgattcaccgatccattggcaggccttgtggattcccgtgattctggcgccgctgatggtgctgattctgggtgttacctggctgctggccgcgttggggacttacatccgcgacatcaaccagatggtgacgttgttgatcagtgctttcatgtttctctcgccgctcttctatcagatcactgccctgcccaaagtggcgcagcaatgggtgatgttcaatccattgacgctgcccatgcaggaatcgcgagctgcgctcatgttgggtcagtctccggactggtcggctctgggcctctatatgctgattgctgttccgattgcggcgttgggattcgtatgcttccagaagttgcgcggaggcttcgctgatgtcatctga

SEQ ID NO: 522247 - DNA, 1338 bp, Stenotrophomonas maltophilia
atgtcatctgacgtgtccattcgggtcagcaacctgtccaagtgctaccagatctacgagaagccagctcaccgcctctggcagggcctattgggtggccgtaaaaagttgtatcgcgaattctgggcgcttcgtgacattgatttcagcgttcgcaagggcacgacgttcggcgtcatcggcaagaacggttccggcaagtcaacgcttctgcagattgtatgcggcacgctctcacccaccggcggcaccgtggagcgcgtgggtaaggtcgccgcgctgctggaactgggggccggcttcaatcccgagttcacggggcgccagaacgcgatcctcagtggtggcatctatgggttgaccaccaccgagatcaacgagcggttaccgtcgatcatcgactttgccgagatcggcgagttcatcgatcgaccggtcaaaacctattccagtggcatgttcgtccgtctggccttttcggtgatcacccatgtggatgcggatatcctggtcatcgatgaagcgctcgcggtaggggatgcgcagttcacccagaagtgcatgcgttggctgcgcaagttcaaggagaacggcacgctggtgttcgtcagccatgacagcggtgccgtacgtagtctgtgtgatcaggccatgtggatcgaccacggacgggtccaggccattggcgacgccaagagcgtgacagagaagtacctggcctcgctgttcaaccaagcgcagaccagcaatgtcccgagcgatcacgcggtgcaggacgtgctcggtgctgccgattgggtcgatcagcgcaagtctctgatcagtgcaagcccattgcgtaatgacttggaagtgatgcgcttttcaccagatgcggcttcgttcgggcaaggcggcgtcgaaatcacccaggtcgtgctggaggatcgcgatcgcaatccactctcgtgggtggtgggcggcgaggctgtgtccctcgtggtccaggcacacgccacggtggacgtgcaccagccgatcatcggcttcttcctgaaggacaagcatggccagacgctgttcggcgacaacacctacctgacttatctcgacgcgccccccatggtcagtgccggtgagcgtttccgtgcagttttcagtttccctatgccgatccttccggtgggcgactacagcttcgatgtcgccatcgccgaaggtacgcagctggaccatcggcagctcaagtgggggcatgacgtgctgatcgtgcggtcggtgtcgaccagtgtgtcgacgggcttggtaggtattccgatgttggacattggaatcgaggtggacgccaatgaagattga

SEQ ID NO: 522248 - DNA, 762 bp, Stenotrophomonas maltophilia
atgaagattgaagatcgggtttcgccctacgactacagctttgatccgaacggcccgagcacagcggcgcggatcgcgcggctggtcggaaccgggcagcgcgtgctggagttgggctgcggctacggtgtgatctcccgacagctgagtcagggccagcagtgcaaggtaacaggcgttgaaatagacccggagagcgctgagcaggcacggccttacctggatgccctttatgtcggctcgcttgaagatgatgagtggctgccagcagtccaaggcacttacgatgtaatcgtatgcgccgatgtccttgagcatctgcgcgatcctgcatatacgctctcccggctgattccgttgctggctccggaagggcgtctggtcgcgtcggttcccaatgttggccatgccggcatcattgccgcattgctcggcggtcggttcgactacaccccgactggcctgctcgacgaaactcatctgcgcttctttacctgggattcgctggagcggatgctcaattcggcaggcttggaggttgtgcgacgcgagaccgtcaacgcgggaggcaaccatgagcagttcctcgagtattggcagcctctgcctgatccgatcaagcgcatgctcaacgcgcacccgacagccaatgtgtttcagttcgtgctggaagctcgccgcagcgccgcgccccaacgcaactggctggagcaggacgcagtagcgctacagcactgggcgggcgaggtgagcggtggttga

SEQ ID NO: 522249 - DNA, 2082 bp, Stenotrophomonas maltophilia
gtggttgaggcaacggtgggccgattgaatgaggtgccacgcgtaagcgtggtcatcccttcgtacaaccacgcccgattcattggcgaggcgatcgattccgtccttgcgcagacgatggcgtcgttggagctgattatcatcgacgatggctcgcatgatgattcggtccttattgcgacggccaaggccgctgtcgacgaccgcatccgcgtgatcaggcaggacaatgcaggctcgcattcagcaatcaaccgagggcttggaaaagcgcgcggcgaatggttagcgattctcaactccgatgacgtatgggagccgcagcgcctggagcagatgttgcagcgtgcgagcgagcaggacgcccagttcctgttcagcgatgtaagcctcattgacgccgagggcctgcctatcacggaccccgggcattggtggaacttcagcgtccagcggctgcgcgaacgggtgcgcgatgaaggtgtggaaaccgggttgctgtacgggaatctgaccgtatccacttcgaacttcctgtttcaccggagcctgctcacgatggtgggccgcttccaccgtttccgctataacctggactgggactatgtcctgcgctgcctggatacagatggcgtacgggtggactttgtcgacgcgccgctgatgcgttaccgccttcatggcgataatgcgatcctcagtggcatgccaggtgccgcggcggaagcgcagctgatcacccggcaggtttaccggcgcaggctgcgcgcgccgcgcagtctgctagacagccaccatcgccatgatcgtctgctgcgtcgctacctgcagtcgcaggtgcgaaactaccgcgagtctttccaagccgtcgaggcagatcgggactcgatggccgacctcttgcgccagcggcagacgatcatcgatacagaacgtcgtcgtgcacaggaagtgcaggctgggctgcgcgatgagcaagctgagttgcgcaatgagattgccaaccagcaagtgctccaccatcaggtgcagcgcgaggtgtatgaagagttctcggcctaccgcagccgcagtagaaacctgcagcaagtggcgtatcgcgccgcagtcagggtccgtgcggagcgcgacgtgcagcgctgtcgagaggtgcggatgctcgaccacttggaagggcgcgatctgcccgacgcgccgtcacagaacatctcaaggagcttgctgcagcgcgccctgcgcgcaatgcggagcactcgccggatcaatgaatccattgccctcctgcacaagggcgtaggccaaggcaccgtccgccatacgccacgcgatcctatgccggtcgaacctgtcgaccaggtgatcgctgcgcatctgcacatctattatctcgacttggctccggagttgatcgccgacgcgctgcgcattcccaagctcagcaaggtggtgatcaccggtccctggggccgggagcacttcgacggacctctgcaggagttggaggcgcgtggcattaccgttgaggtgctggtggtcccgaatcgaggcaaggacgtcggtgggctgctggccgccatccgcgagggcggcttgctcgattcggaccttgtgctgaagctgcactccaagaagagccacaaccccgagacctatttccaggccatctcggcgttgttcggccaggagatccgggatggggaccattggcgccgtgcgttgatccagcctcttgctggtagtgcctggcatgtggacgcagtgctgaagttattccaggacgatcctgccgtcgggatggtgggggcacgtcccttcatcaccagtgcgcctgatgccaacgcagctctcagccgggacgtctatgcgcggttcggtgtgccgcagggtgcgccattcgtggccggtacgatgttctggatccggtcttcgctgcttggcgtatttgtggagcaaagcctttccatcgacgagttcagtctggatagccgggaagtcgagggtggtctcgagcacgtgatggagcgcctgctaggcgggctggtgatcggtcgtggattcgacattttcggggtgcaggaatga

SEQ ID NO: 522250 - DNA, 867 bp, Stenotrophomonas maltophilia
atgagcgtgctttgcaatcgtactgttccggttttcattatttcctacaaccgggtcggctacatcagccgggtcattgatcgtcttgaagcgcttgatttccagaacatcgtcgttatcgacaacgcgtcgacctatgagccactactggaatacctgaagaacagcccacatcgggtagagcgcctgcagcagaatcatggccacctggcgctgtggcgtagtgggcgttttgagcggatcatccagcgcgagcgcttcattctcaacgacagcgatgtaatgcctgccgaagattgcccggcggacatcaccgagcatctggccgagctgctggagcgctatccccggcacaacaaggcgggtctgtcgttgcgaatcgacgatctacccgaccactacgccttcaaacaacaggtgatcgactgggaaacgccgttctggtctcatcgcctcgatgacggcaactacgaagcagcgctggacaccacgttcgcgctgtaccgcccgggcgttcattgcgatgaggaacgctggtggcggtcgatacgcaccgctccgccgtactcggccctgcacctgccttggtatcaggacacgtcgatcagcaccgaagaagacatgttctaccagaacgccgtggcgggcatctcaagtcagtggagcatcaccgacccggttctgctgaagcggcagaacaccgagcttcagcacgagattgccgcactcaagcgtacaatcagtgagctgcgcggcgaagtaccgcccacaggctcgccggcatggcgcaatgcggtccgaaccactcttggcgccaccgggctgcttccgctggtgcgccgcctgcgcgacaacatgaagaagtga

SEQ ID NO: 522251 - DNA, 1044 bp, Stenotrophomonas maltophilia
atggcgctcatgcttagcgaccatcaggatcctgcgctggactattccgacttcgacatcgtgttgacgccggatgacgtggtggaaggtgtgggcgaactgcagtcgtggctcttcgaccataccgtggttgaactgtgcacggctgttaagccctttgcattcgcgcacctgttcaagaagtacgactttgccaatgtcgtttaccaggacccggataccgtgctctatgcgcgcctggaagagctcgaaaaggagatggtgacccatccgatcgtgctcactccacacgtgtcggtgccggcgaccgacaccgacgacctgcaggacggggagatgctcggctgcctgcgccatggcgtgttcaatctcggatttcttgccttgacccgcgaaggtgagggtccggccttcctgcagtggtggctggatcgttgccgcgattactgtttcgatgacaaccagcgcggcttgttcaccgatcaaaaatgggtcgacttggctccgtgtttcttccagaccctcggtattcttcgcgtgccgtcctacaacgtcgcgacatggaatctctactaccgcgaagtcagcacgcgtgcagacggcacgatcgttgtcaacggaacctatccgctgcgcttctatcacttctccggatttgacatcggtacgcatgaacgcatgctgggcaagcatgatgccggcaataccacgctgcagtcgatgacgcagtggtacacctcggaactggagcggctgaagaatccggccggtcttcccgacaagtacggagtgtttgccaatggccggaagattccagccgactggcgtcgctactaccgcagtcagcccgcgctgaagcggatgattccacggccgtacgaacaatatgaggcgatcattgcgcattttgactcggcgcctgatgaagttgcgctggatccttcccgttccgcactggaacgcttcgttcgccgccggccggcgctggaggctatcgtgcgcaagatcgtgccgtcttcggtcattcgccgcatcaagcgttaa

SEQ ID NO: 522252 - DNA, 2487 bp, Stenotrophomonas maltophilia
atggaggtgcgagatgtgcagggacgcagttggcacgcagcgctggccgtgtgcgtgctggtactggtcgcggtcatggcaatgggagccaatccttttgcagggcagacagtaggcccatacgatctgttgatttcggagaagggctggaaccaggatactggtgcggtggctgttcgcagttgggagcggacagatatcctggacgcgatggtgccgcgttggatgttcgcacgcagggcgcttcgggcaggtgaactgccgctgtggaatccacttgtgggcggtggagaagcaggaatccagaacctcgccaactcccagttgacgccggcatttgcaatattcgcggccgcgcccacgccagcgaccggattctactttgcgacattgttcaatctggccatgaccggtatcggcgcatggttctggttgcgacgcagtgtcgggacgctgcctgcattatttggtgccgtcacagtcatgttgtgcggattcaacgtcgcctggctgtattggccgcacatgagcacggcggtgtgggtgtgctggctgctatgggcggtgcaggagtggtggtacaggcctgggccttggcggttccttgcacttgtgtgcgtcaccgtgctgcttctgctaggcggcttccccttcgttacggagttggggcttggggccgctcttgcctatgtgctggtactcggggcgctgtcttctgagcccgcagtcaagcggagcctgggcgtgctggggggggtggtactcgcggcaggtctggctgccatccctctcttgtcgttcgttggttggttgacgcacgtcgatacggtatcccgcaccggaggcagtccgctgcggttggtcccggacgcgttgcggcttctgccatgggcagcacggaacgagccccgggtcgagtcacacctttacgttggcggtctggccgtcctcgccgcagtagcggcgctgctgcgctggatccgccctcgtcaggtcgagccgcttctggctttggcgacactactcctggtggtttcggcagtgctcgttttcgagttggttcctcccgtatggctcggcggggtgcccggcctcggcgggaatggttggtctcgcgccatcatattgctggatatcgcactggctgcattggcctcttgtgggctggcctggctggtgcagcggacccgcacgcccgcctgggggctggccgtcgtgctgccgctccttctgcttcagatcgtcgatctgggcacgatgttccgccgcttcaatggacccgtgcaagctgactggatgttcccttcgacaccacagatcgcgcaggcgcaggcggggatcacttcctttggatacgtggtatccgacgccaactacatcgttagcggtaccctggctgcctatggcttggcggactggtacggacacgggttcaagtctgccgcgaccaagtcgatcatggcgcaggcagtccagagtccgtttaccaccgcgactgcatcggtcattgagccggccagcatccgcctggacagccgtgccatccgtgcaatggcgatccgttatgcgctgggtgatgagcggctcatcgctcggacttgggagccgcaatacacgcagggtcctgacgccatgtcggcgttacccgccctgcgtgatcaagagtggatccagctcgttgatcttgaaagtaggttcgatctcacgcacgtgctgctgcggatcgccacctatggaggaaagggtctcaagggtgagctggtactggcggtctcagcggcggaagcgcccgacacagaactggcacaggcaattcttcccgctgccgatttggtggacggcgagatggctgagtttgcattccgtccagcaatagcgcttcctaaaggacgctacgcactcactctgcagcaccgggactctgcagcagacgagaatgtcaccgcctggtacaggcccggtgcaacgaagaactgtgcgttgaagatgtccagtgagagagcaccaggctgtctgatcatgcgtctgctatcggcgcgtgatgacatggacggctggcgggtggtctcacaggatcgcggtctggtacttctggagaataccgacgcgccaagagggccttactttgtctcatctctggcagatgcgccgcacgggaagagcgccgataccgttcgaacgacgggcagctttgcggacggatggacgttgcgctacacgggcaatgtcccaggatatgtcgtgctaccgatgacggctacgcgttcatggatcttcgaggtggacggaaggccggctgacgtgaagcgctacctcgatgcgctgccggctattccagtgccacatgcagcaaccgtcactgcacgctatcaatctcgctcgatccagcaggggcgttggatcttcctcgcatccgtggtgctgctgttcggggcaactggtgcgctgtttgcctggagacgcaggcagccaccaagaggcggttga

SEQ ID NO: 522253 - DNA, 1011 bp, Stenotrophomonas maltophilia
atgaccgcccttatcccaaccccgtcgagtcacggcaaacgcacgctcgtcatccagattccatgcctgaatgaagcggccacgctcaagattgcccttgatgcgctaccacggaaagttgagggttttgacgaagtcaaggtactgatcatcgacgatggctcgacagatggcacttcagagctggcgcgatcactcggcgtggatcggatcgttcggcacccggtgaaccggggattggcggcggcattcatgacgggcctcgaagcggcgctgcgcatgggagccgatgtcatcgtcaacaccgatgcagacaatcaatactcagctgcagatattccgcttctgacctcaccgattctcgctcagcgcgccgacatggttatcggtgcgcgccccatcgacgacaccgagcatttttcgtatatcaagaagaagctgcagcgcatcggcagctgggccgttcgagtcgctagtcagacagacgtgcttgatgccccgagtggattccgcgccatctcgcgtgaagcggcgatgcgcatgaacgtcttcggaaactacacctatacgctggagacgatcattcaggccggattgagcgggctgatcatcgcttcggttccgatcaacaccaacgaagacctgcggccgtcgcgactggtcaagagcatctggtcgtatgtcgtcagatcacttggaacgatcgcgcgcgtactgatgatctatcgtcctctaatggtgttctcgctgctaggcgcgttcccgtttgccgttgggctggctgcggggctgcggttcgtatggttctacctgcgaggggaaggcggcgggcacgtccagtccgtggtgctcagcggtctgtgtctgacgctggcggcaatcatgctcaccattggcctaatctcggatctggtggcggccaatcgcaagctttcggaacggctgctacgacacgtgcgccacctggaggaccagattgaggcgcagcgaccagagcgacagcccgactga

SEQ ID NO: 522254 - DNA, 831 bp, Stenotrophomonas maltophilia
gtgcaactggaacccactggcgaacggatgattgtggatgagtatcaggccagtgccggagaccgcctcatttatcatctgcacgttgaaacctaccggtttgcccagaagtacaccgagggcaagcgggtcctcgatttcggctgtggcagcggctacggtactgccatgattgcggcatcagcagcgcgaaccatcggcgtggacgttgccgccgatgcggtcgcgttcgcaagcgatcgcttcgggacggagacactttcattccagcaggtggatgcagatggcgcgctccccttcgacgatggttctttcgataccgtgctgtcttttcaggtgttcgagcatgtcgccgatgagcagcgctatcttcgcgagatttcgcgagtgcttacggcgggcggtacgctgttgctggttacgccggaccgctccacccgcctgcttcctctgcagcagccctggaaccggtggcacctgcgcgagtacagcgacgcgtcgctcaagaggcagctggaccgggtctttgaaggcgtacgcatcctgaagatgagcggcgatctggacaccatcggcatggagctctcgcggtgcaggcgacttaaatggctttccctgccgttcaccctgcccttttatccccgcacattgcgtgtggcccttctgaacctggtgcacaaggtcaaaggtcggccggctgcgaagcaggcatcggactcgaatccaggttcgaccgctgcacgatccgatttcagttccgacagtgtccgtatcggccccggtctgtcgccgtcgctcaatctggtcgcaatcgttcgtaagacgcagtaa

SEQ ID NO: 522255 - DNA, 954 bp, Stenotrophomonas maltophilia
gtgagacaccacctgctcaaagcactgaacatcgccattggtgtagtcgcagtcgtggggttcactgtgtacgcggtgagcatggccagcacggtcgacatgacccgtctgtccaccccatctgccattgtcggaatggccattgccgccctcagctcggccttgatcattccgatcagcgctttttcctggatgcatctgttgcgctcctcgggcatcgagcaacactgggggcggctcagcatcatcatgggtatgacccagctcggaaagtatctgcccggcaacatcgcccagcacatcgggcggttggccatgtcaatcagagccggcatcccaaccgttcccttcgctaccacagtcgcatcagagagcctgctggcaatcatctcggccgtgttcttcggcgcattggcctgcgcgctaggcggcggcgccggattgcgacttcccttgggaacacctgacatccctatagttacagtacccgtgttgctggcggcgtctgcagttgcattgggggccgtattcatggcaccccggatcatcaatcgcatcgcaagaagccgattcggcgtctccagtcctgccatacctgcaaccggcccgttggtactggccttctgctgctacgtcggcaactacttggtgctgtcgattggcatctgggccctttcacacctgatcttcactgtccctccttcgacttggctgctttccggcgcgttcgcgctctcatggatcgtcggcttcctgcttccgggggcacccgccggcctgggtgtgcgtgaaacagcaatgctggctatccttgcgactgccgaaatcggtgccgaggcgctgccgctaattattgggctgagggtggccacgactgctggcgacctgttgtgcttcctggtcgccgcgctagccgctcgcattgcaccaccgcacgcaagctccccactttga

SEQ ID NO: 522256 - DNA, 1116 bp, Stenotrophomonas maltophilia
gtgttgttgtggggcacgttcgacacgggaaagccgcgcatccggattctgcgcgatgccatcgaggccagcggcgccaaactggaacaggttcacgccaacgtatggggcgcggtcgaagacaagtcacagattcgcggcctgctcgcaccgctgaccattttctggcgcatgctgttggcgtatcccactctgctctggaggctctgcaaggcgcccaggcctgatatcatcctggtgtcataccctggcctgctcgatgcggtccttgctgccgtaattgggcgctggcgcgccattccagtctgcctggatgtatttatctccatttacgacaccgtcgtactggatcgtggactgttacgcccggcttcgctcgccgctcgtgccctgttcctgatcgagcgcttctgtcttgatcgcgcccaggtcctgttcatggacactgccacacatgcccgtcgcatggaggcactgtttggctaccccagattccgcatgtcgcacgtgtgggtgggggccgaggcagatcgctttccagccgaaccttcgaacccacgcatccctgggagccccctgaaggttcttttctatggacagttcattccgttgcatggcatcgcgaccatcgtgaacgctgcgcgattgttgcaggacagcgaagtagattgggtgatcattggcaaagggcaggaaagccagcgagtcgatgccatgcttgatgctgtcccattaccacgtgtcaaacgattgccttgggtcgactatcggcaactcattgaccacatgagggacgctgatgtctgccttggtatttttgggacatccgacaaagcggccagcgtgataccgaataagatctatcagatcatcgccggtgcccggccattcatcacccgggattcagaagcgattcgagagctgatcacgccggcacccgacgccgtactggtgcctgcgggtgatccgcaggcactggctaggtccatcctggcaatgaccgaacaggacttcacaccatgtcctcatcggacacttcgtgatgcgatcactcctgcccggattgcagagcagttcaatgcgatgctggacgcatacttggagcgcgcacggtga

SEQ ID NO: 522257 - DNA, 390 bp, Stenotrophomonas maltophilia
atgctgtcgcgtcagttcatgatgttcctgctggtcggcggcattgccgccctggcaaatttcctctcgcgcattttttacagcctctggctggacttcacaccggccatcattctcgcctacgtcacgggcatgattactgcgttcgtgctgtccaagctgtttgtgttccgcgacagcaagcaacccctgcaccattccgcgttctatttcgtgcttgtcaatctcgtcgccgtcgcccagacctggattgtttcaacagtgttggctttctatgtcctaccgatgctctccatcgacacgctgcgcatggagatcgcccatgcggtcggcgtagccgtaccagttttttccagctatgtcgggcacaagtatctctccttccgctga

SEQ ID NO: 522258 - DNA, 1287 bp, Stenotrophomonas maltophilia
atgggcaaaaagatcgccgtcctcggtgctgggccaatgggcctggctgtcgcctatcagctcgcgcgcgacgggcaccatccggtcattttcgaggccgacgaccgcgttggcggcatgacggcgtcgtttgatttcggaggcacccagatcgagcgctattatcatttccactgcatatccgatgatgcgttccttgccgttctggatgaactcgggctcagcgggcgcatgcgctggactgagacccgcatgggttactggttcggcaaacgcctgcagccctggggcaatccgatagccctgcttcgtttcgagggcctgggcttggtggccaaattccggtatggcctgcatgcgttcctttgcacgcggcgtaacaactggaagccacttgaccacgttgaagcatccggctggatccgacgctgggttggcgctgaggcctatgaagtcctttggcggaaactgttcgactacaagttctacgatcacgcagacaatctctccgccgcctggatctggagccgcatccgacgaatcggtcgttcgcggtacagcctgatgcgggagaagcttggccatctggaaggaggctcggcgacgctgctcaatgcgcttcatacctacattgaagagcatggcggacaggtcaggctgtcatcgccggttcaacgcatcgccatcgaagatggacgcgttcggggcgttcaggtcaacggcgaacttgagcctttcgacaccgtgatttcgacggttccccttccgttcgtaccgcgcatcgccccggatcttccggccgacatcctggagaagttctcgcgcctgaagaacattgctgttgtctgcgtgatcgtcaagctcaaacgtgcggtgtccaacaacttctgggtcaatacaaatgatcccgacatggatatcccgggaatcgtcgagtacaccaacctgcgaccgatggacgcacatatcgtgtacgtcccgttctacatgccaggcgagcacccgaagtatgcggacccggaccaaacgttcatcgacaaggtccgacgctacctgaagatgatcaacccggagttgagggatgctgacttcctggacgtccgtgccagtcgttaccgccatgcgcagccgatctgtgaccccggttacctggatgacctgcccccgcgcaagctgcccgtcgccgggctttgggtcgcagacacttcgcactactatccggaggaccgtggcatctccgagagtatcggcttcgggcgaatgatggccaaggaagcggtggaatag

SEQ ID NO: 522259 - DNA, 2139 bp, Stenotrophomonas maltophilia
gtgccctcccgtcttgtacgcgacaatcgccacctcatccagttggcgatcttggcgctcgccgccatggccttggtatacgtcgcacttgccctcattggtgccgttcgtagctacacccccgttccgctgactgacatgtgggacggtacggttgatttctaccgacgcacaaccgagggcgatcttggcatctggatcgcaggccacaacgaacaccgcatcgttctggcgcgcatgctgttctggctggacatgtccctcttcggcggaaccgcctggttcctcatcgcagtcaactacctgctcatggctatggccgcggctgtctgcgcatgcctgctgaaggcggcaattccatcaaaggagcatttgaacttccggatcggcacaacgttgttcctgtttgcgtggttgttcagttggtgccaggaaggcaaccttacttggggcttccagagccagttcatcttggcccagctgctgccgcttgccgcactgctggcgatgtaccacgccgggaatgagtcgacgtcatctcgcaagtggttcgtggccgccgttgcactcggtatcgcttcgttgggaaccatggcaaacggcgtactggcactgccagtgctggccttctacgcgctggcgacccggcaggggtggcggcgcgtggcagtcctttccgcactggcgctgtcacttggtgcggcctaccagtacggactcacggccagttccggtccctccaagctcgagctccttcgcaacaaccccagcgaattcctgcgctttctgctgctctatcttggcagccccttctactacatcacccgggacctgaccccacatgcccgtgaggtcgctgcagccatgggcgcggtcttgatcgcaggatcgatcatcgccaccctgtgcgaactccgtcaggtccgcccgcgccgcatcgaatgggcactggtgatgttcctggtctatatcggcgggaccgccgcgggaaccacgctgggcagggcatccagcggcgagatccaagcacttgccagccgctacaccacccccgccattatgggctgggcagtactggtcatctggctcgcctcaacgctggcatcacgcggtcgtcggtggcagctaggcgcgttgttggtgatgataggcacactcgccttgggcagtctcgaacagcgccatgccgccgcggaccagaacgacaaacactttgagcaatcgctggccgcagtggcgatgggtatgcaggtagccgacgaagaccagatcagcaccatctacccgttcctgcagaacgcgatcagcttggcacgaagtgcctcagacgcgcatctgtccatcttccgtacagcgccctggaatgtcgcgccttccattatcggcacggcggcacctccgctaccagcggcctcctgtcaaggcacgatcgatgaaacgggccaggcctcccaggacacgcgctacctgaggatccgagggtggctgcacggacccgttcccggcgcagaaggaagcggattgcgcgtgctggcaaacaaccaggttgtgggctacggcctgatcgggaagtcgcgtccggatgttgccgctcagttcggcacagatgccgttcattccggatttgtggcctatgtccttcgcgaacaggccagccagccgctcaccctgctgggggctggctgcaaactcgccacccttgcgccgcccttggtgttcgtggagtccggagagccgccgatgcagggagaagcgctggtccagcgcagcgcggtgcttccggacaacgcctggctgggcaaggacttccaccaatccactttccccgacctgcaggtcatggccagcctggtcaggggcgacacagataccggcgaagtgaagttcacagccggacgcggggcatacttcttctaccgctcaggccctaccgccggccgccagcgcatcctgatcgacgacggaaaatccggcagtgcgattctcccactggcagagtccaactgggtgcgcctcaccctggacgcgccctcgctgcctgaaacatttacggtaacgttgtcggatgagggcgacgcctggggcgagtggtcagccatcgctgtcggcggagttcccgagcgagccggcgcaccctag

SEQ ID NO: 522260 - DNA, 981 bp, Stenotrophomonas maltophilia
atgtccggctgcacgtccccggcgccggtgaagccggctcgccggggccgcgcaggcctgtgggtcgccgccacggcggcggcctatctggcggttctctggtacatcgaccgcgaccgcaacatccttccgccactggttgaccatgccaccacactggcactgtgcagcgcgctggtgctggtcagctacgtgttccgctaccaacgctggcgctcggtgctcgccgcgcagcgcctgcgcccacgcagctggggccagggcgcactggcctatctggccggttttgctttcaccgcctcacccggcaaggccggcgagctgctgcgcatccgctatttcaattggcagggcatcccgccaacggcgaccctggccaccttcatcttcgagcgtgcgctggacctgctggtgatcacggtgttggcgatcggcgccgcccatttgatcccggcgttcggcgtactggccgcgatcattctgggcgtgctgctgatcctggccctgctgggctgctggccgacgctggcgcgtaccgcgcatcgatgcatcgagctgctgcccggcccacccctgcggcgcctgggccatttcctggtcagcggcgccagcgccctgggccccctgctgcgcgtgcgcctgctgctgcccgccggcctgcagggcgccgccgcctggctgctgaccgcaatcgccttcggcctgctctgcaaggctctgggcattaccctgccgtggccactggcgctgggaatctaccccctggccatgctggtcggcgcgctctcattcgtacccggcggagtgggcaccaccgaagccgccatcgtgctgatgctcggtgccgccggcgttcccatggagaccgccctgaccgtggccatcggcatccggctggtcagcctctggctggccgtgctggtgggcatgctggcgatgctcgcgctcgagctgggcgccaggccaccgcaggccagctag

SEQ ID NO: 522261 - DNA, 879 bp, Stenotrophomonas maltophilia
atggtgaagccgaccctggttgtgctgatgagcctctcccttacggccactgttgccgaagcctgccccctgtcactgaaagatactttcgaaacgtatttgcgtgtcacaactcaagctgacgaggaggcgaaggcccatctgcttgccagctttctcaatgcgccccccggcgaccgtcccgccatccgagaaggtttcgacaaccttgctgtgatcagatacgtagccatggcgtctgaagagccggtggccagcgcgatgaccggacgactcaagaagttggcatgtcacgccacaaacgtcgaggaaaatgcctcctccgggcgaggcatcgtcgagtatgagtgttcactacccgatctctcggatgccttcgtggcttatcgcgagagccaagctcgctcggtagacctggatgcggccaagcgggaatggaagatgttcttggaaaagtacgcagcggctctgcacagcgcgccaagcatcagccactccatgaaagcggagttttatcgtgccgacgagaatagtccttggatcagcacggacatgatgttcaacgcaaaggaccttgctgaccagttgatgcccatgccgcaatgggaagagcgtatccaggcagagtcggtcactgcctattccggcatccccgcctgtgacctgatgttggacgcacagctgaacttcgccgagcgctatgaccccgataacccgctgcagcggggcacgaccttgcaggacatcgtggccgagaaagtacgatcactgggacccagcctggccgaagcgtattgcaggggcacccacgatcggaaccgtgccgtgtgggaaggcccgatcagccaggaagactctcatcgagtccggacagaataa

SEQ ID NO: 522262 - DNA, 996 bp, Stenotrophomonas maltophilia
atgaaatttcctctgttgcgaccgctgctgcttcccgcactgctcctgtcatgtgccgtgttcgacgctcaggccgcttgccgcctcctgggcggagatgcgttcattgaccacgagttcgatgtggccttcgtgcccgatcttcatcgctggatgggcactgttgatggaactttgaagttcgcctgcgattctgcaggtgagacatacggcgccatcgtgcccggcctgctggggctgtcgtatgtcggcgatgtctacaacgaagcgaacggtacgatgacagcggcctacgcgatggggccggaatcggcattgttgatgttccggttgcaatcgttcacctatccggaatgcctgcccggcgacgactgtcctatcgaggaaggtcaagcgggggggtactcgctgcgcgacggcagagtggaaccgctggagcgcatgggcaacgggcgggagggcgaagtgacggtactgatggatgtctactcacggggcggccagatggtgtccacgcccaagcgtcccatcggatctatgaccaccacgcagtcaggcaacccgggacgtcaccatctgaacatcggagtgcgcttcaaggcccagacctgcgcggtaacgccccaggccataacgctggatccgatcgatgcgcagacgctcgatcagcagcagagcgcaggcgaaaaggccttcaacgtcgccatcaactgtggcgccagcggtcgtccgctggtgctggagatgcgcgacgtgcacgacgctgccaacaccggcgacatcctggcccctgcgccgggaagcacgacggccggcgttgcactgcaggtgctgcaggctggagcacccgtgcgcatgcagcagccgtggagctatggcaccaccacgggcacggtcatgtcggttccgttcagtgcccgctaccagcgcacgcctgcagaactgcgcaccgggaccatccgcagcgaagtatcgctgcttgccgactactactga

SEQ ID NO: 522263 - DNA, 168 bp, Stenotrophomonas maltophilia
atgcgtctgcgccagaggaatgattgcaccaccattgcgggcatggaaaacaaactcgcctggaccacctgtcgcgtagtctccttcaggcggctgtttcagttcttcgccggggctgtcgccatcggcaatgacctgctgggccatcgcaggtacggcggtcgatag

SEQ ID NO: 522264 - DNA, 1149 bp, Stenotrophomonas maltophilia
atgggagaacatgttgatcgccgccgattggtttgccagataggcacccgcctccgggcgcagcaccggcggcggcaggaccggatcgatcggatcgattggatccgtcggatccaccggtacgcatcccggcagcgatgggtcgatcgcgcacgggtctgggacggttggcaactgcgagcgcaggtaccagttgccttcgccaccggccacgcctcctttgtgcaggaagtagtcatacgatcccgccaccgcgcgaccggccagcgcgtagttggccaacgacgccccgtccacctggatcagggtgatgccctccagcgtctgcgcacccaggccgccgatgttctgcacaaccaccgttgcatcgccgctgctgtcgccgcgcacgtgcaggcggtccattgccgagtcatcaccttcaagggcgccgcggaaaacgaacgtcgcagcctcgctgtgcagattgccatccacggtaagcgtgttgaagccgatctgccagggatcggaaagcaccagctcgctccccatggccgacagctcgccgacacgtgcgtcgcccgtcagcatccagcggctgcccgtctccatggagatcgcttgaaccagatccgaggtgccgttccatgcggtcccgctgccgagctgcacatgcacctccgactgcggcaccaggccggccgccaggtcgtcaggattgatgacaatgtcacccaccatcacggcattgttctccagtgccacatcgaagcgcccggtcacggcagcgtccagctgcagggcaaccccgttgccaccgtacagcaccgcaccatcggccagggtcatgccgggaatgcgcgcaccccgtatccacaccccgccatgctgctggctgaccagcgagccaccttggatctgcaaccggctgtcatcactcagggtcgcggcccaggacccttctccttccacgtgaacatggctgttgctgaggaacagatagctgtttcccgcacccaccagaccgtgcgacgccgcaccggtcgtgtgtacggcactgtcaaccagatccgcactggagaggccgtcgatatcgatgcccgcagatgcggcaccgcgcgtctcgatgcgcgtgccatatgccgagaagtccgcggcggtgactga

SEQ ID NO: 522265 - DNA, 960 bp, Stenotrophomonas maltophilia
atgaaccgatggatctccatgatgtttaccgcaatcagcctgatcgttgccatgcaggcgtcggcatgtgatctgaccctcgacgacggaggtgatcttgccgccgccgtggcctccgcatccggcaagaagatctgcctgcggcccggcgtctatgtcaccggccccacaccgctggaggttccggacggaaccaccatcgaaggactcggtgcaagcatggccgacgtattgatctatgcctacggttcaccccaaaaagccatcggactcggcagtaataccatgcttcacaacttcaccttgtccactactgctggcggcaactttggtgtactggcgtaccatcgggaacacgtcatcatttggagcctggatatcctaggcttccagatcagcgcgggcgtggtgggcggcaaaagcgtggatatctgggacaccttcatgcgctccaacggcatcgctggcaacaacgcagcggatccaaacctctggataaccgattcgcgcgacgtcaccctcctctatggccaattgaccggcaggaaagatggccccggcggtgatggagagatggcaatctacaattccagcaatgtcatgattgatggagctcgcgtcattgattccggcgccagcgccatctatctggtgaactgcgttgactgtaccctcaagaactcggtgatcgaacgacctggtgaatggggtatcgacgttgtacaaggatcacaccgctttctcgcggagaacaactcggtaagcggcgcaaactatggtggagctgtgtttgaaacggcgggcggcgccacggctacgttccgctcgaacaggttcatccagaatcgccgtcttggcgttggcaactgcaatggcatcaacgcaaagggcagcgttgcaggcgtggtttccaccggcaacacatctttaccttcgggcgatctctgttctttcccgtga

SEQ ID NO: 522266 - DNA, 237 bp, Stenotrophomonas maltophilia
atgaatgcctggaacccggctgcggtacgcatgttcatcccggccatgatcggttggtgtctgaccctggccgcttggctgcgaatggaagaggtgcgcgaagaccgtctcgcccaggaaatattgccggtgctgcagggcggagtagtcgctctgctggttttcacactgacctgcatcggcgccgccagcatggtgctgtggcgtgcgggcgcagatgagatacatggcgcatga

SEQ ID NO: 522267 - DNA, 1017 bp, Stenotrophomonas maltophilia
atgattcgcgaactctgtgatcacattgaccagctggatcttgctcttgatcagcttgcattgaaggacaggaacttcgaccgcttcgccatcatgcttgtggacaacgttgtggagctggctctccatcagtacgccaagcataagaagctctttggaagccggtggttcgatgacactgagagcagagtcaatgatcgagttcttgaggcagctttgggtcaagactttgatgcgaaggtgaccctcgcgctacaaacaggactcatcactgcaccgtggagtcgttcaataaactggcttcactccttccggaatagctcttaccatgctgggctgcggcacgaaggaatattgcactcgctcgccaacttctacttggtaacctgctgtgatctgctggtggcatacaagccatccagctggagttacggttcccaacaaaccatatcccaccgggccgcaaagtaccttgggcacaccgatggtcttcggatgctattcgacgccgccgagctctttgaggcagcttggaagcgaattcgggttgtggcggtaaacatgaagtgcaatatgatcgcggacttagtgcgggatatgtcccggaccatcgacgaagcggacgaacagatcaaatttgttgcaaccaactctccccgcaggggggaatactcgcgtcgtcaggttgtcattgatgcgcaggtatggccgcttgccttctccgaagagggagtggagtacgcaaggaaaaatggttacaccgggagactggttcaggggccagcattggcgacgtggcttgaaggtaacttcagggggccatccacggtagatccaatcccagggtggaagaggcgtcttcgctcgctctcggaagaaaaggacgagcatgctgcgctagataagtactgtaatttcattcggcagacgcaggcactgcgggatgcattgtccgaccaagaagcccgccttgatcagtacattcaagagcaggtcgatattatgcgaggaaaatag

SEQ ID NO: 522268 - DNA, 1548 bp, Stenotrophomonas maltophilia
atgccgctgtccgagaatgatgccgtaaacctagttaatctcattagagatagcttccgagtcagggagaaccagaatcccgtatacgtcgaagttggcgatagctttcgtcgtctgtccagcgctcagcaccaagtagtttttggccggcgcggatcaggaaaatcctgcctgttcgtgcatcttcttcgcacgtgcgaggatggaggttcaagtaatgcaatatatataggtgtcgacagcataaagaaactccagtttcctgacatcttgacgcgcgtactgatatccatattcgagaaattgccagcaccaaagtggcgactggcgcgactttggtcaaagaacccagtggaaagaacactggctgatcttcgttcactgctggatgcggccattacatccgatgtcgaacagacgcagaagcgacaccgcggcggaaaagcctcactcggaggtaaaagccttgccttgaatgcagaagcgaccaccgggaccgacgtaaaagagcagttcaagaaacagaaacttgactacctggagcgccatctggatgactatcgtagcgcaatcaacgcggcgcttccgaaggatctccacacacttcatatcctagtcgacgatttctatttggttcggagaccggagcagcctgacgtcgtggactacctgcatcgattattgcggggaacacacgcttacctgaaactgggaacgatccgacatagaacaacgctgaggcgtcatgaggaacaaaccattggggttgaacttggtcaagatgttgaagagattagcctagataggactttagagaccttcaaggacacccaagattatctggtgtggatgctcgacgtacttggccgcgaagctggaattgataaggcctcggcccagcttttcaaccctgacgcagcacacgctcttacgctagcttctggcggtgtgccccgagactttttgaacattttggctgattcgattgaccttgctcgcggcaagggaaaaccggcctggcttacgcccaagctaatttataaagctgccgagcaaaaaacgcttcctaataagcgcagtaatttgtcggaagatgcgggagttgacgcaaagcgccttgaggctgcgttcgccgatatcctcagattctgcctgcaggaaaaaaagcagactgcctttcttgtttcgaaggaagatgcgattaaattttccgatgaaaacgagactattcagcagctggcagatttcaagcttcttcacttgatcactccggacacctctgccgcctcgggacgccctggacgcttcagtgcttacaccctagacgcagctatctttatggagccgcgccgccggggtctggatgttgttgcgttctgggagcaggacgaagaacgtagacctaggggcattcgcgaatcgcgtacttacgagctctcgcgcatgagagccgccattaaaaatgcgagcgagaacgaagacgtgttgtctgacgttctaaacgcggttgcggaagacgctgctaatgatcccgctccaagcgagtaa

SEQ ID NO: 522269 - DNA, 1119 bp, Stenotrophomonas maltophilia
gtgaagagcaaggcagcagtgactggcgtgctccacgaccttgaagacacgatcctgtttgtggacggcataggtcccgatatgctctcagatgccgtttgcaacatcattcgtggcccgctgatccagtacacgcagcaagcttgcaattactacggcattccgctcacgccgggggtcgattcaggaccggtatggaacacacgcgacgaaaaatgggaaagtgacctgattgagctgccaatgacaaaacacggatcactcatcctgatcccgaagataatcgcgcgcgtaaaacagacctatggccaccaagagtactaccgccacttcttgatgcctgttcttcagcagcaccacaaagatatcaattcgtcatttgtgcacgttctgaaaggcaaaaataacaagggcactaagaaggtttacaagaccgatctttatgacctatacggcgccgacaaactggcctctgcccaactgaccggcgagcaccctcaagctttgacgaagtaccgggagacaaagagcgcagcgccatcgcggcctcttgatcatagcgcgcttgcggcgattgagaatgcgcctacgccaaacttcgacgcactgctggaagatgtcacatcacttgcccccggccacaaagaagcctcggcctatgagaatgcgatcgagaagctcctctctgcactgctctaccccgcgctggcgttcccagtgaagcaggacaaaattcatgagggcagaaagcgcatcgacattacctacgtaaacgatgctaaagatgggttcttcagttgggttgctagaaatcatcccgcctcccatgtcttcgtcgaatgtaagaactatggcaaagagattgggaacccagaggtcgaccaactggccggccgattctcgccttccaggggaaagctcggcatccttgtagtccggtctgtcgaagacaaagccctgctgctgaagcgatgcaaggacacagccagcgaccagcgcggcttcattctcgtattggacgacatcgatctaaccaagttgattaagcaacggcaggcactcatgtacggatatggtgagacgttattgtatcaacagttcaaggcactcatctcatag

SEQ ID NO: 522270 - DNA, 960 bp, Stenotrophomonas maltophilia
atgaaatcgagcgtcatcctgcctatcgctctaggtacccgcgtccgctacgtgaagctcggacctaaaggttgctgggaagatgaggcgatagagaagggactgttgctcatcgacttcgataccggaagtcccgaaacgtacaggatgtgtcgcgaggcgcgatggtcggatctggcgaaggactgggcactttcgaaagcaaaaggcgttgctacgcggtttaccaatgagactcgtacatacttcgaggaccaaggtgagatcttatgggtaacttttgctcatgaccgcctctattggggcttcgtcgcggaaggtgcgcccgagatttacatgccctccaatcctaagtcgacgagtacctctcgcaagatcgccgggggatggagtgaccgcgaccagctgggtgttcagttatcgaagagaagcctgccaggatcgatcaccgccgccgcgtcattccgaggtacttcgttcgatctgagcgacaatgatgcggctcgcctcatccagaggataaatggagcgatagatccgcagatccaacgagttcggacggcacaggaagatctgcgggattcacttgggaaggtcgtccagcgactcgatcccaaggacttcgaaacgctggtggacatgatgtttcttgcggcggggtggaggcgtttggggcgagtcgggagtactgagaagaccaaggatcttgatctccaaatgcctgtcaccggcgaaaccgcctgggtacaaatcaagtgcgccactagcgttggggttttcaatcgctacttgaaagataacgagaaaatggggcagtacgacagaatgttcttcgtgtatcacaccggcgaagagataaggtccgatcaggagaatgtcgacgtgctcgggctgaggaagattgttgatatggtcatcagtggaggctttgtcgactgggtgctggagcgcgctcaatag

SEQ ID NO: 522271 - DNA, 417 bp, Stenotrophomonas maltophilia
atgaacaagcagcaaggcttcaccctgatcgaactgatgatcgttgtggccatcatcgccattctggcggccatcgcgattccgcagtacaacgactacaccgcccgcgcccagatgaccgaagcctacaccctggctgccggtctcaagaccccgatcgctgaggcctttgcacaggatagcgatgcagcgacctcttgcgcgcccccggccaatgccgtgaccaagggcaagtacgttgccagcgtcgttccggacggcaagtcgccttgcggcatcgtcgccacgatgagcaccaccggtgtgaactcgaaggcctcgggcaagaccgtgaccttgaccttcaccccgggcaccggcgcttggagctgcgcttccaatgctccgtccgaagtcaagccgaaggcctgcagctaa

SEQ ID NO: 522272 - DNA, 3084 bp, Stenotrophomonas maltophilia
gtgtatctagtgaagaacaggattggggcttggcttctttggatttttgttctttccggtttttccgggctgatctatcaatcgatttggacccagtacctcgggttgttcctggggcattcgtcgtacgcgcagtcgctggtgctgatcctattcatgggggggatggctatcggtgcgtggctggttagccgcaagagcgctctgatccagcgcccgcttcttgtctacgccgtcatcgaagtggtgattggtctcctcggtttgacgttcaatggcgcgtaccacctgactactggttgggcctacgaccagctcatgcccctgctcggcgcagagcacgcgcactggtctcggtggttgattgcctgcgcactggtgcttccgcagtgtgtccttcttggcgcgacgttcccgttgatgagtgctggctacatgcgtcttcagcctcacaacgagggcagggtgcttgccgggctctatttctccaacagcatgggtgcggccgtgggggcccttgcatcggcatacgtgctgcttcctgctctgggtatgccgggcacggtgttttcagcgggattgatcaacatcattgtcgccgtcatggtctatccgctcaccaagttcgaggcgccgctcgatggtttgttggtggcggcccccgcggcggagggagcgaagagcatttcacagccgtggaccattctcgtcgtcgcctgcctcacaggagcggcctccttcgtctatgaaatcacctgggtccggatgttgtctctcgcattgggaacaacgatccattctttcgagataatgctggcttctttcatcctgggcatcgccttgggcgggctctggctgaaaaacagggctgaccgggtggattcccctctggcgatggcaggctgggtgcagatctggatgggcattgctgcccttgcatcgatgttcatctatgcaaatgcatttgagtgggtcggctggatgatgcgggtaattgtccgcagtgctgaaggctatgccctgttcaatgctgcaagcgcaggcgtcgcactgctggtgatgttcccggccgcattctttgctggtatgacgctgccgctcttgacgctcgcacttattcgccaaggccatggcgagaagtcgatcggccaggcatatgcgttcaacaccgtgggcgccatcatcggtgtcctacttgccgtgcatgttctgcttcccgccgtaggcctgaagtactcacttacagtagctgccatccttgatatggcgctgggtcttttgctcatccgctcgcatgcggccaagtttaggattctcgggttgtcggcattcgcgcgggcggtcgtcgtcgcgctatttggtgctgtggcaactgttggcctcgttacttttgatcctttggtgatgagttcttcggtatacaggtccggcaagacctcgttgagcgagggcgcgcagatgcgcttcttcaaggacggaaaaaccgctacggtcgccgtttttgatataccagatgaagcgtcgcgcgtccgtttgatcgctaccaacggcaaggttgatgcagccatggccactgatttcgcgcagcagcccacgggcgatgagctgacgatggtgctgctggccgctgtgcctctttccatgaaggatcactacggccgcgtcggggtggttggctttggctccggcatgacgacgcatgcacttctagggcatgaaaagattgatcaggtcgatacagttgagatcgagcccgcgatgatcgagggggcgcgttacttcggaagtcgggtcgaacgcgcatttaacgatccgcgttccaaaatcatcatcgatgacgcgaaatcctatttttcgtcgacgtcgcgcaagtatgatctgatcatctccgagccctcgaatccctgggttggggggacggcgactctgttcagtcaagagttctacgagtttgttccgaaacagctcaatcaggatggattgttcgtgcagtggctgcagctttacgagatcactcctgatctggtggcgtccgttttgtctgcaatgatgggaagcttcagtgacgtgaaggcctatctcgcgcatagcggtgatctaatacttgttgcgtccccccatggcgaggttccaccattgggcgacggcgtgtttgctcaacctctgattgcaaaggagcttgatcgaatcggtgttcattcacttcgtgatctgcaagacaccttcgtcatgaatagggcggcgctcaagggataccttggcctttactcgcatcggaccaattcggatatgtatccggtgctcaggctgcaggctcccgttgcacgttttgagagagcagcggttactgatttcgatgcaatcggctcatctccttggggcttgacccgctatttcgggggcgccagtcccaggtcgtccgatgtgaagattgccgccggcggattgccgcttggggctgtgcggaaggcgagggttgcgcgggagattcacgcagcgatcgtaaacgggcagccactttcatctagcgatgtgtcgggcatcgattggttgcagatccaatccttgaagggttttgcggatcgctgtgactttggtggcgagcaggaaaagcccgcactagtgatactgtctcttgctgtggagaccgcgccctatttgaacgagggagagctcgacgacctatgggtaaagcggtcatggctgaagtgcgctccacctgccggcacggtgagcgatgcctttaatctggttgctgcgatagccgagcgtcgcaacgaggacgtcctgaagtacggtcagcttctgttggatgggcctgatgggctcgcgttgcaggctgacaatgtggctgggcactacgtcttcggagctatgcagtacgctgctctggtggttggcgatcccaaggtctctgggctactcattgagcactactggacagggctggggccgcaggcacaggcaagcacgacgttgcgactgctgactaccatggccgccggtcagggtgtcccggtggcgggtagcgaccaaacagagcgcaaacgcgtaagctctcactcggaaagtgcccatcattag

SEQ ID NO: 522273 - DNA, 798 bp, Stenotrophomonas maltophilia
atgcgtctgatcgtcagcctgcttgccgccctgctgccctgcgcagccctggccgccccatcccaggtcgtcactgacgacatcgcccgcttctgggccacctatgacgcggtgcgcgccgaacccgatgccgaacgccgggtggcgctggtccagcagcgctacatcgatccgggtagtcccggcctgcatgcgctaatgcaggtgcgccactacactgcccgcgaatacgccgaggccatgcagtcatggccacgcttctggacctcggtacggccgttgactgcgaatgcacagcaggccagcgccacgctggagcgcgatctggccgccttccgggcgctttatccggcactgcgcccggccaccatcacgtatgcagtgggcgtgctgcgcacgggcggcaccacgctgggcgacaaggtattgatcggtgcggagatggcgctgggcgatgagcgcgagggcgtggccgaatacgtggcggagcgcatcagcgggcgtcgtccggcactgccgctgtacacctatgggcccgcgcacgaggcagaaatccgcgcgcgcttccttgccgagatgcacggggacaacctcgacaactggctgtacaacagtgcgcgcaatccgttcggggtaagcgatctgggctactacgccggctaccgcatcgcgcaggagtacatgcgccggcaggccgatgagacggccggcatcgcgcggatgatcgagctggactatgccgatccgaaggcggtggccgacttcatcgaggcatcgggatggttgcaggcccggtag

SEQ ID NO: 522274 - DNA, 1620 bp, Stenotrophomonas maltophilia
gtgtcgctgccctacctggccaaggacgggcagacctaccacctgaacttcatcgacacccccgggcatgtcgacttctcctatgaagtcagccgctcgctggctgcctgcgaaggtgcgctgctggtggtcgatgcggcgcagggcgtggaagcccagtcggtggccaactgctacaccgccgtggagcagggcctggaagtggtgccggtgatcaacaagatcgacctgcccaccgccgacatcgagcgcgccaaggccgagatcgaggccgtgatcggcatcgatgcctccgacgccgtgccggtcagtgccaagaccggcctgaacgtgcaggacgtgctggaagcgatcgtgcaccgcattccgccgccggcgccgcgcgacaccgacaagctgcaggcgctgatcatcgactcgtggttcgacaactacctcggcgtggtgtcgctggtgcgcgtgatgcagggcgagatcaaggccggtgacaagctgcaggtgatgtcgaccggccgcaaccaccaggtcgacaacgtcggcgtgttcacgccgaagcggaaagtgctgccggcgctgcgtgccggtgaagtgggttgggtcaccgccagcatcaaggacgtgcatggtgcgccggtcggcgacaccctcaccctggctggcgacccggcgcccaagccgctgccgggcttccaggaaatgcagccgcgcgtgttcgccggcctgttcccggtcgatgccgaggactacccggacctgcgcgaagcgctggacaagctgcgcctgaacgatgccgcgctgcgcttcgagccggaaagctccgaagcgatgggcttcggcttccgctgcggcttcctgggcatgctgcacatggaaatcgtgcaggaacgcctggaacgcgaatacaacctggacctgatcagcaccgcgccgacggtggtgtacgaggtcctgaagaccgatggctcgatcatcaacatggacaacccggccaagctgccgccggtgaaccaggtcgaggagatccgcgagccgatcatccgcgccaacgtgctcacccccgaggagtacatcggcaacatcatcaagctgtgcgaagaaaagcgcggcagccagatcggcatcaactacctgggcagccaggtgcagatcagctacgagctgccgatggccgaggtggtgctggacttcttcgacaagctgaagtcggtcagccgcggctatgcctcgctcgattaccacttcgtgcgcttcgacgcaggcccgttcgtgcgcgtggacgtgctgatcaacggtgacaaggtcgatgcgctgtcgctgatcgtgcaccgcagccacgccgaccgccgtggccgcgaactgtgcgagaagatgaaggacctgatcccgcgccagatgttcgacgtggccatccaggctgccgtcggctcgcagatcatcgcccgcaccacggtcaaggccatgcgcaagaacgtgctggccaagtgctatggtggcgacgtttcgcgcaagaagaagcttctggaaaagcagaaggaaggcaagaagcgcatgaagcaggtcggacgcgtggagattccgcaggaagcgttcctggccgtcctgcagatggacaacaagtaa

SEQ ID NO: 522275 - DNA, 627 bp, Stenotrophomonas maltophilia
atggggttgggcggcagggcctgcggccctgcacccgcggtagtgccggccgctggccggcagcaacagcgggctacccgtgggatggcggggcggtgtcggagtgcggggacgctgcaagtacgtccctgtaagcttggcagccgcatccatgcggctgacaccccgcactccgacaccgccccacctctgacagatttctgcgatctggtagatccacgccgtgcgtggatgaatttctgtcagatatcgaaatcaatctggggtcggatccgttttcctgcggaaaacggatccgaccccatgccattccgacagctcgcaagaatctgtcgaaggcggggtgggtccggttgcggtggcgtgagccgcatgggcgcgaggcatgctcgggcgggttgggcaggacgcccaaccccggtcttgccgtgtgcgcaggacagcgcacacgagcaagctgcgaccgagcttacagggacgtacttgcagcgtcccccgcaaccggactcaccccgccatcccttaggaagcccgccgttgctgttgcttcggctgttgctgttgctgccggccagcggccggcactaccgcaggtgcagggccgcaggccctgccgacccaccctaa

SEQ ID NO: 522276 - DNA, 540 bp, Stenotrophomonas maltophilia
atggtagtttctcacgcacctcaacccttcgagccctggaacaaaggaaagctagtgggccagaaggccccactgaagctgaaagacatttgggctatccggatcagacttcagctcggccacaagatccgcgaccccgctctgttcaacctagcgattgattcgaagctacgcgcctgcgatctagttaagcttcgggtatctgacgtctcgcatggcggccaagtagcatccctcgcaatcgtgcacctcaaggcctcggatttgctgttccgcagccgcgtcgcggaatcgcgccacctgtcgacgaggcagtacgcccggatcgtccatcgctgggtggaagatgccggtctcgagtcgggctcctacggcacgcacacgatacgcaggaccaaagcttcgttgatctaccgacgcacgcgaaaccttcgggccgttcagctcttgcttgggcacacgaagctggagagcaccgttcgctatctgggcatagacgtggaggacgccttggaggtcgccgagcggactgatgtctga

SEQ ID NO: 522277 - DNA, 741 bp, Stenotrophomonas maltophilia
atggataacttcgtcacattgaagacaagcaagttcgtgaaacttgtttttgaggacgcgctaggctcgatgaacgaagagccaggggagttatctccatcaaacgccacgattgatgagtatcagttctaccgccagagagttggctttcatctcgcacacgctttgacgtggcttgatcaattagacttcgctgttgagctccttgccaactatgactattcaaagaagatttccgcatctcgcgcagatcatctgatctacaacattgagaactatctgattcgcgccaactccgcgtatgacagagcacttcaacttgtcaattcagtattccacctctgcgttcacgaggagcacgtaacgcactccattatcatcactaacaccaaagttcagcaccgtcccgccgtcgttgcaaagctaaaagctttgcgtaaaaccctagattcgtacgctcaagaccgacataccatcatccataaacactcacttcttgacgaaaagatgcgtcgcatagaacttttctatcaagacgcaatttttgaggtcatggattcggacagaaaagcaggaatcaaggcttttcgtgccaactacctgcgagagttcgttgtttccaagaagcaagaattcaatggtatgaatgccaagctggccgtttcggtacacaatctacttgaaacacttgcagtggaatacgattttcaaaagacccagttcaaggcccgcgggttctaa

SEQ ID NO: 522278 - DNA, 3198 bp, Stenotrophomonas maltophilia
atggtgacaagtagctgttgggtccctgtcgcttctgcgaggaaggcaactcacgtctatctccagaacaacaatggcagttccgacgccaaggacatggacaggatcaccgtcacccatacacgtggcccggcgatcggatcatcgggtgtcatctccatcggccggggtgtgtcctaccactccgatatctccctgccggccagaacggcgctggagcaggaaacggatgatcgccgtgacgactgcaacgagcgcaagggcaatccggtcgtgctctacaccggcaacaaggtagagatcgagcgtgacttcaccgtcaatggggaaatgggcctgttcctcgagcgcacctacaatcaccactggagcgccgcaggtctgttcggcaatcactggatcagcaacttcgactacagcctggcattctccaacgcacagaatacggcgtgggcacagcggccggacggccgacgcatcaagctgatctggaatgaggccgaagcacgatggaatgaggatcgtgccaaaccgatcgcatacctggtgaagaacagcgatggaagcttcacgctgaacaatgaggagctcggtagcgaacgctacaacgcagatggctatataaccgaactccgcaacgagcaaggcgtctattggacctttgcctatatcaacaagtacctgcagacggttactcattcgtcaggtcgcagcatccagttcacgtggaacaatggtctgctgacccaggccaaggacccagctggtaatgtctatcagtacggatacaccgccgatgtctttggagcaggtcgcgcccgccttgcaagtgtaacgctgccaggtgcaccgcagacgaccattacctatcactacgaggacgcgcgctacccgggaggattcaccgggaagtcttacaacggcgtccgatactccacctttgcctacgatgcctacaagcgagcgacgttgtcggagcatgctggtgggatcgagcggcacacgttcagctacgtggtcgagagcagtgcgccggtggccgccccccctgcgccagcccggcctggtggcgttcgcggcagcgaagagaccggatggtgtgagtacaacccgcgccagggtcagatctgtattcaaccccgttccctgcccggtggcccaattcaactcgccgctcgtagcggatcgcagagcacgctattggcggcagccgacgaccggacacgccccgtcaagctaaaggtcagcgagaccaacccgctgggacgcaccaccacgtatgcctacgaggatgggcgccaagtgtcggtgaccggaatcagatcatcgaactgtccggcgagctacaaggagcgcacctacgatgtcaacggaaacccggacattgttcacgactttgtcgacaatcttactgacttcgactacagcgccgagggcaacctgctgaagaagagcgaagccgttggaagcccggccgaacgcgtcacgctctatcaatgggacacggcaggacgtcatctgctcaaagaaacgattgttggcgatagcgaaaccaccttcacttacgatggcaggggcaacatcagttcaacgacgaagcgcaatctgacggcggccggtgtaaacgggcaggcaagaaccactcaatacacctacacctatcatgccaacgggctgaccgcctccatcaaggaagatggccctctggcacaggacgacatcacgtctacattcgacacgaagggcgatttgtccagcgtcacgaacgcactcggtcacacggtcagctactccaacttcaacggactgggattgccgggacgcatcgtcaatgcgaacggtggcgtgcgggagctgacgtatgacggccgcggccgcgttgtgtccgacagaaccagctcgggaaccggctgggcgaccacatccattggctacaccgctgcaggcgacatcgcctcgctcacccagcccgatggcgtgacagtccgctacggctacgatgcagggcgccgcctgatagaggaggtgcgttcgatgggagacggcaagtgggcgtggacgcgtcatagctataacaatgcttccaatcgcacgcgcactgaggtttcacagaccgactatccgatggatacggtggttactggagtgattgacgaaatcacccatgatgcgcaatggaactggtttgtacgcggctgggcctgctccactggctcggctgggtcaatccaggtggacggttacgccgatggcaacgtctacttgggtagcactcaagcgagccttgccagcgagccgggagttgctgcggcctgccaagcatcagggagcgcctataggtatcaattgccgatatctctagcccagaggcaacagttgggcggtcgcaagttctccatttacggccaatctccgcagggccgcggccaggaccgaccgctcgcgaactcaggcgtgtttgcgattccgacagcaaacatcgctggtgacatcggcggcgtgacccaggatggcagctggaacttcttcattgaaggctgggcctgctcagttggcgtggacacctcgatcgacgtacacgtctatgccggtggcgcagctggtggcggtacattcgtcgcttcgggccgcgccaacatgccgaccgacggaaacgttgccaacgcgtgccaggcacgtggaaatgcctattggttcaagatccctcttgacggcaacgtacgatcaaatcacggaggaaaagcgctgtacgtgcacggtatttcgcctgttggtggtccgaacctgaccatcaatcgctcgggtgctttcaccgtccctgccgtggtgcgtagcgccgagctggtttctgcatcgaccccggtgcctcatatcttcaatggacagtcatccagcgtgattttccagttccgaaacacgggcaacgtcatctggaatccaagcgatacctatatggttctgaggacagtgcggaccagcgaggccatcgggctttcatctccagtcgtaccaggcgccgtagccacattcaccgtgatcgtctcgcctgtgaacaccggtagtggtgttgcgcaattcgagtatgtgggccagttggcatccggggccacagcctgggggccgcaagggcaggtgacggtaagggcagagaacgacaagggcagttgcaacccgaaattctgcgaagagccacgctaa

SEQ ID NO: 522279 - DNA, 657 bp, Stenotrophomonas maltophilia
atgggcgtcccgcttcggggcgcctccctcttaccatgggattacaaggagtgtctcgtgccaagaattacgctcacagatcttattgaagtagtaactaagtcgggaagcccaaaggctactaaagtcggtcagctgaagaacaggcaggcgtatgatccggctactgatttctataaggctcttcgggagggccttgtttcaatacataagaggggtggggcaaaggcggatttgtctggcttgacaaagatgctcgcggatccaaaaaagctggcaaattatccgccgatggtcgctggatacaagaaatggtggggtcaaaagaagcttgattggtttgtccctcccagtgagatatacagtcattcgggaattgacgttgctttgagtccggagcttggtctaaagatcaatggtgatccacacgtcataaaactctatttgaagaccgatgcgttgaccaaaacaaaggctgatcttattgtcacgctcatgaatcatgtcctaggtccagtgcagcctccgggtatgaattttagtgttcttgatgttcgcaatagtaagcttttcacctactcggcaacggggaagaacttcaagccgatggtggacgcagagctttcttatattgcgtctctttggcctcacgtctga

SEQ ID NO: 522280 - DNA, 954 bp, Stenotrophomonas maltophilia
atgaagaagttgaatgagctgttcgacgtcgcgtacggcaacaaactagatttaaacaagatgacgcgagtcggccgccgagacggaggaattaacttcgtcgggagatcaagtcagaatcacggtgtaactggcacggttgcacagcttgacatcaaaccctacgatgccggcctcatcaccgtagcgctaggtggcacgaagcttctttgctcttttgtgcaagagcatcctttctataccgcgcagaatgtagcggtacttaggccgaaggaggagatgtcgtttgctcaaaagctatttgtttgcatttgcattcgacacaaccgcttccgatacagcgcctttggaagagaggccaatcgcacactgcgagagttacttattcccgacttggccgattttcctgagtgggtagagggcgcagaagtcggccccattggcgacaaggcactggctcgcattccagacacggtcaattttgacacttctacctggcgtgcatttccactctctgcgcttttcgacttaaagaaggggcgccgactaacgaaggcgcaaatgacgaaaggcgagactcctttcattggcgctatcgatggaaataatggagtttcgacgagcgtcggccagagtccgattcatcagggaaatacaattacagtcaattacaacggctcggttggagaggcgttctatcaagccgagccgttctgggcctctgatgacgtgaacgttctctaccctaagttcaacatgacgccagcgctggcgctatttctaacgacagtgatacgccgtgaaaaatatcgcttcaactacggcaggaagtggcatctggaccggatgagccaatcagagattcgactgcctgccgactctgcgggtaaacccgacttcgcatacatggagaacttcatgcactcgcttccgtacagctctcagttaccataa

SEQ ID NO: 522281 - DNA, 1971 bp, Stenotrophomonas maltophilia
atggaggaaccatgtcacaatcatcgcatagcccaagtgtgtacgtcgatgagcaagaacgaaagaaagaccgagaacattgtccgagatgtgttgcgagaacacggctacttcgacggaagcaatgatattgtgatcgaggagcagaagagcaatatcgatgaagtgcgcaagctgctaaaagctgcaagcaaatccggcggaggtggcattggctcgcctgaattcatcgtcagttccccttcgaacgctgactttcttcttgttattgagtgcaaggcgtcaaccaaggatcacatcagtccggtatgcgtacgcgctcttgattcggaaaccattgccgaaagtcaggccgaatacagcaaacgcgcacagcgcttcgcaactgatggggttctccactatgcagcccagctcgccaaagaattcaatgtcatcgccgttgcagtaagtggcgagacaaaaagcggcgcaagaattgataattacctaatctcaaaagggagtaccaaggtgcgccctctaaggaccaaggagggaaccgcagtcaccggcatagtgtcctggcctgattacattgagcacgccacctatgacccggcagtccagcgaattcgtttcgacgagctgatggcgttctctcgcgagttgcatgagttcatgagagaccatgcaaagctgaccgagagccagaaaccactactcgtaagtggcaccctcattgcgctccgaaacaaggcattcgcgctcgcttatgaggaatacacgcccgaggaactgcagcgagaatggatgcgtgtcatcaaggacgaaatacacaaagccgacattccaaaggccaagaaagataatatggcccagccctactcaggcattgcggttcaccctgagctaggaaaggcgaaaggtaaatttcccaagggcatccttcatcagctcatcaagagactgaatgagaaagtttggccattcatcagcgtttatcacgacttcgatgtcgtaggtcaattctatggggaattccttaagtacactggtggcgataagaaggcccttggcattgttcttaccccgcgccacataacggagctgttcgctctacttgccaatgtgaccaaggacagccgagtccttgacatctgtgcgggcacggggggattcctggtatcagcgatgcatcagatgatgcgttacgctcagacggaagcccaacgagcaaagataaaaagtcaaggacttattggtgtagaacagcaaccggaaatgtttgcgctggccgcgtcgaacatgattctacggggtgacggaaaggcaaatctacaccaaggctcttgctttgatgatgccattacgagggctataacgcagcataaatgcgatgtcggcttgcttaatccgccattttcacagagcgacgcggatcaggctgaactctacttcgtaaagcacatgctcgactgtttgaaaaagggagggactggcgtggcaattgtgccaatctcatgtgccatatccccacactcagcccggcacgagcttctgaagcaccacacactggaagcggtcatgtcgatgcccaatgacctattctcccctgttggcactgtcacttgcattatggtattcaccgccaaaattcctcacagcaccagtaaccgcaagacatggtttggatactggcgcgaagatggcttcattaagacaaagcacaggggacggattgacctctacgagcgctggccagccattcgcgagcgctgggtagagtcattccgtaatagagaagtccacgccggcgagagcgtcatggtttcggtaactgctgaagatgagtggtgcgcagaagcatatatggagactgactactcaaccctcaaccgcggtgagttcgagcgcgagctaaaaaaatatatcgccttcaaaattctcaatgaagacttgatgatagaagatgatgaagaagttgaatga

SEQ ID NO: 522282 - DNA, 1179 bp, Stenotrophomonas maltophilia
atgtcagtaaatgcaggaaagcaaatagcgatgcccttggggaacgccgaagttgtcgcttccggtgttgatgaagacattgatagggagccctacgaagcagttaaggggcgaaaggttctgatccaaacttacgacttcgctgtaaggcagctgatggatatggttgtcgaaggcgatctgatattggatccggactaccaacgtaaatatcgatgggcggatgagaaggcgtcgcgtttcgtggagtccatcgtcctaaatattcccgtccctgtgctctacttcgcggaagagccggatggaacgttcagcgttattgatgggcagcagcgtttgacctcgcttttccgctacatcaaagtcagcgagctcgccaatgtttttcctgataggggcttggacgagttggtacttaacgatgcaatgaaactcaggcctgacttggccggcgttcgctttgttgacttgtcgagggaggacaggtccacgctagcaaagagggctatccggtgcattgttgttcttaatgaatcagatccaaccctcaagtttgaggtgttcgagcggctgaatagtggtagcgcctcgctgtctgatcaagaagtgcgaaactgcctttaccgcggatccttcaataagctcataaagaatcttgcggaaaataaaaagttccaagaaatggtcgctctccctgatcacgcaacgaaggccatgaaagacgcggagcttgttcttagattcttcgcgttcagggagatcgacgaggagtcaaagtatcaagacaattatgcggaatatcttaataacttcatggaggaaaacagggagctaagcccggggagatacgcggcgctggagaagctcttctctgatacagtggatctaatatacgaacagcttggcgccggcgtcgcattccgcaagcctgtagaccttaatcggccattggatagcggatttgccatgaatctgattaatggagctgtctacgagtcgcagatgattgttatatctaggcttctcgaggggaaaggcgatgtcaccaacctgaaggcccgagttctttcagtgtttactgagccggaatacacagcgtctatcttcgcaggtacgagcaaaaagggtcgggttcttcgacggaacaaggctctctctgctgccatcggcctagtttga

SEQ ID NO: 522283 - DNA, 843 bp, Stenotrophomonas maltophilia
atgagtgcctttgaagattttgtcgcaaatgccaatgatgtcagggcagtagctggactcgcccgcgatcagatcatgaatcatggccgtgatggaagacggctgggaaacgcgacctgcagggctgcgctggtactgctttgtggtcatttcgaaggttttgtccgcgaggttgtgcgagaggtggtggcggatcttgcggatggtgaagtcgaatcttatcgagtgccttcgggcattattaaaaaggttctgatcgacaaggtgaagaaggggatcgacatcgagttcgtcgatcagttccgtgcgtcgatgcggcacggtccgccgctcgggctgtcgccaaaagtgatgataagcaccgatagcaatccaacggttgccaaggttgatgagctgttttccatactcgggatcgaggacgtgatcgatcagctctccattgctgactatccgatcgaatccacctacgctgtggacagtcagtcggagccattccgtggccggtttgcgaaaatcatcaatgaattgggagtggctggcgacgattgctgtgacgagatgttggccttgattgatgaaaagtgggcgccaaggaagaagagaagaagtgtcggatatgtcgcctgtatccaagagcttctcaagaagagaaatagaatcgctcatggagaaggcggcgagcagatcactccagaggagcttgagaatttctgtgaagagattcagtcactctgttcaggcctgaaagcagttgctgattcagtgcttgtaagtgttcgagcaaatagggtgcgagagagttccactaagtccgaaaggtggaactatcttttgacatga

SEQ ID NO: 522284 - DNA, 1029 bp, Stenotrophomonas maltophilia
atgctccgttccagcagtgacacagagctggccgccgcctggcgcgcgctgagcggccaagccgcaggggatggttggaaagttatcgagcttttcagtctcggcaactgctgtgtgatggcaggccgtcgtggctcgcggaatgaggagagcgtcctcgtcggtatcaggggaaacctacccgtccagccatttcagctcccgcgcgggcagggattcagtctcacaagcacggagcttcatggctaccccgctgaccacacctggtttgccttagtgcgccaggagtcgggggcgcttgagctctttacgaaggtcgcggtcgatctggttaatctgatggagagttcgtctgcacaggatggtcttcgaattcatagcgcgatgatatccaggatccgtgcttggcaagccttcatgaagcgcgatagcgatggcgtcctttcaacggaggaagagattggactatttggagaacttctagttcttcgaaacctcctgaacgatggcgtttcagagttcgacgccctcgacagctgggctggacctgatgaggggctccacgacttcatgctcggcgatggtgctatcgaagtaaagacaaccattgcaccggcagggttcatagcgaggatagccaaccttgaccaattggatgacagcctgcaccaaccactctatgttgcggcggttcgtctggctcagctgggtgatggtgcaactcttcccgacttgatcgatcaggttgcaggactattccacgatccaggtgcaagtgctttgctgaacagccgactggtctctgctggctacatggacatgactcgcaccgagtacacaaggcgtttccggtgcaatgagcttacatatcgaatcgtaggcgctgactcgcctcgcctcactcgctcaaacgtaccatcagcaattcatgaggtacgttactcggtggatctggatagcctccccgttgtagcgtccacctacaccgatatttcgaatagccttggagtaaagaatcaatggaattga

SEQ ID NO: 522285 - DNA, 2970 bp, Stenotrophomonas maltophilia
atgagtgactcaagcgaaagcagcgttatcaagatcgtccaagaacttctggctggcgagaaagattcaggaccgatcactcccacgttgatcgatgagaagatcagcctggtgctgatgctaaatccgaggtgggcagtcgatcttgatcgtgatgcagttaccgacgagcttatccggcgcttcagcatttggatcggtgatgacatcagtctgtccgatgacactgaccatgagccttggctcgactcctcgagaaaggaagactggcgctactggcaacggtatcgcgagatgctcgagaaggatctatcctgggacatcgcagacaagctggacaaatcgactgacaagatccttggcatgcttgaggacccgctgcgttctggacagtggagccgccgaggactggttgtcggtcacgtgcagtcaggcaagacggcgagttacacgggcttggtgtgtaaagcagcggatgcccagtacaagataataatcgtcctcgccggcctgcataacaacctgcggtcccagacccagatacgtctggaagaaggcttcttgggttatgagaccagttcagcgcacgatgtactcaggcggacgggcgtcggactgatcgacagtgacatctccatcaagcccaactgcgccacaactcgagctgacaatggggatttcggtggacgagccgcaactcagctttccatcagccccgaacagcggccttggctgtttgttgtaaagaagaacaagtcggtgcttgtcagacttctcaagtggattcaggcacacgttgcggatgcccccattcagggagtggaatccagttcaacgaacaagaaagatctccccgccgtagccaagagggccaccagattcccgttgctcatcattgatgatgaagcagacaatgcctcggttgacacaggtgaaatggtggtcgacgaagaagggagggccgatgaagaacatgatccaacaacgatcaacaaactgattcgacgcatactgaattcattctcgcgctcagcgtacgtgggctacacagccacgcctttcgcaaatatcttcattcatgagcgcggtgagacacggaacgaagggcctgacctgttcccctctgccttcatccagaacctggcggcgccggacaactacgttggtcctacggcaatgttcgggcgttcttctccggagggtcgcaaggggcaacttccactgacccgacctgtgggtgactaccagtcagatgacaagaccactggctggatgcctgcgggccacaagatcgaccatgtcccggtgtggagcaaggaacacgcgctgccaccaagcctaagggaggcagtcgactcctttatcttggcatgcgctgtcaggaagctccggggccaaggaaagaagcatagctcgatgcttgttcacgtgacgcggttcaacaacgtccagaaggtggtaaaagccgacattgacggttacgtcaagcatgcgcggcaagcgattgggcgcgggatagaacagactgacaccctatcgaacctgaaggacctgtggaaccgtgacttcgttcctgcttctgcaaccgttcgtgaacttggcttgggcgacgttcccagcgccgatgccacttggcaagacgtcatgtctgcgcttcctggtgtactcgatgacatcgaagttcgaatgatcaacggaactgccaaggatgctctggattacgagcagaacaaggatcgaggcctaaaagtcatcgccatcggtggcgacaagctagcgcgcggccttacgctggaagggctctgcacaagctacttcctgcgtgcatcaaaaatgtacgacacgttgatgcagatgggtcggtggttcggatatcgcccgggctatcttgacctctgccgcctctatacgtcaccggacctcatccgctggttcaagcacatctcggatgcatcagcggagttgagagaagagttcgatcttatggccaactctggggccacccccagagagtttggcctcaaggtccagtctcatcccgaaatgatggtcacatcgcagatcaagatgcgaagtgcgaagacactgcatctttcgtacagcggagagcttgttcagacagttaccttcccaattgatcccgcaatcttgaaccgaaatctgaacacagccagccggctggtggcgcagatgggtgaaccgagccagagggagactgtagcggcccagttcgatggaggcgtcaaggaatggcatgggcatctttggaaggacgttccggtggcttccgttgttgatttcctagatggctatagcaccttggcatcagcgtaccgcgtgaacagcaaggttcttgccgagttcatccgcaagatggcggaagggaatgaacttacgcaatggagcgttgcggtcttaggaaccaaatctggggaacgccatgagctcgctgctggaatcagcataggcatggccagacgaatggccgatacggagccagcggacagatactcaattggtgtgctgcttgaccccacagacgagtccatcgatgtgagctcggagcagtggaaagctgctctggcgctcagcgtcacaacttgggaaaagaagaagcagaaaaagagcgcgatcccgccagaatctccaacgggtgttgcactccggcatgtccgcggtgaaggagcaactggcgtgaagggagaaccagggaaggggctccttattctgtatgtacttgactcagggcgagccggaacaaaggaaggcaaggattggatccgtcccaagttcctcaagaatgccccgcccgttctcgcattcgctgtgagcttccctggtagtagttcaatgatcaagatcccctacaaggtaaacaatgtcggttgggagagcgattactccgacttctccgatcacgtcattaacaacaccccttgggagagcatcaatgctccgttccagcagtga

SEQ ID NO: 522286 - DNA, 2142 bp, Stenotrophomonas maltophilia
atgaatcaaggggaaatggagcccctaggctctacaggtacccgggttggcagtgaagccagcgccggggacaagcggcaatcatcgctgaagccgctccttcgactcgccgcgcttcgcggcgatggggaacatgttctgcgctaccttcaactcgggggtgacgtagaagcacgcgaccagcaggggcggacactacatatgcttgccgcttccaaagggcatctggatctctgccgcctgatttcggagcatgctctcgaagttcagcggcttgcagtcgagaaggtcgacgattcaccagccacgctggacggcctctggagcaatgaacgtaatggtgaggccgaggaatcttctcaaacgcgagccactgattccacactgaactcctctcccgacggtgctgaattcgaatccgagttctttgccacttgggaggaagaagtcgcgaccgaagccccgctggaggatccctcgcttcgatggacaatacagatcgtgcaggaggtgatctccaagcacgtaattgtcgatagcgatgaggattggagtgacctggcgaagctactccccagtcacgccgaaatttcactggtccgggagctcaatcacaactcgacacatggactcttcgaagcgctagttcaacgcgcccagatggagggcaacttcaatcctcttgaccttgaggtgatctctcgcgaggtcggaggatacgaagatggcgatacatttcgccaactttcaattctcatgggtcagattcaggctgtgccggaagagaatggagaatggctaccccctctccatccatatcagatcaaccaaccagcacccgaaagtggtatcgatgagctggaggagttcttgcaggatctctcttccacgacgaatgatcctcacttccacttcgcaaagattgcccaatcgtccgtcctattggaccgttcaggggaagaacgcattgggctccttttggagctctctctcagagatgcttatcgcgccattgctgagagtccccacgcagccgtttcgatagcgagcctcgctacagaccttgagcaaggacgtgtctcagcaggtcaaatcagccatatcaacagcgaggatgaagatcagtctgatgatcttcccggtacttccgacgccgaagacgaggacaatgaagtttcaacggcagaatccgttgccggattgagcctgatcgacatgctggacagcgcacgctccagttgcctcgaacttcaggcgaatccaagggatcagcgctttgatagagatgcggcaacagccgtatcggcgctgaaattgacttcatcggccgttagacgctttgacaaggaattcgaggcggcaggatgcgcgagcgcatcacttcgtagagcggtgcagcgcatattgcgccttgagcacgagatgttccacgccaatatccggctcgcagtgcatgtggctgacaaccacgggtggagcacactgccccgcatggataggattcaggagtgccttgtcggactgctcaaggctatcgacagatttgattacggtaggggcaacaagttctcgacctatgcgatgtggtggctgaagcagtccgttgggcgggctatcggtgacaaagcgcgcgtgatcagactgcccatccatgtcatggaaaaggtcaacaaggtctccatggcagtcaggaggctcggtgagaaatcactaaatgatgcgcgcgctcaggacatcgccaacatctgcgatttatccgttgaaaatgtatccagagtattgaaagtggcccacgatgcggtctcttgggatgagcaggatacgacgagagagctggcctttgttgttcctgatagcagtcaatcccccgaggaagtcacggatgaccatcttcggaggcgtgcgatcaacgattgtctcaacgcaataggctcaagagaggccgaggtcatcagacatcggtttggcctgatcggtggcaacgacaagacattggaggaggtcggtcagatctttggtgtcacccgcgagcggattcgccagattgaggtaaaagcgctgagacaaatgcgccacccagcgcgacgcctcaatgagttggtcaatggcaagtcggagactgacgatgcagcagaacagtaa

SEQ ID NO: 522287 - DNA, 699 bp, Stenotrophomonas maltophilia
atgcgggggaccttcacttcggtcttcgtgatgggcgagcgcacccgacggcgcgctgtggctgctggaagacggcaggtagtgccggccgctggccggcaccccgaatcttccgccaccctgcggttgccggccagcggccggcattacccttgccagacggccccgcacgcggggaccttcacctcggtcttcgtgatgggcgagcgcacccgacggcgcgctgtggctgctggaagacggcaggtagtgccggccgctggccggcaccccgaatcttccgccaccctgcggttgccggccagcggccggcactacccttgccagacgaccccgcatgcgggggatcttcacttcggtcttcgtgatgggcgagcgcacccgacggtgcgctgtggctgctggaagacggcaggtagtgccggccgctggccggcaccccgaatcttccgccaccctgcggttgccggccagcggccggcactacccttgccagacgaccccgcacgcggggtcgtctgcaatcactggatggtgatgaccttcacctcggtcttcgtgcaggcctggtccaggcactggccactcaaccacacctggccgctgccgatcatcacgccctgctggttgacgaacaccttgccgaagtcctgctcggacaccgccttgaccacctccggcgtgatgatcttctcgtag

SEQ ID NO: 522288 - DNA, 162 bp, Stenotrophomonas maltophilia
atgagcctcccacgtgccccgtctgcaccgcttcacagttcagcagcgggaaccccgaagaccggcagcgcccccggcatcccgaccaatgaatgcctgggtatcaacaaacgcctggaagatagcgatggcgaaagcgtcactttgcgccaatcaggataa

SEQ ID NO: 522289 - DNA, 1770 bp, Stenotrophomonas maltophilia
atgtacgtcggacagcggaaccagccccgcatcctcgtcctccggcgtgaggacgatgtcgcccaccagctgcgagccaccgcccagtgcgacatcgaagcgcccggccactgcggcatccagtgccagcgcgatgccattgccgcccgataccaccgcaccgttggacaggatcaggcccggctcgcggctgctgcgcagccatacgccaccatgctgggcgctcaccagcgagccgccgtcgatgcgcatccgaccgttgtcattgatcaccgccgcccacgcgccctcgccttcggtgcgtacatgggtgttgctcagcgtcatttcaccggtcccgccagacagcacaccgtgcgagttgatgccggtggtgcgcaccacgctgtcggccagatgcacggtgccgcccagtcgcgcgatcgcaccgatggcgccatcgccgtcggtcaaaatagcgctgtcacccacctcggccagcggttgcctcccgctccctccttctgcatacagtccgtgcccgttctggccgcgggcatgcaactggctggacgtaatccgcgtcgtcccgccgtacagcgcgacggcctgccaacggttgccctcggcggtgatctgcgagccctcgatatccagctcgccttcattcatcagccggacaccgatgccattgcgcgtggtgatggtcgatccgacgacactggcgttgccatcacgctggttgacgtcaataccaatgctctcactgcgcaactggctgttgcgcagggccagttcagttccttcggtcatgatgatgccgaagtgtccgtaaacatcgacgccatcgagcagcagcgtcccgccggagcccgtcgcgaagctgatcgcgctggcgtgatccccacctgtgtggatactgccccctcgcatctcaacgtctccgacgacatagagtccctggccggaacgcccgtgggtcaggttgatgtccacatcctcgagcagcagctttccagtaccggccagcacaccgcctgcacctgcacctgtcccgttgatctgaaccgaacgcaggtgcacgtcggccccgtcctgcagccatgcgccgtagccgtcaccgtgcatgtcgatgcggacatgctccgccgtcaagctgccaccgcgcacttccagaccattggactggctacccttgacctcgatgacggcacctttcacatcggccgcccccccctgcacgaagacaccatgcgacaagctaccttgcgtggtgatgctgacgcgatccaggaccagttggccgcccagggcctctgccccattcgacaccctgccttcggtctggatgcgcgtgtcaaccacctcgatatgcccgccattggcggcagagacccccgccgcacccgagcctgtcgtcagtatgctgccttgctgcaacgcaatcttgctgcccgcatcctccgcccgcgccgcggcggcgcgcatgccgtccgtacgaagattgaccgcaccggttggaacaatggtgcctccattgagtgcgtggaaggcatagccagccgggttgccaggctccaccggctcggtcgtggcatagtcgccggccgcaggcgtctgttcgtcaccgtcggcgacgacctgttgtgcgtgcgcggtggaagtggcagcgagtatggctgtcaacgccagtgccaaggaatcgtggcgggggaagtggtcgtgcatggcatgtctctggggaactgccttacatgctcggtgtctgcagcgctctcggacatcgaatga

SEQ ID NO: 522290 - DNA, 669 bp, Stenotrophomonas maltophilia
atgggaattcgcctgcccacctgggtctggatcggcgcggtcgcgctgtcgtgcgtggccggcatggtgaatgtcgtcggcttcctcggtttcgaacaccaggccgtcagccacatgaccggcagcaccagccagttgggcatggcgctagcccagggtgactggcgcgcggtcggccacctgtggggactgctgatcgcgttctcgctgggcgcgatgctcagcggcctgttgatccaggacagcaccctgcagctgggccgtcgctacggcgtggccctggcactggaatcggcgctgctgctggtggccattccgctgttcgaacagcaccagatctggggcgcactggccgccgccatggcctgcggcctgcagaacgcgatggccaccaccttcagtggcgcggtggtacgcaccacccacctcagcggcatgttcaccgacctcggcatcggcctgggccacctgctgcgtgggctgccgctgcaggtacgacgcctgaccctcagcggcctgatcatcagcggcttcctcgccggcggcatcatcggcgcctggctgttcatgcgctggcagtacgacgccctgctcgcccccgccctgctgaccggcctgaccgggctgggctatgtgctgtaccagcagtgggcgcgctggcggcattga

SEQ ID NO: 522291 - DNA, 1089 bp, Stenotrophomonas maltophilia
atgcctgccacgcccactctcgatgaccttcgccgctacgcggtggcgcgcaccttgttcaagccgaccacgctgctgaccgcgatccggcggctgggcttcgtgcaggccgacccgatccgcgcaccggcacgcgcacaggacctgaccttgcgccaccgggtgaaggactaccgcgcgggcgatcttgagcgccgctacacgcgtctgccggtggaagaggattgcctggtgaactacggcttcctgccgcgcgagcatctggcgctgatgcacccacgggtttccaagcgcgagtgggatgccgagacccatcgccgtgcggccgacgtgctggcctttgtgcgcgagcgtggcagcgtgcacccgcgcgaggtcgaccaggcattcgcgcatgggcgggtgaccaactactggggcggcaccagcaacgccagcacgcatctgctggatggcatgcactaccgcggcctgctgcgggtgcaacggcgcgacagcggtacgcgcatctatgcggtggccgatcatgccgagcccgactccagcgaacaggcgcagatcgaacgtgccgccgccctgatcgacctggtggtgcgcaagtacgcgccgctgccctcggccagcctgacctatctggtgcgcctgctgggctatggcgcgccgcacctggccgagcagacccgcaaggcattggcgctggccaagcagcagttggccagctgcaccctggacggcaccacctggtactggccggcggacgagaatccgcgctcgcgccgccatgcaccggatgagcaggtgcgcctgctggcgccgttcgacccggtggtgtgggaccgccgccgcttcgagctgttgtgggattgggtctacaagttcgaggcgtacacgcctgcaccgaaacgccagtatggctactacgcactgccggtgttgtggcatgagcaggtggtgggctgggccaacttgagcgtgcgcgagggtgagttggtgtcgagcgtgggctatgccggcaagtcgctggcccgcgacaaggtatttcgtggcgcgctggacgacgagctgcagcgcatggcggagttcctgtag

SEQ ID NO: 522292 - DNA, 585 bp, Stenotrophomonas maltophilia
atgagcacgcaccccgatccaacggcgccgacccgtggccgcccgcccaccatcaccccggagcgtctggccgacatcggcatccgcctgggcctgcccaacctgaccatggccaacgtggccgccgaactggcggtgacccaggcagcgctgtacaagcgcgtggccaacctggaggcgttgaagcgcctggtggcggaggcggtgttccagcgctggcagattccgcgcgcgtcggtcgacgcaccgggtgggctggaggcctatctgatggggttcgtggagtcgctgtgcgaagtggtgaaggcgcatcccgggctaccgccctacctgctgcggcgcacggtggcgaccgcgccgatgctggaaaagatcgcctcgcaccaggcgcacgtggccgaggtgttcggcctgccggtggacaaggcgcgctggctgctggccacgatcgcgttctactgcatcgccggcgccgacaccatctacgcgattgcggatgacgaagaagggcaggtgatcaccgagttcaagcagggcatgcgggccctggtgatcggttcgctggaggtatcgcggcttcggtag

SEQ ID NO: 522293 - DNA, 2196 bp, Stenotrophomonas maltophilia
atgaccgttttcaacttcacttctgcacagcatcgcgctgccgccgcatcctccggcctgatgtattcgccgggcatggtccggcgctaccgggtgtccgccctcgcgctggggctgctggcctcgttcgccgcgctggccgacgccgcgccgtccacccttccgtcggtacaggtgcaggaacaacgccgggtcactgcagactatgcgggcgggcaagtggctgccggcagccgcgtcggcctgctcggcgacaaggatttcatggacacgccgttcaatacggtcagctacaccgagtccttcatccgcgatcgccaggccaaggacctgaccgacgtcattgccgccaccgaccccacggtgttcagcaacggcgtcaccggtgcatggagcgagaactacgcgatccgcggctttgcctccaacaccagcgacaccacgttcaatggcctcagcggcatggcgccctactaccgcacctcgccggaaatgttcgagcgcatcgaggtgctgaagggaccgtctgcgctgctcaacggcatgccgccgggcggctcggtcggtggcagcgtcaacctggtgcccaagcgcgcaagcgagcaaccgctgctgcgggtcagtgccaacttcgcctccgacgcgcagttcggcactcacgtggatatgggccgtcgcctcggcgccgacaggcagttcggcatccgcttcaacggtgcctaccgtgatggtgacggcgccgtcggcaagcagcgcaagaaggtacagctcggttcgctggcactggactggcgcggcgaacgtatgcggctgtcggccgatctgtacagcgccgacgaccgcgttgacggcccggcgcgtggcgtcggcctggcaccgggcgtggccattccgcgcccgccacgcggcgatacgctgatcaacccggattgggcctacgtggacagccaggacaagggcgcgatggtgcgcggagaactggatgtcaacgatagcctgatggcctacctcgcgtacggcaccagcaggaccgactaccgctacaacggttcgatcagcgcgcagatcctcaatccagccggcgacttcaccacggtgatcggccagctcgccttcgacatcaggaagcagtccgcagatgccggcctgcgcggttccttccacaccggcaacgtcggccaccagtgggccgccaacgtgacccactaccagcacacccagaacgactacggccggcgcagcgtacccggctgggactggaccaccaatctgtacaacccagtgtggggcccggcggcgccgttcgtggcaccgcacatctcgcataccgagctgacgctggacagcctcggcttcgccgacaccctcgccttcgccgatgaccgcgtgcagctgacgctgggcgtgcgccgccagcaggtggtcagcgagaccttcaacgtgtccacgggtgcacgcacctcgcgctacgacgagagcgccaccacgccggcagcggccctgctggtgaaagccaccgacgcgatctccctctacaccaactacatcgaaggcctcagccagggcgccaccgcgccgatgaccgccgccaatgccggcgatgtgttcgcaccgttccgcaccaggcagaaggagctgggcctgaagctggacctgggcagcttcgcgcacaccttcagcgtgtacgagatcaagcgaccgaacagctacaccgacccggtcacgaatatcttctcgtttggcggcgagcaacgtaaccggggcgtggaatggggcttcttcggcgcaccaatggacggcgtgcgcctgctcggtggagcggcctatgtgcagccgaagctggcccgcacggccggtggcgtgaatgaaggacgcatcgccaccgccgtggcgcagcggcaggccaagctgggcgtggaatgggatgtgccgaccttgcagggcctgaccctgaccggcaatgccacggcgatgtcgaggcagtacatcagtgccgacaatagcctgtcggtgccggggcgtacgttgttcgacgtgggggcgcgctacagcaccaccgtggcgggtcgatcgcttgcgctgcgggccagcgtgaacaacgtgaccaacaagtcgtattggggcatgccgttgttgtcgagcctggcgctgggtgcaccgaggacggtgctggtgtcggcaacgatggatttctaa

SEQ ID NO: 522294 - DNA, 357 bp, Stenotrophomonas maltophilia
atgaacgcatcggagtttccccatcagcgcgccccggccaatgccgatgaggggcacgacatcccgcccgatcccaacaacctgacggccctgctgcatcgcatcgggttgggcgcggctgccgacggccagccctggcccgagcgccatcagctgccgggccggtgcctggcgttggccgacgccgacggtgcactggccgggctgcgtatcgtgcaggagatcctgctggcggccgaacgcgcccgccagaatggcggcccggaacagtacgtgggcgatcgcgtaatggaagggctgaagctggcggcattggcgttgaccagccacgccatctatcgcctgcatccggaatga

SEQ ID NO: 522295 - DNA, 666 bp, Stenotrophomonas maltophilia
atgcaagcgaccacgaccgggacgtccacgttcaacctcagcctcggcagcggcgcgcgcgagctgttgaagtggatcgcgctgctggccatgaccggcgaccacgtggccaaggtggtcttcgggggctacgtgccggtggtcagcgaactggggcgtatcgccttcccgctgttcgcgctggtgatggcctgcaacctggcccagccgggcgccgacctgcgcaaatcgatgcgccggctcgcgctatgggggctgatcgcgcagccgttgcacgcacttgcgttcggttcctggctgccgctcaacatcctgctcaccttcaccctggcggtggtgaccgtgcatgcgcttgcgaacaatcggcctgtgctgctgttgctggctgccggcgtgctgccgatgttcgtggactaccactgggccggcgttggcgccgtgttgctggcctggatcgcgttccggcatcgggcgtggtggccgctgatggtcgcgcttgcggcggtgtgctgggccaaccacaacggctgggcactgctggccgttccggtggtcgtgctggcgacgcgggtgccgtggcaactgccgcgctggcgctggctgttctatgggtactacgtgggacatctggcggtgctggcgttgattgcccatctgcttgtgtaa

SEQ ID NO: 522296 - DNA, 948 bp, Stenotrophomonas maltophilia
atgcgcaccctgtacccggccatcgagccctaccgcgaattcaccctgccggtgagcgatctgcacacgctgcatatcgaagagtgcggcacgccggagggcattccggtggtgtacctgcacggtggcccgggcgccggtatctcgccgacccatcggcgcttcttcgccccggcgcgctaccgcatcgtgctgatcgaccagcgcggcagcggccgctccacgccgttcggcgagctgcgcgacaacaccacgcaggacctggtggcggacatcgaaaaggtgcgtgagcacctgggcatcgagcgctggctggtctatggcggctcctggggctccacgctgtcgctggcctacgcgcaggcgcatccggaacgcgccaccggcctgatcgtgcgtggcgtgttcctcggtcgtgagatcgagaaccgctggttcgccgaggccgatggcggtgcgcgctggatcttcccggagcgctgggaccgctacgaggcttatatcccggaagccgagcgtggcgacatgatcgcggcctactgggcgcgcatggatggcccggatcaagcaacccgtatcgaagccgcgcaggcctggttgggctgggaagacaatgcggccaccctgcagcacgacgtggatgcgcaatccaccgatgatccgctggataccctggcgaaggcccgcatcgaagcgcactacttccgcaacggcatcttcctggagccggaccagctgctgcgcaacatcgatcgcatccgccacctgcccggcgtgatcgtgcaggggcgctacgacatcatctgcccgccgcgcagcgcgtgggacctggccaaggcctggccggaagcgcgcctggagatggtgacctccggccacagcgccaacgagccggccacggtcgatgcgctggtgcgggcgacggatgcctttgccgaccggttctga

SEQ ID NO: 522297 - DNA, 639 bp, Stenotrophomonas maltophilia
atgtcttggttcggcttgggtcttctcataactgcaccttcgcccctgtccctgagcgatggtatctatgaaggtgcgttgacctacactgcaggaggcgcgggcagcgacatcgactttggtgatgacgtcacgaccgagccgatcacgttgaagttccgcttcacggtgtcgcaccagttccaggtacggttccccagcgacaatccgcaggtgcacctggcgccggaggcaggttgggcgcagtggaccgatcagggccgtgccccgacacgcctctatcaggagctgccattccatctgaccagctcgatggacttcagcatgaagctgcgctgtgagcacgacgcaggcaatcgctgcggcattcgcaatcagacgcttggggaggttgtaccggtggatgtggacgtcaccctgcccggcatgcgcaatctgcgcgacgggcgcccggcgcaggacacaccgctgtcgcccgacgacgaacaggcgccgcgcttcacaccggatggctatctgatgcagcggcggtcgaccttgcggttcaccgcgggacgggacgccgtaacagagatgctgaaggcgccaggctcgcattgggagggcaacatgaccgtggtgtttgacgccaacccgtag

SEQ ID NO: 522298 - DNA, 2520 bp, Stenotrophomonas maltophilia
atgctctcgtcctccaaccaccgtcgattccgactggcccggctcgcgaccgcgatcggtgccgtggtccttgccacctcagcgcatgcggccggcctcgcgccgggcgagctgcccagcctgctgcagcagcgcgaacgcatgccggccgaattccgcgagcacctgtttggcaacccgctcaccgtgcgcgtggagctggacggccagtatctgggtgacgccgaggttctgctgcacgaagacaaccgggtgcaggtgatcggctttggtgacagccacgaaagccggctggcacagaccgagcgtgcccgttggggcgagcagctcgctgaaccgatggcgctgggcgtatgcaggcagcagtgccggggcatggcagcgctgcactacagtctgtccaactcgctgctgagcgtgctgacgtctgccggcgcgcagaaggaggggcgccacatcgccttgccggacgcgggcagccgggggttgatcgtgcgcaacagtcttgccgtgcacggcggccaggaacagcaggccaccgtacgctacagcgccgaactgcgcggcagtgccggccactggagcacggttggcagctaccagtactacgcccagcccggcagcagcgagcactacctcagtgccctgtatgcccagcgcgaactgggcgatcacttcgttcgcgccggctacttcctgcccaccttcgagggcattgtgcgtcagccccgagcaccgggtacgcagaacgatacggcgctgggcctgatgttcggatcctcggacgtactgctggccgatacgcgaagccccagcgtctatcccgtctatgtcaccgccagcggcgaaggcgtggtggagatctaccgcgacgggaacctgctgtccacgcaggccgtcaagcccggcatccaggaaatcgatacgcgccgactacccggcggcatctacgatgtggaactgcgggtggtccaggacggccgcgaagcgtcccgcgaaagcgcctccatccacaagcccagccgctggcaggatcccagccggcggtggcgctacagcgcgttcgcagggcagcagcgcgggttgctggccagcgccggaagcgcccgcgagggcggcgccgcggccggtgccgtggtcaattacctgttgcactcccgtgcggtggccggggccaccgtgcagcggatcggcgcgcggcattcggcgggtgtgtcgatggactggcaggccagtgaccgcttcagcacgtacaccaatgtctatacctccagcgacgccgggcgcggcgtggacctgcagggcctgtaccgctatcgtgccggctcggtggtggccaaccatgcgcgcggttgggtggaacagcgcgagcgcgtcgtggcggatgccggcagcgcaccacgctgggagacccgcggcggctggcaggacacaacggccgtctcgatcacgcatcgtttcgggcaccgtgataccgccagcgtgcgcgtggcccgcagttcgggcttcacgcgcgggaccggcatcgatgtctcttacgggcgccgggagacggtgttcggcaagcacgatgtcaactggcgcgtttccgcctatgaccgccctggcgcccgctacacaggctaccggcggcaacgcggcatcgacctgacggtcagtgtctcgctgggcagcgatcgacgcagctacagcggcagcctgggcagccgcaccggcgatgccggtcgccgcgatacctatgtgaccgcctcctccacacagcgcgtggacggcgccgtactgcagagcgtgaatggcacggtcaccgccgaacggggcgggctgggcgcaggcgcgggtgcctcgctgcagagcgcgtttgtggagggtgacatgcaggtctaccgcggcgcggcgtcgggccgcatcagcggcaccgccaacctcgacagcaccgtggtcattggcggtgggcgcgccgccgtgctggggcaggggcgcggcagaagcgccgacaccgggctgattgtcgatgtccgcagcgattatcccgatcttgccctgcgtgcggacgacagccacggcggcggcgttgcgctgcgcccgggccgcaacttcgttccggtggccgcgtatcgcgcaggccacgtgcagttcgacttccaggggcggcatgcgccgtcggcaacgctgcagccctcggtcgtcagctatcacctcaacaaggggggcgtgatgcatgccacgctggacgtgctgcgcaccttcaccgtcatgggccaggtactggatgcagacggcaacggtgtgcgcggcgtgcaggtgatcaaccacgccggccgcggcgtcagccaggaggatggcttctttaccctggaactgagcgcccgtgccccggtggtggagttgcgttaccccaacatggtcagctgcacgctgacgatggaggaggggcgctaccccagggaaggggatgtgttgatggtgggggcgacgggatgcccgccgtcgatcgcgagaaccgaggaacatgcgaaatga

SEQ ID NO: 522299 - DNA, 501 bp, Stenotrophomonas maltophilia
atgtccctgaagaagtacgccctggctgcagccgctgcagccctcatcgcaccggctgtcagcctggcagccaccgaatccaagtcgatcaccgtcaacgtgaccgccgacgtcccgaacaccgctggcctgcaggtgtccacgcctgacggctgggaaggcctgccgcagaacctgccgtgggacaccgcgcgcgaaacgctgggcgaactgaccgggcgcgtcatcaacatcaagtcgccggctgccatcaccgcctacctgacgtcgccggcacagatggcgtcggccgcagacgtcgtggacctggtggtgaagctggacaacgtggaggttccggcaaccgccgccgccaagatcaccgttgccaacgcggcccaggccgccgcgggcaagtcgctggccttcgccattgcgccgactgcgccgacgggcggctacaagcagggcagctacggcggccagttccacatgatcttcgaaagcgacatcaccccctga

SEQ ID NO: 522300 - DNA, 735 bp, Stenotrophomonas maltophilia
atgcaacgcgcactccttctcctcctgccggccctgttcgccagcagtgcccaagccacgacaccacagatcaatgtgggcctcctgttcgatcatcttgcgccagcgcacagcaacctgctcaagcgcatacgcaataccggtggtgtgaccgcatacgtgcgcgttgaggtcaccgagatgcacttcgatgcagacggcaaggttgtcgaaacgccagtggacaccgtggcgctggtacgcaatgcacctggcgcgcacggggtgatcgccagccccagccgcctgatcattgccgccaatggccaacaggcgacgcgcctggtctatcgcggtgaccgcgatgaggagcgctactaccgactgcgcttcattccggtggtgccgagcgccgaggagttttcgctcagtgatgcgcaggtgcaggagatcaccgggctgacttcggcagttcgcgtgttcaccggctacggcaccatcctgttcgtggcaccgcggaacacgcgctatgacacccgtgtgcaggacggtcacgtgcacaacggtggcaacgccacggtggtgctggacaacctgcggtactgcgagcgaagcagtccggatgcctgcacgcccggcatcatcgtccatgtccggcccgggcgaacctatgcgctgcaggccgacgacagccggttcgcccgctacgacctgagggagggcgacgaccgccgcagcatcgactcgcgccgctga

SEQ ID NO: 522301 - DNA, 300 bp, Stenotrophomonas maltophilia
atgaccggtattcgctgcgtttctgctgtcctcctcatcaccatcggcctgctgctgggcgcctgttccagaacccaggaggcgagcaaggccaccgccgccgaggacgtcaccgaagtgaagctgataccgccgtatgagtcgctggacaaggacaaggacggcatcgtcacgctggccgaagtggatgccgtggcacccgactgggccgagcgcctgcatgcctgcgataccgaccgtgacaagacgttgacccgtggcgagtacgacgtctgcaagcagaccagcggcacgcattga

SEQ ID NO: 522302 - DNA, 300 bp, Stenotrophomonas maltophilia
atgtcctacaagatcctctacatcaccctgcgccgcctgattggcgagcgcgatgttgccgccctgcgcagccagctgctgcagcacggcccggtcatgttcgcccgttcgctgtcgctcggttcgccgcgcgtggtggccgacgcgctgtcgctgctgccgatcagcgagcggatcaccgtgctgcgccatctgccctacccgctgcgcgatgcgatgaagccgctatgcatcggcggcagccagcgcctgcacatgcagccgtggtcgccggcggtgctggcgatgcgccacgcctga

SEQ ID NO: 522303 - DNA, 2760 bp, Stenotrophomonas maltophilia
atgagcctgctcaacgcctggttcaacgccttcctgcgcagccgtcgcgcaggcaacctgttccgccgtcgtgcgatgcccgaagccggctttggcccgggcagcgccgaagcggcgccgttcgcgcttaccaccggtctggtcacccttgcccagcaggaagaagccgagctgcttgcaacgctggagtcgcatgccgatggcctgagcccgcatgaagccgaggagcggctggccacgctcggccccaacgaggtggatcacgaaaagccgctgccgtggtggcggcacctgtggcagtgctaccgcaatccgttcaacctgctgctgaccgtactggcggcggtgtcctggctgaccgaggacatcaaggccacgatcgtgattggtgcgatggtactgctgtccacgctgatccgcttcgtgcaggaaggccgctccaaccgtgccgccgagcggctgaaggcgctggtcggcaacaccgcgcgcgtgctgcgccgcaatccgggcaccgaggccgccgatgtggccgaccagtacttcggcgcccacctgcacagccgtcgtccggctcgcctgctggacctgccgatccgtgagctggtgcccggtgaccacatcgtgctgtcggccggtgacatgattccggccgattgccgcgtactgaccgccaaggacctgttcgtggcgcaggccgcaatgaccggcgagtcgctgccggtggaaaagttcgcgcaccccggcgacggcctggctggcctgctggagcagcacaacctgctgttcatgggcaccaacgtggtgtcaggcaccgccaccgccgtggtgctggccaccggcaaccgcacctacttcggcacgctggcccagcgcagcaccgctaccgaccgtgcgcccaccgcgttccaggccggcgtcaacagtgtcagctggctgctgatccgcttcgcgctggtgatggtgccgttcgtgctgctgatcaacggctggaccaagggtgactggaccgaggcgttcctgttcgcgctgtcggtggcggtgggcttgacgccggagatgctgccgatgatcgtcacctccaccctggccaagggtgcggtgctgctgtcgcggcgcaaggtgatcgtcaagcgcctggatgcgatccagaacttcggcgcgatggaagtgctgtgcaccgacaagaccggcacgctcacccaggacaggatcgcgctggagcgccacaccgatgtgttcggtcacgattcggaagacgtgctgaagttcgcttacctcaacagccacttccagaccgggctgatcaacctgctggaccgcgcggtgctggagcacgtggagctgcagagttcgctgcggctgtcgcaggactaccacaaggtggacgagattccgttcgacttcgagcgccgccgcatgtcggtggtggtgtccgagcgcgaggaccaccatgagctgatctgcaagggcgcggtggaagagatgctggcggtgtgcagcaccgtgcgcgagaacggccaggacatgccactggacgagcgccgcctggcgcgggtgcggcagaccaccgaggaactgaacgaacagggcctgcgcgtggtggcggtggcgatgaaggagaccgcggccagtcagagcgcctactcgcaagcggacgagtgcggtttgacgctggtcggctacgtggccttcctggacccgccgaaggagtcggctgcgcaggcgctgcaggcgctggccgcacacggtgtcgaggtcaaggtcttcactggcgacaacgaactggtgaccgcccgtgtctgcgcacaggtggggctggacgcggacaccatcctgaccggcccgcagatcgagcgcatggacgacggcgcgctgtcgcgggcgctgcaccaccatcgcgtgtttgcccggctgacgccgctgcacaaggagcggctggtacgcgagctgcgggcgcagggcaaggtggtcggcttcctcggtgacggcatcaacgatgcgccggcgctgcgcgcagccgatatcggcatcagcgtggacagcgcggtggacatcgccaaggaggcggccgacatcatcctgctggaaaagaacctgatggtgctggaggaaggcgtcatccagggccggcgtacgttcaacaacatgctgaagtacatccgcatgaccgccagctccaacttcggcaatgtgttctcggtgctggtggcctcggccttcctgccgttcctgccgatgctgccgctgcagctgctggtgcagaacctgctgtatgacatctcgcagatcgccattccgttcgacaacgtggatgaggaactggtacgcaagccgctgaagtggaacccggcggacatcggccgcttcatggtgttcttcgggccgatcagctcgctcttcgacctgagctgtttcgcgctgatgtggtacgtgttcgatgcacgcacgccggccgaccagggcctgttccagtccggctggttcgtggtcggcctgctgacccagaccctgatcgtgcacatgatccgcacgccgaaggtgccgttcctgcagagcatcgccgcgccgccactgctgctgatgaccggcctgatcatggccatcggcgtggccctgccgatgagcccgctggccggctacttcaagctgcaggcgctgccggccggctactggccgttcctggtggcgatcctgttcggctatgcggtgctgaccaccgcgctgaagaagttctacatccgtcgttacggctggcagtaa

SEQ ID NO: 522304 - DNA, 738 bp, Stenotrophomonas maltophilia
atggacatcaatccgaacctgccggcgttcaacgccggcgccacgctcagctcgctgatcagcctgtcggtggcattcgtgctgggcacggccatcggcctggaacggcagttgcgccaacgcaccgccggtttgcgcaccaacaccctagtggcggtgggagcggcggtgttcgtcgatctggcggtgcgcttccatgacctgtacggcggcccgccgtcaccgctgcatgtggtggcctatgtgatctccggcgtcggcttcctcggcgccggcgcgatcatgaaggacggcgcgcaggtgtccggcctgaacaccgccgccaccctgtggggatcggcggcggtgggagcatgtgcaggtatcaagctgctgcccgaagcagtgctcgcggcgttgttcgtgctggccgccaataccctgctgcggccggtggtgaaccgcatccagcggcagccgctgccggaagcgttcagcgaggcgacctatgcgatcaacgtggtctgccagcgcgaacagcaggccgaggtgctggaccagctgttgctgctgcttgagcaggcgcagtacccggtgcgcgcggtggaccagcgcccgttcggcgagcgcgatgtggagatcgaggcggtgttgtatgccaccacggtggatgccggcgaactggacgccgtacttgcgacgctggcgaccacgcccggtgtgctgcagggattctggaacgccagcctggaggagtag

SEQ ID NO: 522305 - DNA, 1056 bp, Stenotrophomonas maltophilia
atgccatcgctgtcgccccgccgcccgctggtgctgctggccctgatcgtcgtgatggccgcgatcttcctgatcgacaccgtcaccgattacgcggttgctgctgcctgcttctacgcagcggtcatcctcgcggcatcgcgcgtgctggccgctcgcggcctgatcacgctggccatcgcctgcatcgcgctgaccgggctgagtttcttcctgacccgcttcggcacctaccgcatcggcctggtcaattcggtgatcggcatgctggtgatcggcatcaccacctacctcgccctgaacatggaagcggccaaggccgccgtgcaggaagcacagggccgtctgctgcgggtcgcccgcgcgtccaccgtgggcgaactcaccacctccatcgcccatgaagtgaaccagccgctggcggccatcgccagcagcgccgaagcctgccaacgctggctggcccaggacccgccgaacgtggacaaggcgcggcagaccgtggcccgcatcctggccgatgcacaccgcgcaggcgatgtgatcgctcgtatccgcggcctgacccagggcgcggaaccggaacgacttgccttcgacctgaaccaggcggtggaggaaatgctggcgttgtcgcgcagcgaactggaccagcatggcgtggccgtggccctgctgctggacgccgacctgccgccggtgcaggccgatcgcgtacaggtgcagcaggtgatcggcaacctgatcctcaatgcggtggatgcaatggaagccgtacccgccgccgaccggcgcctgtcgctgctgacccgtcgtgatggccaacgggtcagcctcagcgtacgcgatcgtggcgtcggcctgcccgccgagcatcccgagcgcgtgttcgacgcgttctggaccaccaagtcacacgggttggggctgggcctcagcctgagccgctcgatgatcgaggccaacgacggccagatccgcgccgaacgaccggcaggcggcggtgcctgcttcgtcttcgacctgcccgtcgccacggatgtccaccatgcgtaa

SEQ ID NO: 522306 - DNA, 642 bp, Stenotrophomonas maltophilia
atgcgtaagcccactgcacccatcgccgatccggcgcccattgtctatgtggtcgacgacgatccgtcggtgcgcgcggcgctggaagacctgctggcctcgatgggcctgcaggtgcgggccttcgcctccacccaggccttcctcgaacacgacctggaagacgcgtcggcctgcctggtgctggacgtgcgcatgcccggccagagcggtcttgaattccatcgcacgatgggcagccatggcctgcagctccccgtggtgttcatcaccggccacggcgacatcgcgatgggtgtcaacgcgatcaaggacggtgccatcgaattcctgaccaagccctttcgcgaccaggaactgctggatgcgatccacaagggcatcgagatcgaccgccagcgccgccgcgagggcgaggcgctcgatgccctgcagcagcgctggaacacgctcaacgcgggtgagcgcgaggtggtcgatggcgtggtgcgtggccgcctcaacaagcagattgccggcgacctcggcgtcagcgagatcacggtgaaggtgcgccgcgcgcaggtgatgcgcaagatgggcgcgcgcaccctggtcgatctggtgcgcatgtacgaccgcctgcaggcggggacgccatga

SEQ ID NO: 522307 - DNA, 516 bp, Stenotrophomonas maltophilia
atgaacatccacgtcgccttgctgcgcgcggtcaacgtcggcggcaccggcaggctgccgatgcgcgaactggtggcgatgtgcgaggacgcaggcttcgccgatgtccgcacgtacatcgccagcggcaacgtggtgttgcgcagctcgctcgacgaggcgggcgtgcgccaggccctcggccagcggctccaggaatatgccggcaagccggtaggcgtactggtgcgctcggccagcgagatcgcaggcgtggtggcacgcaatccgtttccgcaggccgccggcaaccgtgcggtcgccctgttcctcgacggcagcctgcctgccgacccgcttgatggcgtgaccggccggcgcgacgaacagcttgcactcggcacgcgcgagatcttcatccactacggcgccggcatggccgactcgcgcctgcgcattcccggctcggcacagggcacggcgcgcaacctcaacaccgtcgccaggctagcggcgatggcagcggaactccgctag

SEQ ID NO: 522308 - DNA, 393 bp, Stenotrophomonas maltophilia
atgaagggcgaagcacacggtacgtttgaagtggatctgcggccgatcggtggcaatgacggcccgattgcggtgatgtcgatcaacaagaccttcgccggcgacctgcacggcagcagcgtcggccagatgctggccttccgcacgccggtgcagggctcggccggctacgtggcgatggagcgggtaacggccacgctggccgggcgccagggtgggttcaccctgcagcacaacgggttgatgacccgtggcacgccgcagctgagcgtggtggtggtgcccgattcgggcagtgaaggactgctcggcctgagcggcacgctggagatcaccatcagcgagggccgccatgactaccggctggtctacagcctgccggaagaaccctag

SEQ ID NO: 522309 - DNA, 435 bp, Stenotrophomonas maltophilia
gtgcagaacgtaccgcaatggttgctctgggcgggactgtccgccgtgttcgcagcgctgactgcgctgttcgccaaggtcggcgtcaagggcgtcgacccggacctggccatggccatccgtaccctggtggtggcggcggtgatcctgccgctggtgatggtcaccggcaaatggtccaatccattgctgctgccggggcgcacccagctgttcctggtgctgtcggcgctggccaccggtgcgtcgtggctgttctacttccgcgcactacagagcggtgagctggccaaggtggccgtggtggacaagttcagcgtggtgctggtgatcgtgctggcctatcttctgctgggcgagcggcccagcctgcgggagtggagcggcatcggcctggtgctggccggggtgatcgtgctggccacgaagaagtag

SEQ ID NO: 522310 - DNA, 1197 bp, Stenotrophomonas maltophilia
atgtccgagaacaccctccttgccacgccggccgctaccgcgccgatcaagtacctcgaccgcgccatggccacgctgcgcagcctgggcctggccgctccccaggacaacaacgcaccggccatcgcgctggtctcgcagctgtccacccttgaccagggccgcgtggtggccattgcccgcgtgctgcagcagtccgggcatttcaatgccgtgatgcgtgacgaaatcagctcggccaaggtgtccgaccgctataccgagatcatccgcgccttcgacagcattcgtgacgatgccagcaccatggtcgaacaggtgcgcgacggcaggatcgacatgggcgagcgcctgcagaacctgtggatgaaggtcacccgcggcgacatcccgagccggttcgagaagatccgccgcacattcctggaagtcagccgcgattcggccgagcagctgcagcgcgagtcgcgcgtgctggagatgtacggcgacttccgcctgtcgatcaaggatgccgagatccaggcccatgagctgttgaagctgcaggagcaggcgctggccgatgcccgcgaggcgctgaagcaggcgcagcagcgcgtggagtcggccgatccggccgccgatgccgccgacaccggccgcctggtcatggcccgcgatgaggccctgcgcaacaaccaggccgaggagtcgcgctaccagctggccaaggacctggccgagaacctgcaggtgaattacgccacctccgaggcgatcatgctgcgcgtgcaccagtcgcacgagatcaagcgccgcgtcaacgagcgctcggtggtgttcttctccaccaatgaaactagcttcaccgccttgaacctggccttcaccacgcagatgggcctgcacgagtccacgcaggcgctcaatgcgatgaccgagggcacctccaagggcctggaagcggtggccaacatcggcgatgacgtgctgcacgagggcctgaaggccggctacggcgccaccatcggcgtcgattcggtgcgcaagctggtcgatgcggtggtgcgcttccaggagacctcgctgcaggagatcgagcagctgcgcggccaggcgacccgcgactcggccgagatcgccgagtatgtcgaacagggcaagcagcgcttcgccgccctgctgcaggcgccgccgagcccggagccgcgctga

SEQ ID NO: 522311 - DNA, 1488 bp, Stenotrophomonas maltophilia
atggcccctgccgagctgcaggctgcgctgctgaccatggatgtggtcgaccagctgcgctaccgcaatgccgaaatgaaggcgctggccgacagcggccacgacaaggcgacgctgaagcagcgcctgcttgagctgtaccgctcgcagggtatcgaggtctccgacgagatcctcgaggccggcatccaggcccagcgcgagcagcgctacctctacaccgcgccgcgtggctggaaggcgtggctggcgcggcgctggatcgatcgggcccgcctgttgaagtgggcgctgctggcggccttcctgctgctggtgctcggcatgctgctggtcatggcgcgcagcttcggagcgttcgtgcacgagagcaacgtgcagaagaacgtgcaggtgctgaacgacaaggtggccgcgcagcaacaggaggctgctgcagcgcgcgccctgctggcagcacaggaacaggccctgcaggggctgctgccacgtgccacggccagcggtgggcgcctgcagccactggccgaaggcgcacaggccgcgctggccgaagcacagcggcgcttcgccggggttcccgccgcactggccgcacagccgacccttgtgcgcaaggacaagctcacccggctcagcagtggtggcagtgccaccggcgagcaggcggccgcgcaggttgagcagcatcggcaggccgccgcgcagctgctggcgaatgccagggaaaccctgccgccgctgaccgagcgggtgaacattctcggccaggcgatcgaggccagcgagctgctggataccaccaacgccgccgcaaaggcggcacgcctcgcgccggatgcagagcaggcgcgcgcacgcgcctacaccggcggcgacgtggcactgcgcgcgggcgacatcgccgcggccggccaggcggtagcgaccctgaaggagctgatcggcagcgccgacacgctggccgcgctcaacgagcggttggcccagctcaaggccgacggcctcgccaccggtgtcgccggcgaagaccgcaagcgcttcgaacgtgcgctggagcaggccgcccgcctgatccgggtcgagacgctggccgaagccgggccggccctggacaaggtcagccagctggtggggctgctgtcgcagaccctggtctaccgcatcgtcaaccgtgacgatgaacgcaccggcgtctggcgctacaacgagaaggccaatggtggccgcaactactatctggtgaccgaagcgctggacgaggccggcaatgctgccgaactgccgatccgcaacgaggaaaccggcaaggaggaacgggtctcggtgtttgccgtacgcgtgcccgaggccacctacaaccgggttgccgccgacaagcaggacaacggcatcatcgaagacgaccagatcggcagcaagccgcgcggcagcctgtcgccgcggttccgcatgcccgccaccggtggctacatcacccaatggtga

SEQ ID NO: 522312 - DNA, 1422 bp, Stenotrophomonas maltophilia
atgagagacctgaacgacgcgattgccgatgtcgaaaccgatatcggccaggtgcaggcacaactggccgcgcgtggcgaccagtgccgggagctgatcaaggaacaggaagcgctgcacgggcgggtccgcgacgacttcaacgccctggcgcgcctgcaggccgaggccgccaccgatgcgccgccgatgctggcccgggacctgctgcagcagtccagcgccgatctgcagcgccgtgaccgcaaagcggcggtactggacgacgaactgcaggcgctgctggacatcgagcagtccttgcagcagcggtcgcaggaggccgttgccgcacgcgacgccgccggcgaacgctggcaggccctgcaggaccaggtggacaccacgctggaagcggaacccacctacagggtgctgcaggacgacctgcagctggccgtggcacgcgccgacacggtcgagcgcatggcttcctctgcccaatcggagcatgacgccaaggccggcgcctatcaggccgacccgatcttcatgtacctgcaccggcgcagctacggcagcacggcctaccgcggctggccactggtgcgcaccgtcgacggctggctggccgaactgtgcggctttgaccgtgcccgtcgcgagtacgccacgctggtcgagcttccgccctatctgcaggaacatgcccgacgcgcccgcgacgacgtggaggcggcccgccaaccggtacagcaggcccgcgatgccgccctcgcccgcgccggtggcgacccgctgcgccagcagctgcagacggcacagggcgcagtagcgcaggcgctgctggccgagcagctgcatcgtcagaccgtggatgccaagcaggcacagatcgacggcttccgcagttggaccgatgccgaaggcagcgccctgctcaccgcgctggcgcgcacgctgtcggccaagagcatggacgacctgtaccggcgcgtggccgccaccgcctccggcgaggacgatgccgtgctcgagcgcatccatcgcagtcgcctgcgcctgggcgagatcgatgggatggtaggcgagcacacccgcgaaatggccgtgctgaaaaagcgcctggacagcctgcaggcggcgcggaggagctaccaggcggcagcagacatcgagcgccaggcctacgaggcgccgagctaccgggccgtcgcgccggccaccgtcgccgcatccttcttcagcaccaccagcagccgaagcaccacccgctcctctggcggcctgttcgacctgctttcgggcggttccagcagttccggctcgggttcgagctccagttcgagctccagctccagctccagttccagcggcagcagcttccacagcggcggtggtatcagcggcggcggtgacttcaagaccggcggcgggttctag

SEQ ID NO: 522313 - DNA, 1179 bp, Stenotrophomonas maltophilia
atgagtacccgactgcgcctgcccgcgctgcgccaccgcgatggccatcatgcccgcgtgacctacgaagaactgttcttcgacctggtctacgtgttcgcggtcacccagctcagccaccatctgctgcaccacctggatctggccggcgtgctgcagaccctggtgctgtggttcgcggtctggctcggctggcagtacgcgtgctgggtcagcaactggttcgacccggaggcgccgcgcatccggggcctgatgttcgccaccatgctgctggcgttgttgatgtcctcgtccattcccgaggcgttcgccgatcgtgcgtggatcttcgccggggcgtacgccacgatgcaggtcggacgcaccgcgttcgtgctgctggaagtcggccgcaaccatacgttggcgccgaacttccgccgcatgctggcctgggtcagcgtgtcggcctgcttctggctggccggcgcggcggccgagggccacctgcggctggcactgtgggcgatggcggcggcctgcgaatacatctcgccgatgttcggcttcgcgttcccgggcatgggccggtcgcacacccgcgactggaccatcgagggcggtcacctggccgaacgctgccagctgttcgtcatcgtcgcactgggcgagacgttgctggccaccgggggcgtgctaagcgatgtcgagcactggagcctgcaggtgatctcggcggtgctggccaccttcgctggcacgattgccatgtggtggctgtacttcggcatctccagccgcgatgccacagaggccatcacccacgccgaagacccgggccggatgggcgccaatttccattacgtgcatgccctgctgatcgccggcatcatcgccaccgcggtgggcaacgatctggtcatggaccatccggcggcggccgtcaccacggtgtacgccacggtgatggtggcgggcccgctgatctatctgctgggcagtgccctgtacaagcacgtggtctatgggcgcgcgccgcgctcgcacctgctgggcgccgccgcactactgatgctgggcctggtgttgccctggatgcacctgctggccgccggatggctgaccagcctggtgctgctgggcgtggggttgctggatgcgcggctgaagcggcgcacccggccgttgccgggctag

SEQ ID NO: 522314 - DNA, 267 bp, Stenotrophomonas maltophilia
atgcacgtgctcatggtgatgctgggtggcgtactgctgctgggggtattcgtgctgtttggccatctctggagcacgggcacctcgcagctgcccacggcactgatcgccttcatcgccacctggctgctggtggccgtggccaacatgtgggtaggggtcagcaaggccggctacgcggtacgcgaggagctgccgatcctgttgctggtattcgccgtgccggcgctgctggccggtttcctgtactggcgcctggcgcgctga

SEQ ID NO: 522315 - DNA, 870 bp, Stenotrophomonas maltophilia
atgcgcctttgcctgacgacccttgccctgactgccacacttgcctttgatgtgactgccgccgacgcaccgctgccgcagctgcaggcctacaccgtggacgcctcgtggctgcagccgatggcaccgctgcagattgccgaccacacctggcagatcggcaccgaggacctgaccgcgctgctggtgcagaccgccgacggtgcggtactgctcgacggcggcatgccgcagatggccggtcacctgctggacaacatgaaggcacgcggggtggcagcacaggatctacggctgatcctgctcagccatgcgcatgccgaccatgccggcccggtggcggagctgaagcgccgtaccggcgccagcgtagcggccaacgccgaatcggccgtgctgctggcgcgcggtggcagcaacgacctgcactttggcgacagcatcacctttccgccggccagcgccgaccgcatcatcatggatggcgaaggggtcaccgtaggcggcatcgcgttcaccgcgcacttcatgccggggcacaccccaggcagcaccgcctggacctggaccgatacccgcgatggccagccggtgcgcatcgcctacgccgacagcctgagtgcgccgggctaccagctgcagggcaacgcccgttatccacgcctggtcgaggactaccggcgcagcttcgctacggtgcgcggcctgccctgcgacctgctgctgacgccgcatccgggcgccagcaactggaactatgccgcgggtgcagaggccggagccaacgccctgacctgcaaggcctacgcggatgcggccgagaagaagttcgacgcacagctggccaaggaaacagccacggcacgctga

SEQ ID NO: 522316 - DNA, 540 bp, Stenotrophomonas maltophilia
atgaaccgttctctctccctcggcctgctgctgggcaccgtgctggccaccaccgcctgtgcacgtgccgccgaagagtccgccgccgcaccggtcgccagcaaggctccggtggcaccgatccaggccagcccggccaaggtcgatccggccctgccggtggccatcgtgcacaagaccgccagctgtggctgttgcggtatctgggtcgaccatctgaaggccgcgggcttccaggtggacgtgcgcgataccgatgacatgaatccgatcaaggtccgcctgggcgtgccggtcggcaaggcctcctgccataccgccgagatcggcggttatgtggtcgaaggccacatcccggccgaggacatcaagcgcctgctggccgaacgcccggccgcacgcgggctggtgctgcccggcatgccggccggttcgccgggcatggaaatgccggatggttacgtgcagtcgtacaccgtcgagctggtgcggaccgacggcagcaccgagccgtttgcccagcacgggcagggtggctga

SEQ ID NO: 522317 - DNA, 2286 bp, Stenotrophomonas maltophilia
atgtccgagcagaaaccgccgcgttacaagccctacaaccagcccgccggaggctggggtgccgccggcgccacggccaaggtgctgctgcagcagagtgtgatcggcaagggatcgaaggcattgctggcgatgaatcagcccggtggcttcaagtgccccagctgtgcgttccccgatgccgacgaacgcaagaagctggagttctgcgagaacggcgcgaaggcactggcctgggaagccacccagttccgcgccggccgcgaactgttcgcccggtacaccgtgaccgaactgatggcgcagaccgactactggctggagatgcagggccggctgaccgagccgatgcgctacgacgcagccaccgaccactacgtgccgtgcagctgggacgatgccttcgcgctgatcggccgccacctgcaggcgctggacagcccgcaccaggccgagttctacacctccggccgcacgcccaatgaagccgcgttcctgtattcgatcttcgtgcgcgagttcggcaccaataatttcccggactgctcgaacatgtgccacgagccgaccagccgtggcctgccgccggccatcggggtgggcaagggcaccatcgtgctgcaggatttcgagcatgccgaggcgatcttcgtgatcggccagaacaccggtaccaattcaccgcggatgatgagcaacctggtcgaggcgcgtaaacgcggcatcccgatcgtggcggtcaatccgatgcccgagcgtgcgctgatccgcttcgccgagccgcaggacgtggtgcagatggccacgttcggttcgaccgagatcaccagcgagttcgtgcatatccgcatcggcggcgacctggccctgatcaagggcatgatgaaggtgatgttcgagcgtgaggcacagggcgagcgcgtgctcgaccatgatttcctgtcggaacacacggtgggcctggaggcgctgcgcgaagacgtgatggcgcaggactgggaccagatcgtgcaggtgtccggcatttcgcaggcgcagatccgccgctgtgcggagatctacatccgttccaaggccaccgtgatctgctacggcatggggctgacccagcaccagtacggctcgcgcctgctgcagcaggtcgccaacctgctgttgctgcgtggcaacttcggcaagcccggcgccggcatcggaccgatccgtgggcattccaatgtgcagggcgaccgcaccgtcggcatcgacgagaagcccaagccggcctatctggaccgcgtgcagcaggtgttcggcttcgacccgccgcgcgagcatggccaccatgtggtcgaatccatcgaggcgatgctggacggcagcgccaaggtgttcatcggcctgggtggcaacttcatccatgccgtgcccgataccccgcgtgcgtatgaggcaatgcgtggcctggagctcaccgtgggcattgccaccaagctcaaccgcgggcacctggtccatggccgcgatgcactgatcctgccggtggtggcgcgctcggagcgcatcgttacgccggccggcgagcagttcgtcaccatcgaagacgcgatgtcgaatgtcaccgcgtcgcgcggggtactggagccggtcagtgccgaggtgttgcccgaggtcgagatcgtctgccggatggcactggccacgctgcccgacagcagggttgactgggccggctgcatgcacgactacgcgcccatccgcgagctgattgccgcggtgtatccggagatctacaccggcttcaacgagcgcatccagcagccacacggtttccatctggacattccgccgcgccgccgggtgtggcccacgcccaatggcaaggccaacatcctggtgatgcccggcctggacgtggacgatccggtgcacgatccggacatgctgcggttggccacggtacgctcgcatgatcagtacaacaccaccatctacagctacaacgatcgctatcgcggcgtgtacaacgatcgcatggtgctgttcatgaatatcgaggaccggctggcgcgcgggctggagaaggaagcgctggtcagcctggagacgatcagcggcgatggcgtgcagcgccgcatcgagggcctgacggtgctggactacccgatgccgcgcggcgcgctggccggttactacccggaactgaacccgttgctgccgctggactactacgaccggatcagcggcacacccgcagcgaagtcgatcccggtgcggatgcgggcgatggcggcggcgattgcgtga

SEQ ID NO: 522318 - DNA, 849 bp, Stenotrophomonas maltophilia
atgcctgattcgatcccgccgcacaccccgcctgccggcaccgcccaacgcccgttgcagcgctggcgcggcggcacgcaacagcagcaggtcgacgtggtggccgaggaagtgccggtggcgctgcgctacaacgatgccgcctttgccgtgatgatggccacaccctgtgatctggaggacttcgcactcggattttcgctcagcgaaggcctgatcagcgcgccctcgcagctgctgtcgatcgatatccacccacagctggaaggcatcgagctgcagatgaccgtggacgaggctgcgcccggcgcaaacctcgaccccgacaagggacgcctgctgcccggccgtggtggctgtggcctgtgcggcacgcgccagctggaagaagtgctgcgcccactgccgcagatccgcgagcgccgcagctattccgccaccgccctgcagcgggcgttggccagcctggcgcagcaccagccgatgaatgcggcaagcggctcgatccatgccgcggcctgggccgacgccagtgggcgcatcggctgggtacgcgaggacgtcggccgccacaatgcactggacaagctgatcggcgccctgcaccacaacgaacacgccatcgaaggcggcctgctggtgatttccagccgggccagctacgagatggtgagcaaggcagtgcgcgccggcgccagcgtgctggcggcagtgtccgcgccgaccgcgctggcgatcgatctggcccgcagcgccggcctgtgcctggtcgggttcgcgcgggaaagcgggttcaatgtgtatacgcatccagagcggctgcaggcgcacgacggccacgcccgctga

SEQ ID NO: 522319 - DNA, 537 bp, Stenotrophomonas maltophilia
atgtcccgtgtccccctgatcgatgccgccaacaccaccgccgaccgccaggccctgctgggccaggtccacgctgccttcggcgccaccccggccatgttccgcgccgtggccaactcgccggctgccctgcagagcatgtggggttcgttcggcgcgctgggcggcggtcgcctgtcgccgctgctgggcgagcagatcgccgtggccatcgccaaccgcaacgcctgcgagtactgcctggccgcgcacacggcattgggccgcaaggccggcgccagcggtgagcagatggctgccgcgcagatcggccagtccagcgacccggccactgcggcggcgctcgacttcgcgttgaaggtggtcgagcagcgtgcgcagatcgccgacggcgacgtgcgggcgctgcgcgcggccggcttcgatgatgagcaggtcgtcgagatcctcgcgcatgtggcgctcaacctgttcaccaactacgtcaacgtggcgttcgacgtgccggtggacttcccgaaggtcgcgctgcgctga

SEQ ID NO: 522320 - DNA, 882 bp, Stenotrophomonas maltophilia
atgcgcatgcgcaccgccacccctgcgccagatcgactctcctcgctgctggaacgcttccgggtgcaggcggcgctgttccacagtggcccgctgtgcgggcagcatgtcttcgagccgcagcccggtcgtgcgttcctgcacatcctgcgccagggtgagatggaagtccgtcatcctgggggcgatagcgcgctgccccgcttgaagatcgatacacccagcctcctgctgtatccgcagccgctgcaccatgtgttcttcaacgctccgctggacggcccggatttcacctgtgccacgctggatttcgatggtggcgcgcgcaatccgatcgtgcagtcgctgccaccggtgatggtggtgccgctggccgcgatcaccgaactggatgacaccctgcagctgctgttcgccgaagccgatcgccagcgctgcgggtcacggctgctgaccaaccgcctgttcgaggtagcgctgatccagatcctgcgctgggtggtcgaccacccggatgcagccggcgtcagccacgggttgatgcgggggctgtccgatgcgcggctggcacgcacgctggtggcgatgcaccaggcaccgcaggacgaatggacgctgccgcgcatggccgcgaccgccggcatgtcgcgcagcgcgttcgcggccgtgttcaaggacgtgatgcaggcaacgccagccagctacctgctggactggcggctgagcctggcctgcgcgcagctgcgggccggcgtggcggtcaagcaggtggcgatcgaggtggggtttgccgataccgcatcgttgtcgaaggcgttccgcaagcggctgggggcttcgccgagggcgtggctggccgcgggcgccgcgcaggctgggtaa

SEQ ID NO: 522321 - DNA, 558 bp, Stenotrophomonas maltophilia
atgagaaccagcaagcgcgaccgcatcctcgacgccgccgtcaacgtgatcaatcgtgatggcgtgcgcgcagtgaccttcgagtcggtggcggccgaggccaagctgacccgcggcggcctgctgtaccacttcccctcgcgcgaggcgctgctgcgcggcatcgacgagcacctggtgcaggcctgggagacgtcgatggaaacgctgctgggcaagcgtgcagacgaagcctcggcgctggagcgttaccagaccttcgtgcgcgtctcggcgcagagcgctacccgtgccgagctgatgttcatgctcgaatcggccgacccggacgccgatgagcgcccgtggggcccggcggtacggcgttgggcgccgctgccgccgtcggccgggcagagcgacccggccgcgctcgacaatttcgtggcacggctggccgccgacggcctgtggatctacgaggcgatgtacgaagggcagctggatgaaagcgttcgcgcccaggtggccgaacggatcgccgggctgctggcgaagcccgatggaatatccagttga

SEQ ID NO: 522322 - DNA, 1533 bp, Stenotrophomonas maltophilia
atggcttcgtcccagcccttggccggtgctccggccctgtcgcgtgcccgtcgctgggcactgttgttcaccgtcgccgccggcctgctgctggtcacgctcgacaactccgtgctctacaccgccctgcccacgctgaccgaagaactctcggccagtgccggccaggcgctgtggatcatcaacgcctatccgcttgtgatggccggcctgctgctgggtgcgggcacgctgggcgaccgcatcggccaccgccgcatgttcctgatcggcctggtggtgttcggcgtggcatcgttggcagcggcgttcgccgacaccgcagggctgctgattgccgcgcgcgccttcctggcggtcggcgcggccgcgatgatgccggccacgctggcgctgatcggcctgagcttccacgaagcgcgcgaacgcaacatcgccatcgcgatctggggttcggtggcgatcgtcggtgcggcgcttggcccgatcatcggtggctggctgctgcagcatttctggtggggttcggtgttcctgatcaacgtgccggtggtcgtggtcgcgttcgtggccacgctgctgctggcaccggaaggccagcgcgacccctcgcgaccgtgggacctggtttcgtcgctgctggctctggctgcactgtccggcctggtgctggcgatcaagtcgctgatcgctacgccgccgtcgtatgcgctgggtgcaggcgcgctgctgctggccgccatcagtggtgcggcgttcgcgcgccgccagcagcagctgccgtacccgctgctggactttgcaatcttccgcaatccggcgttcctggccggcacgttgtcggcggtgttcaccctgtttgcgatggccggcctgcagctggtcaccacccagcgcttccagctggtggcgggcttttcgccgctgcaggcgggcctgctggtgtcggtggccgcgctgggcagcctgcccagtgcgctgctgggcggcagcatcctgcaccgggtgggcctgcgcccgctgatctgtggcggcctggccgcaggtgcgctgggtgtcggcgtggtggcattcggcttcccgcacggcctcggttgggtggtcgccggcatggcgatcaccggcttcggcatgggttcagccatctcggtggcgtccaccgccatcctcaacaacgtaccggcgcaccgtgcgggcatggcctcgtcggtggaagaggtgtcctacgagttcggcggcctgctggcggtggcgatgctgggcagcttgagcgcggcgatgtatggcgcattcctgccggtctcggccgacatgcccgcgcttgcacgggaaggcttcagccaggcgctgcacgtggcacgtgaaagcgggcagggcgagtggttcgcactggccacggccgcgtatgaccgcggctaccagatcgtgctgctggtgatcacggtggtgctggcgctgggcgcgtcgatcatcgcgcgcctgctgcgcgggcgcgtcggcagccgcgagggtgcggccgatcgcgtaaaatga

SEQ ID NO: 522323 - DNA, 747 bp, Stenotrophomonas maltophilia
atgcgccggtgctggatcctggctgccgcggcgctgctgggcgcaatcgtgctcctggcgtggtggcagcggcagcgcgcagccatcgcgccgccggcggtcgcgttcccggcgccggcgtccgacgccagccagcgcatcgaacagcgtttgggtgacgaccacgcgttccgcaacgacgtgctgttcctgcttgcggcaacagtgcgcgaccgctgccagccagcgcaggcggggctgctggcgcgcatggccaatcgtgcatcgctgccggtgctggcgggagtcagcgcggtgacccagcaggatccatcgctggaccggccgatctaccagtacatccagcatcgcgccgatgcgacgcggtgcgggcagccgctgcagatgccgttgggcgctgggcgcagcatggcgttggacatcgaacagtacgcgcgcaccttcccggacagctacttcgacccgcagcgcagtagtgaaccccgggattttggtggacggtcgttgcagcagcgcgctggcaacgcctgcaacagcgtggtgtattcggtgctgccgctgggtggcaccgactggcggtgcagcagcctgcgcgcgaatgcccgcgcgcgggtgcgcggcctgtgcgaggacgagctgcggcgccagcacggggcaacgggcggggagctggacatggccgtggggcagggcatgcaggcggcggtggtagcggcgattgctgcgctgccggaagactgccggtga

SEQ ID NO: 522324 - DNA, 618 bp, Stenotrophomonas maltophilia
atgaaccgtagcgctgtgttgctgcttggatgcgtctggttggcaggctgcacgtcaccgggcggtgatgccgtggtggccacgccgcgcgacaagccgttgccctccgccgcgcccgaaacgcctatcgaccgctgggacgcgctgcggccggacgaagtgacctaccagcgcccgcccccgcagatcggcttgtcacgcaatggcatggacggggtgggcggcctgatcgacgacaccggctcgggcacgccaccggggcaggaaatcgaccattccagcccggatcgcgccaagcagttcggctcttcgcgcgtggtcgacgctgtcgacggtcgcgcggtggatctggatggctacgtggtaccgctgggcaccaatgatgccggcctggtcgatgagctgctgttcgtgccgttctacggtgcgtgcatccacgtgccgccgccgccaccgaaccagatcatccatgtgaccctggccacgccgatcacgctgggcgatctttgggacccgtaccggttggccggccgcctgcaggtgaagcgcttcgatgcggacattgccagcgcgtcctacgatgccgcagcggccacgctgacggcgatccgcaactga

SEQ ID NO: 522325 - DNA, 552 bp, Stenotrophomonas maltophilia
atgcgctggatgctgtcattgccgatggtactggcgctggcagcctgcgagcggccggtggataccggtgtgcaggcgttgccacctccgccggttgtcgaccacgctggcgctgcggatgcggcggagcaggaactggactggttgcagatgatgcccaaggacgagctggccgcgctggagcgcggagagggcccggaggtggagcacaacggcaaccggcgcatgccgcaattcggcacgttccgtaccgtggatacggtgctgcagcgtccggtgcgcctgcccggctacgtggtgccgctggccactgcgcaggatgggcgcctgaccgaattcctgttcgtgccgtactacggcgcctgcatccacgtaccaccgccgccaccgaaccagatcgtgcacgtggtgctgccgcgcccgatcgccatgccggacatgtactcgccgttcttcctggccggcaccctgcgtgacgagcggctggatgatgatctggccggttccgcctacaccatgcgcgatgcccagctgaggccctatgaaccgtag

SEQ ID NO: 522326 - DNA, 1254 bp, Stenotrophomonas maltophilia
atgcttgagcttgcctgggccagcctgcgcagccgcgcgttgagcgtgggcctgaccgtgctggtcatcaccctcagcgtggtgctgttgctgggtgtcgagcgtgtgcgcacgcaggcgcacgaaggcttcgccagcacggtgtcgggcacggacctgattgtcggtgcgcgttcggggccggtgaacctgctgctgtacgcggtgttccatatcggtgaccccaccaacaacgtgtcctggcagtcctaccaggcgctgtccgcaataccgcaggtgaagtgggcggtgccgctgtcgctgggcgattcctggcgcggctaccgggtagtgggtaccactggcggctactttgaacactatcgctatggttccggtcatgcgcttgcctttgcacaggggcggccctttgatgatctgtatgacgcggtgatcggcgcggaggtggcacgcgcgcagaaggtcggcctcggcgacgagatcgtgctggcgcacggcaccggcgcggtcacgctggccacgcatgccgacaagccgttccgggtctccggcatcctgcagcgcagcggcacgccggtggattcgtcgctgctggtctcgctgccggcgatcgaggccatccacgtcgactggcgctcgggtgtgcagctgcgcagccagagcgtcagtgccgagcaggcgcgccacctcgatctgaccccgaccagcatcaccgctttcatgctcggccttaactcgcgcatcgccaccttttcggtgcagcgcaggatcaacgagtatcccgaagaggcgatgctggcgatcctgcccggggtgacgctgcagcagctgtggcagtcgctgggcacggccgagcgcgccctgcagctgatcagcgcgttggtggtgttgctgggcatggtctcgctggtggcgttgctggtctcgacgctgcagcagcggcggcgcgagatggcgatcctgcgtgcgaccggcgcgcggccgggttacatcgccggcctgctggtagtggaagcggtggcgaccagtgccgtggcctgcgtgctggcgttggcgctgctggtggccgccagcatggccggacgcggctgggccctggccaccttcggcctgtccatcacccatgtctggccggatggccgcgagctggcctgggtggcgggtgtgttggcgatcagcgcggtggccgggctggtgccggcgttgctggcctaccggcgcaccttggccgatggcctgtcgccgggaggctga

SEQ ID NO: 522327 - DNA, 690 bp, Stenotrophomonas maltophilia
atgcgaccgctgatcgtgctggatggcgtgcagttcggctatggccggcggctggtgctggacgtgccgcggctatggatcgagcagggcagcagcgtgctgctgcgcggaatcagtggcggtggcaagagcacgctgctgggcctgctggcgggcgtgctgctgcccggcaacggccgcatccaggtcgccggccacgcgctgcaggcgatgcgtggtgccgcgcgggatcgcttccgcgccgaccacctgggcgtgatcttccagcagttcaacctgctgccgtttctcagcgtgcgcgacaacatcgcactgggcctgcgcttctcgcgcctgcgcagtgcgcgcatcagcgggccgttgaatgccgagatcgcgcgactgctgcaggccctgcagctggaccccgggctgatgcagcgccgcgccggcacgctcagcgtcggccagcaacaacgcgtggcggcggcacgcgcgctgatcggccgcccggcgttgctgctggctgatgagccgacctcggcgctcgaccgcgacgcggcgaccgcgttcctgaagctgatgtcggcgcaatgcgaggcggccggcaccacggtgctggtggtcagccatgacgacagcctgcagccgttgttcgaccgcacgattgccctgtctcagatcaaccaggcaggtgccggccatgcttga

SEQ ID NO: 522328 - DNA, 534 bp, Stenotrophomonas maltophilia
atgaagcgttctgctgctcttttcctgctgctggctgccagcgctgcacaggcccatgatgtccgccagctcggtgcgcacgtacacggccaggccaccgttgatcttgcgcttgaccagcagacgctggaattcgccctgcaggcgcccggcatcggcatccttgatttcgagcggccgccggccaatgcaaccgagcaggccgcgctggcgcgtgcgactgcgctgctgcagggcggcagctgggtcaccttgcccaccgccgcgggctgccgccttatcgcgaacgatgccagggccgagggcttcggtgcgatggctgccgcgccgccgcccggtcagcatcgccacgcagggttcagcgcaaccctgcggtaccagtgcaccaagcctgccgggttgcgggccatcgtcgtgcgcctgcccgcagtattcccgggcctgcacgaagtgatcgtcaacagcaccaccgcccatggccagaaccgcagcgtgttgaccgcggacaatctgcgcgtggtgctggcaccgtga

SEQ ID NO: 522329 - DNA, 477 bp, Stenotrophomonas maltophilia
atggaccacatccccacgacgcctgcaagggccctggcccagccgccagcttcggcacgctggcacccccgcttcgatctagccggggcctggctgtccctggcctgcgccgcccattgcatcgccctgcccctgctgctggccttcgtgccggcagcgatgatggcgctgcgctcgttccagcaccccggccatggcgcgatgacgtttctgctgatgatgtcgcgctgggaatggctgtttgcgctgctggcctcgtcgctggccttggcgagcaccttggccggggttcaccggcatgggcgctggcgacctgcaaggctggcctgcgtcggcgccctcctgctgttgccggcctcgctatacctgccgctgaaggaatcactgctctggcatggcgtggcgacagctggtggtggcgtgctgctggcatgcgcgcacatcggcaaccggcgcgcgctgcacaaccgccggtag

SEQ ID NO: 522330 - DNA, 903 bp, Stenotrophomonas maltophilia
atgaaaaccaccctggatgagctgaaggccttcgtggccgtggtcgacagcggttcgatcactgccgcggccgaagagctggagctgaccatctccgccaccagccgcaccctggcgcggctggaggacaagctgcagaccacgctgctgcggcggaccacgcggcggctggagctgaccgaggagggagccgcattcctggagtacgcgcgcacgatcctggccacggtggacgaggccgaggaacagatggccgcgcggcggctgcagccggtcgggcgcctgcgcgtagacgccgccacgccgttcatgctgcacgtcatcgtgccgttgctggagggcttccgcgagcgctacccgcaggtggagctggagctgaattccaatgaaggcatcaccgacctgatcgagaagcgcaccgacgtagcgttccgcattggcgtgctgcgcgattccaccctgcatgcgcggcccatcggccacagccgcatccgcgtggtggccagccccgagtacctgcgccggcgtggcacgcccacgcgggtggagcagctgcgcgagcacgacctgcttggcttcacccagcccagttcgttgaacgaatggccgctgcaggatgccgatggcggccctttcgtgattgagccggcgattgcttcatccagtggcgagacactgcggcagatggcggtgaccgggctgggcatcgcctgcctgtccgacttcctgacccgccaggaccggcgtgacggccgcctggtgcagttgttcgccaagcagacgcaggaggtgcgccagccgatcaacgcggtgtactaccgcaacaccgcgctggccgcgcgcatcacctgtttcgtcgaccacgtgacgcagacgctcggccagcgtccgtttgacgaataa

SEQ ID NO: 522331 - DNA, 804 bp, Stenotrophomonas maltophilia
atgagcgttccttcctttggcgtcggcaccttccgcctgaccggccagaccgtcatcgattcggtgcgcaacgccctcgacgtcggctaccgtgcgatcgataccgcgcagatctacggcaacgaagccgaggtcggccaggccatcgccgaatccggcgtcccgcgcgacgagctgttcctgacaaccaagatctgggtggacaactacgccgccgacaagctgatcccgagcctgcgcgacagcctggccaagctgcgcaccgggtacgtcgacctgctgctgatccactggccggcgccgggcaatggcgttgaactgcgcgagtacatgaccgcgctggccgaagccaaatcgctgggcctgacccgtcagatcggtgtgtccaacttcaacatcgaactgacccggcaggccatcgaggtggtcggcgccggcgagatcgccaccaaccagatcgaactgagcccctacctgcagaaccctgcattgactgccttcctgcaggaacaaggcatcatcgtcacctcctacatgaccctggcctacggcaaggtgctgaaggacccggtgctggccgccatcgccgacaagcaccaggccaccgtcgcccaggtcgcgctggcgtggtcgctgcagcggggttactcggtcatcccgtcctcgaccaagcgcgagaacctggccagcaacctgcttgcccaggacctgcacctggatgccggtgacatggccgcgatcgccgcgcttgaccgcaacggccgcgaagtcgatccgcccggcctggccccggcctgggactga

SEQ ID NO: 522332 - DNA, 975 bp, Stenotrophomonas maltophilia
atgggcagtgcgttgacgcggctgcaggccggtggtttcagcatcggcatcgaagcaccgctggacaatgactggacgccgctgggcgaacaggcacgacacgccgcgcgacgcctgcccggcgaaccggacctgcagcgccatgcggagctggcacggctggccgaccgccttggcttccgtgcgctgtgggtacgcgacgtgccggtgtacgacccggccttcggcgatgccgcacaggtgttcgaggtgttcagttacctcggctacctggccggcatcaccgagcacatcctgctgggtaccggcgcggtggtgctgccgatccgcgagccgttgctgaccctgaagtcggcacgcagcgtgcagcggctgagcggtgaccgcctgctgctgggcgtggccagtggcgaccgcccggtggagtacccgctgttcggccgcgacttcgacagccgtggcagccgcttccgcgagcagatcgcactgctgcgcgaaggcgccgccgcgcacctgccgcagggcttggacgtgttgcccgcggacggcccggccctgccgctgttcgtggcaggcctggcccagcagcaaccggcgtggatcggccagcacatggatggctgcctggcctacccgggcacgccgcaggaccatgtacaacgcgtggcggcctggcgcgccgtggccggtaacaagccctatgccagcttcatccacctggacctggtggccgatgccgatgctcctctgcagcgctggcgcttcggcctgcgcggcggccgcaacgccctgctggccgagctgcacgccatgcgggcggccggtgtcgaccacatcggcctgcagttccgccgcaacgaacggccgttggccgaaaccttccacgaaatcgccgagtacgtgctgccgcacttcccggcccacgccggcgccgctgcgccgcatgccccgcttgccgcccccgcgacggcctga

SEQ ID NO: 522333 - DNA, 939 bp, Stenotrophomonas maltophilia
atgaagatgaagaccctggccgcgctagcgctggctaccctgccgctgtccttccaggccactgccgaggactggtacccctctgcctacggcgccaacgacgagatcggcgcggccaacctgctgaccgccgacgtggtcaagcacgcggtctcgctggtcaggaccggcaagacctatccgctggcggtgccggtggacaagaacctgcccgcgttccgccaccgcagcttccgcctgtacaacgtgcaggtcggccagcaagctggcaagtcgctgggccccaacaagttcaccttcaacgatgaactggtgaacgcctggaccggcgttggcacccagctcaacggcatcggccatatcggcatcgacaacgtctactacaacggcaacaaggccgccgacttcgtcaccgtggacggggtgcgcaagctcggcgtcgagaaggtgccgccgatggtcacccgtggcgtcgtgctggacatgaccacgtactacggcaaggcgatcgtgcccggcggcaccgagttcaccgtggccgacatccaggccgtgctgaagaagcaggggctgcgcctgcgcaagggcgacgtggtgctgttcaacaccggctggctggaactgatcggcaaggacgacaaacagttcctggaagtggaaccgggtatcggcatggaggcggcgaagtggctggccgaccagggcatcgtcgccttcggtggcgacacctgggcctcggaggtctacccgaacccgaacggtgccgaggagttcccgatcaaccagtacatgctggccaagcgtggcatctacaacctggagctgatcgacagccgtgccctggtgcgcgacaaggcctgggaattcctgttcgtgctcggccagccgctgtacgtcggttcgacccaggtcaacatcaacccggtggcaatccgatga

SEQ ID NO: 522334 - DNA, 324 bp, Stenotrophomonas maltophilia
atgaacaccgccgctgaccttcccgtgttcgccggccgccgcttccgcgtcagctatgacggcctggccgccgacaatgtctacagcgccgatggccgccacgtgcagtacgccatcgtctctggcgcctatgccggtgcgcggggcgaagccgcctgtgagtggcagcggatcagcgacggggtctatgccatttcgtggcaggaagccgatggcgctacggtcgtgcatgtcgatgacttcgcgggcgggcattcgctggcctggttcaccgccaccgatggcagtttccatcgcatgcaagggccgctgcacgcgctgtga

SEQ ID NO: 522335 - DNA, 954 bp, Stenotrophomonas maltophilia
atggaccgcttcacggccatgcgcgccttcgtccgtatcgtcgagcgccgcagcttcacccgggcctccgaggacctgggcctgccgcgggccacggtgaccgacgcgatcaaggcgctggaacagcggctgggcgtgcgcctgctgcaccggaccacgcggctggtggtgccgacgctggaaggcgaggccttctatggccgttgtctgcgcctgatcgccgacatggacgacgccgaggccgccttccgtgacgcgccgccgcgcggccccttgcgcattgaggtgcatggcacgctgggccggcacctgctgtttccccacctgccggagttcctgcagcgctacccggagatcgaactggaggtcagcgaaggcgaccgctatgtcgacctgctgcgcgaaggcgtggatgcggcgctgcgggtgggcacgctggccgacagcgatctggcggcgcgccggttggcgatgctgcgcgaggtcacggtggccgcgccgggctacctgcaggccaagggcgtgccaggcagcatcgagtccctgctgggtggccatgaaatggtgggctatcgctccagcgccaccggccagctgattccgctggagttccagcagggcgggcaggtgcgctacgtgccgctgccggtgcgggtgcgcgtgtccggtgcggatgcgttcctcggcgccgcgctggcgggcctgggcatcatccaggctccgcgctaccggatggacccgtatatcgcgcgcgggcagctggtggagctgttgccggacgcgccgccgaccccaagcccgttgagcctggtctacccgcgcaaccgcacgccgtccccacgcttgcgggtgttcatcgactgggtggccagggtgttcgagcaggccgggggtgccggccagcggccggcactgccggagcggcacgcgaagctgtccgaccgcacgcggtag

SEQ ID NO: 522336 - DNA, 744 bp, Stenotrophomonas maltophilia
atgaccctctcccccgcccgctctgtcgccctggtcaccggcggatcccgtggcatcggtgccgccatctcgcgtcggctcgccgccaatggccacgcggtcgcgatcaactatgcgggccgccgcgacgacgccgaagccttggcggccgaactgaacgccgccggcgcgcaggccatcgcgctgcaggccgatgtgtccgatccgcaggcggtgcgccagctcttcgacgccatcgaagcccgtttcggcggcatcgacgtggtggtcaacagcgccggggtgctgcagctggcaccactggccgataccgacgacgccctgttcgagcgggtgatcggcatcaacctcaggggcgccttcaacgtgctgcgcgaaagcgcgcgacgggtgcgcgacggtggccggctgatcaccctgtccaccagcgtggtcggcatccggctggataactacagcgtgtatgcggccagcaaggcggcggtggagacgatgggcgcaatcctcagcaaggagctgcgcgggcgcaacatcaccgtgaacgccgtggcgcccggaccgaccgccaccgatctgttcctggatggaaaatcgcccgagctgatcgagcggctggcgaagatgaaccccctggagcggctgggtacgccggaggacatcgccggcgcggtggggttcctggcaggtgccgatggcggatggatcaacggccaggtgctgcgcgccaacggcgggatggtatag

SEQ ID NO: 522337 - DNA, 3078 bp, Stenotrophomonas maltophilia
atgatcgatcgcctgattgcctattgcctgcgccagccgctgatggtgatgctggcgctgctgctgttcatcggcgctggcattgccgcgttccgcgtgctgccggtggaagcctttccggatgtgtccgacacccaggtgacggtggtatcgctgcacccgggccgggccgcggaggaggtggagcgcgaggtgacgatgccgctggaagtggcactgtccggcatcccgcattcggtgcgggtgttctcgcatacgcaattcggcctgtcgatgatcatcctgaccttcgacgacaaggccgacgattacttcgcgcgccagcaggtgctggaacgcctgcagggcgtggagctgcccgaaggggtgacgccggagctggaggcgatgagctcggcggtgggcgagatctaccggtacgtgctgaaaggcccgcacctgacaccgacccagctgcgcaccgtgcaggaatggacgatggagcgcagcctgcgcaccgtgccgggcgtagccgatgtgatcagtttcggcggcttcgcgcgtactttccaggtcaagccggacctggacaagctgcgtgaccgcggcatcagcctggctgagttcgccgaggcgctggagaagggcagctcgaacgcaggcggcggctacgtggaacgtggccagcagcagttcctgatccgcggcgtcggtctgatgcgttcgccggccgacatcggcaacgtggtggtcgcgcagcgcagtggcacgccgatcctggtgcgcgacctggccggcatcgccgataccggcctgccccggcagggcctggtcggccaggatgacaacgacgatgcggtgttcggcatggtgctgatgcgcaagggcgagaacccgtccgacgtgctcgacgccctgcatgcgcgcatcgccgagatcgaagcgaaccagctgccggccggggtcagcatcgagccgttctacgaccgctcgtggctggtctcgaccacgctgaaaaccgtcttcagcaacctgctggaaggcgcggtgctggtgttcctggtgctgtggctgttcctgtacaacgcccgtgccgcgctgatcgtggcggcgatgatgccgcttgcgctgctgtcgaccttccttggcctgcatctgtggggcgtgccggccaacctgctgtcgttgggtgcgatggacttcggcatcatcatcgatggcgcggtgatcgtgaccgagcacatcgtctcgcgattgtcgaagctgccacctgcggccgaccgtaagacacggttctcgaccattctttcggcagcgtcggaagtgggccggccgacgttcttctcgatgctgatcatcatcgccgcgcacatcccgatcttcaccctgcagcgccaggaaggccgcatgttcgcgccgatggcgtactcggtgacctcggcattgatcggcgcgctgatcctggcgctgaccgtggtgccgttgttctgctactggtggctgcggcgcgaccgcatgcgcgacggcaatccgctgatggaccgcctgaccggctggtaccggccggtcctggagcgcgcactggcccgcccgcgtgcggtagtgctgaccgcgattgcgctgctggtcggcacgctggcattgggcacgcggctgggttcggagttcctgcccgagctggacgaaggatcgatctggctgacggccacgctcgacccgagcaccagcctgggcgaagcgcagcagcagtcgcggcgcatccgtgagctggtcggcagctttccgcaggtatcgacggtggtggccaagctgggacgcccggaagacggctccgatgccaagggcgccaaccagatcgaggcgctggtggcgttgaagccggagaaggaatggccgaaaggcgtgggcaagcgacagctggtgagcgacctgcagcgcacgctggagcagcgcattccgggccccgagttctcgatttcgcagcccgtgcgcgacaacatcctggagagcatctcgcagatcaagggccaggtggtgatcaaggtcagcggctcggatctggacgtgttgaaccagcaggcgcaggcgatcctcggccaggtacgcggcgtggagggcgtggagagcgccttcatcgaccgcgacgggtcattgccgcagctgcagatcgagatcgaccgcgaccgcgccgcgcgctatggcctgaacgtacgcgacgtcgacgaagtgatcgagaccgcactgggcgggcgccaggtcggcgagctgtgggagggtgaccgcagattccccatcaccctgcgcctggacgatgccgatcgtgacctgcagcggctgcgtacggtgccggttggcatcggcgatggccacacggtgacgctgtccgacgtggccgacttccgcatggccagcggcgcgatcaacatctcgcgcgagaacgcccaacgggtgaaggcggtgagcatcttcatcgccggccgcgacatgggcagcgtggtggctgacatgcgcaagcgcgtggatgccagcgtacagctgccggaaggctatcggctggagtggtccggcgagttcgagaaccagcagcgtgcgatgaagcggctgggctgggtgattccgctgtcggtgctgatcatcttcgtgctgctgttcgatgccttcaaggacatcagcagcgccgcgctgatcctggccaacgtgccactggcgatgatcggcggcatcctggccctgtggctgaccggcattccgctgtcggtgtcggcggcaatcggcttcattgcattgttcgggcaagcggtgctgaacggcgtggtgatgctcagccgcttcgcccagttgcgcgagcagggcatggacctgctgcagtcggtggtgcagggttcgctgcagcgcctgcgcacggtgctgatgaccgcactactggcgatgttcggcctgctgccgatggccacctcgcacgcgatcggtgccgagacccagaagccgctggcggtggtggtgatcggtggtctgctgtcggcgatgctgctgaccctgctggtgttgccgacgctgtactactgggtgcatcgccaccgcgaggcgcgcatcgcgtga

SEQ ID NO: 522338 - DNA, 1173 bp, Stenotrophomonas maltophilia
atgaagtccaccgtcgcccatcgcccgcgggcgcgacatgccatgctgccggccctgctggcgctggccctgctgggcggctgcggtcgcgaaccggcgtcgtataccaaggatgcgccgcaggtcagtgccggccagatcctgtttccggccggcagccgccagctggatgtgctgcgcagcgagctggtgaccgccggtgccagcgccagcctgcagctgccgggccgggtggtctgggacgagacccgctccagcgcgctgcgcaccccgctggcggggcaggtggcgcgcatcgaggcacaaccggggcagaaggtgaaggccggccaggtgatcgcctggatcacctcgcccgagttcggccaggcgcaggcggagggcgtgcgtggccgtgccgagctgcagctggcacgccgggaactggaccgcacccgcgaactgcacgcggcaggggtggcgtcgggccgtgaactggacgaggccgaggccagcttcgccggcagccaggccgatcacgcgcgcgcgaccgccttcgccagggcgtatggcaacggccagcacgtcgaccaacggctgccgctgcgcgcacccattgatggcgtgctggtggagcggcggatgagcccgggcatggcagtcagccccgacagcgaacagccgctggcgatgattggcaatcctgatcgcctgtggttgctgctggatgtaccggagagcctggccggacgcctgaaggcgggcatgcaggtgagcgtgcccggcgccgatgggcagccgcagcaggcgaccctgcagcacgtggatgacttcgtcgacagcgaacgccgcgtggtgcaggcgcgcgccgaactggacaaccgtgcgcgcggtttcaaggcgggccagtacgtgcgtgcgcaggtggcagtgccggccgggggcggtgtctcgctgcccgatgctgcggtactgctcatcgacggcaagcaggtggtgttcgtggaggaggccaagggccgcttcgcgcgccgcgccgtgcgtgccgaggaactgggcgatggccgcctgtgggtgcgcgagggcctggcccagggcgccagggtggtggtcgaagggggcctgttgctgcagcagctggtcgacagtgcgcccgcagccgccagcaccgggacggggcacgccgcgccatga

SEQ ID NO: 522339 - DNA, 1248 bp, Stenotrophomonas maltophilia
atgaatttctcccgtcgtcttgcggccctgctggccgccctttcgtgcgcgcctgcggcttcggcgctgtccttgcaggatgcacagcgtgcaatggaagcgcacaacccggacctgcgcgcggcggcattggaactgcgtggggtgcagggcgatgcgctgaccgctgcgttgcggccagcggccgagctgtcgatcggcagcagcaagatcagcccgaagcacggcatcggcccggggcgctggcaggacaagcgggtggacagcacgctgggcctgggctggacctgggagcgcggcggcaagcgcgcattgcgcatccgccaggcggacgcgctgctggaagtggccgggctggacatgctcgatacccggcgccggcagcaggtggcactgcatgaagcctatttcggcctgaagggcgcgcaggagcgggcgcagattgccgaggccaaccgccagagttcggccgaacagatggcggcggccgacaagcaggtggccaccggggcgatggcgccggtggatcgcgcgcggatggcggtggaccatctggcggtggccgatgcggcgcgcgaggcggccctggatctgcgtgacgcgcggcatgcgctgggcctgctgctcggcagcgatgacagccgcgacctcagtgccgatgacccctggccggatgccagcagcgtggccagggtgcgcgcgttcgatccgcagcagcgtgccgatctgcgcgcggcacgctcgcgcctggccgccgccgacgctggcgtggccctggcacgcagcgagcgccaccgcgacatccagctgggtgtggaggccgagcgcgagcccaccgatatcagcggtgtcacctggggcgtgtcgttgaccattccgctgggcggcccgtcgcgcgcacgcggcgcgatccagcgtgccgaggccgaccgggacagcgccgcgctggaactgcagctgctgcagcgcgaagcacacgctgaactggaccagctgcaggccagcgtgcagtccgccgcgcagcgccgcagcgattacgaggggctgcagtccgacgctgcgcgcaaggcggtggagggcatcgaactggcctatcgccgtggcgccgccagcctgaccgatctgctcgacgcgcgccgcagctggcgcgagttcgaggccgcgctgattgatgcgcgtgccgaccatgccattgccttggcgcgctgggaagcggccacatccgttgctgaaggagagtcccgatga

SEQ ID NO: 522340 - DNA, 675 bp, Stenotrophomonas maltophilia
atgcgaatcctgctgatcgaagacgacgccgccctggccgatggactgatccgcgccctgcagggtgccggccatctgtgcgaccacctttcgcgcgggctgcacgcgccggctgcactggccagcgcgccgtatgacgtgatggtgctcgatctttcattgcccgacgtcgatggcctcgacctgctctcgcgcctgcgcaacgacggcgtcacactgccggtgctgatcctaacggcgcgcgatggcgtggaggaccgcatcctcggccttgaccgcggtggcgacgactatctcgccaagccgtttgcactcggtgagctggaagcccgcctgcgtgcgctgtcgcgtcgccgcagcgacgcaccggcgcagaagcggttgggccggttgtgcttcgacagcatccgcaatgaagtgcaggtggaaggccagcgcatcgaactgaccgcgcgcgagctgtcgctggtcgaggcactgatgcagcatcctggccgcaccgtcaccaagcagcgcctgttcgacgcgctgtacagctgggatcacgaggccaacctgtcagtgatcgaagtgcatgtcagccgcctgcgccgcaagctggaacaggcgcgcgccggcgtcggcatccgcatgctgcgtggcctgggctatcggctggaagccggtggtgactga

SEQ ID NO: 522341 - DNA, 1377 bp, Stenotrophomonas maltophilia
gtggtgactgagcgtgtgcacagcctgcgtggcctgctgctgcgccgcctgtggctgcccctgctggtgctgctgctgtgcagcgcgatcggttcattcgcgttggcccgcttctatgccggccaggtctatgaccgctggttgctggactcggcaatgtcgttgtccgagctggtgaaggtgcaggacgggcgtgcctcgatcgagatcacgcccgcggtgtcgcgcatgttcacctgggataccgctgacgaagtgcatggcgaagtggtcgacgctgcgggcgggcgcctgtatggggacctgcccgaagcgctgccccgccccgcgatcgctgccggcagcgacgatgccgtctactacgacgcgcgcctgcgtgggcagccggtgcgcatggtcgaggtcgtggtcagcgctgggccgggccacgatatccgcctgcgcgtggccgagacgctgcgcaagcggcaccggctggagcgcaagctgctgctggccagcatcccgttccaggccgcgatcctggcgctggccgcgtggctggcctggtccggtaccggcgcggctgcacgccatgccaaccaggtggcgcggcggctggccagcccgcgtcctgacccgctggcgccactggagcccgcgcaggaagccccacgcgaactgtggccggcggtcgaagcctacaacgcactgctgcaacggctggacgcgatgcaggccgcgcaacggcgcttcgtcagcaatgcggcgcaccagctgcgcacgccgctggcggcaatgcaggtggagctggagagctcactccgccaacaggatccgcaggcccagcagctggcgctgtccggcacgctggccgggctggcacggctgcagcacctggtcaaccagctgctgatgctcagccgctcggaagatccacagggcagcgcactgccgctgcagccgctggatctggccgcgttggcacggggcgtggtcgagcgctacgccgaccgtgcgttggtggcgggcgtggacctgggttacgacggacccgacgacggcgtgaaggtacagggtgatccgcagttgctgcgcgaggcgctgggcaacctgctggacaacgcgctgcgctacggcgccgtgcccggtgtgatcaccctgggactacagcgggatgccgagggcgtgcaggtgtgggtggacgatgacggtacaggtatcgccgaagccgagcgcgcgcgcgtcacggaacggttctaccgggccagcagcgagggagatggctgcgggctggggctggcgatcgtggccgagatcgcgcagcggcatggcgcgatattgatgatcgaaacggcgccgctcggtggcgcgcgcgtcgggttgcgtttccattga

SEQ ID NO: 522342 - DNA, 2343 bp, Stenotrophomonas maltophilia
atgcccacgctggaccgtcgtctcctgatcgctttcgtcgcgaccgccatgcttgcctccggggcggtgctggcggctccgtcgaaatccgccgaacgcgcctatggctcggtcgacccgttcatcggtaccggcggggaaggccatacctacccgggggcgacggtgccgttcggcatggtccagctcagcccggacacgcgcatccagccgcgcgaaaaggcctatggctgggcagcgggctaccgttacgacgacagcagcatcgtcggtttctcgcacacgcatttttccggcaccgggcattcggacctgggcgacatcctgctgatgccgttcaccggcaaccccgggctggagcgcggcgatccggagaagccgcgcagcggttacgcctcacggttccgtcacgctgacgagaaggccgagccgggctactacgcggtcaccctggacgactacaaggtgcgtgccgagctgaccaccagtgcgcgcgtgggcgtgcatcgctatgccttccccagaggcaccgacgccaaggtgctgctggacatgcgtaccagcatgtacgactaccctggcaaggtgctgtggtcgcgggtgcgggtgcgcgccgatggcacggtgaccggcttccgcgagacgcgcggctgggcgccgggtcgccagctgtatttcgcgatgcgcttttcgcgcccgctggctggccatgaactgcataacaccgagcaggacatcgtctacaagggcttcccgccgccgggcgagaaggacccggcgcagcgcgcacagatcgagggccggcagctggtcggcaccttcaacttcggcaagctggacgcaccgctggtggtgaaggtagccatctcgccggtcagtgaggccggtgccatcgccaacctcgacgctgaagtggccgacttcgacttcgatcgggtgcgtgcgcaggcgaagcaggactggacgcaggcactgtccgtgctcgatatcgatgcccccgagcatgcgcggcgcagtgcctataccgcgctgtaccacacgatgctggggccgacgctgttcatggacgccgatggccagtaccgcggttcggacaacgcggtgcacaaggccgacggcttcacgcactattcgacgttctcgctgtgggacacctaccgcgcgctgcacccgttgctgacgctggtgcagcctgagaagcgcaacagcgacttcgtcaattcgatgctggcccaccatgagcacagtccgtacggcatgctgccggtgtggtcgttccatggcctggaagactggtgcatgatcggctaccacgccgtgccggtgatcgccgatgcctacgtgaagggcattcgtggcttcgacgccgacaaggcattgaaggcgatggtcgagaccgccaactacggcccgtatgacggtatcgcgcagtaccgtgagctgggctatgtgccgatcgacgaggaaggcgaagcggccagcaagacgctggagtacgcctttgatgactggaccatcgcacgcatggcgcaggcgatgggcaaggccgatatcgcggccaccttcgacaaacgcgcgggtaactggcgcaacgcgttcgacaaggacaccggcttcatgcgcgcgcgcaagcgcgatggcagcttccgtacgccgttccaccccagcgccagcggctacggcaccgactacaccgagggcaacgcctggcagtactcgtggtacgtgccgcaggacgttgccggcctggcggcagcccacggtggcagcgacaagctgctcgcgcgcctggacgaggtgttcaacgccaaggtggatccatcgatcttcgagcacatggaagacatcaccggcctgatcggctggtatgcgcacggcaacgagcccagccaccacgtggcctacctctattcgtacgcgggccagccatggcgcacccaggcgcggttgaagcagatcatggacacccagtatgccgaccgccccgatggcctggccggcaatgatgacgttggccagatgtcggcctggtatgtgttcaccgcgctaggcttctacccggtggcgccgggctcgggcgagtacatcctgggccgtccgttcctgccgaagaccgcgatgcgtcttccgaacggcaagacgttcaccatcgtggccgagggcctggatgacaaacacacctatgtgggcagcgtgagcctcaacggcaagccgttgcagcgcaccttcctgcgccatgacgagatcctggctggcggcgaactgcgcttcagcatgcaggccgagccgaacaaggactggccggggcaggacgcgcaggcgccgtattcgatgagccggtga

SEQ ID NO: 522343 - DNA, 246 bp, Stenotrophomonas maltophilia
atgaaacacacgcgtccgctcagcccggccatggagtcgctcttccagcgcatcgaacacgccctcaacagtgcagaaggcatggccatcctcatcggtgaacagtacggccccgagccgaagccgcccgcaccgatgggctacaacgccagagagatcgccaatgcgatggtcatgctgagccagcatggccggtcgttgttgcagaagctgcgtgcggaagcggaaaaggtgacctatcactag

SEQ ID NO: 522344 - DNA, 324 bp, Stenotrophomonas maltophilia
atgccgttcatgcgtgactacccggcggcggagcctgcaggcgcggacgtggaagctcaggcgggctggcagctgctggagttcggtgcaccctggtgtggccattgccaggccgcgcagcccgcactccaggcgtttgtggacgcccacgatctggtgcattggaagatcgaggatggcaagggaaagccgctggggcgtgcgttcaaggtaaaactgtggcccaccgtggtgctgctgcatgacggccaggaagtggcgcgcgtggtgaggccggtcgacagcgccgacctcgccaccttgcagggcgcattgccagattga

SEQ ID NO: 522345 - DNA, 417 bp, Stenotrophomonas maltophilia
atgacccgtcgcattcccgaaggcacgttgatcatcgtcgccgatggcggttcggcccgcgtgttcaccaacgtcggcagcgaacatcagctggcgttgaagcaggaaggtgagctgcgcctgcaggacatcagcgagcagggcgtctccggtcagggcccggctggcgcggtgccgaaggacatgtccatttcgcagctcaacgaggcgacgtttgccaagcaggtagcggagcagttgaacgaagatgcgctcaacaaccgctatgcacacctggtgctggtggcagacccgaccacgctgggccgtatccgcccgctgctgcacaaggaggtccaggcgcgcctgctgggcgatatcgccaaggacctgaccaacgccccgctggcggatatccagaaagcgctggcggcgtaa

SEQ ID NO: 522346 - DNA, 1491 bp, Stenotrophomonas maltophilia
atgcaggacacccccgatgcacacgcccatttcggctggttcaaacgccgccgccacctgaaggtcgatgagatcaccgtcgtcgacaagcccatgctcaagcgcgccgtcggcgcggccgcactcggcaatgccatggagtggttcgacttcggtgtctacggctatctggccgtcaccatcggccaggtgttcttcccctccagcaaccccaccgcgcaggtgatcgctgcgttcgccaccttcaccgtggcgttcctggtgcggccactgggcggcctggtgttcggccccctgggtgatcgctacggccgccagaaagtgctggcgttcaccatgatcctgatggcgctgggcacgtttgccatcggcctgattcccgcctacgagcgcatcggcatctgggcaccggtgctgttgctgctggcgcgcgtggtgcagggcttctccaccggcggcgaatacgggggcgcggccaccttcatcgccgagtattccaccgaccgcaaccgcggcctgatgggcagctggctggagttcggcacgctgggcggctacatcgccggcgccggcaccgtcaccgcgctgcacatgctgctgagcagcgagcagatgctggactgggggtggcgcattccgttcctggtggccggcccgctgggcctgctcggcctgtacatgcgcatgaagctggaggaaaccccggcgttccgcgccttcgccgaggaagccgagaagcgtgagcacgagcggccggggctgggcgcgctgttccaggtgcatggccgccagctgctggtgtgcatgggcctggtgctggtgttcaacgtgaccgattacatgctgctgacctacatgcccagctacctcagcgtcacgatgggctatgccgagagcaagggcctgctgctgatcatcatcgtgatgctggtgatgatgccgctgaacatcgtcggcgggttgttcagtgaccggctgggccggcgcccgatgatcatcggtgcgtgcatcgcgctgctggtgctggccattccgtgcctgctgctggtcggtagcggcaacgacgggctgatcttcctcggcctgatgctgctggggctggcgctggtgtgcttcaccagctcgatgccgtccacgctgccggcgctgttctacaccccggtgcgctacagcgcgctgtcgatcgccttcaatgtgtcggtgtcgctgttcggtggcaccacgccgctggtgaccgcgtggctggtggagcgtaccggcgacccgctggtgccggcctattacctgatgggcgcggcggtgatcggcctggtaaccatgctgttcgtgaaggaaaccgccggcctgccgctgcgcggttcaccgccagcggttggcagcgacaaggaagcagccgcgctgttgaagagcgatgtgccggtgacggtggacccgaccttgccgccgctgccggacgttgccgagcccgagcaggcgaagccggcgttgtag

SEQ ID NO: 522347 - DNA, 630 bp, Stenotrophomonas maltophilia
atgggacgcatcctggcgttggccggtgtcaatggcgccggcaagagttcgctgctgggcacctggctggacgccgaagggctgagctggttcaacccggactcgttcacccgccgcctggtcgacgccggctggccgctgccggacgccaatgccgaggcctggcaggaaggcacccgccgcctgcgccaggccatggtcgatggcaccgacttcgccttcgagaccacgctcggtggcaacaccattccgcgtctgctgcgtgaggcctgcgagcggcaccaggtggcgatctggttctgtgggctggccgatgtcgggctgcacgtcgcccgtgtggccgcgcgggtggccgccggtggccacgatattccggtggagaagatccacgcgcgtttcgattcggcgcgcgcgaacctgctggagctgctgccgcacctggccgagctgcatgtctacgacaacagcgcgccggccgatgccgacggctgcgtggtgccgctgccggtattggccatggctgcaggccagctgcattacccggtcgcagtggccgacctgttgcacacgccgggctgggccaagcccatcgtgatgcgcgcgatggaattggacaccccgggtgattga

SEQ ID NO: 522348 - DNA, 342 bp, Stenotrophomonas maltophilia
atgaccctgccgctggatctgcctggcctcgagaaggccccggcctcgtcggtgaagacccggggctggccgagcctgatgcgcaccgtgcgcgaaaagcaggcgctggtcatcaccaaccacaaccacccggaagcggtgatcgtggacatccgcacctaccaggaactgctggccaaggccgccggcggtgatgccggtgagcgcagcgaggagctgcagcgcctgcgcagcgagttcgaccagaccctggccgggctgcagcgcggggaagggctgggcaaggtgctgggccagccgatccggcgcggccgcaaggtcacccttggccgtccgctctga

SEQ ID NO: 522349 - DNA, 1587 bp, Stenotrophomonas maltophilia
atgtcacgccgcatcgagggtctcccggccattgagcgcccggcgggcatgccgccgccgctgcaggcgcatgcgcgccatgacggcatggccgcccgtattgcccgccacgactggtcaggcacgccactgggtgcgatcgagcgatggccgccgcacctgcgcgccactgtcgacctgatgctggcccacggcttcccgatgatcgtgctgtggggcgagcagctggtgcagctctacaacgatggctatgccgagatcctcgccgacaagcatccgggcgggcttggccagcccacccgcgagtgctggcctgaggtctggcacatcaacggcccgatctaccagcgggtgtggcagggcgagaccatcacctacgaggacaagctctatccgctggcgcggcgggggcggctggaggatgtctggttcaccatcacctacagccccatccgcggtgaggaagggcgcatcaacggtgtgcttgtcaccatgttcgaaacgaccgccgcgcatgtcgcgcaggcggcccgcgagcgcgaggagcagaagcgccgtgagagcgaccggcgcctggcgctggcattcaaggtgctgccggtgggcgtctgcattgtcgatgccgaaggccgactgcaactgtccaatgaccggatgcggacctatctgcccaccggcaaggtgccgtccaccgatcgtcccaaccactaccgctggcagggatggcaccccgacggctcgcgcatcgagccccatgatttcgccatcgcccgcgccctgcggggggagacggtggtccctggcctggagttccagttcatccatgacgacgggcgcgcccgctggacacgcgtcgccgctgcgccgctgcgcgatgcagacggcgaggtgaccggggtgttcgccattgcggtggatatcgacgacctcaagcgcgccaccgagcgccaggcggtgctgctggccgaactgcagcaccgggtccgcaacatcatgtccaccatccatgcccttgcctggcggacgcgcagcacggtggccagcgtggacgagtacgccgagcggctgtgcgggcggttgatgtcgctggcgcgcacgcagagcctgctgacccgcggcggcaatgccggggtctgcctgcgcgggatgatcgaagaggaagtgtcggcgcagatgccgggcacgggcctgtgcgaactgcacggtgaggacgtgctgctgccaccgaaagcggccgaggtgctgtcgttggccatccatgagctggcgagcaacgcgctgcgctacggcgcggccgcgcgcgaggcggggcggatcgaggtgtcctggcatctgcaggtgcaggacgccgaaccgtggctgggcctgcactggtgtgagcgccatgccgacgtggagggctgggaaatgccacgccagcgcggcctgggccgggcgctgatcgagcagcgcgtgccctacgagctggctggcagcggcgagctgcactttggcccacaggggctggatgcgtggatccgcttcccgctgcgcgaacgcgacagcctgctgcagaccgacgctccggacaccgcgcccctgcggtaa

SEQ ID NO: 522350 - DNA, 405 bp, Stenotrophomonas maltophilia
gtgctggaagcgggcaacaagccagagggcctgaaagggctgcgggtgctggtggcggaagatgaattcgccatcgcgatgttcctggtggactatctggaactgaagggcgcgcaggtggtgggaccggccggtgacctgcaggcgctggggcgtctggtcgatgagaaccccatcgatgtcgccctgctggacatcaacctggggggtgaactggtctaccccttggctgaccgcttggcggacgccggcacgccgttcatgttgacctccggctacgatgacaatctgcccagccgcttcgctggcgcgccccgctgtaccaagccctatcacatcgaggcactggtgcagcagctggcacggctggtggcaggcccgcaggctgctgcgggcatcgcctga

SEQ ID NO: 522351 - DNA, 1455 bp, Stenotrophomonas maltophilia
atgcgccattccaccttccttgtcgtactgctgttggctgccgctgatgtgcgcgcccagcaggacgatctgcgccgcgtgcttgaacagggcagcgaactgcgccaccagcagcaggaccggcagcgcctgcaacaggccgagtcggagcggccgaccatcaccatcgacggcaggacgctgcgcgtggagcgcagcgtcgacgatctcggccaggccctctacctgtcactgcagcatcagcaatggcgggccgccgcggccttcctcgaggagtacatcgaactgccggggcatgacccgctgctgcgccattacgcgcagggggcgttggcccgcgtggccggcgaccatcgtcgcgcggcgaaggagtacgaagcgctgctggcggcgcagccggatttcctgccggcccgtctcgagctggcacgtgtctatgcggaagaccagcgtgatcgcgatgcggtcgcgctgttcacggccatcgctgcaggcatcaatgctgatgatccggccacggccggcgtccgcgcgcgcgtgggcgggtacctgggtgccctgcaggcgcgccagcgctggaaaggcgcgctgtccgccggccccgcatggagtgacaacatcaaccgcagctcggccagccgcacctgcctgttcggcgtaggcgacgcctgcctcatcgaacggaaactgcccgacgcccagcgcgcagggggcctcgactacgacgccagcctggaacggcgctgggtcctcgacgggcatcatgggctgtacgtgcgcggtctcgccttcggtcaggcatggcgcgggcaccgtgcctacaacgagctcaatgccaatgtgcaggcaggttacagctggcgcagtgcgcggcagaccgtgctgcttgcccccagctatgacgtccagggcctgggcaaccatgcgctgcagggcggcagtggcgtgcacggcgaatggcagtacgccctggatgcacgcagcctgctcaagctggaggccgactggaagcgccagcggtatcgccagcagggcctggccagcaattatgacggcgagctggtatcggtgtatgccacctggttccgtgcgctcaatccgcgctggacggtcttcgccgggctggatgtcaccggcagcagcgctgccgacccggccaacggctaccgccagcgcggcttgcggctgggcgcggcgcggcagtggagcggcaccacggccacggtgttcgtgtcgctgcgccgccgcgactacgacgcctggagtccattgctggaggcgcgcaggcaggacgacgaacagaacctgatcgccatcgtgcgcagcgagcggctggcggtggccgggctggtgcccagcctgggcctgcgctacgcccgcatcgacagcaacgtcggctggctgtacagccacgaccgcagcctactcagcctgaaatgggagcgggcgttctga

SEQ ID NO: 522352 - DNA, 765 bp, Stenotrophomonas maltophilia
atgaagatgatctcccgttccgtactggccatggccgccaccttcgccctggccggtgccgcccaggccgccgacatcgtcggtgcggccagcccggccaccgattcgcagctgtacgtcaaggtcggtgcctccgaagtcaacggcggcccgcacagcgcaggcaaggccggcatcggcgtcggcaccgtctccaacggcaagccggtcgacttccaggggctggcggcctactcggccccgaccaccgtcaacggcgttaccgtgcgtaccctggccatgccgatcaccggtacgccgggcagccattccggcatgggccacttcaacttcgtcaaggtgggcagtggcgatgtgtggttcggcgaatggtccaaggacggcgctgcgggtggcttcaacaaccgccaggtgtacttcgctggcgaccgcgccggcaccaccctgcccagcggtaccgccacctacgcggtggccggcctgaaccggttcaatggcagcaacctgctcagcggtaccttcgcggcgaacttcggcactggcaagctgaccggcggcctgaccggtggtggccagaccctggcgatcagcgccaacatcaacagcgccgatgcatccttcgccggcaccgccgtggccaacggctcggtcaccggcaacagccagggccagttcttcggcgccaatgcggccacgctcgccggtatcgccacgttcgccggcaacagccagtacgacaccgccttcggcggcagcaagaactga

SEQ ID NO: 522353 - DNA, 3117 bp, Stenotrophomonas maltophilia
atgccgtccacggcatccgcctgtcatcgtcgcgccaccgctctggccctggctgtttccaccgcattgctgcagttggcctgggtgccggccgggcaggcgcaaccggcggtcgtcgcgccgctgcgccagtacgccattccggaacagcccctggccgacgccgtgcgtgcctttggccgccaggccgatgtgcaggtggtgttccgcagtgacctggtggaaggccgtcgctccagcgcggtgagcggcgagtacagccagatgcaggccctgcagctgctgctgcgtggcagcggcgtgcgcgcgcagcgtggcatggacggcacctggagcctgcgtaccgcagcggaggcgggtgaaggggaaggggtgcgggtgaccgagacactggacgtggccggtcgcctgcagtcggaagggggcgaggcccgcgatcggcgcggctacgatgatgtgttcgcgctggacatggccacggcgtattcggggcgcgaccgggtggagcgctaccgcggctccaatccggccgacgtggtcaaggatctggtcggtgtgttcagcggcgatgcgcgcaacagtggcgcgctggacatcaacatccgcggcatccaggggccggggcgggtgccggtcagcatcgacggcggcgagcaggcacttacggtctggcgcggctacaacggcgtcagcaaccgcaactacatcgatcccaacctgataggtggcatccaggtcatcaaggggccggggctggtgcgcgatgtgcacagcgggatcggtggcgcgctggtgatcaagaccatcgacgtcgatgacatcgtggaagcgggtgagcgcttcggcggggagctgaagatcgaaggcagcagcaatgcggtggcgccacgcctgccgcggctgcataccggcgaggactaccgcacggtgcccgggttcccgcagggctcgccctcggcaccgtatgccgacagcacgctgctggtgccggtgaagtcgcgcggttcggaagccaatgtgttcgccggcgaggaccaggcctggcggctggcgctgggcctgcgcggcgaacacgtggacctgatggccgcgtatgcctggcgcaagcgcggcaactacttctccggcacccagggcacggcgtactacgaccaggacccgcgcgagcagttcgagtacaagggcctggactacatcaccacgctggcgcgctacttcaagcccggcgacgaggtgcccaacacctccagcgagcaggaatcgtggctgctgaaggcgacctggcagatcaacgatgaccagcagctgcgcgccacctggcggcgtacgctctcccactacggcgagatcatgccctcgcgcatcctgtccgcgcccgactacggtcgcatccagtggccgcacagccgcgtcgatgccgatgcctggaacctggaataccactggcagcctgccggcagccgctggctggacctgcgtgccaacctgtggcgcaccgaaaccaccagcgatacctacaccgctggcggcttccccaattttgccagcaaccccgactggaaccccggcagcagcccgatcctgcgcaataccgcgctggccaatgcccgcaacgaccgcaccggcctgaccctgagcaaccgcttcgcgttgcattccaccctggacctgacggtgggcggcaactggcagttcgagaaactgcgctcggcggacccgtactttggcgtcagcgatggctggcgcatgtacccgcgcgccgggcgccgccaggaaggcgagggctatctggtgctggactggcggccggtggatttcctctccctgagcgccggcgtgcgctacgcgcgctattgggccttcgatgatttcctgcaggaacacccggaactgatgaccacctctgtgttccccaaggaggcccgctaccgggtcaacgaactgcctgagcgcccggccagcctgcagggcgagatcgacgccatcgagtcgcagcgcgcgttctgggacagcatcggcatgggcttcatcgttgatgatctgctgaagggcctgctgagcaggtacgagacgccggtggcggtggagcacagcattccgtggctgccggatgcggacggcaactacagccgtgccagcaacccgtgcctgaatggtcagttggcggccattcccgggctgttgccggtgcagggcgcgcagatcctgtgcagcatccagagcgggcggtcgcagacggtatccgggcgcaacgagcgcaggcgcgaccatgcctggctgccgaccttctcggccaccgcgcatttctcgcccaatgcgcgcgcctatgcccgttacagcgaggcggtgcgtttccccagcatgttcgagagcaccatcgcgttctccagcggcctgaacccgctgtacccgctcaagcccgagcacgcctacaacttcgaagtgggctacgtgcacaacctgtccgcactgttcggcaacaccgccgatgccgacgtgaagctggcctactacgtgcacaagacccgcaacgtgatcgagcgcgacggcaatttcctgttcgacaacctggacaagcagcgcatccgcggcctggagctgcaggcgcggttcgacaaccggcgcttcttcaccgacctgggcatcacccgtacgctggaaaacaaggtctgcgacgaaagcatggcggtgcagctcgatgcgctggccggcaaggtgcccaactgcgtgcaggacggcttcgtcagtggctacctgctgacccaggccattccccggttgtcggtgaacgtgtcgctgggcacccggctgttcgatgagcgcctggagctgggcagccgcatcgtgcattaccagcgccaccagaacccggacctgcaggcctaccgtgaccgactgtacgccggcagcggtggcctgatctggcagaacgtgccgttcacctggggaaacatcaccaccgtcgatgcctacgcgcgctggcgcttcagtgaccacgccagcgtcgagctggtcggcaccaacctcggcaaccgctactacgtcgacccggccacgcgctccacgctgccggcgccggggcgcacgctgaagctcggtgtcactgcacgcttctga

SEQ ID NO: 522354 - DNA, 957 bp, Stenotrophomonas maltophilia
atgaccacgtccgaaccctcgccgcgtcaggccaggcaggcgttgcgctgggtgatacggtgcaatgcaggcccgttgccggaacgccagcaacgcaccctgcagcgctggctgcagtccgatccgcgccatgcgctggcctggcgccagcagcaggccttctggcagcggttggacgctgccgggcccgaggtgctggccgcgctgcccgatctgaccgccgaccgccaggggctgcgtccgatcgcaccgcgccgtcgcctgccgtggctgctggcatcggctgcggccgtggtgctgatggtcgcggccgctccgcatgcgttgctgctggcgcgcagtgatgtgcgcagcagcgatgcgccacgagtggtgcagctggccgatggcagcacggcggtactcgatgccggcaccgcgctggcactttcgttcgatgaccggcagcgccacctgcgcctgctgcgcggccaggcctggttccaggtagcgcacgaggctcgcccgttccaggtcgaggcagcgggcggcctggtccgtgacatcggcactgccttcagcgtgtcgatgctggataccacggtcaccacccaggtcagcgcgggtgtggtcgatgtgcgcccgggcgatggcagcgtgcagcgcctgcatgccggacaggcacgcgcgttccgtgacgggcactggctgcagccggtgcagctggaagatccggagagcatggcgccgtggcggcgtggcgaggtagtgatcgatgatcggccggccgcgcaggccatcgccgacctggcgcgctaccgtcgtgccccggtctgggtactgggcgggcagggcgcacgcgtacgggtcagtggcctgttccgcctgcagcaaccggacacggccatcgtcgccgtggccgcgcaggcgggactgcgcgtgcagcgcttgcccggtggtgcgttgctgctgtggtga

SEQ ID NO: 522355 - DNA, 504 bp, Stenotrophomonas maltophilia
atgtctcccaatgccctggcgctggtcgagctgctgatccgcgagcgccgtgcgttgtcccgcttcgtcgcgcgctacctcgacccggccagcaccgaggacaccctgcagaacctctacctgaaggccagcagcgtgcccggtgatccaccgatcctggagccgcgcggttatctgtaccggatggcctaccaccacgcgctcaaccgcagccaggccgacgcccgcgagcggcgcgcgatggccgagtacgccaccggcatggccgaggcaggccacgacggcgaggcgcaggcgctggaccaggcgcagctgcgcgagatcacccagaccatcctggccctgccggcccaggtacgcgagtgcttcgtgctcaaccgctacctgggcctgagcgaacgcgagattgccgcgcgcctggggatctccaagagcctggtcggcaagcatgtgctgcgcgcagcgctgctgatccagcaacagcagcggggaatgggccgatga

SEQ ID NO: 522356 - DNA, 927 bp, Stenotrophomonas maltophilia
gtgttcatcgcagatatccgccgttgtgacctcaacgacctgttctacttcgccatggtggtcgagcatggcggcttctcgcaggccggccgggcgctggcgatgccgaagtcgaaactgagccggcgcatcgcgctgctggaggaacggttgggcgtgcgcctgatccagcgttcgacccggcgtttctcggtcaccgaggtcggccaggactactaccgccactgcaaggcaatgctggtcgaagccgaagcggccgaggaagccattgcgatgtcacgtgccgagccgcgcggcaccatccgcctggcgtgcccgatcgcgatcctgcacgcgcgcattggcacgatgctggccgatttcctggccctgcacccgcaggtgacggtgcagctggacgccaccaaccggcgcgtcgatgtggtgggtgagggtgtggacgtggcgatccgcgtgcggccgccgccgctggaggacagtgacctggtggtacgcgtgctggcgcgccgggtctggtgcaccagtgccagcccggcgctgctgcagcggctgggcacgccgcaggtgccggccgacctggcgatgatgccgaccgtggatctggcatcgcccagccagcagcatgcctgggaatacaccgggccgggcgatgtgctggccagcgtgcaccatcgcccgcggctggtcagcgatgacatgatcgcgttgcgcaccgccgcggtggccggggtgggcctgctgatgctgccgcggatgatgatcagcgacgagctggccagtggcgcgctggtgccggtactgccggagtgggtgcccaagcacggcgtcgtgcacgcggtgttcccgtcgcgacgcggcctgttgcctgcggtgcgtgcgctgatcgactacctcgccgaacgcttcgaggcgctggaggaaccgtag

SEQ ID NO: 522357 - DNA, 867 bp, Stenotrophomonas maltophilia
atgaagcgtgtcaccggtacctacagcgccccacgcccgcactgggtgggcgacggattccccgcccgctctatgttttcctacaacacccacggccagcacctcagcccgttcctgctgctggattacgccggcccgtacaccttcgcccccagcaatacgccgcgtggcgtcggccagcatccgcatcgcggattcgagaccgtcaccatcgtctatgagggtgaggtcgcccaccgcgattcgaccggggccggcggcaccatcggcccgggtgacgtgcagtggatgacggctgcctccggcatcctccacgaggaattccacacgccggaattcagcaggcgcggcggcacgctggacatggtccagctgtgggtgaacctgccggcgcgcgacaagatgggcgcaccgggctaccagaccctgctcgacgcagagattccctcggtggatctgcccgatggcgccggccgcgtgcgggtcatcgccggccgcttccacggtcatgccggcccggcgcgcacccacacgccgatggatgtctgggacatccgcctgcagcagggccaccacaccgacctgccggtggccgagggccgcacgctggcgcttgtggtgctgaagggtacggtgcggatcaacggcggccagccggtcggcgaagcgcagctggtcaccttcgaccgcagcggcgaggacgtgttcgtcgacgccgacagcgacgccaccgtactgctgctcagcggtgagccgatcgacgagccggtggtgggctatggcccgttcgtgatgaacagccaggccgagatcgcgcaggcggtcaacgacttcaacagcggccgcttcggccagatcgcgcactga

SEQ ID NO: 522358 - DNA, 528 bp, Stenotrophomonas maltophilia
atggccacgctggcaaagatgccggtgatcaccactgcctctgttccgcagggcccgaacggcccgctggtcccggagatccacgacgcagccccgcatgcccagtacgtggcgcgcaagggcgagatcaacgcatgggacaatccggaattcgttgccgcagtgaaggccaccggccgcaggcagctgatcattgccggcaccatcaccagcgtgtgcatggccttcccgtccattgccgccgttgccgatggctatcaggtgttcgcggtcatcgatgcctcgggcacctattcgaagatggccgaggagatcaccctggcccgggtggtgcaggccggcgtggtgccgatggacaccgccgcggtggcctcggagatccagcgcagctggaaccgcgacgatgcccagcaatgggccgaggtctacacgaagatcttcccgaactaccagctgctgatcgaaagctacctgaaggcgcaggacgtgcagaagaaccacgagccgctggattcgcagcgcagctga

SEQ ID NO: 522359 - DNA, 642 bp, Stenotrophomonas maltophilia
atgtccagtgaaccgatccgcgacccggccagcgatcatctgctgaccccgcagaactccgccttcatcatcatcgactaccagccggtgcaggtgaactccattgcttcgatggaccgccagttgctggtcaacaacatcgtcggcactgccaaagccgcagtggcttatggcctgccgatcgtgcattcgacggtgaacgtcaagaccggcctgaacaagccgccgattccgcagctgcgccaggtgctgggtgactatccgacctacgaccgcaccaccatcaattcctgggaagacgtccagttccgcagggcggtggaagccaccggccgccgcaagctgatcatgaccgcgctgtggaccgaggcctgcctgaccttcccggccttggatgcgttgaaggaaggctatgaggtgtatgtggtggtcgacgccgtcggcggcacctcgctggccgcgcacgatgccgcgctgcgccgcatcgaacaggccggcggccagctgatcagcgtgccgcagctgttctgcgagctgcagcgcgactgggcccgttcggaaacggtgccggccttcatgaacctcttcattgaaaccggcggtacggcgggcatccagttctcgtacgatcgtaccgagtaa

SEQ ID NO: 522360 - DNA, 399 bp, Stenotrophomonas maltophilia
atggcctacgcacgcattgtttcgaccgccgacaattacctgcaccacatcagcaatggcagcttcgatgtggatgcggacgagcctgcctcgttgggcggccagggcaagggcttcgcgccgttcgacctgtacctggcctcgctggcggcgtgcaccgccatcaccctgcgcatgtacgcgcagcgcaagggctgggacctgggcgagttccatgccgagctgcgctcggaacgtgacgaggacggacgcctccacgtgcaccgcgtgctgcatgccagtgccgagctgagcgatgcgcagtggcagcgattgctggaggtggtggaaaagaccccggtgaccctggtgatgcgcgaaggtgcacgcatcaccagtgagcgtggggcggcggcgtaa

SEQ ID NO: 522361 - DNA, 330 bp, Stenotrophomonas maltophilia
atgagccgtcgcaagctgttcgagagtcccgaaccgtccagccagatgctgggtgttggaccggcctatgtttccgtggagggcctgcgccagcacctggccgagttcctgctgtacgcgggccggccggtggtgatcatgcgcgggcgcagcgaagtgggctacttcctgccggcgcgctgctggcgccagcgtgacgatgatccgctggcggccgctgccgccgaccagctgctggatgccgccgggttccaggccgaagacatccagcaggtggagcaggaattcaacgcgatgcgccagcgcacggtgctgcattcacggcgctga

SEQ ID NO: 522362 - DNA, 1746 bp, Stenotrophomonas maltophilia
atgaacgaccacgtccgcgcacgaaccgattcccgccgcccgcggccggcccgacgggcgctgctgtgctgcgccgtgctgctcagcctggccgccccggccggtgcgatggccgctgaaaccaccatggtcaagctgatcaagggcctgatcgccagcggcgcactgaaaccagaagacggccaggcattgctggtgcaggccgaggccgaagcggcggccgcccagcgcagcgcagccaccgcgacctcggccgccagtggcggtgtcgccctggaggccggcgacgtgcgcgtgccctacgtgccgcagagcgtgcgcgacggcatccgtgacgaagtacgccaggacgtgatggcgcaggccaggtccgagggctgggcggcaccgaacgaagtggctgagtggaccaagcgcatcaaggtcaccggtgacatgcgcgtgcgcagcgaatcgcgcttcttctccgaacgcaacagcgatatcgtgagcaactggtcgtcgatcaattccggcaacggcttcgacaccaacaccaacaccaacctgcagctgccaccactgctgaacacccgccaggaccgccgcaacctgtggcgcatccgcgcccgcctgggcatcgaggcgaccatcggccagcacaccacggccggtgtgcgcctggccagcggcagcagcaatggcccggtgtcgaccaccgagcagctgggtggcggcctgagcaagaaggatgtatggctggaccaggcatggctggcctacagcccggccgactgggtgacggtgcgtggcggccgcttcggcaatccgttctggaccagcgacacgctgttctccaacgacctcaacttcgatggcctggccgccaacctgcagtacgacttcggcggcggtgacctcggcctgttcggtaatctggcggtggtaccgctggagtacacctccgacagcgcgcccagccagagccgggtcaagaccccgaacgagaacaagtggctgtccggggcgcaggtgggcgtgaactggcgcttcaatgacgacaacgcgctgcgcgcggcactgggctactacgacttcaagaacatcagcggccgcctgtcctcgccgtgcgcgctgtatgcgggcgcggtgggctgcgacaccgactggtcgcgtccggcgttcatgcagaagggcaacaccctgatgctgatccgcgacatcgcgcgcaatccgctggatccggccaatacgcccaccccgcagtatgtcggtctggcctcggcattccgcctggccacgctgaacctgcgctgggatacgcagctggcccaggacgtcggcctgcgccttgaaggcgactacatccgcaacctggcctatgacaagcaggcgatgttcagtcgcgccaacaacggcatcgtcaacaactacggtgccggtggtgccgccagcatcgacaccttccgcagcggcgacacggcatggatgctgcaggccaccttcggtgccaccgagctgaaggagaagggccagtggcaggcgctgctgggctacaagcacatcgaggccgatgcgctgccggatgcctacaacgatccgaacttccacctcggcggcaccaacgcccgcggctactacgtgggcggtgcctacgcgctggatgcgcgcagctggatcagcggcaagtggatggcggccaaggaagtgtccggtgcgccgctgtcgatcgacgtgttccagctggagttcaataccggcttctga

SEQ ID NO: 522363 - DNA, 666 bp, Stenotrophomonas maltophilia
atgcgcggtcgccagtttctggtgactgtcgcgctggtgctggccgcgttgctggtgctcggcatcgccgtgtggtggatgctgttcaaggacaccgccagcacccgtcggccggtggtgcagccgccgatgttggcgctgccgccagcgcctccgccacccccgccgccgccggaaaagccgccggagccagaaacgccgccggaggagacgatgcccgaaccggagccgctggagcagccgacgccggctgaagagccggcaccgactccggacaatgccgatccggtgacgatgaacgccgatgcgcaggccggcggtgacaacttcggcatccagtccggcaatggtggcggttcgtccggcgtcggtcgcggcggtgccggcaatgccacctatgggcgctacctcggctacctgatgcagcaggcaatctcgcgcgacgacaaggtcaagcgcctggcgttccagctgcaggtgaatgtgtggctggccagcgatggccgcctggaaaaggtcgagctggtgcgtggcagtggcaacgaggaggccgacgcggccgtgctcgatgcactgcgtcgcatcggcaaggtcgaccaggcacccccaccgtcgcttgatttccctgcccgcgtcctgatccagggccgccggcccggggcctga

SEQ ID NO: 522364 - DNA, 414 bp, Stenotrophomonas maltophilia
atgggccagaaggcgaagttcggcatcaagaagcgcgagaagggcatcaacgtgacgcccttcgtcgatgtgctgctggtggtgctggtgatcttcatcctgaccagcaacgcttccatccccggcatcgaggtcaacctgccgaaggccagcaacagcgttgcgctggagaagccgaagaccaaggcgatcaccatcgaccccagcggccaggtgttcctggatgcctacccggtgacgatggccgagctggaagaccggttgcggaccgagcgcgcgaccacgccggacttcccggtgatcgtgcgcggtgacgcacaggtgcagtacgcccgcgtggtcgaggtgctggacctgctgcggcggctggagctggcccaggtgggcctggtcacgggcaaggcgcagggctga

SEQ ID NO: 522365 - DNA, 1785 bp, Stenotrophomonas maltophilia
atggaccgtttgctttcccgagtgttgctgctgctggccgcgctggttgcgttgcctgcggctgcggccgatgccaattggtggcaggccgaatggaaataccgcaagccgatcaccgtagacgcgggcccgcagggcgcgggcctggccggtgacccgggccgcacgccactgctgctgcggctgcataccggcaacttcggcttcgacggcacccaggatgcgggcaacgaccttcgcttcgtctcgggtgatggccgtaccgtgctggcccaccagatcgagcagttcgatcccacgctgggcctggccctggtctgggtggacctgccggcggtcagtgccgccgcgccgcagaccatctggatgtactacggcaatgaaaatgccccggccagcggcaacggccagcaggtgttcgatccggactacacgctggtctaccactttgccgaggccaatgcgccggcacgcgacaccaccgcctatggcaacaatgccggtgcggtggtgccgccgtcggaaggcgcggtgatcggccgcggcgtgcagctgggcgccggctcgctgccgctgccggccagcgcatcgctggcgcaggaggcgggcgcgccgctcaccgtttcggcctggatcaagccgggcagcaacaatgcggctcaagccatctacgcccgccgtgatggtgcttccgaactggtgctgggcatcgagaaccgcgtgccgttcgtgcagctcaatggccagcgcagcacgccggcgcaaccgattccggaagggcagtgggcgcatgttgcactgacggcagagaagggcgcgttgcagctgtacctcaatgggcgcgtagctgcccagctgagcggtgcgctgccggcgctggccaccgcgccggtggtcggcgccgatgcgccgggcgcggcgcagccgctggccaacttcgaaggtgccctggacgagttgcgcatttcgcgggtggcacgtccggccgcgctgctgctggccgacgccaccgctcagggcgccgactcgcgcctggtcagctacggcgccgacgagcagtccgccgggcagagccacttcgccttcattctcaaggcgatgccgttcgatgcctgggtggtggtcgccatccttggcctgatgatgctgctgtcgtgggcgatcatgatcgccaagagccgccacttcggtcgtaccagcaaggccaatgcggtgttcacccagagcttcggcaagctgtccggcgtaccgctgcgcaccctgtccgacatggaccgccagggcaaggcgccgaccgccatgcacgatggctcgttgtggcgcatctaccaggtggccatcgatgaaatgcagcaacgccaccagcgcgatggcaacagcggctacctcagtggtgccaccatcgcggcgatccgcgcctcgatggatgcagtgatggtgcgcgagcaggaagcgatggcgcggcgcatgaactggctgtcgaccaccatcgaaggcgcgccctacgtgggcctgttcggcaccgtgatcggcatcatgctggtgttcgtggttgcggcaatggccggcgcggtggacatcaactcggtggcaccgggcatggccgcggcgctgctgtgtactgccgccggcctcggcgtcgcgatcccggcgctgttcggctacaactacctgggcgcgcgtgccgaagcgatcggtgcggacatggcggtgttcatcgacgaattcgccgcgcgcctggccgaagagcaggacgggcgcggcccggccgcggtccagggctga

SEQ ID NO: 522366 - DNA, 1617 bp, Stenotrophomonas maltophilia
atgactcctgttccgtgccgagccgtccgctttccgttgcgcctgcatccgctggtgctggcgctggccgcgatgccgctgccattgttcgcgcaggaggcagcgcctgcgcccagcgtgaacatcaatgaatacatcgtgcgcggcaacaccgtgctcgatccgcgtcagatcgaacgggcggtagagccgttcctcggcccgggcaggaccctggccgatgtcgagaaggcgcgcgatgcggtccacgcgctgtaccagcaggcgggctaccagtcggtctacgtcgaactccccgagcagcaggtcagtggcggcgtggtgctgctgaaggtgcagcagacgccgatcggccagctgcgcgtggtcggcacccgccacgaatcgcccgaccgcatacgcgatcgcgtaccggcactggccgagggcaaggtgccggacttcgaccaggcccagaaggaactgaccgcactgaacgaaggcgggcgtcgccaggtgatgccgctggtgcgcgaaggccaggtgccgggcacgatggatgtggacctgcaggtcgaggagaagtcgccgtggcgtgccagcgcgtcactcaacaacgaccacagtgccgacaccgagaagctgcgcctgagtgcgtcgctggcctacgacaacctgtggaagcgcgggcacagcgccaacatcggcgtgtacctggcgccggaagatacaaagcaggccaaggtgttctcggcctcgtacacgatgccgttcgaaggcacgccgtggagcctggaagcctccggctacagatccgacagccgcgtgttgaatgcaggcgggcaggtcggtacaggcaccggcaccaacgtgatcggcaacggccattcgatcagcctcaagctcaactaccgccttgccggcagcagccagtggtggcgccagctcagtctcggtgtggatttcaaggacaccgaggaagacacgcagatgggcaaggacagcctgaagacaccgttgaagtatgcgccgatcaccctggccttcgtcggcgtgcgccagggcgagcaggatcagctgagcatcaacacccagctggtggccggtacccgccgcctgttcggttacggcagcgacgccaccgcgttcgggcagaagcgctactgggctgacccgagcttcgtggccttcaaggccgacgtggccaacacccacaccttcagcaatgactggcagtggtatgcgcgtggctcgctgcaggtaaccgatgcgccactggtgtcggccgagcagttcgctgctggcggcatgtacaccgtgcgtggctacctgtcggccgaggcgatcggcgactacggcggcctggccagcctggaatggcgcaccccggcgtggtcgctgtggagcggcaccgatctgcgtgtctacagcttcgccgacgcggcctacctgcgcctgcgccggccgctgcccgagcagcgtgaaaagtacaacctggcctcggtcggcctgggcgcgcagctgcgcctgggtgaacacctgcaactgcgcctggactacgcctggccttatgccgatggcccggtcacgcgcaaggacgacccgcgcctgcatttcaacatcagcaccagctactga

SEQ ID NO: 522367 - DNA, 336 bp, Stenotrophomonas maltophilia; identical to SEQ ID NO: 493234

SEQ ID NO: 522368 - DNA, 534 bp, Stenotrophomonas maltophilia
atgatgaaacaaaagcgtcagcggcggctgctagcgtgggcggacacgaacgtggcgatggtgcggaacatggatggcaggcgctgggatcgcaatcggatgttgaccctgctggcggccaccctgctgctggcggtggtggcctattggagcgtcaccctgtctgcggtggcgcctgcggcggcggccagcgaagcgcatgccgatgcgccggcccggccgctgttcgatgcggtggccagtctgccgctggtgcggctgctgtcgcccggtgcggtgcagaccgaggtggtcgtgctgggtgtgatggcgggtgaccacgcgcccctggccctgttgtcggtggatggacgcccgccggaggcttacgcgcccggccagcggctggggccctgtacggtgctggccagcatcagcgccaacgcggtggaactgaaccaggctgggcaatcgcgcagcctgccggtgcccgcgctgccaccggtgccgaacgatggcatcgtgccggccgctccgcagggcggcgctcggtag

SEQ ID NO: 522369 - DNA, 447 bp, Stenotrophomonas maltophilia
atgcagcacgtgccgcgtggtttcaccctgctggaactgatggtggtgctggtgatcatcggcatctgcacggcgggcatcggcctgggcctgggcggcctgctcgaccccgcgcgccagctgcggcaggaggccgaacgactggcgcagcgcctgcaggtggcgcgcgacgaggcccgcatcgatggccgccccctgcgctggcaggccgacgccgccggctaccggttcagcaggcgcgaaggcacccgctgggtggacgtgcaacgcgacgacctgctgcgcccacagtcatggcaaccggccggcatcgttgtgcagccggccaccccggttgaactgagcccggagtggatcggcgtggcatgggaactgacgttgtcgttgcagggccgccagctgcgtcttcgtgacgatggcagcggacagttgcaggtcgtgcagtga

SEQ ID NO: 522370 - DNA, 351 bp, Stenotrophomonas maltophilia
atgcgcggattcaccttgatcgaagtgctgatcgcactggcgatcgtttcgattgcgctggctgcggtcatgcgctcggtcgcggtggccaccgacgatcagtcacgcctgcgcgaccgtcgcctggcgctgttgtgcgcgcaggaccgctggcaggagctgcgcctggccgggcagccgccgcaggatgcacgactgcgctgcgtgcaggggcgaagcagtttcctggtgctgcagcatatcggcacggggggtgacggacagccgcaactggaactcagcgtggctgccgaagatgcaccgcggcagtcgctggcgcggatgcagctgccgtggaccgcggcgcaatga

SEQ ID NO: 522371 - DNA, 615 bp, Stenotrophomonas maltophilia
atgaagcgtaccgccgcaggcttcacccttatcgaggtgatgatcgcgatcaccatcatgggcgtgctggcgctgatctgctggcgagcgctcgacagcgtggccagcagcgaccagcgcctgcgccgggccgatgccgagaccacgacggcactgcgcgtgctgcagcagttccagcgcgatatcgagatgcgtgccgacgatgcgctgatgaacggcgcggtgcgcccggcggatcagcctcagcgcctgctacccccttcactggtgagcgaacggcatccggatggaagctttgcgctggagatcacccgcagcgtcgacagtgatgggctgcgctggcagcgggtgcgctggtggcggcaaggcaacacgctatggcgcgccagcggtacggcgacggaccgctatcctctgcccgcgccggttccttcggaaggcattgcagtggcaaaggatgtgcagcggttcgaggtgcgcgcctggcagcccggggccggctgggcgatgctgccgagcgagggcgaggtgctgccggccaccgggctggaactgcggctgggcctgcgtgacgggcgtggaccgttgagctaccggcgcgtgctggagctttag

SEQ ID NO: 522372 - DNA, 12384 bp, Stenotrophomonas maltophilia
atgtcgcacccgctcccgtccgctgttcatccggccgcgtcgatgcgccgcaatcatccgatggcgtgggccatcgcggtcgcactggggagcatggtagccccggccagccaggcgcagcaggcgttcactccgggctggttcgccgaacggggcgcggcccagggcagcgcggcacagagtggccggatgcccaacggcgtgccgatccagttccagttgccggcccagcagcaggatgcggcacggcagaagctgcagcagtcgatcgacaatcttggcactgcggcacaggcgattgccctgcagcagcgcctgcaggaacaagcccggcaggcgcaccgcgaggctggcttcatcgttgccgatggcctcggcaaggacggcctgagcgtcgaccagaacccgctgacccgtggctggctcaatgcgcgcgacgcgatccagtcgcagggcagcgacgggagggtgcaggtcacggtcgagcagaccgcggacaaggcgatcctgaactgggagactttcaacatcggcggcaacaccacgctgaatttcctgcagaaccctgactgggccgtactgaaccgcgtcaacgatccgcaggcgcggcccagccacatcctgggccagctgaaggccagtggcacggtgttcgtggccaaccgcaacggcgtggtgttcggcaacaacagccaggtcaatgtacgcaatctgctggcggctgcagcacggatcagcgatgcgcagttccgcgacaacggcctgtacagccccgacgccagcagcagcgcgctcagcgatgcattcggcaaggtgatggtggagcggggcgcgcgcatcgcgacccatgagccgaccagtgcgacgcgcggcggtggctacgtgctgctggccgggcacagcgtggacaatgctggccagatcgaagcgcgcaagggccaggtgcagctcgcagcaggtgacagtttcgtgatccggcgcggcgtgggtacggccgccaacaccagttccaccacccgcggcaatgaaatcgcgccgcgcttcattgctggcagcacggctggcagcgtgcgcaataccggcctgctgcgcgcactcgagggtgacgtgaccctggccggacgcagcgtcgagcaggccggtgtggccgtggccagcaccacgcttgcacagcgcggcaccgtgcatcttctggcctcggccagtgatgcaggcagcagcgtcacgcttgctgacggagccaccacggcggtgctgatcgaggacgatggcaagaccacggtgctggatacgcagcgcgacgccctaatcaaggaatcggccgagcaggacgcgatccgcgctggcgcgcgttcggcaaccttcgacaatctgtcccagcacaatgatcgccgggaccagtcgcgggtggagatcgtctcgggtggcaacatccatttcagcgcggattcgctgacggttgccacgggcggccagatcatcgccgatgcggcggcccgtagctacgtggacgatgccgcgcgcgtggacgtgtccggcgcagtgggcgtgcaggtgtcgatggagagcaacaatgtccaggtcaaggtgcagggcaacgaactgcgcgatgccctggacaaccgcgacagcggcaagctgaccagcagcgaagtctgggtcgaccgccgcaggctggtccacgttccggccggtaccgggggctacgagggtgagcgctggtacgccgcaggcggcctgctggaagtggggggctacctcgacaaccaggggcactcgatcggcgaatgggctgcgcagggaggcaccgtcctgctgggcggcagggaagtgatcacgcagggtggctcacgcatcaaccttgccggcggcagcctggatgtgcagagcggcgtggtccggcagagctgggtgcgcggcgttgatggccaggtctaccgtcttgatgaggcgccagcggagatgctgttcgatggcctgtacagcggccatgaagtgaagcaggaacgctggggcatcaccgagaccttccgtgatccgatcgtattcgcggcgcagcgggtcgataacgggtacacggtcggccgcgatgcaggacggctgatcgtctccgcaccgaccgcggtgctggatggaaaggttgagactgcaaccttccagggcgcgcagcagaaccgcaggccggatgccgcgcgggatggctatgcacaggcgcagacggcggtcgcgcgcaatgcgcagttgtacctggggcgctacgacggccagggccgcagtggtgtgttcggctcggatgtgcgcctgggtgacaaggctccgacgaagacggcgtggtcgctggcggctccggtcaacgaggagcggcgtgacacggtgtggctggatattgcagagctgagtgcccagcagtgggggcggatcgacctggcgaccgccgatcgcatccgcatcgacggcagccttcggcttcaggccggcgggcagctcaacctgaccggcagcgaggtggagctggcaggcgacatcggcattgccggcggccagttgtcggcgggcaacctgctggatgtccagggccggccgacggcgctgctgcacgatggccgcgcccgcaccgtcattgccgacggcacgcggatcgacctctccggcgaatggagcaacgcctcactggcgatgccgcgcgacgcgagcggtgcctggacggatggcggccgcctgagcctgggcaacagtcatgacgtggccgtgggcgccaaggcaacggttgacgtcgaggccggtgctgcgctggacctgcgcggcaaggcccatatcggcaaaggcggcagcgtcagcctgcaggcgaacagcagtacggtgacgaccgacggcagtggccgtgtgcaactgggtgagggaagccggttcagtggtcgaggacagggcggtggttctttctcgctggggaccggtggccaggtgcgggtgggcgatgcggacctggcgggcgcgtcgctgcgactggaccccggcctgttcggcagtggcttcgcgcagtacgacatcaatggccaccacggcgtggaggtggccgatggcgcgcggctggtcgctgccctgccaggcctgcgcctgacccaggacgcgccgatggcgaccgaccgggcgtccgcactggcggcgtgggacgaaccgctgtacagcgccgatccgtcgagcgggcgcgtcagccagcgcgcgggtgcgagcatcagcctgcgttcggagcgcaacagcgtgggcggtgacctgcgggtcggcaaggatgcactggtggcggtcgatccaggccagacgatctcgctgcttggtgcgggcaacatcgatgttgaaggcacgctgcgcgcgaagggcggacgcatcctgatcgacgatgtgcgcccggagaacgcgctgtacgccgggcagcgcaccgaacgcacctggcgtttcgccgaaggcgcgctgctggatgccgatgcagacgcgatttcgctgcccgattccagcggccgtctgcgcgggcaggtgcgcgcgggtggacgcatcgagattggcggggcgctggactgggagaccaccgcgttcgtcgacaaccgaccaccggaagccttcgtggtggtcgaacgcggtgcgcgcctgcaggcgcggggtgcgtcggccgagctggacgtcgacggccagggccgcgtgcgcgtggacagcgatggcgggcagatcgtgctgcgctcggccaatgcgctgtacctggacggcgggatggacgcggccgccggtggtgccggcgcacgcggcggcaccctggggttggcctttggcggcagcatccatgcacgtggcgccagcgaggaggtactgcggtcacgtgcgatcaccctcagccagcacagcgcaccggggcagccactgccggccacattggagtatggccacgccgcgttgtcggtcgagcagctgcaggctggcggtttcgacaatctgtccgtgttcggtgacatccgcgcggtcggcgacgtcgacctgcgcctggcccagagcctgcgcatccacggccagggtacttcgagcctgggcatggccatggatgccgggccatcgtcggggctgcgactgagtgcgccctacgttcgcctggcgcaggcacgctggcgccagatgccgggcgagaacctgcagggcaccgccgcggtcgcttcgtccgggccggaagatcacgcgctggcggtgcaggccgggctgatcgacatccgcgacgtcacctggctgccgggtttcaagcatgtggcgctggaaagccgcagtgacgtgcgcctgaccaacggcattgccagcagtggcaacaccagcgcgttgatgacggctggttcgatggacgtgaccgctgcgcgcctgtatcccaccacaggcgcggtcggcacgctggtggccggcgcgtcggcgcagaccgtgcagaccgctgattactggtccgatccggatgccgtgctgcgcatccacggcaccggtgcggccacgaagccggcgccggaatcggcgctgggtacgcttcgcctggtggccgccacggtgcggcagggcggcaacgtacaggcgccgatgggcacgctgcagctgggtggcctgatccagaacggaaccgtcggcagccgggtggaactgctgccaggcagtgtaacctcgaccagtggcgccggcttgtcgctgccctatggtggcaccgtcgatggtgttgactggcgggtcggtacgcgcagcctgggttcgctgacgccggccggcatctcctcgatgggggtgacactgaaggccaacgagatcgatgtggcgccgggggccctgctggacatgtccggcggtggtgagctgaccggcgccgccttcgtgtcaggacgcggtggctctgtcgacgtcctgcgtacggcgttggccgacgccaacccgcgctacgggttcagtgcgtcgggcaacccggtgtacgcgatcgtaccgggacgcgccggggcgttcgcccccagtggcgaagaagggttcgcagctccggcggtgggccagcagatcaccgtgccggctggcgtgcccggcctggcggccggcacctacacgctgatgccggcaagctatgcgctgcagcccggcgcattccgggtggagctgggcgccaccggcacctccggcatcgtgcaaccgattgcgaccggcaccggcacctggcgtgtgtccgggcagcagcgcacggcgctgggcgcggcaatctcgccgttgctcaccgacatcctgctgactcccgcggccgtggtacgccggcactcgggctacaacgaaacctcctacaacagcttctcgcaatcggtagctgaccgccgcggcgagtcgcgtggctggcagaccatcgatgcgctcgggttgacccttgcgctgggcgaaggtgcaggtcgtgcagcaacgcctgccatccgcttcgccggcaccgcgcggttcgcggccgccaccgacaaggggcgtggtggcacgctggcagccacgttggcgagcccggcggtcggttcgctggagatcgtcgatggcagcgcgccatcgcaggcgcgtgatcgcggcgccaccttcagcgacgacgcgctcaatgccttcctgccggcgcgaatgatgatcggcgggcagttcaaccaggaggcctcgcaggtggcggtgaccggccaggcgcgcagcgtggcgatccgttccggcgtcaccttgaacgcaccggaagtgctggtggcagcggcctccggtggcagcggcgtgctggtcgaggccggtgcgaccctcgatacactgccgttcgcatccgccaacgcgaatgccagcgcgaccctgccttaccaggtctccggcggcctgctggcggtgtccaaccagcgcctgaacctgatcacaggcaccaccggggtggaggccggtccggtggcgatcgacatcggcggatgccaggcggcgtgcgacggccagacgcggctggtttccgatggcagcatcgcggtagcgaccgatggcgcgctgcagatgcgcgactcggccagctatggcacccgccagctcggcctgagcatggcggcgctgaacctcggcagtgccgaagcgatcgcccaggccgctgcggccggggcgctgcccagtggcatgaccatgaaccagtccgtgctgcaacaactgctgcgcggcaatgatgcgaccggcgcgccggcgctggacacgttgagcctggtcgcgcgggagtctgtcaacgtgttcggcagcgtctacctggatgcgcgcgacagtgccaccggccgcagtggcctgcagacgcttgtgctcggtgcgcaggccatccgcggctacggtgcggcgaccgaccgcgcgcgcatcctggtggacacgctggtctgggacggctcattggcggcgggccaggtgcccggcagcgacgcgacggtgccgccggccgatccgatggtggaccggctcggggccgggcaactggacatcgtcacccggcagctgcagctggggcgggcgccattcagccgtcccagctctgaagtacctgcgaaccggcaggtgctcggcttcagtgcgctgaacctgagggcttcggagcagctgtctttctccgcgcagggcacgctggacgtattccagcagcgtggcgactatctggccgacaaggggtggcagtacagcggaggcaacctgggtatcgatacaccgctgttggccgccgatcccgccgcgcagctgcgcgtgcgcaccggcggcgacttccgcctgcaggggggcgccggcaagacgggtggcgatgcactgggcagtgagttgagcatcgacgccaaccggatcgcgctggacagcacggtcgcgctggcgtccggacggctgtcggcgaacgcacgccagggcatcacgcttggcagccgggccgagttggatctggccggacgcaaggtctcgctgtacgacgtggacaagttcagctggggcggcgatgtcctgctgtccagcgacacgggtgacatccgcgccgatgcggcctcccgcatcgatgtttccgcacgcaacaaccgcggcggacgcctgacggtcaccgcaatggccggccgagccgatctggccggtgttctgcagggtgccgccactggtcgctacgatgccggtggcacgctggtgccctacgacggtggcgaactggtggtgcgggcacgccagctgcaggacttcgccggcctcaaccagcgattgaccgccggcggcgtcgtcggcggtcgcagcttccagatcggtgagggcgatctgcggatcggcgacgaagtgaaggcgcgccgggtcgatatcagcgtcgatgcgggcagcctgaccgtggccggccgcatcgatgccagcggcgagcaggtcggcagcatccgcctgtacgcccgcgatcagttgcaggtggacggcactttggacgcgcacggtaccggcctgcgcgtggacagccatggcaagatcatcgacagtcccaaccgggccatcatcacgctgggcagcgtcgaaggtgccgtcggcctgggcagcgcggcgcagctggacctgcgtgcgggcagcgacgttgccgttggtggacgtcctggccagaacgatggcaccccgcgcggcacgctgaagatcgatgtgccgcggctgggcagcaacgacgcggcgattgccgcggccaccggcctgcgcatcgatggcgcggccgacatccagctcaatggtgttcgccgctacgacgatgcgcccctggcaaccaccgctgacgtgcgcggcaaccgcgcgcagctggtcacccagcagtggctggaccgggtggtcgatccgcacagcgtggcctggatcgatggtgcgctgggcaacgcggatctgcagcagcgcacgcgggcgctgggcgctgtccgccttcgtcccggcgtgcaggtgctggcgcggcgcagcgacgccaacccggacggcgacctgaccatcgccggcgacatcgatctgtccggctaccgttacggccccgatgccaaccgcgccgatccatcgcggcgtggcttcggcgaatcggcctcgctggtgctgcgcgccgaaggcaacatcaacgtctacggcagcatcaacgatgggttcgcagcgccgccgtccacgccggatgagggcggctggcagctgtacgagggccgcaatggcagcgcggggcacaccccctttggcggtgggctggtggtgccggtggacggagtgaagctgcagcccggcaccgagttccaggccggcacccgcctgaactatgacgtgccggtcgaatcggtaacgcttccggtcggtaccgtgctgcccgcgccgatggtgatctcgcagaacctgcggctgcctgcaggcacggtgctgggtgcggcggtgaccaccgactccgggcagacgctggccgcaggcaccgtgctgcaggagccgctgatgctggcggccggtgcgcggctgggagccggcttccgcctgcgcagtgcggtacagatggcggcacaggagtggcccgccggcgcggtgctgccggttgcgctgcgcctggcacgcgaagtcgcgctcaaggtgggcgcgtacatcccgtcgttgaccaaggtggagctgcccggcgacgcgccggtgaatctgaggccggccgatgccggcggcaaccaggggcgcaactgggcgctggcgccgatgctggccgagggcaccacctcctgggacctgaccgttgttgccggtgccgatgccggggcagccgacccacgcagccggcgctggggcagcgaaggcagcgtcgtgctggccgatacccaccagggctcgatcggcacggtcaagacggaaatcatctgggtgggggatcgcgcgttgaccgagcgggcatcgttggactggatcggcgacacctcctatgcaggccgtccgatcgcggagctggccgacatgttcggcttcaccgaagacgagttctgcgcgatgtcggccgactactgcggcccggcaccccgccaggtggccgcgcagggctcgctggattactggggcgacgagtcctacgcaggcactcctgcgaaggacttcgccgcgatgtttggcatgaccgaagacgagttctgcagcaccgcgcccacctactgcgccggcggcggcacgcagaccgaagtgaccacttacggcaagcgcgcaggcacgccggcgtggagcgtactgcgcaccggcaggggcgacatggaactgctcgcggccggtgacgtcgtgatgaagtcaggctttggcgtctacaccgccggcactcccgccgcgctgggtgggggccgcgacgctgccttcaattcgccccgtgcagcggccccttggaacaccgcagtgctgggaccgaacctggtgccgggcagctatgacgccgcgatggcaggctaccaggcctggtatccggatcatggtggcaacctgcgcgtcgaagccgggcgcgatatcgtcggcgacgcctggaccgcgcgcgcagagtcgggcagcagcgatcgcgactgggcgctgtactccagtgccgcggtcggcaactggctgtggcggcagggtaccggcggcaccactggggtggagccggtgccgaccagctggtgggtgaactttggcgcctacaccaacgtgtccgctgccgctggcgcctctccacggatggttggtttcaccggcttcggcacattgggcgggggcaacctgacgctggaggccgggcgtgacgccggcgtgcgcgatgcgataggtgacgcgttggtctcgacgatcgcaccgcgctcgggtgcgatcattgctgcggtgggatcgaccggccgggtcagcgatggccagctgcacctgaccggcggcggcgacctgcagctgcgtatcggtggcgcgctgaatccgaacctgcaggcgacgatctccagcctcaacccctccagggcgggacagaatctcgacctcaacggtaccttcagcaacctgcgtgggagcctgcagctcgatgcggggcgcatcggtgcaatgggcgtcaccctggaaagctacgcgacgctgggtaagcagcgggcggcagacctgtttgcgcctgacgccgcccgcgcgatgggcgggccggtgctggtgctgggcgacgccgccgcgcagctgcaggcgcggggcgatgtggtgctcggcggcgtcgccgatgccggccgggttccgctggccaactacagcgcggtgctgcaggatgacggcgcgcgcgctgcaggcagtacgtggttctccctgtggaccgccaacacggccgtggatctgttcagtgccggtggtgacctcgcgccaggcctcgccgggccggaaaacgtgacgggcagcaatctgtggcgggagcaggtccagcttgttgtgcgtggcggcgatgatctgctgaattactggctctatccttcgcgcttcagcgcgattgctgcgcagggtgacatcaagctggaccggatcagcaccacgacggggacgcaggatgtgattctgctggcaccctcggcgacaggacggctggacgtcctggccggcggaggcatcttcgcccagcctggcgcgacccagatcgcgcgctcggccagtgacgcgcgcctgccgggaccgttcgacccggcattcatggccgagcagggggattccgcaggcaatgtgacccgctcgcggcacaacctgtccgtcgacggcaacacggcatcgccggcggggtcgcttccactgttcgcattcggtccgaatacgccgctgtccactgtgtctgcggcactggcgccgagccgcttctacgcggtgcagggcgacatcatgggtctggccaccggcgcccagcgcacgctgaatgtcaacgcggggcagcgcacgcagctgaactggttcgaggccgccggcgccgtgcaactgcgggcaggccgggacatcctcggggtgtcgatgaccgcgttgaacaccgcacccagcgacatcacggtggcgacggcgggccgcgacatcgtgcatctgaatgcgaccattgccggccccggcaacgtcgagatcagtgccggccgccagctgcgccaggaggatgcgggcagcatcgccagcctcggtggcatcgtgcagggcgacacccgtcccggcgccagcatcgcgctgacggccggcaaccagcagatcgatttcgcggccctgcgtgcacgctatctggaccctgccaaccttgccgatcccgcgcaatcgcttgcttcgcagccgggcaaggcagccaaggtgtacgaccaggaactgaagcagtggctgcagcgacgcttcggcgtggcggccgagggcgacggggcgctggccgcgttcgatgcgctgccgcaggaacagcagcgcatcttcctgcgccaggtctattacgccgagctgcgcgaaggtggacgcgagtataccgatgcagaagggccccgcttcggctcctacctgcgcgggcgcgaagccatcgccacgctgatgccggacaggaatgcggccggtgcgacgatcgaccgtaccggcgatatcgtgatgtacggtggctccggcgtgcgtaccgaggcgggcggcaacatcgaactgatggcaccgggtgggcagatcgtgatcggtgtgcagggcgtggtgccacctgccagcgccggccttgtcacccaggggcaaggtgatatccggctgttcagccaggacagcgtgctgctcggcctgtcgcgggtgatgaccaccttcggtggcgacatcctggcgtggtcggagcagggtgacatcaacgccggtcgtggttcgcggacgacgttgctgtacacgccaccgcgccgcgtctatgacggctggggcaatgtgatcctgtcgccgcaggccccggccagcggtgccggcatcgcgacgttgaaccccattgccgaagtaccgccgggcgacgtcgacctgatcgcaccgctgggcaccatcgatgcgggcgaggccggtatccgcgtctcgggcaacatcaacctggcggcgctgcaggtgctcaacgcggccaacatccaggtgcagggcgagagcaagggcctgccggtgctggcatcggtgaacgtcaatgcgctggcctcggccagtgcggcagccaacagcgccagccaggcggcacaggatgtgatgcgcaagagccaggacgaggcacggcgcaaccagccgtcggtgatcagcgtgcagattctgggcttcggcagtggtaccagcgccatcaatccgccggcgcgtggcaacactgccaacagcggttatgacgccaacagtgccttccagttcccgcaggcaaggcgcgacgagggcacgcagcgccgatag

SEQ ID NO: 522373 - DNA, 1176 bp, Stenotrophomonas maltophilia
atgaacaagtacaagaccctggccgcgctggttgccaccgcgctgctcgctaccgtgggcgccgcctcggcgcagaccgtgaccggcggcggtgcctcgttgccggccgacctctacaagggttcgtccgacagcatcctgccggcgaacttcagctacgccgtgaccggttcgggcaccggcaagaaggccttcctggaaaacaactcgctgctgttctcgaccaccggcaccgtgcacttcgccggcagcgattcggtactgagcggcaccgagctgaacacctacaccaccaacttcaaccagccgaccaatgccaaccgctacggcgcgctgatccaggtgccgtcggtggccacctcggtcaccatcccgttcaacaaggccggttcggcggtgaacctgagcgtggcgcagatctgcggcgtgttctcgggtgcgatcagcgactggtcgaccatcgatgccaaccgcagcggcccgatccaggtggtgtaccgcacggaaagcagcggcaccagcgaaatgttcagccgcttcctgaccgcggcctgtgccgctgagaacgctgaaacctcgaagctggtgggcggcaagttcgccatcaagtcgaccttcgccgacctgtacaagcgcgatgccaacggcaacctgccggcgttcctggtggccgccccggccaccggcggcacctcgctgtacaacgctgtctacgcggctgaaggccgtatcggctacgttggcccggacgtgattccgaacctgaccgatgcgaccaaggtcgccaaggtcaagggcttctcgccggaccaggtgagcgtgcaggccaccctggacaccgtcgctccgccgaccggcaccgatgcagagaaccccgccaactgggtgccggtattcggcaacccgtcggccggctatccgatcgccggctacaccaacctggtgatcggccagtgctacaaggattcgagcgtcgccaccagcctgcgcggcttcctggcccgccactatccggcgacctacaccgtcgcgtatgagaagtcgatcaccgaccacggcttcatcccgctgaccaaggtttggcgcgatgcgatccgcaaccgcttcgtgctggccagcagcactgccggcctgaacaaccccagcacctgcgccggcatcggccgtccgctgtaa

SEQ ID NO: 522374 - DNA, 1200 bp, Stenotrophomonas maltophilia
atggcgctgttcgactaccaggccgccaacgcgcagggccgcatcgagaagggccagctggacgctgacagcccgcgcggtgcgcgacaggtgctgcgcggtcgtgggctgacacccgtgcaggtcagcgtggcgcgcagtgccggcagtggctgggctgcccggcggctgtctgccagcgagctggcctgggccacgcgccagctggccagcctgctggccgccagcctgccgttggaaggcgccttgagtgcggtgatcgagcaggccgaacgcccgcacgtggcccaggcgctcaccgcagtacgcgccgacgtgcgtgccggccagcgcctgaccgtggcgctggcagcgcggccgcgcgattttccgccgatctatcgggcgctggtgggcgctggtgaagactctggtgacctggcacgggtgatggagcgcctggccgactacatcgaagaacgcaatgcgctgcaggccaaggtactgaccgccttcatctatccggcggcgatcagcctggtgtcggtggcgatcgtgatcttcctgctcagctatgtggtgccgcaggtggtgaccgcgttcgttcaggcacggcagacgctgccgatgctgacccaggtgatgctggccgccagcgcgttcgtgcgcagctggggtgcgtgggcagggctgggcatggctgcgctggtggtggcctggcggctggcattgcggcggccggaactgcgcctgcgctgggacgcgatgctgctgcgggtgccgatggtcgggcgcttcgtgctgggtgtgaacagtgcgcgctttgcctcgacgctggcgatcctgctggacgccggtgtgccgctgctgcgtgcgctcgaagcggcgcggcagacgcttggcaatgcgttgctggcgcgctgtgccgatgatgtggctgctcgcgtacgcgaaggtgcggcactgggtgctgcgttgaaggtacagaaggtctatccgccgatcctggtgcatctggtggccagcggcgagaagaccggttcgctggcgccactgctcgaacgcgccgcgcagacgatctcgcgcgagatcgagcgccgcgcgatggcgctgaccgcactgctggaaccgaccatgatcctggtgatgggcggcgtggtgttgacgatcgtgctggcagtgctgatgccgatcatggaaatgaaccagctggtgcagtga

SEQ ID NO: 522375 - DNA, 1434 bp, Stenotrophomonas maltophilia
gtgagcgccgccgcgccactgccgtacgcctgggtgcgcagccatggggtgatgctgtccgaggttggcggtgagcctgtgctgctgggtaccgtcgataccgcagcgtgggctgtggccgaactgcgccgccggcatggaccgttgcccttccaggcactggatgccgcgacgtggcagcagcggttggctgagcagtatcgtgacggcggcgacgccgctgccgtggtcggtgccgccgagagcgaagtcgatctggaccggctgatgcaggacatgccggaagtcaccgatctgctggacgcgcaggatgatgcgccggtgatccgcatgatcaacgcgctgctggcgcaggccgcacgtgatggcgccagcgatctgcacatcgagccgttcgagacccattcggtggtgcgctaccgggtggacggcacgctgcgcgacatggtgcagccacggcgcgcactgcacgcagcgctcgtatcgcgcatcaagatcatggcccacctggacatcgccgagaagcgcctgccgcaggacgggcgcatcgcgatccgcgtgggtgggcgtccgctggatatccgagtctccacggtgccgaccgggcatggcgagcgcgccgtgctgcgactgctggagaaggatgccggccgtctgcagctgcagcgccttggcatggccgatgacaccctggccacgttcactggattgatccggcagccgcatggcatcgtgctggtcaccggcccgaccggtagtggcaagaccacctcgctgtacgccgcgttgggccagctcgacagcagcaccagcaacatcctcaccgtggaggacccggtggagtacgacttcgccggcatcggccagatccaagtgaacgcgcgcatcggcatgagcttcggcaccgcgctgcgcgcgatcctgcgccaggacccggacaccatcatgatcggcgagatccgcgacctggagaccgcacagattgcggtgcagtcgtcgctgaccggccatggcgtgctggcgtccctgcataccaacgacgcgatctcggcagtgacgcgcctggccgatatgggcgtggaaccgttcctgctggcctcgtcgctgcgcggtgtgctggcgcagcggctggtgcggcggctgtgcacccaatgccggcgtgccgaggtggatggggacggccgtaccgtatggcgcgcggtgggttgcgcggcctgtgccaacagcggctaccgggggcgtaccggcatccacgagttgttcgtggtggacgatcgcgtgcgtacgctgatccatgaagggcagggtgaacctgcactgcgcgaggcggcgcggcgtgccggcatgcggaccttgcgtcaggacggccagcgttggatcgacagcggggtgaccacgctggaagagatcctgcgcgtcaccggcgacgactga

SEQ ID NO: 522376 - DNA, 2382 bp, Stenotrophomonas maltophilia
atgagggcgatgcgcagccttgcctgcagtactgcattggccctgatcgggggcatggcccacgtgccggcgccggtggcagcgcaggacacacgcgatgagccgctgcagctgaacctggtggataccgatatcggtggcgtgctgcggatggcggcacggttcaccggccgccagttcctggtcgacccacgggtgaccggcaagatgacggtggtctccgatggcccggtcagccgtacccaggcctatcagctgctgctgggcgcgctgcgcatgcgcggcttcgccgtggtcgagaatggcggcgtcagccgggtggtgccgcaggccgacgccaagctgctcggtggccgggtgggcagtggcggtgcaggaggcgaggtcgccacgcgcacctttccgctgcgctacgagaacgccgccgcgctggtggcggtgctgcggccgatgatcagcccggacaatccgatcacggcgaacccgggcaacaacaccctggtgatcaccgactatgccgacaacctggagcgcatcgcgcgggtgatcgccagcgtcgacacgccggccggcatggacaccgatgtggtgaagctgcagcagggcatcgccgtagacgtcgcggcgatggtcgcgccgctgctggatgcgcagggcgcagagcccagccagaaggtggtggtgatggccgacccgcgcagcaacagcgtgctgctgcgttccagcagtcccgggcgcacccgtctggcccggcagctggtggagaagctggaccgcgcgcaggacgagtccggcaacctgcatgtggtctacctgcgcaatgcccaggccaatcagctcgccggcgtgctgcgcggcgtggttgcggggcagagcgatgcgccggcagtgggcagcaatgaaggcatcacgccactgcctggcgatgcaagccgttccgcaccggcgcagccgtcgcagccacaacaggccagggccggcagcaatgcgctggaatcgcagcggctggatccgaaccgccgcgacccgatcgacgccgggagcaccggcttcagccagaacggcatttcggtacaggcggacgtggccaccaacacgctgttgatctcggcgccggaaccggtgtaccgcaacctgcgccgggtgatcgaccagcttgaccagcgccgtgcacaggtgctggtggaaagcctgatcgtggaggtcaaccagaccgacgcggccgaactgggcgtgcagtggatgctgggcaatggccgcaccttcggcggcacccacttcggcggcaccagcggtggcagcgggctgaacaccaccgcgcgcaccaccctggacgtgctgcccaaggatggcctgaagatcggggtgatcgacggcacgatcaacctgcccggcgtcggccagatcctcaacatgaaggcgctggccaacgcgctgcagagcaagggcggtgccaacatcctgtccacgccgaacctgatgacgctggacaacgaggcggccagcatcatggtcgggcagaccgtgccgtttgtgagcggccgctacgtgaccgacggtggcggcggcagcaacaatccattccagaccatcgtgcgcgaggacgtgggcctgaagctgcgggtacgcccgcagatttccgagggcggcacggtgaagctggacatctaccaggaagtcagcagcatcgatgcgcagagcgcgaacagcacggccggcatcatcaccaacaagcgcgcactggataccagcgtgctgctggacgatggccagatcatggtgctgggtggcctgctggaagacagcgtcagccatggccgtgacgcggtgccggggttggggaagattccggtgctgggtgccttgttccgcagcgacacacgcaagcgcgccaagaccaacctgatggtgttcctgcgtccgcacgtggtgcgtgacccggccgccggccagcgcctgacccgcgaccgctatgactacatgcgcaacgcgcaggctggcgcgcaaccggtgcagagctgggcattgccggcgctgtcggcaccgcagctgccgccgcaggacctgtctgtactcggccagggcaacgcgcgcgatggccagggccagccgctgcagaacaccagcctggcagcgttgtatccggccggtgacggcgatgcgcagctggtgcagttcgcacaggggctggacccgacccgtgcccgccagggcgtggcgcaggtgcgggcgctgggcctgcaggcctatgccgaggcgacgccgggcgagagtggccagcgcctgcgggtgcggctgccgcgcgacccggcgacgctggatccggcactgcagcaactgcgcgggctgggctacacgccggaactggtgatcggaccgtga

SEQ ID NO: 522377 - DNA, 528 bp, Stenotrophomonas maltophilia
gtgacggcccgcaccctgcggctgggcggggggctggccggcctgcagcagcgctggcaacgcctgccaccgcgcgaccggcggatgctgtgggtgatggtggtggcgctgctggtggcgggcctgtggtcgttgtggctggagccactgctgaagcagcgcacgcactggcaggccgagctaccgcggctgcaggcgcagtggcgcgcactggcaccgctgctgcgcgtccgtgagcgccagcagctggcgcagggccagcatccgacactggccgggctgcgcgatggaatcaagaccgccggccttgccgacggcctgcatatcgaagcgcgcgacgggcgctggcacctgcaggtgcaggcggtgcccgccgatgcgctatggaactggctgctgccgctgctggccgaccccgccatcgagctgcagcagctgcaactgacacgcacaggggacgcgaacatgccggcggcacggatttccggaaacatcgtgatggtggccactgcgggtgcccatccatga

SEQ ID NO: 522378 - DNA, 1164 bp, Stenotrophomonas maltophilia
atgaacgcgcagcttcgggtgcgcctgccgacgcttgagggtctgcacgccgacagcgcggtggactgggcgcagctgcacaggggcgaggtgctggcccacggttgcgccacgctggcggcgctgggcctgcggcatccgcgggctgcggtgcatgcctgcctcgatccgggcgacctgatcctgctggaactgcagctgccaccgttgtccgggcgccgcctgcagttggcgttgcagggtgaggtggaggcaatgttgctggatgacctgcaggacgtcgcgctggcccacggtgcgcaggcggctgacggcacggttccggtggcctggctcggccagcaggcggtcctgcaggcgcagcagttgctggcctcgtgcggactgcagctgcaggcactccatccgacgcccctgctgctgccctggcaggacggacaggccacgctgcaggtcagcggcgagcacctgctggtgcgaagcgggcgcgatcggggcttcgtccagtggtatggcggacgtgatgcgtgtgcagtcatgcaggcgctggccgttcgcctgccacaggccggcgtgcaggccgtgcaatggatcggcagcgtaccgccggcgtggccggacagcctgccggccaccgccgtcatgaaggaacggcaggcatgtggccctctgccggggtggtcactgccgctgcccggtgcggatcggcaagcgccacgcctggcaatcggcctcgcgttggcggcagtgctgctggccgcgctcggcctgcagctgcaggtctggcgttggcggatcgagggcgaggcgctgcaacaggacatggcgcggcagttcagcgcacgcttcccggaaatcaccgatgtggtggatccggtgctgcaggcaaggcgtgctctggcggtgccgccaccggcgccaccgttgccgccgttgcaacggcaggtagccagcacgctgctggcggttccggaactggccgggcaggtgcgcagcctgcattaccagcccggccagctcgacatggagctggatgccgatgcccaggcattggccgacgatccgcagcggcttgagcactggcagcaggcgctgcaggtgcagggcctgctgctggcgcgcgacgccggtgggcgcctgcgggtgagcggagcgggacagtga

SEQ ID NO: 522379 - DNA, 906 bp, Stenotrophomonas maltophilia
atgtcagcccggatgcggtctgtttcgagtgtccgtcaacgtggcatggcggtgatcgtcgccctgctggtggtggcactggtggcagtgattgccactgcactgctcacccggcagtcggcccagctgcgcgcgctgcgtggtgaccagctgcgcgcacaggtacgcatggccgtggacgcaacgctggaacgtgcggcgcagcagctgcgtgaggacgcaaaggaacagctgaccacggtgcgcagcgggcgctgggcgcgcccattggagctgcaggtgccgttgccggtccagctgcagctggtcgatgcgcagtcgatgttcaacctgcgcaatctgcttgcgcatggcaggccggaccccgaggcgcggcgcgcgttcatcgcgttgtgtgccgggcaggggctgggccagggcgcctgcacatccgccgcggatcacatccaggcgcgcctgcgcgatggcgacatgcaggcgcaggcgccgctgccgcgcgaatcactgatcgaacaggtgctgccgggtgccgatccggtggcgttgcaggcgctggcgcgacgcaccgtggtgttgccggcacagaccctggtcaacgccaacaccagcgacctgcgcgttctgcaggcggtgacgcctgcggtcgagccggcacggctgcaggcgctgctcggtgagcgcgacgctggccattggctgctcaatcgcggcgacatcgccaaccgactccaactgagcaacgaacagatggcggtacttcccttgggtatccatagcgagtggttcctggccgtcggccaggtgcaggctgacggcagcgcggttgatttccgcgcgctgctctggcgcgagtaccgcgacgatggcgtgcgtgtgcagcgcgtgtggacgaggatcggcgcatga

SEQ ID NO: 522380 - DNA, 438 bp, Stenotrophomonas maltophilia
atggcaaggcaggtgggtggtcgcagggctcggcagcagggtttcagcctgatcgagatcatggtggtggtggtgatcatcggcattctcgcggcattgatcgtgccgcgcttgatggaccgtcccgaccaggcgcgcgtggtggcagcgcgccaggacatcgcggcgctgatgcaggcgctgaagttgttcaagctggacaatggtcgctatcccagcgccgagcagggcctgcaggcgctggtgaagccgccgcagggcagtggcgcgatgccggtcacgccctatctggatcgcctgccgaacgacccgtggggccatccgtaccaatatcaggtgcctggcacacatggcgacatcgatgtgttctcgctgggtgcggacagcaggcccggtggcgacgccgggaacgcggacatcggctcgtggcagctgtga

SEQ ID NO: 522381 - DNA, 558 bp, Stenotrophomonas maltophilia
atgctggagctggatcgccacctgagccggtcgctggagcaggcgcggcacacgccgttgaatgtgcaacgctacgggcactcgtgggtctgggtgctgtccagtgatgcctgggccgatgccgcgcgctgggcggcactggacagcagcgcgcatccattggcggcgctgcggcgcgcccttgatctgcagctgcggccgtggtccgaagcagccatgaacgcgctgccgcttgacgcaggcgatgcgcggctgctgcaacgtgcggccctgctggtggtcgtgcgtgatctcaacagtgcgcagcgcgtgtacgacgatctgcgctatcaccaggcctaccgcacgttcatcggcctcgaccatggcaccgcgtggtcgccgatgcagtgcgtgcgcctgttgcaggcgtgcgcgcttccgctgctgcgcggctgcatcgacgaaacgctgtccagtgtgccgccacacctgctcgaggcggcacgcgtaccggctgcgccggcgcccgcccaggcacatgcgcagcgaattgccggcggatgtttatcgtactga

SEQ ID NO: 522382 - DNA, 552 bp, Stenotrophomonas maltophilia
atgcgcaacgagaccatcggtgtgctggatctgcgccgcaatctgtcggcgttgctggaaaccacccagcgacggccgttgatggtgcaccgctacggctcgccatgggtatgcgtggtatcggacgcacagtggcagcaacaggccgtgctgctggacttcgatccgcagtcgcacccgttggcgatgctgttgcgcctgcagcagcaggtgctgccgctggctgaaaccggtgtgttgccgcctgcggcgctggcacgcgcactgctgctgatggacatgcatggcatcaaggatctcgcgcagctgcacgagcaggtgctgcaccatcggctgtggcactggttcgtggcgggcacccgcgggctgatggacggctggcagctgccggcggtgcgcattgcgatggcgtcgtggtgcgatgacgtggacatgacagacgcgctggtcgcgttcgccgcgcgcagcgacgttgcggtactggcccgccgctgcgggggtgacgcaccgcgcctgcagcgcgaagcctgcaggcggatgacgctgcgatga

SEQ ID NO: 522383 - DNA, 981 bp, Stenotrophomonas maltophilia
atggatcctgacgatcgcccgcaacgcccgctggatgccgtcgagcgccaggcgcacgcgtgggtggtgcggctgacctcgggcgaggctactgcggccgacgggcgcagcttccgcgcgtggtgcgaggctgatccccgtcatcgcgaagcattcggccgtgcgcgccggcaatgggagcaggtacgcctggccggcgagcagctgcctgccgctgcacgccaaccggccgtgccgacgccgacccagcgctggagccggcgtgccttcctgggtgccgcgattgccgccccggccagcctggcagtggtggcggcgatccgtccgccgctggggctgtggccctcggtgacggcgatgacggccgacttccacaccggtaccggtgaacggctgcagatcgcaccttcgccacagctgaagatcgagctggatacgcagagcagcctgcgccgccgtgcggacacggagggcgaaggcttcgagctggtgcagggccaggccgcgatcgagacccgggccggtctgcgcctggccctgttcgcaggggcgggctgcgtgattgccgatgaaggggcggtgcgcctggacgtgcgcaacacccacggccaggtacgggtgacctgcctgcagggcagcgcccggatcgagcacccgcagggccgcctgcagctgcaggcgggccagcagacccggtacgacgagcgcctcagtggcgtggtggccgaagccgtggcctcggaagtgagtgcctggaccgaaggcatgctggtgttccgccgggcgccgctgcgcgaggtggtggaggagatcaaccgctaccgccgcggcaaggtgctgctgggtgaatcggcattggcgcgcgccccggtcagcggccgcttccgcatcgatgatccggatgcggcgctggagcagctgcgactgacgatgtcgctggatctgcgtcgctttccaggtggcattgccgtccttggttag

SEQ ID NO: 522384 - DNA, 531 bp, Stenotrophomonas maltophilia
atgagcaacggtacggctggcgcagttgacctgatggaccaccttctgggggcttacgacgagctgaagcgccggttggtgcgcaagctgggatcggaggagctggccggcgacgcgctgcaggacacctggatgcgcctgagtgcgcgccgtgaccgcctggacgccgtgcagaaccctgcggcctacctgctgcgcatggcgatgaataccgtgatcgaccgccaacgtgccgaccatcgcctgctgagcctggaagaggtggagacgctgatggacatggccgaccctgcacctgggccggcgcaggcggccgaactggacttcgcgctggaggacatggtgggcctgctgcagcgcatgcccgagcggcgtcgccgcatcctgctggcaatccgcgtcgatggcctgcagcagcgtgacgtcgccgatcacctcggcgtgtcgctgcggctggtgcagcgtgagctgaaggcggcccaggactacctggcagagcgcagcgggcaggggcgccaggtgcggttctga

SEQ ID NO: 522385 - DNA, 681 bp, Stenotrophomonas maltophilia
gtgttctacgtcagggggctgaatggacaccatgcggtcagaacttggaaggtggccatcgtcgcgtggctgctgctgtcctttgccgctgccgcacaggacggagttcatgcctacgacatccctgcgcagccgctggaacaggcggtcgagcgcttcagcgtcatcagcgggtggtcggtgatgtacccgggcgaccttgccgccgggcgcagcagctatccgctgcacgccaacctgccgccgctgccggcactgcaggtgctgttgcaggactccggtgtcgaggccgaggtgatcggcgagcagcgtgtcgtgctgcgccggggcacgcccttggcgaccggccccgatgttggcgctgaactccctgaggccgagcgtcggcgtcgctacggtggcctgcagcagcggctgcgtgcggcgttctgtgacgacccggagatcgcgcccggccgctacgccgcgacgctgcgcttccgcatcgacggtgcgggccgggtgagcgagcccgagctgctgtccggcagtggcagtgcccgccgcgatgcacgcctgctgcaggcgctgcagggcctggtgctggcgaccgaggccgccgcgctggcgcagccggtgaccctgcagatacgtccttccggcaccgaccacgactgtggtgggcgcgcgccccttccatga

SEQ ID NO: 522386 - DNA, 465 bp, Stenotrophomonas maltophilia
atgcagtatcagctcgacaacctcgatcggcgtatcctcgacgccctgcagcgcgacggccgcctgcagaacctggagcttgcccggctggtcgggctgtcgccgtcggcctgcctgcgtcgggtgcggctgctggaggaaggcggctacatcgaccgctacgtggccttgttgaacgaggccaaggtgggccgtggcttcacggtattcgtccgcgtgtggctgcgcgggcaggacgaggacaccaccaattacttcatcaacagcatcaagtcgttcccggaagtgcttgaatgccatctgatggccggtgactgcgatttcctgctgcgggtggcggtggccgatcttgatgcctaccgtcagttccagatgcagcacctgaaccggattgccggcgtgcagaacaccaagaccgagattccgatgcagcggatcaagcagacgacccggctgccgctgtga

SEQ ID NO: 522387 - DNA, 732 bp, Stenotrophomonas maltophilia
atggacgcccgtaccaccctccccctgcccgacacctgcgataccgcgccgcgtgccgaattcctgcgcggcctgcgcgccgccgtgccggtgatgatcggtttcattcccttcgccctggtgctcggcgcgcaggccgcgcagaagggcctgagcgcactggaagtaccactgatgacgggcctcaacttcgctggcggctcggagttcgccgccgtcgaactgtggacctcgccaccgcacatcgcactgatcgtggcgatcaccgcactggtcaacagccgccatctgctgatgggcgccagcctggccccactgctgcagcacctgccgcgccgccgggtgctgccggccctgttcttcatgtgtgacgaaagctgggcgatgggcgtggccgatgcgcgccgccgtgcgctcggcttcagcctggcctattacctgggcgtctccgcgggcctctacaccgtctgggtggcctgcaccgcgctgggtgcgatcgtcgggccgctgctgggcgacatccacgcctacggcttcgacatggccttccccgccgtgttcctggtgctgctgcgcggcatgtggcagggcatgaaggccgcgcgcccgtggctggtcagcctggtcgtggccgccggcacctatctgctgatcccaggtgcgtggtacgtggccagcggcgcattggccggcctggccgccgcctggctgctggcggaggacgcagcatga

SEQ ID NO: 522388 - DNA, 315 bp, Stenotrophomonas maltophilia
atgatcttcaacggcctgatccactggtcctcggtgctgaccatcgtgctgatggccgccgccacctacctgacccgcatcgtcggcttcctcgcgctgcgcaaccgcacgctgggcaagcgcgcggtgacggtgatggaagccgcgccgggctgcgtgctgatctcggtgatcgctccggatttcgtcgccgacaagcccgccgacctggccgcgctggcgatcaccctgctggccgccacgcggctgtcgatgctgccgacggtgctgatcggcgtggcctcggccgggctgctgcgctacctgatgggctga

SEQ ID NO: 522389 - DNA, 2121 bp, Stenotrophomonas maltophilia
atggccagccgtaagtggacgcagacctcgcgcgtgcgcgaaggccggccgttcccgctgggcgcgacgtgggacgggctgggcgtgaactttgcgctgtactcgcggcatgccacccgggtggagctgtgcctgttcgatgcgcgcaaccgtgaagtcgagcgcatcgtcctgcctgagtacaccaacgagatctggcacggctacctgccggacgtgcggcccgggcaacgttatggctatcgggtgcacggcccgtatgcgccggaggaggggcatcgcttcaatcccaacaaactgttgctggacccctacgccaagcagatcgtcggcgagctgaagtgggcgccgcacctgttcggctacaccctgggccaccgcgatggcgatctcagtttcgaccgccgcgacagcgccagctacatgccacgctgcgcggtgatcgatccggccttcagctggggtgtcgaacgtgcacccgcaacgccctgggaccggaccgtgatctacgaagcgcacgtgcgcggactgaccatgcagcaccccgatgtcccgcaggccgagcgcggcaccttctctgccctgcgccacgacgcggtggtcgaccacctcagccatctgggggtgaccgccatcgagctgctgccggtgcatgcctacgtggatgaccagcagctgctcgagcgcgggctgcgcaactactgggggtacaacaccatcggcttcttcgcgccgcagccacgctacctgtcgctgggcaccgtggccgagttcaagcagatggtcgcgcggctgcacagtgccggcatcgaagtgatcctggacgtggtctacaaccacaccgccgaaggcaatgagctgggccctacgctgtccttcaagggcatcgacaatgccagctactaccgcctggccgatgatcgccgctattacatcaacgataccggcaccggcaacacgttcgacctgaccaatgccggcgcgctgcgcatggtgatggactcgctgcgctactgggtgaccgagatgcgggtggatgggttccgtttcgacctggccaccatccttggccgcgagcggcatggcttcgatgcctcgggcagtttccttgatgcggtacgccaggacccgatcctgagccaggtgaagctgattgccgagccatgggacatcggcccgggcggctatcaactgggccagttcccgccgggctgggcggaatggaacgaccgcttccgcgatacggtgcgcgcgctctggcgcggcgatggcggccagttgccggaattcgccacgcgcttcaccggctcggccgacctgttcgaacatcatggcaggcggccctcggccagcatcaacctggtgacggcgcacgatgggttcaccctgcacgatctggtgagctacaacgatcgccacaacgaggccaacggcgaagacaaccgcgatggccactcgcacaacctctccagcaaccacggtgtggagggcgacaccgatgatgcggcgatcctctcgttgcgtgcgcggcagatgcgcaacctgctggccacgctgctgttcgcgcagggcacgccgatgctgctggccggcgatgagttcggccattcgcagcagggcaacaacaacgcctactgccaggacaacccgctgagctggatcgactgggagcgtgcggcatcgccggctgcacaggcgcaggtggcgttcgtacgccgggcgctgtcgctgcgccgacgctatggcctgctgcgcaggaaccggttcctgcgcggcgaatacgatgaagcgctgggcctgcgtgatatcgactggcggcatcctgacggccgcagcatggaggaagcggactggcatgacgcagggctgcgtgcgctgctgatcgtgctggacggccgcagcccggacagcggcctgcgcgagcccgggcggcatgtcagcctggccctgctgttgaacgccggggaccagccgcagcggttcagtgtgtcggatgaagccttgtcgttccggcgcgtactcctgcagaccgacgaaacgccgttggagccggatgaggcaggtgcctggaccctgccgccgcgcagcctgtgcctgctggcggcaagcagcagcgcctga

SEQ ID NO: 522390 - DNA, 2574 bp, Stenotrophomonas maltophilia
atgacggggttgcgtgccaccgcgcgcctgcagctgcacgcaggcttcgacctcggagcggctgccgcgcaggtgccgtactacgccgcgctgggcgtcagccacctttacctgtcaccgatcgctgcggcggtgcccgggtcgacgcatggctacgatggcgtcgacccggctcgcatcaatccggaactgggcggtgaagcgggcttcctgcagctggcggaagtgacgcgcgcgcacggcatgggcctgatcctggacatcgtgcccaaccatctggcggcgtccccgcacagccagtggtggagcgatgtgctgatgcacgggcctcgaagcccgcacgcagcttggtttgacatcgagtgggaggcgccgggctgcgagggccggctctggctgccggtactggaccggccgttgcacgacgcggtacgcgacggcgtggtgcgcgtggtggtggacaacgcgcggcccgtgctgcgccaccatggcctggcattgccgttgtcgccgcgcagccatccgctggaacccgcgcagtggccggcgtgggccgaacgctgcaaccgcagcgttgaacggttgcacacgctgctgcagcggcagcactaccgtctggcctggtggcgcacggccggcgatcaggtgaactaccggcgctttttcgatatcaacgaactggccgcgctgcgggtggagcgcgaggatgtgttcgaggcagtgcatgcgctgccgctgcggctggtacgcgagggatgggtggacggcctgcgcatcgaccacgtggatggcctggcctccccgggcgcgtacctgcagcgcctgcgtcaatcgctcgacgccgcctgcgcggccggcggtcgtgagccgcaggccgtcagcctgcatgtggagaagatactggccgagggcgagcagctgcccgacgactgggcctgcgacggcaccaccggctatgacttcatggaccaggccggggcctggttgcacgatccggcggctgcacccgcgctctcgcgcacgtggcaggcgctgggcggtgacccgcgcagcttcgaccggatccagcaggacgcccgcgccatgttgctgcgccagggccttcatgccgacttccagcggctgctgcgcagcgcgcagcaggtcctgcagccgcggctggccgaagccgatatcggagtggctgcgctggcccgcgcattggcttccgtgctggggcattaccgcacctaccggccctattcgctgcagggggcgggtgaacgaaaggcgctggcggacgcttccgccgcagcgcgccaggcactggacggtgccgcacgcgcggcgctggacctgttgctggcagcgcttgccggcgaggcgcaggccgagcgcgtgctgcgtgcgcgtttcggtcaactggccgcgccgttgaatgccaagtcggtggaagacaccgggttctatcgctatttcaggctgctctcgcgcaacgacgtcggcagtgatccgcagcggctgggcatggaggggcgcgcgctgctggaacacgccgccgcgcgcctgcgtcgccatcccagggcgttccttgcgcttgcgacccacgatcacaagcgcggcgccgacagccgggcacggctggcggttctcagtacctgcacgttcgaatggcgggacgctgtgcggcgctggaaccggatgttgacccgcgccggcgcgccgatgccattgccgggtgccgaggcctacgcactgtggcaggcgctcgtggccgcatggccgatgcacggtgcccctggcgccgacttcgcctcgaggatggtgcaatggctgaccaaggcattgcgcgagggcaagcgggtcagcagctggtcagacccggatgtggccgtggaggaggccgccgcgcagtggctgcacgcgctgctggacgcagcgcccttgcagccggtgcgcgaggcgctggcgacgttcgtggcgcgcatcgcgccggccggcgcctgcaacggcctggcgcagctgtgcctgcagcactgcctgcccggcgtgcccgacctctatcagggcggcgaaggctgggacctgagcctggtggacccggacaaccggcgtgccgtggactatccagcgcggcaggcgtggctgcgcgatacgcgcgggtggcccgcgctgctggaagactggcgggacggtggcatcaaggcattcctgctgcggcaattgctggagtgccgccgcaggcacccgcacctgttcctgcatggccagttgcagccgctgtccgcgcctgcgcgctcgccgtggctggcgttcacgcgcaggcatcaggcgcaggtgctgctggtgatcgtgcggcggggttcgcccgccgccgtgcctgggcccagcctgcacgccgcgcacgacgtcggcaccggcgtagcactgcacggtctgccgacaggccccatgcgcaacctcctggacgggcgcatcgaacatttcaacgcaaccgcggacgtgggcaggcttctggctggcagcccgctggcgatatggatcaacgaggagacaggtagggatggacagcagggaacgacggcagcggattga

SEQ ID NO: 522391 - DNA, 1845 bp, Stenotrophomonas maltophilia
atgaatacggatgcagcggtgcgggagacggcccgccgtgcgggcctgctggtccgctggaccgacgtggccggtgccgcgcgcgaggtcgcgccggacgtgctgcgcgccgtgctggaggggctgcagtgcgaggcggtgcccgagcacgctggcctgcgcacggcctgctgcggacagctgctggtgatgccggaggcagccggcgcagcgtgctgggtggatgagcagggcgcagcgttgcccgcccgtgccgatgcgcagggccgctggcgcgtgccggaccagccgggttactggcagtggcgccggggcgaccagcaacaggcggttgcggtggcgccacagcgtgcctggtggccgcggggcacgctgcgcggctggggcctgtcggcgcaggtctacagcctgcgcgcgcccggtgatgccggcatcggtgacagtgccggctgtgcacgatggagcgagctgctgcaccggcacggcggcgacgcactggcgttgagcccgctgcacgccggcttgccaccgggcccaggctacagcccctattcgcccagcgaccggcgctggctcgacccgctgcaggtctccctgccgcaggtactgcccggtgctgccaacagcgtgctgggcgtggacgaggcgctggcggcggcggtggaagcgggaactgccgcacgtcgcattgactggccgcactcggcggcagtgaagtggcgctggatacggcaggttcgccaatggattgcagcgcaggcaccgtcgcagcacgcgcagatcgaaacctggcgtgccatgcagggcgatccgctgtggcactattgccagcatgccgccgaccggttcaccggcagcgcggacgaccacgcgtttgcgcagtggttggcacagcagggctgggcgcaggtacacgccacgctgcgcgacgagggcgcttcgatcgggttgattgccgacctggccgtgggctgcgcgccgcagggcgtggaggcacgcaccgggggggctgatctgctgcagggacttgagctgggtgcgccgccggacgcgttcaatccgctcggccaggcctggggcatcaccagctggtcaccgatggcgttgctgcgcgagggcttcgccccctaccttcgcgtgctgcgcgccgtgatgtccggccgcggcgggcttcgcatcgatcacatcctgggcctgctgcggctgtgggtgttgccccgtggcgcgggcgctgggcagggagtgtacctgcgctatccgttcgatgatctgatcaacctgctggtgctggagtcctggcggcatcgctgcgtgctgatcggcgaagacctgggcgtggttccgccgggcatgcgccagcggctggcagcccggggcattctgggcatcgaggtgctgccgtttgcccgcaacggcgcgcgcttcctgccggcgccgcagtggcgccgcgatgcagtggccatgccctccacccatgacctgccaccgctggccggctggctgcgcgggcgtgacctgcgctggcgtgcacgcctgggtgagctggcggatctgccagcggcactgcgcgcgcgcgcaagcgacgcgcaggcactttctgcggtggccggcggcgagggcgcgccgctggacgccagggcgttgtctctggtcgcccactcggcgtcccggctggcgttgctgccgctggaagacgcgctgggcggtcgcgcacaggtgaacctgccaggcaccgtcggcggccatcccaactggcgccgccgcctgccgccgacgtgggatgctgacgcggccgatgcgcgcgtggcgcgcctgagtgccacgcgccgcaggaccgggcaatga

SEQ ID NO: 522392 - DNA, 1719 bp, Stenotrophomonas maltophilia
atgaccacagtggccccgcgcctgggcgcttggccggtggccggtgacggggtggagttccgcgtgtgggcaccggacgcaaggacgatggcgctgtgcctgcaaggcacccagcggccgatgcagcgcgacccggacggctgccactggctgcgaataccggcatcgcatggcgaccgctaccggttccgcctgccttctggccaggacgtgcccgacccggcctcgcgctggcagccggacggcatcgacggcgacagcgcggtggtgctggataccgacgcgacggggcctgcctggcaggggcatgcctggcaggacctggtgatctatgaggtgcatatcgaggccgggggcggcttcgcggcgttgaccgcgcagctgccgatgctggccgcgctgggcatcaccgccattgaactgatgccggtcgcgcagtttcccggccagcgcaactggggctacgacggcgtgttcccgtatgcgccggcccatgcctatggcgggccggcagcgctgagggccttcatcgaagcggcgcacgatgcagggctgtcggtgctgctggatgtggtctacaaccacttcggaccacagggcaaccacctgcgcgactacgcgcgcgggttcttccgtgacgaccgcagcacgccgtggggcgaggccatcgacttccgccagccctgggtgcggcgctttttcatcgacaacgcgctgatgtggttgcgcgactacggcttcgatggcctgcgcctggacgcggtgcacgccattgacgatgaccgtttcctgcagcagctggccgatgaggtacgtgcggtggccccgcacgcgcacctggtgctggagaacgagcgcaaccaggcgcgatggctgcgcggcgcctaccaggggcagtggaacgatgacttccacaatgcgctgcacgtgatgctgaccggcgagcaggaaggctattacgcggcctatgccggtcgcgccgaagcactgctggcgcgctgcctggccgagggattcgcctggcagggtgaaccggacctgcgcggcaatccccgcggcgaacccagcgccgacctgtcgcccgcgcgttttgtggtattcgcgcagaaccatgaccaggtgggcaaccgcgctttcggcgagcgcctgtcgatgctgaccgatcctgcgccgctgcgcgcggcgctggcgctgaccctgctgacgccgatgatcccgctgctgttcatgggcgagccgtggcaggcgcaatcgcccttcctgttcttcaccgactacgcgccgccgctggacgaggcggtgcgtgaagggcgtcgacgtgagttcgctggtttcagcgcctttgccgacgccgccgcgcgcgcgcgtattccggacccgaacgatgcggcgaccctgcaggcgtcgtacacgccgccgcccggcgatgatccctggtcgcagcactggctgcgctgctcgggtgaattcctcggcctgcgcaggcgctatctgcagccgggcctgctgcaggcgcggtcgctgggcgcgcgcgtgcttggccaaggcgcggtgcaggcgggctggcagttgccatcgggccaatggtggatcgcgatcaacgtgggccctgtgccggtggcgcatgcggtgccggccggcgagtacgtcgtggggccggacgctgccgggatgctgccggcaggcggcggcgtgctggcctgctgggtcgccgcatga

SEQ ID NO: 522393 - DNA, 2235 bp, Stenotrophomonas maltophilia
atgagccacgacagcctgcatctggccgccctggaggatgaagcgatcacggagacgggattggatcagcgtatcgccccggcgctgcaggacctcgtcaacgcgcgcccggccgatgcattcgcctggctgggcccgcatcgccagccagaaggcggacgccagctgcgcgtgctggtgccgcatgcgcagcgcgtcgaggtgattgcagacgatgggcggcgctggaacctgtcccctggcccgttgcccggcctgttcgagggcgcggccggtgacgcggcgataccgctgcttgccctgcatttcgaacagggcgtggagcaggtgcacgatgcctatgcgttcggtccactgttggacgaagccctgctgcagcgcttccatgccggtgatgccgatgcggcgcggcagctgggtgcggtgccgatgcaggtgcagggcattgcgggcgtgcgcttcgcggtgtgggcgcccaatgcccagcgggtcgccgtggttggcgatttcaacgggtgggacggccgacgccatccgatgcggctgcgtcacaccgccggcgtgtgggagctgttcctgccgggcgtgcaggccggcgcccgctacaaattccgcatcgtcggcgccgacggccgggtgatgcccgacaagttcgatccgatggcgcgctgggccgagctgccaccggcgaccgcatcgcgggtgccttcggctgggcaaatggagtggcacgatgatgcttggttggcggcccgccgcctggccggaacctgcgcgccgctgtcgatctacgaagtgcatgcgggttcctggcagcgcagcgacgatggtgcgccgctggactgggatgccctggccgaccgtttgattccgtacgtggccggtcttggcttcacccatatcgagctgttgccggtgagcgagcatcccttcggcggttcctggggctatcagccgctggggatctacgcgccgacggcacgccatggcacgccacaggccttcgcacgcttcgtggaccgctgtcaccaggccggcgtgggagtgatcgtggactgggtgagcgcgcacttccccaacgatgcgcatggcctggccgggttcgatggcaccgcgctgtacgagcatgccgacccgcgcgaaggggtgcacgccgactgggacacgctgatctacaactacggccgcaacgaagtggccgcctacctgatcggcagtgcgttggagtgggtggagcgcttccatgtcgacggtctgcgcgtggacgccgtagcgtcgatgctgtaccgggattacagccgtgccgagggggagtgggtacccaacgagcagggcgggcgcgagaacctgcaggcggtcgctttcctgcggcggatgaaccagacgctgcgggagcgcttcccggacgtgctggtgatcgccgaggaatccaccgcgtggccgggggtgacagcgccggtggaggagggcgggcttggcttcacccacaagtggaacatgggctggatgcacgacaccctgcagtacctggggcgcgatccggtccatcgttcgcatcaccacagccagatcagcttcggcctggtctacgccttctccgaacggttcgtgctgccgctgtcccacgacgaggtggtgcatggcaagggcgcgctgctggccaagatggcgggcgagccggcacagcggctggcccagctgcgcgcgtattacggcttcatgtgggcgcacccgggcagcaaactgctgttcatgggcggcgagttcggccagggccatgagtggtcgcacgatgcggcactggactgggcacgggcggccagcagcgagggccagggcctgtcgcgcctggtgggcgacctcaataacgtgctccgcgccgaacctgcgttgcatcgcgacgaacgcgacgaacgcggcttcgactggagcgtggcggacgacagtcgcaacagcgtctacgccttcatccgccgggatcctgccggcagcggccgcaccctgctggtggtgagcaacttcaccccgctgcgtcgcgacggctaccgggtcggggtgccgcaaccggggcgctggagcgaacggctcaacaccgacagcgcgtactacggtggcggcaatgcgggaaacctcggcgcagtgcataccgagcccaggccgatgcacggccacgcgcagtcgctgcggctcacgctgccgccgctgtccacgctctacctgcaggttgatgcatga

SEQ ID NO: 522394 - DNA, 1527 bp, Stenotrophomonas maltophilia
atggcccgcgccgcccagtccgcttcacccgttgcgatctctccgctcacgcccgtgccgatcggcactcgccgcggccactcgcaaccgttggatctcccagaactggtgcagcgcgtgctgttcgtcgccaccgagatggccgacttcatcaaggccggcggactgggcgatgtggccgcggcgttgccgcgtgcggtgcgcggtgcatgtgattcgcgcgtgctgctgcccggctacccggaggttctgcagcgcctgccacagctgcgaccggtggggcgggtcagcgcccgagccgggttgcccgcgtgcacgatcggcatggcggtgcaggccgacggccttcctatctacgtgctgctgtcgcctgggctgtacgagcgcgagggctcgccctacgtggatgggcagggacaggagtggaaagacaacgcggtccgcttcgccacgctttcgcatgcggctgcggagattgcggccgggcgcgccgggctggactgggcgccgcagctgctgcacctgaatgactggccggtggccatggctgccgcctacgtacgctgggaccggacagccgtgccgaccctgctgaccatccacaacctggcctatcaggggctgtttccctacgcgcttgcgccggtgctgggcgtgccagccgaacacctggatgaactgcacttccacgggcagatgtcgttcctgcagggcggcatcaccaatgccacgcggctgaacacggtcagcctgcgctacgcgcagcagatcaccgccccggatgacggctgcgggctgcatgacctgttggcgcgccgggcggccggcggacacctgagtggcatcgtcaacggcatcgacgccagctgggatccacgccgcgacatccacctcaaggcccatttcggcatcggcgaatggaccgggcgcgccaccaacgcgcatgcggtgcgcaaggcgttcgggctggcgccgtcgaccggcccgctgttcgcggtggtctcccgcctggtgcaccagaaaggcctggacatcacctgcgacgtggcaccgcagatcgtggcggccggcggccagctggtcatcatcggcggcggcgagccgcaggtggaagcgcaggtgcaggcgctggcccggcgctaccccggacgggtgggcgcattcatcggcttcgaagaggcgctggcccgccagatgtttgccggcgccgacttcctgctgatgccttcacgcttcgaaccctgcgggctgagccagatgtacgcgcagcgcttcggctgcctgcccatcgcacacgcgaccggcgggctggtggataccgtcgaggatggcgtgaccggattcctgttccacggcgccaatgccgatggcctgcgccgctgcgtggaacgggcgatgcgcaccttccgcctgcccggcctgctgcaggccatgcgccgcgccgccatgctgcggccgggtggctgggatgcggccggtcgcgcgtacctggccctgtaccagcagacctgccaggtggccgcatga

SEQ ID NO: 522395 - DNA, 429 bp, Stenotrophomonas maltophilia; identical to SEQ ID NO: 493262

SEQ ID NO: 522396 - DNA, 1530 bp, Stenotrophomonas maltophilia
gtgaacgctctcccgaccagtacgcccttcagccgcctgctggtgggttttgcgtccgagtcgggcaacgcccgcgccctggcccagcgcctgggcgcgggcctgcagctgcacgggccgcaggtactcccgttcaacgacatcgacgtggccagtctcggccaaggcgatgtgctgctggcaatctccagctcgttcggcgatggcgaaccgccggccaatggcgagcagttcttcgaaacactgcgccagaccccgacgctgcgcggcctgcgctatgcggtgttcggccttggtgacaccggctacccgagcttctgcggcttcaccaaggcgctggatgctgcattgagcgagcgccaggcccagccgctgctgcagcgggtggacgccgatctgggctacgagcagttcttccagcaatggcagccggtgctgggccaggtgctggagggtgacctcagcgctggccagcacctgcacctgcaggtcaccgcctatggcgaagacaatgcctttgccgcgcgcatcctcgaacgccgccgcttgaacagcagcgacccggccgcgtggcacctgcaactggacattgccggcagtggcatggcctatcgcgcgggcgacaccctgcacgtagtacccgagaacgatcctgccctgctgcaggcgttggccacctggtacggcgacaccgccgccgtggccgccctgcacgaccgcgagctgcgcctgctgagcaagggcgtgctgcgcgaactggcccggctgggcggtagtgaggcactgaagggcctgctgaaggtcagccagaagcgcgagctggacgcctacctgcacggcctggacctgctggacgtgctgcaggaccacgccacgccggacagcgtgccgcttgcccggctgcgcgaactgctgtcaccgcggctgccgcgcgcctattcgatcgcctcgcacccgtgcgacgaccagctgagcctgtgcctgcgcgaagtgcgctacaccctgcgcggccgcgaacgcttcggcactgccaccggcagcctgctgcatggaggcgaccatgcccgtgtgtactgccgctccaaccccggcttccacctgtccgataccggcgaggcaccgctgctgctggtcggtaccggcaccggcatcgcaccgctgatgggcctgatgcaggagctgcaggccaacggctgcgaacgcgaggtgcacctggtgtttggcgagaagcaccgccagcacgactacctgtaccgtgaccagctgctggactggcgcacgcgtggcgtgctggccggcctgcataccgcgttctcgcgcgatggcgccgaaaagatctatgtgcagcatgtgctgcagcagcgcggcgatgaagtgcgcgatgtgctggcccgcggtgggcatctgtacctgtgcggcaacaagcgccacctggaaagcgcggtgcgcgaggccatcgatgccatcggcggcgaaggccactgggacacgctgcgcaatgaaggccgcacgcactgtgagctgtactga

SEQ ID NO: 522397 - DNA, 669 bp, Stenotrophomonas maltophilia
atgtggcttgacctgcaggtgcagcgtcgcctgcaggcggccggccaggatttcgtgttggacgtatcgctgcagtgcacgcagcggcaggtggtgctgttcggaccctccggcgccggcaagagcctgaccctgaaggcggtggccgggctgctgcggccgggccagggccatgtgcgcctgcaggggcagaccctgttcgatacggccaccggcgtggacctgccaccgcagcgccgtcggctgggctacgtgttccaggattacgcgttgttcccgcacctgagcgtgcgccagaacgtggcgttcgggctacagaagggatggctgaatccgcgggtcggccagcgtttcgatgcggtggagcagtggctgcacgcattccgcatcgacacggtgggcgatctgctgccatcacagatttccggcggacagcgccagcgtaccgcgctggcgcgcgcgctggtgacacagccgcaggcgctgctgctggatgaaccgttttccgcgctggaccacgacctgcgccagcacctgcgccaggagctggagaccgtgctggacaagaccggcattccgctgcttttgatcagccatgacccgcaggatgtggccatgttcggccagcaggtggcgcgcgtggtggatggccgcatggtcgacaattga

SEQ ID NO: 522398 - DNA, 684 bp, Stenotrophomonas maltophilia
atggatctggactggagtgcattggggttgtcgctgaaggtggccggctgggccaccgcgatcaacctggtgctgggcgtggcgctgggcgcgctgctggcgcgtcggcgctttcccggccgtgagctgctggattcgctgttgaccctgccgatggtgctgccaccaacggtgctggggtactacctgctggtgctgatcggtcgcaacggcccgatcggcgcgtggctgcagtcgtggttcggcatcaacctggtgtttacctggcaggccgcggtgatcgcggcggcggtggcttcgctgccgctggtgttcaagccggcacgcgcggcgttcgaggaagtggacggacagctggagcaggccgcgcggacgctgggtgtgtccgaagcggcggtgttcttccgcgtcacgctgccgctggcctggcgcggcattcttgccggcctgttgctggcgtttgcacgcgcgatgggtgaattcggcgcgacgttgatggtggccggcagcattccgggccggacgcagacgttgtcgatcgccatctacgaggcggtgcaggccggtcaggacggcaaggccaatgcgctggtgatcctgacctcggtggtgtgcatcgtgatcctgttgctggctgcgcggttggtgggcggacgtcgccgggagctgcgtgatgtggcttga

SEQ ID NO: 522399 - DNA, 744 bp, Stenotrophomonas maltophilia
atgaagcgagcggcattgttgtggctgggcctgctggccacggtaccggcctgggcggccgacctgacagtgtcggcggcgtcgagcctgaccgagagcttccgcgaactgggtgcggcctatgagaagacgcacccgggaaccaaggtcgatttcaacttcgccgcctctggcgtactgctgcagcagatcagccgcggcgcgccggtggatgtgttcgcgtcggccgatgaagccaccatggaccaggcccagcagcaggacctgctggcggccggcagccgcgcggtgttcgcggtgaacgcgctgtgggtggtggcgccgccgcaggccagggccgcgccgcgcagcttgaaggacctggccggtgccggcgtgcaacgcatcgcactgggcaacccggacagcgtgccggtcggtcgctatgccaagggcgcgctggaagcggccggcctgtggccgtcggtgcagggccggatcatcaccacgcagaacgtgcgccagtcgctggattacgtggcgcgcggtgaagtggatgccggcttcgtctatgccactgacgcgcaggccatgccggaccgggtacgccgtgccttcgtggtaccggtgtccgggcgcatcgcctatccgctggcggtgaccagggccagcgcgcagccggcagaggccaagcggtttgtcgcctttgtgcgttcggcgcagggccaggcgatcctggcccggcacggattcggcaagccctga

SEQ ID NO: 522400 - DNA, 777 bp, Stenotrophomonas maltophilia
atgcctctgaacccctccgctccctctgcgtcccggccggccacgcccaatccggcagcagccgatgacggagacgcgctgcacttctgcagcacctgtgcgttctccgacgcctgcatgtcgcagggctacgacaagaccgcgctgggcgaattgcatgtgctggtcgaccacgtcggcccgttccaggccggcgactacctgttccgtgccggcgatccattcgactcgatcgccgcggtgcgtgccggcatggtcaagacgttcgtcgatgacagccagggcaacgagcaggtgctgggtttcagcctgccgggcgaggtgatcgggctcaatgccatccacggcgcgcgcttcccttgcaacgccgtggccctggacaccgtctacctgtgccggatctcgtttccgcgattgagcctgctggccacgcgcatgccggggttgcaggcgcggctgttcagcctgctcagcgccgagatcggcaaggtcgccacgctggccgccaaccatcgcaccgaggagcgcatggcggcgttcctgctggatctttccgagcgctatgcccggcgcggattctccgccacccgtttcaacctgagcatggcccgcaccgagatcgccaactacctgcggatggcgccggagacggtgagccgggtactgcgccgcttgagcgacgacggtgtgattgcggtgaaccaacgtgagatgctgttgctggacccggaccggctggcggaactggccgtagcccgggacgccggactggactga

SEQ ID NO: 522401 - DNA, 366 bp, Stenotrophomonas maltophilia
atgaaggtccagctgcaacagcaatcgatgcgcctgcgcgtggatgaagaagaactggcaggattgctggccggcgaatcagtggagaacctgacgcgctttggtggcagtggtggctggggcgtggcgctgtcgctgcatgccggcgatcaggcggtgctgctcgatggcgggacattctgccggttggtactgcctcgccaggccgttgagtcgctggcgggcaggctgccctgccgggatgggctgggcttcggtatcgcgttggatgacgacagcatgctgcagctgcagttcgacgtggacgtgcgcgacagcatgcggcagcgtggcccgcagcggcgttccgaacccgcgccagagtag

SEQ ID NO: 522402 - DNA, 567 bp, Stenotrophomonas maltophilia
atgaccatgcgcacgatcacgaacatccccattgatggcatcgtgctggccggcggcctgtccagtcggatgggccgcgacaaggcgctgctgccctggcacggccgcacgctgctggaacacatgcgcggcctgctgctgcaggccggcgccgggagggtatgggtgagcggcgactacccagcttttggtggcatcccggaccgggtcgcacgctgcggcccgctgggcggcctctacagtgtggcgatgcagatgccagacggccccgcctgggtggtgccggtcgatacgccgcgggtgacacccgcgctgttgcagcggctgcaggccgatcaagggcgtgcctgcacggtattcgacgatgaaccgttgccgatgcggttgcagatcgatgatcattgccgccgcgtgctgcaggccttgatcgaggacccgacggcgcgccgttcactgcgcgccctgcaggaacgcctgggcgtgacacggatgccactggcgccggaggatcaggcgttgctgctcaactgcaacaccccgtcggaatgggagtccatcacagcatga

SEQ ID NO: 522403 - DNA, 501 bp, Stenotrophomonas maltophilia
atgagcgagacgatcatcgccaaggtcgtggaccgcgcgcaggcggcaatcgatccggccgagggcatcgcggcggtttccgatacgggcttcggcggcatcgatgtgttcatcggcaaggtgcgcgacgtcaacgtgggccggcgggtgaccgggatcacctacgatctgttcgaaccgctggtgctgaacgaattcaagcgcctggccgccgaggtcgaagccacgttcggtccgaagctgaaactgtatgtagcgcatgccaagggccggcttggcatcggcgatgtggcggtggtggtggccgccggcagcccgcaccgtgacgaggcgttccgcgcctgccggcagttgattgaagtggtcaagcaccagtgcccgatctggaagcaggagcattacgaggacggcgacagcgcgtggagcgagggttgcagcctgtgccatgcggacggcgaacccggccatgaccatgcgcacgatcacgaacatccccattga

SEQ ID NO: 522404 - DNA, 261 bp, Stenotrophomonas maltophilia
atgagacaggtgaatctgcaattgttcggtgcgttttccgatctggatgccagccgcgagatcgccgtggatgtagccggtggcaccgtggccgatctgcgccaggcgctgcgcgagctgctgccgctgcgttggccgggtttccgcgcgggcctgctggactactcggcattcgccgaccagcaacgcgtgctgcgtgaccacgaggcgctgcccgacgatggccgggtggcgatcctgccgccggtgagcgggggctga

SEQ ID NO: 522405 - DNA, 1254 bp, Stenotrophomonas maltophilia
atgatcccctacagcgatgccctgcagcacctgctggacgcggccaagccgctgccggccgaacgcctgccgctgcacgaggccgcgggccgcacgctggcccgtgacatccacagcgcacagtcgctgccgccgttcgacaattcggcgatggacggcttcgcgctgcgcgccaacggcgcgacgttcgaggccggtaccgaattcggggtgcagggctggcaggcggccggcgatgccggtgccgaaggcggcgagggggcctgggaaatcatgaccggtgcgcgcatgccggttgggctggatacggtggtgccggtcgagaatgtggagatcctcgccagcgaggacggccgcccgacccgcatcgccctgaaggcatcggtgaagccgggccagaacgtgcgcctgcgtggcgaggatgtgagcgacggcgagcgcgtgctgcagtccgggcaggtgctggacatcaacgcgcgcaccttgctgcatgccatcggcgtggctcaggtggcggtggtggcacggccgaaggcggcggtgattgccaccggcaaggagctggtgaccgaggcggcgcagacgctggaatccgggcagatccgtgacagcaaccggccgtacctggtcggccgcctgcaggccgccggtgccgaggtggtctggcagggcacggtgggcgatgaggtggccgccttcaatgccgtactggatcaagcactggacgcgggtgcgcagctgttgatcagcaccggcgcggtgtcggccggccgctacgatttcattcccgacgcgctgcgcggccggggtgcgcgcatcgtgttccacaaggtggcgatccgccccggcaagccgttgctgttcgcggtgctgcccaatggcgcgctgtatttcggcctgccgggcaacccggtctccgctgcggtgggccagcgcttctttgtcgagccggtgctgcgccgcctgctggggctggcaccggagcaggtgctgatgttgccgctgcaggccgacgtgcgcacgccgccgggcctgcgcttccatgcgcgggcccgggtggaagtggacgcgcagggccgcctgagtgcgcgcgtgctggctgggcaggagtcgttccgtttgatgtccatgctgcaggccaacgcctgggtggtgctggacggcgagggcggtctcgcccctgccggcacgccagtgcgcgtgcagggctggggtcatcaggaccctgtgcagctggcgagccaggagccgtga

SEQ ID NO: 522406 - DNA, 999 bp, Stenotrophomonas maltophilia
atgagtggggaattgaacgcggccttccacatggccgatgtccgcaacaagcgcatcagccgccgccgtgcggtggcggtgggcgagctgcatgccggtccagtggcctatccgctgatcgtcgagcgccgcctgccaaagggcgatgcgctggtgatggccgagattgccggtctgcagggcgccaagatggcgtcgatgctgatgccgctgtgccatccgctgccgctggaactggtgcaggtgttctgcgcgccggtgccggaacggcaggcgatccgcgtgtggtgcgagtgcgccagcgaggcgcgcaccggcgtggagatggaggcactggccggcgtcaacgcggcgctgctgaccctgtacgacctgagcaagccggtggagccggcgttgcgcatcgaaggcatccgcctgctgttcaaggagggcggcaagcgcggtgtctggctgcacccggacggcatggacgaggccgagcgtgagcggttcaagccgcgtgcgccgaagggcctggagggcgcggcctgcgcggtgatcacgctgagcgatcgcgccagcgaaggcacctatgaagatatctctggcccgaccctggtgaccggcctgaaaaagctgggtggcgaggtggtggccgccgaggtgctgcccgatggcatcgagccgttggccagccgcctgcagtccttggccgccgagggcgtgcgcctgtgcctgtgtaccggtggtaccgggctgggcccgcgtgacctgaccccggaggcgctgcgttcgttgaatacgcggccggtgcatggcctggcgcagatggtgcgggcactgagcgcacagcacacgccgatggcctggctgagccgcgccgaggtggtgcagctgggcaacatgctggtgtttgcattgccgggcagcccgaaggcggcggcgcagtgcctggacatcctggcgccggtactgggccacgccctggcgatggtcgagggggatggccacgcatga

SEQ ID NO: 522407 - DNA, 981 bp, Stenotrophomonas maltophilia
atgagccaactcaccgacagcttcggacgcagctttccgtacctgcgcttgtcgctcaccgaagcctgcaacttccggtgcagctactgcctgcccgacgggtaccaggccgacggccgcccgcgtttcctgcaggtggatgagatcggccgcctggtgcgggccttcgcggcgctgggcatgagcaagatccgcctgaccggtggcgagcccagcctgcgcaaggatctggacgagatcatcgccaccgtggcggcggtgccgggcatccgcaaggtggccatcaccaccaatggcacgctgctgccgcggcgcctgccgggctggcaccgggccggcctgaccgcgctgaacgtgagcatggacagcctgcaacgcgagcgtttccacaccatcaccgggcacgaccgcctgccggagatccagcagggcctggcgctggcgcaggcgttgggcctgccggcgatcaagctcaacgcggtgctgctgcgtggcctgaacgacgacgagctgccgcagtggatggactacctgcgtgaccgccccttcagcgtgcgcttcatcgaactgatgcgcaccggcgacaacaaagcctatttccagcgccaccacctgcgcgccgacgtggtgatcgagcagttgctcgccgcgggctggcacgagcgaccgcgcgcggccgatgctggcccggcgcgcgagttcggccaccccgaccatcgcggcagcatcggcatcatcgccccgtattcgcgtgacttctgcaagggctgcaaccgcctgcgggtgaccgccaagggcgacctgcggctgtgcctgtttggcgagttcggcgtaccgctgcgcccgctgctgcagcgcgatgaggaccacgacgcgctgctggcacgcatcaccacccagcttggcctgaaagcggccgggcatggactgcaccagggccagaccgggctgaccccgcacctggcctccatcggaggatga

SEQ ID NO: 522408 - DNA, 387 bp, Stenotrophomonas maltophilia
atgaaagatttcaacgcgctcgaatggtgtgacgccacgttgctggctatcaacatcgatagaaggaatccaggcgtatgcgatgaggtaaaggtccacgtgcgctggccggacggtcgggagtcaatcgtttgcttcccggaagcgtacgggtgctctgcgctcatgaacttcggcgtactgggtgacgagggaattgagttcgccagagttgacgatgacgcgccgggactcgctgatcttcttgatcgttggaaggcggtcggctatccgctgtccggcctgaagtgttttcgtatcgagaccacctcgaccggtagcgtcattctgatctacgccaggacatggcggatcgagcatctgccgatggcgggtgcagtgccctga

SEQ ID NO: 522409 - DNA, 324 bp, Stenotrophomonas maltophilia
atgaaagaatgcctgagagaaagaggcgtgctgtcgccaactggcttctatgaccaatactatgcggagagtggtctggatcaggaaaccgtagtggagctgctggagcatgttgcagacgagcttcgtttgccctccgggaggctccgtcctggagatcgattttcgaaggaactgtcgcctggtgaagctcatggctgggactcggggtatggggtgttgatattcgagcttcaatcgctcgcaaaaaagcgtggtattgcagtcgatcggcgggtggattcgctcgacgactacattcgtatcatggcgggtatctattga

SEQ ID NO: 522410 - DNA, 336 bp, Stenotrophomonas maltophilia
atgtacaggcatttatcggaatctgaaaaatcattagtgaaattgatgcttcaaggtgtggattttccgggcatcactgctgattcacttgcggcgattgaagttgaggagatggatgatggcgggatggggagcctgctgttcaaatcaagcaagctcgaccgtttgcttggaaaggagctggccagcaaaacctttgtcgacacggatggggttgaagttatagtgacactttcactggacaattatggagatctttttgagttggatgtatggaaagtcgacttctcgccagttattagccttcgtcccaggagggcgtccgctgcgggctag

SEQ ID NO: 522411 - DNA, 867 bp, Stenotrophomonas maltophilia
atgctagtgatcggccgcaccggcgaatttcgctacaatgacaaccaatcgctaaaaccggtcaatgtgagaatggctcgcatttcgctccccggctttgacctggaccctgacgagaccgatcgcccggcggttgccagccgcctgcaggtggccgagcacgacgcggaaattccggtgcatgagcaccgcaagggtcagctcattcttgcgctgcatggggcggtgacctgcgaagtcgccaatgcgttgtggatcgtgccgccccagtgtggcgtctggattccgggcggcatgccgcacagcaaccgcgccaccgccaacgcgcgcctgtgctacctgttcgtcgagcccggcatcgtcgacctgccggtgcagtgcgtgacgctggccatctcgccgatgctgcgcgagatgatcctgcacctggccgacgcgccgctggactatccgcatggcagccacatcgaccgactggcgcgggtgttgctggaggagctggtacagatgccggctgagcatctgtcgctgccggtcagccatcacccgaaggtgcgtgcgctggctgcggcgctgtcggcggatccgtcagaccgcagcaccatcggccagtgggccgtgcgcctggccctgggcgagcgtacgttgacccgcctcatcgaacgcgaaacgggcttgtccttcggtcgctggcggcagcagctgcacctgctcatcgccattcgggaacttgccgcgggcgcaccggtacaacgcgtttccgagacgctgggttatgagtcggtgacggctttcatcacgatgttcaagaaggcgcttggcctttccccggcgcggtacttcgcggttcggctgcgcgggcagtag

SEQ ID NO: 522412 - DNA, 1962 bp, Stenotrophomonas maltophilia
atgcactcccccactcctgcccgtccccacgtgttccaggcattcgcccggttgaaaagccctgccctcaggaccgatcaggaggcggtgctgttctcgctcaaatgcctgctcgccgcgtcgctggggctgtatgtctctctaaggatcggcctgaatcgcccgttctgggtgatcggcacggtctatctggtatcgcagcctctgtccggggcaacactcagccgcggcctgttccgcctgctcggtaccgtgggcggagccgtcgccaccgtcgtgctggtgccacgtttcgccaatgcacccctggtgctgagcgccgcgctcgcgacctggatggcgctgtgcctgtatctggcgatgctcgaccgcacgccacgtgcctatgcgttcctgctggccggctataccaccagcctgatcggctttcctgcggtgatggtgccgggagacgtgttcaccattgccatcacgcgggtgcaggaaatcgccatcggcatcctggccgcaacgctggtacatacgctggtgctgccgcgccgggtctcgatgcgcgtgcacgcgcgggttgctgccgtgctggatgatgcggaacgatggacgcgcgacatgtgcgccggtgcatcggacacggtgctggcgacggaccgctcgaaagtggcagctgacctgctcgaactgcatgtgctgtcgatccacctgcccttcgacagtgcccaaggcgtggcccaggtgcagatcctgcgtgccctgcatgaccggatgctggacgtcctgatgctgtccagcgcggtggaagattccatcgcccggctgcgttcaccacaggccagcgcaatggatgcaaggggctggcgcgatctgctgcgggccagcctggtcgcgcaacaggccgagctcgacctggcccacgccgactgccgcgtgctgcaggcgcaactgcacaccgcccgccccgattggcgccggcatgtacctgcccgccttgcgcgacatacgcagggtgcggtacttcaccgggatcatcggcttgccctgcgcagcgcgctgggcgcgttcgtcggcatcctgctgagctgcgtgttgtggatcgttaccggctggtcggacggcgcgacggcggtgtccatcatcggcacggcgtgcgtgctgttcggcacgatcgaagcgcctgcgccgcatgtcatgcgctatctggtggggtcattgatcggcgttgccgtcggcctgctctacggtctgctgatcttccccgcgctgtccgatgtcgtcggcctgattgccgcgctggcgcctgcgctgctgctgtgcggatcgttcctggcccggcctcccttcatcatggctgccctgggcgtggtgctgacgtttccgctcatcgcgggactgggcgcgaccaatacggtcaacatcgtcggcgcactcaacaacagcgtagcgttgttcgtgggtacgacaatggcactgtgcagcatgcagctgttccagaccgccgatgcgggccgcaaccgcgcacggctggagcgttcgatccgtcgggatatcgcacgacacgccgccggacaaggtggcgtggcccgggcctggctcagccgcatgctggatcgaatcgggctgctcgctccccggttgcggggcggttccagtgccgcagacgacctgcgggcattgtttgcggacgtgcgtgcggtacgtgcatccaaccaactccgcgcactggacaagtgccaggaaaacccgcaggtccgggtgcttcatgcggcgctgatcgaacgcgtcgccgcacatttcagggttcgtgcccacgcgccacgcagcgtcgacgcccatcttctggaactgctcgaccgcatgcgcgaggcagcagtggccagcagcggggatgatcgtgagcatctgtcgcacctgctctgcggattgcgccgcgacctgctggcgcctgctctcacccttcggcactga

SEQ ID NO: 522413 - DNA, 210 bp, Stenotrophomonas maltophilia
atgttttctgatctctccattgatggcgtgctgatccccggcctgctcgccgtggccgccgccgcgctggcgctgtcgatgctgacctcgcgcctgctcgccagtctcggtctgtaccgcttgttcgccgcgcgaccactggtgggcctgtccctgttcgtgatcctggcggagctgatgatccggctctcgcccctgctcgagaaatga

SEQ ID NO: 522414 - DNA, 885 bp, Stenotrophomonas maltophilia
atgaaacacctgcttgctgtcatcgggcgctggagcgctacgctggttgtattcgcgattgctgtcgtcgccgcgctgtccatctggaagcgttacgaaacacgcccgtggacgcgggatggacgggtccgcgccgatgtggtgcgcgttgcgtcggacatgggggggctggtcacccaggtgctggtgcacgacaaccagcgggtcagcgccggacaactgctgctggtgctggatcagccacgcctggctgccgcgcttgagaaggccgacgcagcggtcagcagcgcacgcgcgacgctggcgctggcccgccgcgaatcgacgcgggacaacgcactgggcaacctggtcgcctcggagacacgcgaacgcaatgcggccaaggtcgacaccgagctggccgccctggcgcaggcacgggccgaacagcgcgttgcccagctcaacgtgcaacgcaccgaggtgcgcgcgagcaccgacggcatcgtcaccaacctggacctgcatgcgggcgattacctgcaaccgggcgcgcaggcgctggcgctgatcgacaccggcagcctgcgcatcgagggctacttcgaggaaaccaagctgggctgcatcaccgagggcgatgccgccgtggcgcggctgatgggcgacacccgcgatgtccgcggacacgttgacagcatcgccgccggcattgccgacgatcagcgctcaagcacgcacaacctgctgccggccgtggcgccgacctatacctgggtgaggctggcacagcgcatcccggtacgcatccgcatcgatgatgcgccgccggatacgcgcctgatcgtgggtcgcactgcgagtgtgaccatcacgccctcggcaccgggagcctgcaagtga

SEQ ID NO: 522415 - DNA, 1437 bp, Stenotrophomonas maltophilia
gtgagcgtgcggacagtacgtggtgggctgcttgccctgttgctgcccctgacggcctgcgtatccggccccgactatcacctgcctgcgaacgccatcgcagcttcacaacaggctgcgcgggcgttcgtctcaggccaggacgcatcgttcagccacgacgcgccaccggatcgatggtggcacctgtatggcgacccccagcttgacgcctacgtacgcgaagcactggcggccaataccgacctgcgcgccgccgatgccaaccttcggcgcgccagcgccaccgtgctggagtatcgcgcgcgcggtgccgtacaggccgacgtggatgcatcgggcacgctcacccatgccggtggctacacccaggcatcggccgcgccacagtcgtatgcgctcggccttcacctctcctatccactggatcttgcaggcggcatccgccgcggcatcgaagccgccaacgccgacgcggaggcggttgctgcggcacgcgaccaggtccgcgtggtcgtcgctgcggccgtcacccgtgcctatctccaggtgtgcacccgcaatcacacgctcgctgcaacccggcaggtgctggcggtgcagcgcgccaccctggacgcaacccgacgcctggctgcaggcgggcgcggaacggacttcgatgtcagccgtgccggtgccgccgtcaatcgcagcgcggcggcgataccgcacctgctggcggaacggcaggccgcactgttcgaactggccgcattgatgggcaggctcccggcggactatcccagggaggccgaagcctgcccccagccccctgagctggagcaggcgctgccggtcggtgatggctggcagctgctccagcggcgccccgacatacgtgccgccgaacgcagcctggccgccgcgactgcaatgatcggtgtcgagacggcgggtctctatccgcagatcaccttgggcgcctcttcgggcgtggccggcacaccggcgcatctgctgtcggccgacggcttcggtgcgggcatcggtcccgtgctgtcatggcactggcccaaccgccgcgtggccaaggcccgcatcgcagcggccggtgccaacgcagataccgcgctcgcgtcctttgacggcgtcgtgctgcaggcactgcggcagaccgagaccgcgctttctgcctgcacgcaggagcttgaacgcgagcgcagcctggcgcaggcgcgtggggatgcagcgcgggccgccgggcaggcgcagcagctctaccgtttcggcaggatcgattttctcgacctgctttcggcccaggccgcgctggcagatgcggagtccgcattggccgtctcgcgcgcggagcgcattgaccggcagatggatcttttcctgtcgttgggtggaggctgggctgcaacagattcagccccgggcggggtccagtga

SEQ ID NO: 522416 - DNA, 348 bp, Stenotrophomonas maltophilia
atgaagaccacacgcttgcttgccatcgccttgaccaccaccaccgcgttggctgcggcccccgccttcgccgatccgccgcaccacgcccgcggcaacggcccgccgccgcatgcgggcggcccgcataaccgcgatgcgccgccgccgggctggcagaagaaggcctggcgacgtggcgagcgcctgccgtgggccgaagtggaccgccgctactgggtagacgattacgcgcgctatgacctgcgcgaaccgggccgcgaccggcgttgggtgcgccagtccgataacgagtacctgctggtggagatcgccaccgggctgatcatcgacgccctgcatcgctga

SEQ ID NO: 522417 - DNA, 324 bp, Stenotrophomonas maltophilia
atgagggcactaatgtgggggcttgcgggcctgttcgtggcgtacgtggccggttgctcggcgatctcggcgtggcattcccacgcgcttgcctcggtcccggtcggggcgagcaggggcgaggtactgcgggcgctggggccccctgacgtggtggagcacgccgatgttccctttacccgctatgccagccgtggatgcagtggtcgctgtgcgcagcgatggtggtatgagaaccggctgggactagataccgaagcctggtcggtggaactggatgcctccgatcgcgtgatcgcaacgtcgcgcctgacatcaccgtag

SEQ ID NO: 522418 - DNA, 621 bp, Stenotrophomonas maltophilia
atgggacggaatctggtgatcgcctgcatggccctggctgttgcccccgcggcggcaacagcggccgcaacagcgaccgcaatgccgggcgatcgtgggcaggatttcgtgcagacacaggcgatcgccgcgcgctgccagaagagcctgcccggcctggaactgcagttgcaggagggccgcaagcactggctgtcgacactcgacgccgcgcaactgcaggccgccgaggcctatgccagcagcaaggaaggcaggactctgggaaagagtgtggagcgggatgcctcccgcgccttcggtcgcaataccttgtccgccgcagcgacctgcgttggcctgctcgccgagtacggcccggcccacccgctgccttccggcacggcaatgccggccgaccgggtgcagcactacatgctgcactttgcaccgatggtgctggctcggctgcagtgcgcgcgcctggacggcatcgacgtggccgcccagcccgatggctcggaaacctggcagtaccgggcctgtgtccagaccgaatccgtgcgcatggccccgctcgggcagagctggtcgatgagcgatgcggaccgcaatcgcctgttcgacgcactgacccgatag

SEQ ID NO: 522419 - DNA, 453 bp, Stenotrophomonas maltophilia
atgtttccacccaccacctggatcaagttgcgatctgcctttccattggcggcctgcacggtgctatgcgcctgcggcctggttacggacagttcgttcgacacgctgcgcgaggcgcttgactccgacatggtgaacaagggatggattcccggctgggtgccccacgaggcgaccgacctgcgcgaggtgcacgacctcgactcgaacaccagcgcgctggccttcaccaagcctcctgcgataccactgcggctgcctgcggattgccaggcaacgacattcagtcacagcgatcctgttgcgttcgatcgatactggtggccgggcgacgggacgctcaagtcgtcgtatcgcgtctttcgctgcgcgcccgaatccggaaaatcagtcttcgtcgccatcaacaggaccgaagaccacgtgctcttctggcgaacctacgcgcggtga

SEQ ID NO: 522420 - DNA, 528 bp, Stenotrophomonas maltophilia
atgcccaacgcacgtgcacgcttcgtcgccctcgccctgttgctcccggcgtggctgccggcctacgccacgcagaatgcccccgccgacgtcaaggcgatcgaacaggtggtcgaagcgttccgcacctcgctgatcaacaaggacaagccgacctacatgggcctgttcttctctgataaaccggaagacatcggctggcagttcgtttccgaggatgtgcgcctgcaggacatccgcaaggccaagcccgatgcgatcaaggcacggcagattcccgccaacaacttcatcgcgctgatcgacggggcggtcgcctcgccgaagccgaaggaggagaagttctccaacacgaagatcgaaacggacggcgatgtggcctcggtctcgtttgactacagcttccacgacgatggggtgaagaccaactggggcaaggaaatgtggcagctggtccgcacggagcagggctggaagatcttctcggtgatctactcgatccgcgattcacgcagcccgggcgattga

SEQ ID NO: 522421 - DNA, 675 bp, Stenotrophomonas maltophilia
atgacccgcctgctgatcatcgaagacaaccccgagctggttgccaacctgtatgccttctttgaaccgctcggctacgtgctggacgacgcgcgcgacggcgccagtggcctgcgccgggccacgcagcacgactacgacgccatcctgctggacctgatgctgccgcgcctggacggcatgacgctgtgccagaagctgcgccaggagttccagaacccggtgccgatcctgatgctgaccgcgcgcgatccggtcgaagaccgtgtgcagggcctggccctgggcgcggatgactacctggtcaaaccgttttcgctggtggaactggatgcacggatcaaggccctcgtacgaagggcacaggggcgccaggtccagagcgtgctggcgtggaaggacctgcaggtggacacgcgctcgccacaggcctggcggcaaggccgctgcattgcgctgacgcccacgtcgcacaagctgctgatgtgcctggtgcgtgcagctcccgccgtggtgcgcaagcaggagatggaatacctggtctggggcgacgagccaccggacagcggcgcgctgcgaacccacatccatgagctgcgcctgcaggtggaccgcagcttcgacaccgcgctgatcaccacggtgcacagcgtcggctggcgcatgcaggcgtga

SEQ ID NO: 522422 - DNA, 1254 bp, Stenotrophomonas maltophilia
gtgagccctgcctccctctaccgccgcctgagcctgcgcacccgcatcacgatctcgttcgtgctgttgatggccggtgccatgggcttcatcgtactggccgaacaggtcgactacgaccaggtccggactgctgtcgtcgcacggacccagcacggcgaagtgcaaaggctgcaggccgcgctggatcgtggccaacgccccgccctgccaccagggacccagctgttcgatgcccaggacgtgcctgtcgtgctgcgccaatacggcccgggctaccacggcgaagaggcgcccaacgagtggcacctgcgtgtgttcgacagtggtggccaacgctactacctgctgcaggacgccgcaccctatggctatctggaacacctgatcaatgcctttgcggcactggtcatttcggtctgcgtgttcggcgccttcctcatcggccgcaaggtcgctacccacgtcatcgcgcccatcacacgattggccgatgcggtgcaggacggccacaagccctttccctaccaggacgcacgcgacgagatcggcgtgctcgcgcgcgcctttgcccgccatagtgacgagctcgaacggttcctgcatcgcgagcagtgcttcagcggcgatgccagccacgagctgcgcacgcccttggccatcatcggcggtgctgccgaaacgctggcctgccagcttccggccgacagccacctggttcccagcgcggcacgcatcctgcgtaccacccaggagatgcagcgccagctgacctgcctgctgctgctctcgcgtgcccccggcgccgtgccgcgcaacgcggtggccctgcgtccgctgctcgaatcctgcatggagcgctgccagccctggctttccggcaagccggtgaccgttgcgtttgatgcccggcatgacgccgtgctggtgaccaacgcggatctggcgcacagcatcatctggaatctgctgcgcaatgcctgccagtacaccgaaagcggcgaggtgcgaatcaccctccacgacaccgcactcatcgtcgctgacaccggacccggcctgccgtccagcatcgacccacggcagttccagcgcttcgcgccgggtggcgcgcacagcggcgaggggctggggttgtcgatcgtgcagcgcatcgtcgagcacctgggctggacgatgaccgtgcaatcctccgggcaggggtgccggttcaccctgcgctggccccgccccccgcatctgacggattcctga

SEQ ID NO: 522423 - DNA, 387 bp, Stenotrophomonas maltophilia
atgcagcaccccaaggacagcggcaagtacccgcacggcaggaccggattgagccgcatcttccacaccctcatccattcgcgcgatggcttcatcgccacctttcgcggcgaggcggcgttccgccagttgttgctgctgcacgcgctgctgatggcggctgcgttcgtgctggacatcagcacggtcgagcgggcactggtgctggcggtctgcttcatcagcctgctggtggaactgctcaactcggcgattgaagccgtggttgatcgcatctcgctggagaagcatccgctgtcaaagaacgccaaggacatgggcagcgccgcgcagaccaccgcgttgttgatggtgggtgcggtgtggggcgtgatcctgctgggctag

SEQ ID NO: 522424 - DNA, 1809 bp, Stenotrophomonas maltophilia
gtgcgtcaatgcctccgtttcccgcggtcccatccaatcgttctggtctgggccgccgcactgttcttcgccacgattggaaaccttcccctctggaagacgctgtgggggctgatcgatctcaacagcctgcgcagcatgctgttcctggccagcctgccgccgctgctgttctgcctgttcaacctgctgctgacgctactgctggcactgccattcctgcgcaggccgctgctggtgctgctcgttgtcgtcagcgccgcgtgcagctacttcatgctgcactacaacgtgctgatcgatcgcagcatggtgcagaacgtgttcgagaccaatcaggccgaactgaacgcctatctgtcgctgccgctgctgttgaccctgctggcgctgggcgtgctgcccgctgccgggctcgccctggtgcgcaccaccagcggggccggttcgatacgttcgctgctggtgtggccggccaacgtcctggcgtcgcttgtggtgctgctggtgatcggcttttcgttctacaaggactactcctcgctgctgcgcaacaaccgctacatccgcgaccaggtactgccgttgaacgtggtgcgccatacccacggctacctgaagagcctctacagcacccgccagcaaccgttgcgcccaatcggcacggacgcgcggcgcgttccgggcccgcgcccgaagctggtggtcatggtcgtcggcgagaccgcgcgttcacagaacgtccagctcaacggctacccacgcgcgaccaatccccggctctcgcgcaaggaaggcgtcatcagcttcagtgatgtttcctcatgcggaaccgcaacagcgatctcggtgccctgcatgttctcgcagatgacccgccagcaatacgacgacgtccgcgcggcgaccgaggagaacgtgctggacatcctgcagcgtaccggcgtcggcgtgctctggcgcaacaacaacaatggcggctgcaagggcgtgtgcgagcgcgtgccgaccgaggacatgcccgcactcaaggtggccggccggtgcgtcaacgccgacggcacctgctacgacgacgtgctgctgcatcagctcggcgcacgcatcgacgccatccacggcgatgccctggtcgtgctgcatcaactcggcagccatgggccgacctactttgaacggtatcccgcagcgtcgcgggccttcagcccgacctgcgacagcaaccagatccagcactgcagcaacgaggcactggtcaacacctatgacaacaccctggtgcataccgaccaggtgctggcggagaccatcgacctgctgcagggctattcggaccaccgcgacgttgcgctgatctatgtctccgaccatggtgagtcgctcggcgaacgcggcatgtaccttcacggcacgccctacttcatcgccccgcgcgaacagacccaggtgccgatggtgatgtggttctcaacggagttcagccgcaacgcgggcctggacatggcctgcctgcgtgggaatgcgctgcaccgcgcctacagccacgacaatgtcttccattccctgctgggcctgttcggtgtcagcagcagcgtgtaccagcgcgatctggatgtcttcgccggctgccgggcgacgaccggcgcgccgctcgccaccgcgccggccaagcggcaccggctgatgccggtcaccgcccggaacgtggcgcgttactgtgcggccagggcgaaatccaggccggcacataccgccgccacctgggcgtcgttgcattcctgcgggttggtgcgcgggctgtccgggtag

SEQ ID NO: 522425 - DNA, 921 bp, Stenotrophomonas maltophilia
atgactgttgcgcagttctacccgatcggcacccccggacagccctggggcgacgcggaacgcgcacagtggcgggcccgccagcagcgccagcgcagctaccacgacgatgtggtggccgcgcttgaacgcctggacgacagcttcgatgtgatccagtacggtcagctggactacgcgccggaccattacccgctgttcgccgtggtcaaccacgactggaacccggcgctgccgaccgcgctgatcaccggcggcgtgcacggctatgagaccagtggcgtgcatggcgccctgcagttcctggaacagcaggccgagcgctacctgggccggctgaacctgatcgtggcgccgtgcgtcagcccatggggctacgagcgcatccagcgctggaacccggatgccgtcgacccgaaccgcagcttccgtgacggcggccagatcgaggaagccgccgcgctgatgcgctgggtggccgagcgcaagccgaacctgctggtgcacctggacctgcacgagaccaccgacagcgacctgcacgagttcgatccggcccgctgcgcccgcgacggcaagccgttcgagcgcgacacgattccggacggcttctacgtgatcggcaacagcgaggatccgcaggccgagttccagaaggccctgatcgccgccgtcgccccggtcacccatatcgccccggccgacgccgagggcaacctggtcggcctgccgttgcagtcgccgggcgtggtctggggcgaatcgcgttcgattggtgcctgcgccggcttcaccgatgcacgctttgccaccaccaccgaggtctacccggacagcccgcgcaccaacccgcaggaatgcaacgacgcccaggtggcggcggtatgtgccggcctggatttcgccctggccgcacagtaa

SEQ ID NO: 522426 - DNA, 654 bp, Stenotrophomonas maltophilia
atggcgaacgcagcgcagccggtcctgggtggaccggagttcctccgcctgctcgcccgtctcagcgacggcgcgatgccggccaccagtcccgccctgaccgatcgcctcggccagtgggtggactggagccgcgccgtggccctgtccggggcgctcggcggacgcctgcccgagcccggtgaagccgccgaagcgctcgaggatgtgctggccgactgcgcgcaggcgcacgccagcctgctggcctcgatcagtgaggatgccgaagccgagcgcctgctggacctggccgaagccgccgctgtacccaacttcgcctcgctgcgccagcgctatcgggtgctgcagcaggccatccagacggccaccgggcgcctgcgcggccgcctgcgcgaccagctggtgcaggtttcacccgagctggcgcggctggccgaggtcgatgcggtgatggaacagaccctcaccccgcgcgagcacagcctgctggccacggcgccggcggtgctcggcgcccggtttgaacgcgtgcacggccagcccggctggcgcgcggccttccgccatgacatgcgcaccctgctgctcgccgagctgcagctgcgcttccacccgatcgaagggctgcaagacgccctgcgctcccactga

SEQ ID NO: 522427 - DNA, 2265 bp, Stenotrophomonas maltophilia
atgtccagaactgctttccatgtcgttgttttccttgtcggcctgctggccgtgtgctggatcggcattggctacgtttcggtgcatccgctgggtgcagcggtggcggcgatcatcgcggcctgctacatcgccggtggcgtggagctgtaccgctaccgccaggccagcaacggcctgcgcagcgcgctgaacgacctgtccagcgcgaaggagagcctcgccccctggctggagcgcgtgccggcgggcctgcgcaacgccgtgcgcctgcgcgtggaaggcgagcgcaccgccctgcccgcaccggtgctgaccccatacctggttggcctgctggtgctgctgggcatgctcggcaccctgctgggcatgatggacacgctgcgtggcaccggcctggcgctgcagagtgcgaccgacatggccgcgatccgcggctcgctggcctcgccggtgcagggcctggcggtggcattcggtacctcgatcgccggtgtggccagctcggccatgctcggcctgctggcggcattgctgcgtcgtgaccgcctgcaggccgtgcagcagctggaccgtgccattgccggcgacctgcatccgtactcgcaggcctggcagcgcgccgaatcgctgcgcctgctgcaggcacagtctgcggcgctgccggcgctggtcgaccgcctgcaggcgatgaccagcacttttgaacagcacagtgcggccgccaatgagcgcctgctggccggccaggccgagttcctgacccagagccaggccctgcaggaacgcctggccgtctcgctgcagcaatcgctgcgcgaaggtgccgaagccagcgccgccgccatcggtggtgcgctgcagccgatggccgaaaccaccctggctggcctggcccatcacggcgaagcactgcatgcccgcgtcgagcaggccgtgcagcagcagctggccggcctgagcgagggtttcgagcgcagccgcgtcgccaccgaggccagctgggccaaggtggtgagcgagcagacccaggcacaacaggcgctggtcagtgatctgcgccagcacctgcaggccttcagcgatggccagggcacgcacgccgaagcactggtcgcgcgtctcggcgagcgcctgcaggccgatgcccgcggcaatgccgaggcatggcgcgccgccgccgaacagcagcaggcactgaacagcgcgctggtcgaacgccagcagcaggcgttgctggcctccagcgagcatctggacgcgcgcgcgcaggcgctgctacaggcgctggagcagcaccacagcaccagccaggcgctgctgcaggaccacgaactgcagcgttcgcagcagtggcaggccgcgcaggccgctgccgcggccgcgcacgccgaactgcaggctggcctggacagccgcgagcagcagcgccaggcgcgctgggacgcgatcaacgccgagctgcagcaggcccacgccgcgctgcaggcgcagctgcaggccggcgacgaacagcgcctgcagcgctggagcgaagccttgcagcacgtttccagcgacctgaccgagcgcctgcaggccaacggcgaacacctggccgcgcagcagcagcaggtctgcgacaccctggcggccaccgcacagcagatcggcgagaacggtcgcgcgcaggccagcgccacgctggctgaagtgtctaccctgctgcagaccgccgcggccgctccgaaggctgctgccgacgtcatcaacgagctgcgcagcacgctgtccgagagcctggtgcgtgacaacgcgatgctggaagagcgcggccgcctgctggccaccgtgcagaccctgctggatgcgatcaatcacgcttcgcacgagcagcgcaccgctgtggacgcactggtcggtggctcggccgagctgctggagcgggttggcaatcgcttcaccgaccatatcgccgcagagaccggcaagctggatggcattgccgcagcgctcaacggcagcgctgccgaagtgggccagctggccggcacgttcggcgaagcggtcgcgcagttcggcagtgccgccatcgagctgtccggccgcctggaacagatcggcggcgcactggatgcctcgctggcccgcagcgacgagcagctggcctactacgtagcccaggcgcgcgaggtggtcgacctcagcctgctgtcgcagaagcaggtgatggaagaactgcagcaactggccgcgcgccgcggcaaggccggcagcgcatga

SEQ ID NO: 522428 - DNA, 639 bp, Stenotrophomonas maltophilia
atgagcgacgagctggaggtcgacggcggttcgcatgccccgatctgggcagccttcggcgacctgatgtcggtgctgctgggcgcgttcgtgctcatactggtcggtgtggtcgccgtacagctggagctgtcgcagcgactggaccaggaagtgaaacagcgccaggccgaagccaagcgcctgcagacgctggagcaagcgttggctggaccgctggcggccggccgcgtgacgctggtggatggccgcatcggcatcagcggcagcgtgctgttcgcgctgaactccgaccagctgcagccggaaggccaggagctgctgcgcagcctggccgcaccgctggccgcctacctgggcagccgcgaagagatcctgatggtcagcggcttcaccgatgacgcgccggtacgcgaaggcaaccggcgtttcgccgacaactgggagctgtcggcgcagcgctcgctgaccgtgacccgcaccctgatcgccgatggcgtaccggcggacgccgtgttcgccgccgcgttcggcagcgagcagccggtcagttccaatgccgatgaggaaggccgcgcacgcaaccgtcgcgtcgagatcgcgccgattcccaagcccaaggccccggatgccaagtaa

SEQ ID NO: 522429 - DNA, 384 bp, Stenotrophomonas maltophilia
atgccaagtaagtcgccagcgctcgaaggcctgcgcgcactggtgcgcgaccttgatgcagggtcgcgctcgctgccgcattacccgcaggtgccgatgctgcagcaggtgcagcgcgagtggtcggagctgcgcagcgagctgcaggtgcgccgctccctgcgcgccgaggccccggctgacggcggcccgctgaactcggcggtgctggtgcagcgcatgctggacacgatgcaggccaccagccccggctacctgcgccacttcatcgactacgtggacaccttgtcctggctgcaggcactgcaggatggcgccgccagcggtgcggatagcgcaaagccgaagcgcacgcgcaagccgcgccagacgccgaaggagtag

SEQ ID NO: 522430 - DNA, 1578 bp, Stenotrophomonas maltophilia
atggtgtttcgcgtttccatcgcactggttctcctgctggtgctgcttgccggtattgcaccaggccccttcaatgccgtggtgcagtcgatgctggcagaagtcatccgcagcgtcggctggctgtacctgctggtggtattcctggccctggtgttcctgatgtacctggctttcggtcgcttcggcaacctgcgcatcggtggcgaagacgccgagcccgagttctcgcgagccagctggatgtcgatgctgttcgccgccggcatgggcatcggcctggtgttctggggcgccgccgagcccatttcgcacttcagcaagccaccggaagggcttgctccgcagagcctggatgcggcacgcgcctcgatgcgctatgcattcttccactggggcctgcacccgtgggccatctatgcgctgatcgggctggcaatggcctggttccagttcaaccgcaacggccgcggcctggtcagcgacatgctgcagccgatcatcggccgccaccatcgcggctggatcggtagggcggtcaacatcgctgcagtggtcgccaccgcgatcggtgtcgcgactacgctgggcttcggcaccatccagatcgccgccggcatcgagcgcgtgttcggcgtgcaggctaccgtcgccgtgcagatgaccatcattgccgtcgccttcgtgctgtacatggcctccaccgccagtggcgtggagcgaggtgtgaagtggctgtccaatttcaacctggcgttggctgccctgctggccgccatcctgctggtgctggggccgaccggcttcatcttcgataccttcaccaccacgctgggctcctacctcaaccagctggtgacgatgagcctgcgcatgtcaccgttctccggcagcacctgggtggcggactggacaatcttctactgggcctggtggatctcgtgggcaccgttcgtggggtcgttcatcgcacgcatctcgcgcggccgcagcgtgcgcgagttcgtgatcggcgtagtgctcgcgccgacgctgctgggcttcttctggttcgcggtattcggcggcaccgcgctgtgggcacagatcttcggccatgccgacctggtgcaggcgctgggcaatggctacgagaccgtgctgttcacgctgttcgacagcatgccgctgccgctgctgctgtcgtgcatcgcactggtactgctgatgatcttcttcgtgacctcggccgactcggcggtactggtgctggccagcatgtccactgacgaagcaggcgatcctccgttgaagcgcaagctggcctggggcattgcggtggcgttgatcgcagcggccttgctgctggccggtggcctggatgcactgcagggcatgatcacgattgcggcgttgccattcgcgctgctgatggtgctggtgatggtgtcgctgtaccgggtgctggaccaggagtacacgcgggagcggcggcaggcgcagcgccagcggcacatgatcgatgcgtggatcgcacgcgagatggcggcacaggaggagacgcaggccgaggccgcgcgcgcgcacgatcaggattga

SEQ ID NO: 522431 - DNA, 1794 bp, Stenotrophomonas maltophilia
atgcggaacatccgcaacttctccatcattgcccatgtcgaccacggcaagtccacgctggccgaccgcatcatccagctctgtggtggcctgcaggcccgcgagatggaagcgcaggtgctcgactccaatccgatcgagcgcgagcgtggcatcacgatcaaggcacagtcggtgtcgctgccctacctggccaaggacgggcagacctaccacctgaacttcatcgacacccccgggcatgtcgacttctcctatgaagtcagccgctcgctggctgcctgcgaaggtgcgctgctggtggtcgatgcggcgcagggcgtggaagcccagtcggtggccaactgctacaccgccgtggagcagggcctggaagtggtgccggtgatcaacaagatcgacctgcccaccgccgacatcgagcgcgccaaggccgagatcgaggccgtgatcggcatcgatgcctccgacgccgtgccggtcagtgccaagaccggcctgaacgtgcaggacgtgctggaagcgatcgtgcaccgcattccgccgccggcgccgcgcgacaccgacaagctgcaggcgctgatcatcgactcgtggttcgacaactacctcggcgtggtgtcgctggtgcgcgtgatgcagggcgagatcaaggccggtgacaagctgcaggtgatgtcgaccggccgcaaccaccaggtcgacaacgtcggcgtgttcacgccgaagcggaaagtgctgccggcgctgcgtgccggtgaagtgggttgggtcaccgccagcatcaaggacgtgcatggtgcgccggtcggcgacaccctcaccctggctggcgacccggcgcccaagccgctgccgggcttccaggaaatgcagccgcgcgtgttcgccggcctgttcccggtcgatgccgaggactacccggacctgcgcgaagcgctggacaagctgcgcctgaacgatgccgcgctgcgcttcgagccggaaagctccgaagcgatgggcttcggcttccgctgcggcttcctgggcatgctgcacatggaaatcgtgcaggaacgcctggaacgcgaatacaacctggacctgatcagcaccgcgccgacggtggtgtacgaggtcctgaagaccgatggctcgatcatcaacatggacaacccggccaagctgccgccggtgaaccaggtcgaggagatccgcgagccgatcatccgcgccaacgtgctcacccccgaggagtacatcggcaacatcatcaagctgtgcgaagaaaagcgcggcagccagatcggcatcaactacctgggcagccaggtgcagatcagctacgagctgccgatggccgaggtggtgctggacttcttcgacaagctgaagtcggtcagccgcggctatgcctcgctcgattaccacttcgtgcgcttcgacgcaggcccgttcgtgcgcgtggacgtgctgatcaacggtgacaaggtcgatgcgctgtcgctgatcgtgcaccgcagccacgccgaccgccgtggccgcgaactgtgcgagaagatgaaggacctgatcccgcgccagatgttcgacgtggccatccaggctgccgtcggctcgcagatcatcgcccgcaccacggtcaaggccatgcgcaagaacgtgctggccaagtgctatggtggcgacgtttcgcgcaagaagaagcttctggaaaagcagaaggaaggcaagaagcgcatgaagcaggtcggacgcgtggagattccgcaggaagcgttcctggccgtcctgcagatggacaacaagtaa

SEQ ID NO: 522432 - DNA, 1533 bp, Stenotrophomonas maltophilia
atgattccccgacttcgcacgcaggccattggcctgctggccctgacccttcccctggcggcctgcgcgcaggcgccggcgcccgtcgcgcagacccagcccgcgccagccgcggccgcgcgggcaccggcgcagccgctggtcagtggcctgcccgacttcaccaacctggtcgaacaggtcggcccgggcgtggtcaacgtcgataccaccatcgtccgcaacaaccgccaggctgcgcgcggcccgatgggcgacgatgacatgccggagttcttccgccgcttctttggtcccgacttcccgatgccggggcaggggccgggtgggccggacggtggccccagcatcaagggccgtggcatgggctcgggcttcatcatctcgcccgatggttatgtgctgaccaactaccacgtggtggccgacgccagtgaagtgaaggtcaagctgggcgacagccgtgagttcaccgccaaggtggtgggcagcgaccagcagtacgacgtcgcgctgctgaagatcgacggcaagaacctgccgaccgtgcgcgtgggggattccaacaccctgaagccgggccaatgggtcgtcgcgatcggctctccgttcggcctcgaccattccgttaccgcgggcgtggtcagcgccgtcggccgcagtacgggggggcccgaccagcgctacgtgccgttcatccagaccgacgtggcgatcaaccagggcaattccggtggcccgctgctgaatacccgcggcgaggtggtcggcatcaactcgcagatcttctccgcctccggcggctacatgggcatcagcttcgcgatcccgatcgatctggcgatgagtgcggtcgaacagatcaagaagagcggcaaggtcacccggggccagctcggcgcggtggtcgagccgatcgattcgctgaaggcgcagggcctgggcctgccggacagccgtggcgccctggtcaaccagatcgtggccggcagtgcggccgccaaggcgggcgtgcaggtgggcgatgtcatccgctcggtcaacggcagcccggtcaacagctggtccgatctgccgccgctgatcggtgcaatggcgccgggcagcaaggtcaacctggtggtgtaccgcgacggcaagccgcatgacctcagcgcgaccctgaccgcactgagtgaagacggccaggccactgcccgcgggccggcggccggcggggccgacgcggcgccgcagaccggcgtcaatgccctgctggggctggacgtgagcgacctgagcgcggcccagcgcaagcagttcgggctcaacagcaacgaaggcgtgcgcatcaccgcggtcaagggccaggccgcgcgtgatgccgggctgtcgccgggcatggtgatcctgcaggttggccgggtcgcggtcggcagcgtggatgccctgaaccgggcgctgtccagcttcaagaaggacgacgtggtgatgctgctggtccgcacggccaacggcaacagcgccttcgtggcggtcaaggctggccagtaa

SEQ ID NO: 522433 - DNA, 882 bp, Stenotrophomonas maltophilia
atgaccagtaacccgttcaacgaatcgcagaaccatcaatcgcccgccgggcagcgcctggaccagcgccatcgcgagcagctgtcggccctggtcgatggcgagctgggcgccgatgaagcgcgcttcctgctgcgccgcatggagcacgaccccgaactggccggctgccaggagcgctggcagctgctgggcgacgtgatgcgtgggcaggccccggcgctggcgccggccggcttcagcgccgccgtggccgctgccattgccgccgagccggtgccaccgtccgagccgcgtcgccaggtgcgccgcggtggctggcgggcctggggcggcggcgccgccctggccgcgtcggtggccgccgtcgccctgttcatcggcggtgagaaactgaaggaggcgacgccgggtgagccgctggcgccgcaggtgatcgccagccaggcggaactggcgccggcgccgaccgcaccggccgcggtgaccgaggcgtcggtggatacggccgcgatggccgtggctgctgcgccggccgtggcgatggccgcctccagccgccgccaggacgcccgccgtgccagcgccacgcgtacccagcaggccgggcgtgcggcgcagcgcgatgaggccccgcaacgggccatcgccgcagcgccggcgccgttgaccccgaccgtgccggccaacgccaaccgcaacctgccgttcggcgaggtgggcggactgcaggcccggccgtggccgcgctccagcctggcgcccgctgccggtggcgcactcaatgccagcttcccggcccatgccggcggcgcggcgttctatccgttcgagccgcgcctgcaggacgagctgccggtgccgccgcgcccgcgcgactga

SEQ ID NO: 522434 - DNA, 621 bp, Stenotrophomonas maltophilia
atggccgatgttgatacacctcaggagctggatctggagctggtccggcgcgtgcagcacggcgagagtgccgcgttcgatgtcctggtgcgcaagtaccagcatcgggtcgtggccctggtcggtcgctacatcgccgactggagcgaatgtcaggacgtcgcccaggacactttcatccgtgcctaccgcgcgatcgggagtttccgtggcgatgcccagttctcaacctggttgcatcgaatcgccgtgaataccgccaaaaactacctggcttcacacaatcgacggccgccgaccgatgacatcgacatcggcgatgccgaacagttcgacagcggtacccgcctgcgcgacaccgatacgcccgaacgcgagttgatgcgccaggaactggaacagacggtgatgaaggccgtcaacgcgctgccggaagaactccggtcggcgatcaccctgcgcgaggtggaaggcctgagctacgaggaaatcgcgcagaagatggggtgcccgatcggcaccgtgcgttcacggatcttccgggcgcgcgaggcgatcgacaccgaactccggccgctgttggacatcggcagcgccacccgtgagaagagccgcgtatga

SEQ ID NO: 522435 - DNA, 2064 bp, Stenotrophomonas maltophilia
atgctctcaggcttcgatggtctccgcttcagccactggcaccccgagatccgcgacgacggcgtggtggttctctccctggatcgccaggacagcagcgtcaatgcgatgtcgcaggacgtgctgctggaactgggcgacctgcttgagcgcattgccctggacccgcccaagggcgtggtcatccagtcgttgaagaaggccggcttcattgccggtgccgacctgaaggagttccaggaattcgatcggcgcggcaccgtaaacgacgcgatccgtcgcggccaggccacgtaccagaagctggccgagctgccctgccctacggtggcggccatccacggccactgcctgggcggcggcaccgagctggcgctagcctgccgctaccgtgtggcgtccaatgacagcagcacccgcatcggcctgccggaaacccagctgggcatcttcccgggctggggcggcagcgcgcgcctaccgcagctggtgggcgctcccgcagcgatggacatgatgttgaccggccgtaccctgtcggcctcggccgcgcgtggcatcggcctggtcgacaaggtggtggcaccggcagtggtgctcgacaccgccgtggcgctggccctgtccggcaccacccgcccgttcaagcagcgcgccaccgcgtgggccaccaacacctggctggcgcgcaagctgctggccccgcagatggtcaagcaggtcgcgcgcaaggcgaagaaggaccagtatccggcgccgtatgcgctgatcagcacctggcagcgtagcggcggcaaaccgatccaggcccgcctggacgccgaacgccgtgcggtggtgaagctggcgagcacgccgaccgcgcgcaacctgatccgcatcttcttcctgaccgaacgcctgaagggcctgggcggcggtgattccggcatccgccacgtgcacgtggtcggtgccggcgtgatgggcggtgacatcgccgcatgggccgcctacaagggcttcgaggtgaccctgcaggaccgcgagcaacgcttcatcgacccggccatggagcgcgcgcaggcgctgttcgccaagaaggtgcgcgatgaaagcaagcgccctgccgtggccgcgcgcctgcgcgccgacctggaaggccacggtgtggccgaggccgacctggtgatcgaagcgatcatcgagaaccctgaggccaagcgtgcgctgtaccagacgctggaaccgaagatgaagctggacgcgctgctgaccaccaacacctcgtcgattccgttggtggaactgcgcgaccacatccagcgcccggcgcagttcgctggcctgcactacttcaacccggtcgcgcagatgccgctggtggagatcatccaccacgacggcatggcgccggaaaccgagcgccgcctggccgcgttctgcaaggcgctgggcaagttcccggtgccggtggccggcagcccgggctttctggtcaaccgcgtgctgttcccgtacatgctggaagcggccaccgcctatgccgagggcattccgggcccggtgatcgacagggctgcggtgaagttcggcatgccgatgggcccgatcgagctgatcgacacggtcggcctggacgtggccgccggcgtcggccgcgaactggcgccgttcctgggcctgcagatcccggccgcactgcagacggtggaaccggacaagcgcggcaagaaggatggccagggcatctacacctgggagaacggcaagccgaagaagcctgacgtggccagtgactaccaggccccggccgatctggaggaccgcctgatcctgccgctgttgaacgaagcggtggcctgcctgcacgagggcgtggtggccgacgcggacctgctggatgctggcgtgatcttcggtactggtttcgcgccgttccgcggcggtccgatccagcacatccgcgcggtcggtgccgatgcgatcgtcgagcggctgaaggcgctgcagcagcgccacggcgaccgcttcgccccgcgcccgggctgggacaaccccgccctgcgcgaaccggtggtctga

SEQ ID NO: 522436 - DNA, 864 bp, Stenotrophomonas maltophilia
atgaccaccatcatcgccccgcgcgtgcacgacatcggcggcctggaagtccgtcgcgccgtccccaccctgcaggcgcgcagcatcggttcgttcgtgtttgtcgaccagatgggtccggcactgatgcacccgggcaccgccatcgacgtgcgtccgcacccgcacatcggcctggccaccgtcacctacctgtggtcgggcgcgatcgggcaccgcgacacgctgggctcggatcaggtgatccgccccggtgacgtcaactggatgaccgccggccgcggcatcgcccattccgagcggacgccgcaaccggaccgcgaccatgacaatccgatccacggcatgcagacctgggtcgcgctgccgaagtcgcacgaggaaatcgagccggcgttctaccaccatgccgctgccaccctgcccgagcagcgccgcaacggcgcctggctgcgtgtgatcgccggccgcgcctacggcgaggaatcgccggtgaaggtgttcgccgacaccctcaacgtggccatcgatctcgacccggatgccgaaatcgacatcgacgacggccaccgcgagcgcgcgctgtacatcctcgaaggcgaggcgcagctggatggcgtggacattcctgcgcagcacctggtgattcccgaggccggcgcacgcggccgcctgcgcgcgaagacgccggtgaaggcgatgctgtttggcggtgagccgctggatggcccacgccacctgtggtggaacttcgtgtccagctcgaaggagcgcatcgagcaggccaagcacgactgggaggccggtcgcttcggcaccatccccggcgacgacaaggaattcatcccgctgccgcagtactga

SEQ ID NO: 522437 - DNA, 720 bp, Stenotrophomonas maltophilia
atgagcatgggtaaacgcttgtccgccgaattcctcggcacgttctggctggttctggggggctgtggcagtgcggtgctggccgccaagttcggtggcgacggcaatccgctggggatcggcttcctgggcgtggcgctggccttcggcctgaccgtggtgaccggcgcctatgcgttcggccatatctccggcgcgcacttcaacccggcagtcagcgtcgggctgtgggccggtggtcgcttccccaccagggatctggtgccctacatcatcgcccaggttgccggcggcctgctggccggcttcatcctgctgcagatcgcctccggcgccagtggcttcgccatcgatggcagccaggcgggtgcgttcgccagcaatggctatggcgtgctgtcgcccggtggatacagcgtggcagccgccttcctgtgcgaagtggtgctgacggcggtgttcctgatcgtgatcatgggttccacccacggcaaggcaccggccggtttcgccccgctggccatcggcctgtcgctgaccctgatccacctgatcagcattccggtcaccaacacctcggtgaacccggcccgctcgaccgccgtggccttctttgctggcagcggcgcagtcagccagctgtggctgttctgggtcgcccccctgctgggcggcgcgatcggcggcctgatctacaagtggatcggcaacgaccgctga

SEQ ID NO: 522438 - DNA, 459 bp, Stenotrophomonas maltophilia
atgaagttcgtgcctgtcatcttgtcgagcctgttgttcgccgcggcccaggccgccgcgcaggcaccgtccgaatgtccttcgctgccggccagcagcggcctgcagtggcagcagcaggtgcaggccgatttcctggtctgccgcgccagcaccgcggacggtcgtgaagtgctgagcctgatgctcagcgcgcgtgatcccgccattccgttgaaccgctcgctgcgccaggaaaaaggcagcttcggcggtgaatcgctgtactggtaccagcccgacctgggcggccagcaaccgccgggttacgccgaacggcgcatcagcgtggtcaagatcgacaaagggcgttacgcgcagattgcgctgtatccggacagcgcgcaggagctgggctcactgcaacagctggcgcagggcatgagcctaacgccgtcggccgtggccgccgggcgctga

SEQ ID NO: 522439 - DNA, 852 bp, Stenotrophomonas maltophilia
atgagccttcccgaaccggtccgcgtgctgcggaccatccgtggcatgcccacctccgacggtgccggcgtgcgcctgacccgcgtcatcggcggcccgacgctgccggacctggacccgttcctgctgctcgatgaattcggcaccgaccgggccgaggactacatcgccggcttcccggaacacccgcatcgcggtttcgagaccgttacctacatgctcgatggacgcatgcggcatcgcgacaaccacggcaacgaaggcctgctgaccccgggcagcgtgcagtggatgaccgctggccgcggcctggtgcactcggagatgcccgagcaggaaagcgggcagatgcgcgggttccagctgtgggtgaacctgccggcaaaggacaagatgaccgacccgaagtaccaggagttcgcgcccgagcgcattcccgtggtgcagccggccgccggtgtggaagtgaaggtgatcgccggcacggtcgatggcacccgcggcccgatcgtgcagccggccaccgagccgctctacctcgacatcacgctgtcgcccgaccgcgcctggacctacacgctgccggagggccacaacgcttttgcctacgtgttcgaaggtgcgctgacggtgggcgagcaggatgccgcccgcgatgtcgcgcgccaggaactggcggtgctgggcggtggcgaacagctgcacgtgtcggccggcagcgaaggcgcgcggctgatcctggtggccggccgtccgttgcgcgagccggtgatgcggcacggcccgttcgtgatgaacacgcggcaggaactgatgcaggccttcgttgatttccaggaaggcaggttctga

SEQ ID NO: 522440 - DNA, 2082 bp, Stenotrophomonas maltophilia
atgaaagggttttccaaactgggctgggcggtactcgccctgctcggcgcattctgtctgggcaccgtggccctgcgccgcggcgagcacatcaacgcactgtggatcgtggtggccgcggtctcgctgtacctggtcgcctaccgcttctacagcctgttcatcgccaacaaggtgatgcagctggatccgacccgggctaccccggcggtgatcaacaacgatggcctggactacgtgccgaccaacaagcacgtcctgttcggccaccacttcgccgccattgccggtgccggcccgctggttggcccggtgctggccgcgcagatgggctacctgcccggcctgctgtggctggtggtgggcgtggtgctggccggcgcagtgcaggacttcatggtgctgttcctgtccagccgtcgcaacggccgttcgctgggcgacctggtgcgcgaagagatgggccaggtgcccgggaccatcgcgctgttcggcgcgttcctgatcatgatcatcatcctggcggtgctggcgatggtggtggtcaaggcgctggccgaaagcccgtggggcatgttcacggtgatcgcgacgatgcccatcgcgatcctgatgggcgtgtacatgcgctacatccgccccggcaggatcggcgagatctcggtggtcggcctgatcctgctgctggccgcgatctggtacggcggcaaggtcgccgccgacccggtgtggggcccggcgttcaccttcaccggcacccagatcacctggatgctgatcggctacggcttcgtcgcttcggtgctgccggtgtggctgctgctggccccgcgtgattacctgtcgaccttcctcaagatcggcaccatcatcgcgctggccatcggcatcctggtggtcatgccggaactgaagatgccggcgctgacccagttcgccgccagcggcgatggcccggtgtggaagggcggcatgttcccgttcctgttcatcaccatcgcctgcggcgcggtatccggcttccatgcactgatttcctccggcacaacaccgaagctgctggccaatgaagcgcacatgcgctacatcggctacggcggcatgctgatggaatcgttcgtggcggtgatggcactggtggcggcctcgatcatcgatccgggcatctacttcgcgatgaacagcccggcggcggtgatcggtgccgatgcggcctcggcggcgcactacatcaccaacacctggggcttcaccatcacgcccgagcaattgaccgcgaccgcggcggcgatcggtgaaccgaccatcctgcatcgtgcaggtggtgcgccgaccctggcggtgggcatcgcgcagatcctgcacgaagcgatacccagtggcagcgacgcgatgatggcgttctggtaccacttcgcgatcctgttcgaagcgctgttcatcctgaccgcagtggatgccggcacccgtgcgggccgcttcatgctgcaggacctgctgggcaacttcgtgccggccctgaagaagaccgagtcgtggaccgccaacatcatcggtaccgccggctgcgtggcgctgtggggctacctgctctacaccggcgtggtcgacccgttcggcggcatccagaccctgtggccgctgttcggcatctccaaccagatgctggccggcatcgcgctgatgctgggcacggtggtgctgttcaagatgaagcgtgaccgctatgcctgggtcaccgcggtaccggcagtgtggctgctgatctgcaccacctacgccggcttcatcaagatcttcgacagcaacccggcgcagggcttcctggcgcaggcacacaagttccaggcggcgctcgccagcgacaccatcacggcaccggccaagtcggtggcgcaaatgaagcagatcgtggtcaacgcctacgtcaacaccggcctgaccgcgctgttcctgctggtggtgggtgcggtgctggtgtattcgatcaagaccatcctggcggcacgccgcaatccgcagcgcagcgaccgcgagaccccgtacgtggcactgaagccgcatgaaatggtggacctgtga

SEQ ID NO: 522441 - DNA, 225 bp, Stenotrophomonas maltophilia
atgagcacgcaactggttcccgtggggcagtaccaggcgcaccgccgcatctggcggcgcctggtgcagaccgcacggctgtgctgtggcattcccgattacgacaactacgtccggcacatgctggaaaagcacccggaccaggagccgatggactacaagacgttcttccgcgagcgccaggaagcgcgctacggcggacgcaacggtggccgctgctgttga

SEQ ID NO: 522442 - DNA, 1251 bp, Stenotrophomonas maltophilia
atgccgaccgaacccgctcctgccctgatcagcaacgacatcgttggactgggcctgattgccgccaccctggccctgatcttctgggccgccagtggtccgacgccgctgctgaagaagatcttcgcctgggtgccggccctgctgctgtgctacttcatccctgccatctacaacaccgccggtgtcatcgatggccacaacacctcgctgtacaacccggtcgcgcgtgacgtgctgctgccggccgcgctggtcctgctgacgctgtcgatcgacctgaaaggcatcgccaagctcggcccgaaactgctgatcgtgttctgcgccggtacggccggcatcatgctcggtgcgatcgtctcgttccagctgatgaagctgatccacccggaaaccgtggccggtgatacctgggccggcatggccgcgctggccggcagctggatcgggggcggcgccaacatggtggccatgcgcgaggtgttcggcaccgacgccaccaccttcggccagttcgccgtggtcgacgtggcctgtgccagcctgtggatggcgatcctgctgttcctggccaaccgcgcgcagcagatcgacaaccgcaacggggccgatacccgcgccatcgacgagatgaaggcacggatcagcgcctacgaggcacagaacgcgcgcattcccagcatgaccgacctgatggtgatcgtcggcgtggcactggggggcgtcggcctggcccacgccatcgccgcaccgctgtcgggctggttcaaggccaacgtcagctgggccagccagttcagcctggacagccagttcgtgtgggtgatcctgctgtccacggcgatgggcctgggcttgagcttcacccgtgcacgccggctggaagcggcaggcgcttcacggctgggcacggtgttcctgtacttcctgatcgcctgcatcggcatgcagatgaacctgctgtcgctgctggatcgtccgtggctgttcctgctcggcgcgatctggatggccacgcacgtgctggtgctgtggggggtagccaagctgctgcgcgcgccgctgttcttctttgcgatcggttcgcagggcaacatcggcgcggcggcgtcggcaccggtggtggccgcggcgttccaccccacgctggcgccggtgggcgtgctgctgggtaccgtgggctatgccaccggtaccgggctggcctatgtcaccggcctgatcctgaagtggatggccaacggctga

SEQ ID NO: 522443 - DNA, 1287 bp, Stenotrophomonas maltophilia
atgaaggcgcgtaagccgggcccgctgtaccggcgcgtggtgtggtggttgctgggctatctggccctgctgtcgatcgccgtgttcagcgttggcaactacgtgcacgagcacgccgagcatgcggcctggcgcgcactgctcaattccgaactggacagcattgtcgaccacaccgagcacgagccccattaccgctggcaggactcggacacgctcagcctgttccgcttcgacgagggcaacatgcccgagagcgtgcgcacgctgcacccggggctgcacgacggcgtgccgatcaaggaccggcagaccgcagtgatggtgcgcgacaccggctcgatggggcgggtggcgctggcgctggacatctccgacttccacgacctggagcagttcgccacgcgctgggtgatgctggccggggtgatcatgatcttcgtcaccgtgttgatggcgtcgttcggcatggagcgcatggtgcgcccgctgagcctgctggcccagcacatcggcgccctgcgcccaggggtgcagggccagcgtatcgaggtcgacccgcgcggcagttccgagctgcacaccatcgccgatgcgttgaacgattaccttgaccgcaacgagcagttcgtcgagcgcgagcgggtcttcatcagcaccgccagccacgaactgcgcacgccgatcgcggtgatgaccggtgccgccgaactggcactggagcaaccgggcctgcccgagcgcgcccgccagcagatgcagcgggtgctgcgcaccgcgcagagcgtggagcagctgatcgagctgctgctggtgctggcacgtgacccggcgcgcctggccgcgcgtgccgagcgtatcgcgctggaccagctgctgccggaaatcgtcgacgaccatcgccacctgcttggcgacaaggacctgagcatcggcatccaggccgcgccggtggacatcgtcgcgccgatggcggtggtgcaggcggcgatcggcaacctgctgcgcaatgccatcgagaacagcggtcgcggccatatcgaactgcagctgagtccgtcggcggtgctgaccctgcaggacccgggccatggcatgagcccggaggagatcgctgccatccacgcgcgcatggcacgtggtggccgtgccgatcgtggcggcggtatcgggctggacctgattgcgcgcttgtgcgaacacctgggctggaccctgcagctgcacccctgcgaaccgcgcgggacgcgcgtcaccctggacttcggcgcttcgcgccccacctga

SEQ ID NO: 522444 - DNA, 714 bp, Stenotrophomonas maltophilia
atgcgtctgttggtgatcgaggacaaccgccagctggtggccaacctgttcgactacttcgagtcgcgcgggcacgtgctcgacgtggccccggacggcatcaccggcctgcacctggccggcagccacccctacgacgcggtgatcctggactggatgctgccgcgcatggaggggccggaggtgctgcgtcgcctgcgcgccgagcacgcttcggaggtgccggtgatcatgctgaccgcgcgcgacgagctgccggacaagatcaccggcttccgcgcgggggccgacgattacctcaccaagccgttcgccctccccgaactggaggtgcggctggaggcactgctgacgcgtgcgcagggccgcaatccgcgcaagcgcctgcaggtcggcgacctggtgctggacctggcgaccctggaggcccagcgtggcggccaggtgctgcatctgtacccggcctgccgcaagctgctggaggtgctgatgcgggccagcccgggcgcggtgacccgccagcagctggagttcgccctgtggggcgacgagccacccgatggcgatctgctgcgctcacatgtctacgagctgcggcgcagcgtcgacggcccgttcgccgacaagctgatccataccctgccgcgggtcggttatcgcctggcggtgaccgccgccagtgatgcaggcaaggatgatgatgaaggcgcgtaa

SEQ ID NO: 522445 - DNA, 1704 bp, Stenotrophomonas maltophilia
gtgcccgtagccctgccccgccattggcgcctgcccctgttgtggctgctgatcatcgctgcgttggccgccggcatcggcctgcgccagccgcagccgccggacgagccgcgcttcgtgctggcggcccgcaccatggtcgaaagcggggaatggctgctgccgcaccggggcgtggagctgtacgcggagaagccgccggtcttcatgtggctgcaggcggccgcctacgaactggtcggcagctggcagtggtcgttcctgctgccgtcgctgctgggcgccctgctcagcctgtggctggtttcggacctggcacggcggctgtggtcaccccggcattccctgtatgccctggcggcgctgttctgcaccctgcagtttggcctgatggccaagcgcgcgcagatcgacatggtgctggtgggcatgaccacggtggccctgtggggcctgatgcgccacctgtgcgagcgccgcaacctgcccgcactgtggctggccggcttcgcggcgggcctgggcacggtgaccaagggtgtgggtttcctgccgctgctgatggtgctgccgtggttcggctggtggctgtaccagcgtcgccgcggccaccgggtggacggtccgcacccggcaacgctgctgtggctgatcccggccttcctgctcggcgtggcggtatggctcgccccgctgggctgggccctgctgcacgagcccagtgcggccctgcagtcgtatgcccacgaactgttgttcaagcagaccggaacgcgctatgccaacgcctggcaccaccgccaaccggcctggtattacctgcaggtgatcctcacgctgtggctgcccggcagcctgctgctgccgatgctgttcaggccgtggtggcgccgcatccgccgtggcgaccgtcgccagtggctgctgctgggctgggccgttctggtgctggtgttcttcagcgccagcccgggcaagcgcgaggtctatgtactgccgatgctgccggcgatggcgctggcggtggccccgttgctgccggggctgctgcgccggttgtgcgtgcggcgctacctgttcggctacagcgtggtgctgatgctggccaccggcgtgctcggcgtgctgctgctgaccgaacacccttgggcccttgcgcagcttgagcgccgggcaatgcccgatacgctgctgccggtgctcggcgatggcctgctgaccttcgccatcgccctggccacgctgatcgtgtggctgcgggtgcgccgtgcggcaaccctggtgctgttggcccacggcatgctgtggatgctctacggcctggtgctgatcccggcgctggacccgtacgcgtcggcgtctgcggtgatgcgccgggtgggcgcgaggatcggccccgatgcagagctggcgctggtcgcctggcgcgaacagaacctgctgcaggccgaccgcccggtgcgcgagttcggcttcaagcggccctgggccgagcagtggcacgatgccggcccctggctggccgaggcgccggacacgcgctggttgctggtgctggacgaggcaatgagtccctgcgtggacccggccaaggtgatcgatatcggcatcgccaacaggaatcgttggcaactgcttcccggttccgcatggaacccggaatgccacgccgagcggacaggatcgaccgcagacgaagactga

SEQ ID NO: 522446 - DNA, 648 bp, Stenotrophomonas maltophilia
atgggtttcggcggcgatcaatgggtggccgatcacctgttccgccttgaaggtggccactgggcgttgcaggacgcctgggtcacccgcacggtggtgcacaaggccggcaaatggctgagcacgtcggcggcgctggtcgcgatcctgttgtgcgtgcaccactggcgcaagggaggcgatcgcaccctgcgatgggcgctgctttatgtcgtaattgccatggcgctggggacgggcgtgatctccctgctgaaggccctggtgccgatggaatgtccctgggacctgctgcgctacggtggccatcagccctatataggccttttcacgcagcgcccggccgggatggccgcccaggcgtgcttccctgccggccacgccagcgcgggctatgcgtggctgtgcctgtactatttcgccctgctgtggcgcccgtcgtggcgctgggccgggttgtggatcggcctcggcaccggcctggtgttcggcatcagccagcagctccggggggcgcatttcctttcgcatgacgttgccactgcattgatttgttggctgctttcgctgggcctgtacctgatcgtcaaaggcatcctgatccgccatccgctggaccgtcccaaccgccaggaggcaaacgcatga

SEQ ID NO: 522447 - DNA, 1650 bp, Stenotrophomonas maltophilia
atgagtgcatcggtccaacgccccgcccgcccgtctgcgctggcgggtcttcgccactggcggccacagctgtccaccgaagcactgatcgcgttcaccagcctgttcttcgcggtggccggcaacggcctgttctggcacagcgcgatggccagccatccgggcagcctgcgctacgcgctgtcgctgctgctgttgctgctgggtgcgcacggcgtgctgctcggcatcctggtctggcgctggaatgccaaggtggtgatcagcctgctgctgctggtgaccgcgttcgccgcgcactacatgggccgctaccacatctacctggatgcggacatgctgcgcaacgtgctggcgaccgaccccaaggaaagccgcgagctgatgaccgtgtcgctgatatggccggtactgctgctggcggtgctgccgatgctggtgctgtggcgcgtgcagctgcgccgccgcagctgggggcgcagcctgctgtggcggctgggcttcctggcagtggccgcagtgaccgccgtcggcggcgcgttgatctcgttccaggatgtctcggcgctgatgcgcaaccagcgtgaagtgcgttacctcgccacgcccgccaatgtgctgctgggcatgccgcgtgcactgcgtggcgacaacccggtgcagcgcgcaccgaagttgccgatcggaaccgatgccaaggccacgccgcgggcgccggccagcaagccgcgcctgctggtgatcgtcatgggcgaaaccgtgcgcgcgcagaactggggactcaatggcggccgcaacaccaccccggaactggcgcaggccagcgtgatcaatttcccggacatgcattcgtgtggcaccagcaccgaggtttcgctgccgtgcctgttctcgccgtgggggcgccacgattacgacgagaagaagatccgcgcacaccagtcgctgctgcacgtgttgaaccgcgccggcatcgcgccgttgtggcgtgacaaccagtccggctgcaagggcgtgtgcgagggcctggacttccagtcgctgtccgatgccaccacgccgggcctgtgcgccgacggccgctgcatggacgagatcctgctgcaggacctggccacccaggtgcgggccaggcccggcgaccgggtggtggtgctgcaccagctgggcaaccacggaccggcctacttcgagcgctatccgcctgcattccgtcgcttcaccccgacctgcgatacccgggacatcggccgctgctcgcgcgaggagatcaccaacagctacgacaatgccgtgctgtacaccgatcacttcctgaccaagaccatcggcacgctgcagggcatgcaggactacgacacggcgatgatctacctgtccgaccatggcgagtcgctgggcgagaagggcctgttcctgcacggcgtgccctacgccatcgccccggccgaacagacccgggtaccgatgacgatgtggttctccccgggttttgccagcagccgcgggttggacctgcaatgcgtgcgcaagcgctcggcggcctataccgaccacgacaacctgttcccgtcggtgctgggcctgatgcaggtgaagacctcgctgtacgagcgcgaccgcgacgtgttcgccaactgcgaaggttga

SEQ ID NO: 522448 - DNA, 312 bp, Stenotrophomonas maltophilia
atgccaatccgccgcaatgttgcagtgactgttatcgccccggccaaggcggtagctccaaagcacgcaagtgactggccccgggccgacagcctgtcggatgcgctcggcaaccgcgtcaatccactcactcatcgcgaggctggtaacgtgttctccatccgcaggcagatggctaatatcgggaaggcctttcaggccgttatcatcgcgtgcattctcttccttccggaaagagaaatgacgcccttcgccgaacaaaacctgcacgatttcagtggccttttgctgactctgactactcatacataa

SEQ ID NO: 522449 - DNA, 708 bp, Stenotrophomonas maltophilia
atgatcgctgtgatcttcagaagcccgtgtccaaacgcgccaccaaagacccctcctattcgctaccaggttcccatccaaagcatgaccaccaaaagaccagctgaatcttcccgtttgcagctacaggatcttgtcaccgacctggccggccgtgcgcacattgcgccccctcgggtcaaactttggcggaaccgcaacgcacgatacaacgcggctacccattgcattgcggtatctgtggcgctcgcggatgggctcaatggagcgcagctccgtactctgttggctcatgaagtgggccatgcaaggcgtcgagtaaaaacgctgcggcgtgtattcaagtacctctttccgccatctctgattacgctcgccacaggcattgttgggttcaatgtcggtggcttctcagctacccaggacgtggccatgggattgcgtgcttggggggcgctgctggtgattggagtgggcatatttgcggcagcgcgggtccatgagagcatcgaaaagcgggcccgacgcgatgcctacgcagaggaactgcatgctgatcggttcgctagacggcatggagatccatccgcagatattggctctgtgttggaagcgtgcgcacagatagaggactcggggacgctcggccccgaggcgatgcggcgaacccgttttgctcggcgattccaacagggcacgagccaataa

SEQ ID NO: 522450 - DNA, 402 bp, Stenotrophomonas maltophilia; identical to SEQ ID NO: 518872

SEQ ID NO: 522451 - DNA, 3267 bp, Stenotrophomonas maltophilia
atgctaaagcggaagaaccttgcctctgcggtttctgcggcactgactgtcatgctcctgccaatgccctgccttatggccgccaatctggaaggggccggcatcaagttcgctaccgacagcttcagcgctgcacaattcagcgatgtacgcgaaaatttgcgtgccagtgtgctggctcagaacggagagatcctggcgcttgaacgagtaggaatctactcgaccgggaccgggatcagagcgggctccggtagcaaaatcgaggttgcagatgtagacgtcaccacttcccagaattacgctcatggcgtagaggctactggcatcggatcgatggtatccggcagtgaagttcgtgtttctacgtccggccagttctcgtacggcctccgtgccaacgaagcgggcatcgtcgagatccatggagcgggtgtgtccaccaccggcgatttcggccacggcgtgatcgccgatacaaccggctcgcgtatgaccgtttccgcagcggacatcaccactgagggcgggcgttatgcgatgggcgtgcgcgcagccgatggtgggttcgtagatatctccaacgcaaatgtgaccacacgcggcaatgggagttacggcctgaatgccattggtgccggttcgctggccaaggctcaatcgctgcggatcgagacctttggtgacgaagaatcaggaacgaccgcttcgggggttgtcgccgagtggggcggcgtggttgatgtccaggacagcgatgttctgactcacggggcgtcggcaattggcctgcttgcgcaggtcagtggagatgctcgcgatcccgacacgctgctcactgccaagaacctgaatgtgtctacttcaggagaccatgcctttggtgcgatggcttgtgcattggtggcagggcggcgcgactcctgcgccgatccggcaggctcgggtcagccggccttgggcgcacgtgctgcgttggatattgccgccagcaccattgcaacaaccggtgcgggaagccacgggctctatgcgtacgggcctgctggggcgatgatccgggcaagcggcagcatgatctccaccagcggaatggccgcacatggcgcggttgccgaggcaggtgcggatctgttgcttcaggactcccaagtccaggtcgaaggtgacgaatcgatcggcattctgggtatcaacaacgccaggctgacagtgcgcaacaccgcgatcaaaagcgccggtgaacgcgcgcacgggatctccaacaactcaggatcgcaactcacgctggatcgcgcgcagatcgagacgcttgctgatggggcgttcggcatgatcgtgcgagatgacaacagctacgccgaactggccaatctgcaggtgctgacccacggtagcaatgcgattggcctttcagtcgattatggtacgtcctccgcggttctggccgacagcgcgatcgatacaaggggcgctggctccaatgctgcccgtgtacaggacggcgccaggctggacatcagcaacagtgttctgaagagcgaggccgcccctgcgttgctcttgaacaacggcacccttgctgccaccggaggcactgcgatcgaaggcaacggaatcctcgccgagttcggttcggacgcagcaagcactctgaacttcgaccgcaatgtcgtcgcgctgggcgatatccgctttgccggcggcgcagtggacgccgatggcaacggcatgcttgatcgtacctcctcgctgtccctggacaacaacagctcctggaagggcgcaaccggtgctatcggcgatctgtcgctggcgaacggcagccggtgggacgtgaccggcgactcgcaggttggcacgctcagcctggtcggctccagcgtgatcttcgaccacagcaacggccagtacaagaccgtcactgtgcacggcaacttccatgccgacaacggagtggtggcgatgaacacctcgctgggcgatgatgcctcgccaaccgacctgctgcacgtgaagggtgatacgtcgggcaatgcgcatattgtggtgaccaacatcggcggtactggcgcacagactgaagacggcatcaagctggtgcaggtcgatggcgtgtcggggggcgagtacgcactggccggtcgtgccgttggcggtgcctacgagtactacctgtaccagggcggccgcatcaacccaaccgacggcgactggtacttgcgttcggagctgtctccgatggatcctccggtggccccgtgcgacggtagcggctgcgcgattgacccgccggtgaagccgccgccggtcttccgcccggaagcgggtgcatacctggccaaccaagcctcagctcttggcctgttcaacatggatctgcacgagcgtgtgggggagccgaacttggcccagcgccaacgtagtggcggcaacctcgacggtgcttgggcccgtgtcaccacagaccagccgcgttaccgcgtcaacgatcagctgagtgggcggggtcgccagaacgtggtgcagatcggcagcgatctgaccttctggggaaagcaggaccgcggcgtggttggcatcatggctgccagcggccaggccgccaaccgacttgcctcctcactcacgggctacagcgccgagggccgcgtagacggctgggcactggggctttacggcacctggatccaaagtgcagagaacgatgacggactgtacgtcgacggctggctgcagtccgcgcgcttcaagaaccgggtggacggcgatgccctgctccgtgaacaatacagttcgcgcagcctatcagcatcgattgaggcgggctacgccctgcgtctgaaccagaatgagacccgtgctctgtacctggaaccgcaggtgcaggctatctggagcgactaccgtatgtctggtggccagcaccaggagctgaacggcactttcgtgaagattgcagaagccggcggcctgcaaacccgcatcggggcccgcctgtatggccactcgagctcgattaccggaaaccgcgtgcagcccttcgtcggggtgaactggattcgcaacagcggcaatgctaatgcggtatggatgggtgaacagcgtgtgcaaggccttgtacccaaggacgtgtacgaggccaaggtaggtacacagttgcaactatcgccgaagctgagcggctggggtgaactgagtacacaacttggtgagtacggtttccgcagcgtcggcggccagttgggtgtgaagtacatgtggtaa

SEQ ID NO: 522452 - DNA, 789 bp, Stenotrophomonas maltophilia
atgaaatattgtcgaatcatcctgctgacggcactggcagctgcgccgtacctggctcacgcgcagagcgtaagtgagaccgcccccgaagccagggactggtccttccggttctcgccatatctatggggaagcgcgacagagggaaggttcgcgcatgagcgtctacccttcaccttgcagggctcaaaaagcttcagcgacacgctcgatgatctggaactcggcggcatgggcatgttcgaagcgcagaaggggcgttatggcctgctgctggatggccagtacagcagatccgccacggtcctcaatgcaccgctgggtgggtttgcattgcccgttcaactgaagacccgccactacagcacgctggtggccgcccgctacggactgcatgaggatgcgtccaataccctggatctagtggccggactgcgcatctggcaggtgcggatgcgcatggcctactccgctccgctgccgacgccgccgcctatcccgcagagttacgatggcgagcagaaccatggatgggtagatgcacagatcggcgtcaaggcccgccacacgtttccgagccagttcttcgctggcggctgggtgctggcaggagctggagagtcgaagctttctacggatgtcatgctggtcgtcggctatcgcgcgagcgaacacctgtctgtgacggcaggctatcgatggctgagcaccaattacagtactggcaaaggattcgtcttcgatgcgcgattgcatgggccgggagtaggcttggagtatgtattctga

SEQ ID NO: 522453 - DNA, 3255 bp, Stenotrophomonas maltophilia
atgaatccctatttcgacctgttttgccttcagcatcatgtgcctgcacggctcaaggcagctcgcaatgactcgccgtgcaagctgccgaagaagcggagattgaccgtcgcactcaccctcgcagcatgtgcagtaatgcccggtgcggcttacgcaacgtcactcaacggcagcacaacggttgacagcactacaccttggagtgctgatgaagatctctatatcggctggaatgctgcgggcgaagtcctggtgcgtgatggaggccagctttcaaacaccggcaagagcaccgcgaccctgctgatcggccataccgcccccggcacgaccagcctgggcgatggcacgctgaccgtgaccggtgacggctcgcgcgccttcaccagtggcggcctgatggttggctccacaagcaagggtgcactgaacatactcgacggcggcgttgttcagaacaatacctacgcttacatcggcgcatacggggggggcgatggcagtgcgctggtcagcggtgccgggagtctgtggcagatggatggcgcgtggatgatgatcggctcgcagggggcaggtacactcacggtcaatcagggggggcgggtggagcttggcaacgcaaggacattggcctcgcggatcggcgtgaacgcagaaggtgctctcaatgtgaccggtgacggatcggcatgggtgagcacgggtgatctggcggtagggtacctgggcaaaggccagctgaccgtatccgatggcggcctggtcagcaacgctgccgccgtcgtgggtgaccgcgcaggcggcgtcggtaccgcggatatcgatggtgggcgctggctcagcagtggccagctcaccgtcggaagccttggtcaaggcaacgtgctggtccataacggcggtgaactggtggctacccgcggcattaccgtgggcaacagcagcacgcagaccgattcggacgcgggtccaaatggggccatcctggtgaagggcaccggttcgcgcctttccaccgatggcataatcaccgtgggcaatcttggccggtcggtgttcactgtgaccgatggagcgtcggccacggccggcaagtggatgatcgtcggtaacagtgcggtgggccgcggagaagtctccaacggcgcccacttggacgccgctgccgaaatctcggtaggccacaacacgttgggtgtgctggacatcttcggcggcgccacggtcagcagcggcctgggcagactgggccggttcgccgacggcgatggacacgtaacggtaagcggcagtggttcgcgctggctcgcccaagccctggtactgggcgagcagggtactggcacgctgaccatcgctgatggcgccgcagtgactgccgatggcgaaggtatcgtacaactcgcatcgttcgacggcgcatacggcaccctgaacatcggcacaggccagcaggccggcagccttgcagctaccggagtcacgggtggtgcgggcacggcggtggtcaacttcaaccatgccgacgatacgcatttcaccgcagcactgacaggaagcctgtcggtcaacgtgctgggtacggggaccaccgaactgtccggacccggtagctacctcggtgcgacgtcgattgcagcgggtacgctgaaggccggccgcgagggcgccttcagtgcatcatcggcgtatgcgttgcagccaggcgctgagctcgcgcttgcgggctacaaccagacgctggccgcgcttgataatggtggagccgtgcgcttctccgagagcaacacaagcgggacagtactgtcgatcgcgggtgattacgtgggcaacaacggtctgctacgcatgaacagtgtattggcaggcgatgattcggtaaccgacagaatgttggtggccggcgatacgtccggtcatacccgggttgcggtgaagaacgcgggtggtgcaggggcgtcgacgcagaagggcatcttgctggtgggcgtggatggtgcctccaacggcacctttgaactgcaagggcgtgctgttgcaggcgcctatgagtatctgctccatcagggtagtagcagcgatgcatccgatggcaactggtacctgcggtccgcactcagcgcgccgaccgcgccgccagtcgagccggagcctgtcgatccagcagctccggtgctcccgccgccggtcgaacccgagcctgtcgatccagccctccctgttacgccccccccgccccggacaccgggagagacaatcaatgtcccgtcgccggtgccgcccagcgcgcgcctgttacgtccggaagccggagcctacttgctcaaccaggcggcggccgccgacatgtttgatctgtccatgcacgaccgtatcggagggccgaatctgatcgaagccggcacggatggcgtcgtcgatggtggcgtatggtcgcggatttccaccgaccagagccggggcaccattctgggccagttgcacggccgcagccggcaacatgtgctgcacgctggtgtcgacgtagcccgctggggtgaaaatagccgcggtgtgttcggcatcatcactgctacgggtgaaacgaaccatcaggtcgcatcctcaacgactacttaccaggcacaggggcgggtgaagggcaatgccgcgggcatctacggcagctggatacagagcccggcccagaccggtggcctttacctggatggctgggcccagatcgccacgttccgtaaccggatgcagggagacatgctggacgccgagcggtataagagtcgttcgaccagtgcatcgctggaggtggggtatgcaatcgccctgcgccaaggtgcggaccaggcgctctacatcgagccacaagcgcaactgatctggggtgatctgcgcatgcgtggcggtggccataacgaagtcaatggctcccatatcgcagttgccgagggcggtgggctgcgcagtcgtatcggcgtgcgcgtatttgggcatggcaccaaaccgggcatcaatcgcgtgcagccttatctgaccgccaattggctgcacgcgtcgggtactcccaatgcggtgtggttggatgaggtggcactgtctggcgggcagcccaaggacgtgtaccaagcaaaggccggcgtgcaactgcagttgaggcgcggggtcacggcctggggtgaactcaatggcagccgtggcaacgatcacttccggcaggtcggcggcacgatcggcctccgctacgactggtga

SEQ ID NO: 522454 - DNA, 1200 bp, Stenotrophomonas maltophilia
atgggcaaagggcactgcgtggcacaacgcgttctgatcgttgaagatcatccgttccagcttgagatcctggccgatcttttctccagccggccgggcatcgaggtggagacgtgcctttgcgcgtgcgatgccggtgcacgttgcgtggcccaagcatacgacctggtggtcagtgacctgcaaatgccgggcatggatgggatccagttcatccaactgctttccgccctcccccatcccccactgctcgcgctggtgagcgtagaccgtggacggatgcttgcctctgccaggttggcggcccagtctctggggctgaacgtggtgggtgtgctgcgcaagcccgtccaggcaagcgaggtagttgaactgcttgacgaactggccagtgttcaggggagccggcgccacgggttgccccacgtcgggaccgaaccggaggagcgggagttgcgccaggcgctgctggacggacgcatcacggcatggttccagccaaaggtgtgccttcaaagcgggcgtacggtcgcagctgaagcgctggctcgctgggtgtcagaacgcgacggtgtactttcaccggcccggttcctcccggccatcacccgacttggcttggagaaggaactgctccgcaaagtgctggcagcgagcattgacgcccagcatcaatggcttgcagccggtcaccatgttgcagtgtcggtcaatctcccgacacatctgctggagcaatcggacctgcccgacgaactgctggcttttgtggaggagcgcggcggagagccggcgcagttgtgctttgagctcctggaggacagcatgaccgggcacgtgggcgactatcacgccggcgcctgccgcctgcgcatgaaggggttcgcgctggctcaggatgacttcgggcaaggcatgagttcggtccatggcctggtcaacacccctttcaacgagatcaagatcgaccaggccctggtcgatggatgttcgcgcgatcccgcattgggcgcagcactggccaatgtaatcccgctcatccgccagttgggcatgaccagtgtcgccgagggtgtggaaactgatgaggacctagagatgctgaagcagttgaagtgcgatctggtacagggctatctgatctcacggccgttacgggtgagtgacttcacccgcttcctcggtgcaccacccgtctga

SEQ ID NO: 522455 - DNA, 1272 bp, Stenotrophomonas maltophilia
atgcagaatcgtctctgtctcgcccccctgctgctactgtgctgcagccctctgctcgctgccgaacgccccacgagcgctgacgccgccttgcgcgcctccgcgcaaaaggaagttcctgcggtcatcgccacgctggatgatctggtcaacgtcgaatcggggtccaacgacacgccgggcctgacgcagatttcgacctacctggtgtcccggctcaagcgcgtgggagcagcggtggatcgcccgagggcggcaggtaacggcgtccccatggtacgcggcgtactgaaaggaacgggagcgctgcggatcatgctgatcgcccacatggacacggtctacgacaaaggcattctgcacaccgagccgtaccggcgtgagggcaacctgatctacggtcccggcatcgccgatgacaagggcggcatcgcagtgatcctgcattcgctggccctcctgcaggcgcgcggatggaaggactacgcgcaggtaaccgtgttgttcaacccggatgaggaaattggctcccccggttccggcgaaaccatcgccaacctggcggccgagcacgatgtggtgctgtcctttgagccttcgccggccaaggcggtgataaagagcgaaggcgtgcttctcagcgccgcaggtacctcgcaggtgcagatgaccgtgaagggagtcgcctcgcatgcgggcgctgcaccggagcaggggcgcaatgccctgctggagctttccaaccgcctgctacagactcgaaccgcggccgagcaggtgcatggcgctcagttgaactggacaatggccaacgccggcgcagcccgtaatcagatccccggtgaggcaatagcaaccggcgatgtgcgcgttaccgaggccgacgccaacgagcgcctgttggccgtgttgaaggaaaggaccggtactccaggcttgattcccgacaccaccacctcggtgagccttgatgcgctgcgcccgatgtacgtcgcgggtgagcgtggctccgctcttgctgagcgggctcgaaagatctacttcgaactggatgggcgcgagctcctcttccaccccaccaccaacggcggtaccgatgcaggctttgctggaagatccggaaaggccgcggtgctggaagggctgggattggcaggctggggctaccacgccaagagcgagttcattgaagtcgattccatcgagccacgcgtctatctggccgcccgcatgatgatggagctcggtgcggaggcatcccgcaagcgatag

SEQ ID NO: 522456 - DNA, 216 bp, Stenotrophomonas maltophilia
gtgatcgtatgtgatggatggatcttccgctcggacgatgtagagtcgatcgggccgatcgtggatgagggaaacgcttgctggtttgaggtgcggacagtggatggtcggacgtacctgatcagcaggcagaacacgcgcgaactgttcaagcagcaggctgcgttgttcgcccagctcgcagaacgcgagcagcgccgcagcgattcccgctga

SEQ ID NO: 522457 - DNA, 642 bp, Stenotrophomonas maltophilia
atgaaaaccacaattgtcatcgccgatgatcaccctatcgtgctggccggcatctgcgacgttgttgatcgcaatccggaattcgaggtgattggacaagcccagagcccggccacgctgatcaacctcatgcaaatgcataagccggctatcgtgatttccgactacaacatgcccggcgacgacgatctgggcgatggcatcaaactgatttcctatctcgccaggcacttccccggcgcaaggatattgatcctcaccatggtatccagcccggccatcgtggcggagatgtatcgggcgggggccagcggcgtggtacgcaaaagtggcgacctgcgggagctcaatgctgccctgacggccctggcagcccaacggcagtatcgctcgccggatctgcctgtcgagagcggagtacccgctacgggagcggagtcgtcagcggcttccctgtccccgcgtgagctggaggtgatccgcttgttcgccagtggattgagcgtcggggacattgcaaagcggctgaatcgcagcagcaagactgtcagcacgcagaagatgaatggaatgcgaaaactgggggcacagaccgaccaggagctggtgacgttctgcctgcagtcatcgcttttcagctga

SEQ ID NO: 522458 - DNA, 738 bp, Stenotrophomonas maltophilia
atgactaccagcgctcctttcgcctcctctccgcccagcccttggatcgtccggccgggggcgggtgacctgttgctcgtgcagacccataagggcgggaccttggcggcgtcgctcgatcgggctggcatacgcatcgattttgcctactccaggttgggcgcttgcaccattgccaaacggcatcgatacaccgccatcgtgatagtggggcgtcccagcggcactacagttcaatcgctacgcaggacagtagggaatggcatctgcgcgccgctcattgcggtgctgctttcctcacgcgccacagtgacggagcggctggaacagcacgcctggggggcggacctctgcctggacgattggacggacatcgaagtggtgacccgcatccaggcatgggaacgtcgcaggaacggcgccgttccgcacggctggctggctgattctggcagtctgcgcctgtacgtcggggccaatgcactcatttatctgggaaacactcttctgaagctgtcttcgacgcagcgggccgttctcgcagcaatcatcaccgcgggcgatgaaggtattccggcggccaaactgcgggaacagttgagctcgcggtcgatgacctacggcgcagtcagggttcacatttgttcaatccgcaagacgttgctcagctaccagaatgcgccacggttgatgtcgaactcgggccgctaccgtattgagcggcatgcctccggttag

SEQ ID NO: 522459 - DNA, 408 bp, Stenotrophomonas maltophilia
atggtcagggtgctggtgctgggcggtctggaaggcgggcgtgcgcaaatcgcgcgacagttccgcaggtatcgcgacatccgcatcgatacagtcggccccctggggcttggtctgcatctattgggggatgctccctatgatctggtggtggcattcttccagcctgacctggccacagggtttgccgaggcgtgcctcgccaaccgggttggcccgccgctggtcgtcctgacccccggactgcatcaccagtgcgcacaactgcaacgtgtcctggccgccgtaggtctacccgccccggcgttcattcgatgtgagccggacgatgaagcgctggggcggattctggcggatctgctgccgaaggcgtctgctcctgcgcctgctgtcgcagaccttcgctaa

SEQ ID NO: 522460 - DNA, 3210 bp, Stenotrophomonas maltophilia
atgaaaaccagctcccagcccgtgagcgtggtgttcaagaaaattgccggctctgatcgcctgacggtcctactcgcggcattgttgatcgttgccggcagtatgttggtactgctggtggaacgagcgatccagctggcgcaaagcaatgtcgccctccagttccgcgaattggagggcgccttcagcgagcaggaacggttcatgctgggctggaagctgcacgacgccgatcttgccgagccacaggaaaacacaagccctcccgcggccacctcgttcggctgggcgctggtcggtaccgggagccccggcgaggccgcagagcctgctgagctcgcccacagctttatcgatttttaccgcgatttctggtcgcaatcacggtatcggccctcgcagtgcctgctggtcaatggcagtgggacactgggcgtgcttgccccgtccaaatacagctcgcagtaccagaaacgtggcattccaacccaattgcactcggcattggacagggtccgccaagcggtgctgaaccgcccacggctcaaggcgggctacgtggcctgggccgaagagccctgggtcgatggccaggtgcgcttcgtggcggtgaccagtgcgccgggggacgcagtgcattggggcgaagccgggaagacaacggttcctgcaattgcatgtctgatggaaaccaacgggctgttggctgatcttcgggccagcggcgcaagcgaattcacggacctttcgttgttcactcctgccggaaccccattgatcggcaacgccaaggtggctcgcaatggccctcccaagcgttttgggctgcaggggctggagctccgcatgcaggggcgcggcggctggacggctgtctatacagtcggtattcggcagctgttgctggacaaccagggcacattgatggccggtggcctcctggcgctcgtggtggggggcgctggcgcactgctgttgcgcgcgcgccgccggatcatcatggaccagttgggggcgcacgacgagcgcctgctggagagtcaggaattcagccgcgcgttccttgatagcgcgccggtgggcgtctgcctgctgcgcaggcaggacggcagcgtcctcctagacaacgtgcgggtccggcgattcctgggcggtgattatgaccacggtggatggcaaggcacgtggaggcggcaggtccaggcggctcacggagagcaggatattccctacacgacgcccgatggtcgccatctgatggtaagcgctacggcggtgaggtttgatggcgaggatgccctgctgtgcctgttcgtggatgtgacgcttcaacagaagactgaacaggcaatgcgcgcagcgcaggcggcgtccgaaacagccaaccaagccaagagccagttcctcgcaatgatcagccatgaaatccgcaccccactctatggcgtgctgggaaccctggagctgatgggactgacgccgcttgaaccacgccagcgcgagtatctgcgtacagtagagacgtcctcttccacgctgatgcatctgatagatgacatcctggacatcagcaaagccgaggcgggccagttgcagctggatgtgggcattttcagtccaggggatctgaccgaagacgtcgtgacggcctggaatggcgccgctcgcagcaagggcctgatgttctacgcggtcatcgatgcgcagatacctgccaccatcagcggtgatgccacgcgtatcaggcaggtgctgaacaatctgctgagcaacgccatcaagtttaccgagcagggtcgcgtgacgctgcggctgagcacacgccatagcggggacaacgagctgatgtgctggcaggtctccgattcaggcgtgggcattccctcggaagcccaggcccggctcttcgagcgcttctatcaggtagatcccggcaacgatgggaagcagggtacggggctcggcctgaccatatgcgcgctgctatcggcaatgatgggaggcaccatcgcagtcaccagcgagccgggactggggagcagcttcaccctggagattccagtcggcagcgctaatgtcgtgcctgccctgccatccacaatgccatggtcgctgacggaaacgctatgggttcgcggcgagccgcaggttgtggtgcacagtctggtcgagcgcctgacagaacgggggatcaaggcggcagccatgggaccgcttcatgcgccctcgcccggtgactcggcgccactactggagattctgctcggcagcgcctctgctccgggcgtgtggagtggccctcacgtggtggccacctattccggtggcgagcagcccgagtctgcggagggttgctggtgggtcacggcgcatcggctggatgcgattgtagaggcggtgttcatggcaaccggcactgtgtcgagcacactggccacgcactcgctgcgggcggtgcgccaattgggcttgacgatactggtggccgaagacaatcccatcaaccaagcgatcctgcgtgaccagcttgaacagttgggctgccactccgtgatcgctgcggacggacgcgaagcgctgggctactgcagagaacgctcgttctccatgctgttgaccgatctcaacatgccggtaatggacggcttcgccctggctgctgctgtccgcgaaaaaggcttgtcgttacctattgttggcactactgccaatgccgaccccgaagagcgggaacgctgccgccgcgtgggcatgaacgaacttctcatcaagccgatcacattgagggagctgcagtcggtgctgttggacctgtcatcgatagatggccatgacaggaccggacaatttgtactgggcagtactccctccggcgccccagcggccgtcgaacctccagcggaacggctggtcgtcccggtgcggcaccggcttctgttcgtgcagaccatgagtgaagatctgtcgcgcctgcggcaggccattacgcaacaggatgccgcgcagtccgcagcagggctgcatcgcatctgcggcgcattggtgatagccggtgcgccacagctggccgagatgggagccttggccgaggacggtctgcggcaggtgccgccaatgcctgccgcatgggagagtgcgcgccggttcgcggctgttctcgaggcatctctgcaggccatgccggaggagtccgatccccgactcgggtaa

SEQ ID NO: 522461 - DNA, 567 bp, Stenotrophomonas maltophilia
atgaagaatcacattatctcgatcgccatgctgtcggccttgggtgctgctgctttctcggccaatgcagccgagggcggtaccatcacgtttaacggtcgtgtgaccgcccagacctgtgaagtgggcaacagcgccagtggcgacttcaccgtcaccctgccgaccgtgaagatcaccgacctgaacggcagcgttgggcgcaccgccggtgactcgaacttccgcgttctggtccgcaactgcaccaccggtgcggatgctgtcagcgctgtgcgcgcacagttcgaacacgatgctgcctttgacgatgccaacagcggccagctgctgaacctgaacagcccgaacaacaacgtgcgccttcagctgttcaacgttggcacccagaccaacatcatcaagcctggcgacgccagctacaccggcggctacggttcgcagagcttcccggtcaccggcggcgcgtccgaactggtctacggtgtgcgttacatctccaccaacactgccgtcaccgctggcgacgtgcagggccgcgtccgttaccgcctcagctacaactaa

SEQ ID NO: 522462 - DNA, 741 bp, Stenotrophomonas maltophilia
atgcgcacgctcgccttgcttgttctctcacttactgctgccatgcccgccacggcaagcgtggtgctgggtggaacccgcatcgtgtatcccgcccaggagcgcgaggtcaccctgcagatcgagaacaagggcacactgcctgccttggttcaatcgtggctggatgatggcgacgcggagtctgcccctgaaaacacccgagccccattcatactgctgccccccatcgcgcgtattgaaccgggccaggcccaggcactgcgcatcatgtacaacggcagcagcttggcgaaggacaaggaaacggtcttctacctgaatgtgttggatgttccacccaatccgtcttccaaagatggggaatcgaacaactaccttcagtttgcctaccgtacccgcgtcaagatgttcttccgaccggccggactgcctggcagcgcggaaaccgcgccggaggacctgaagtggaccgtcataccttcaccggccggcggctacacgctgcgcgctgacaatccgaccccgttccatgtgtcattcgttggcgtcaagctgcaacgcgagggtcacagctacctgaatgatgaggggacctacatggtctcgccgggtggagaggtgacgttcccgttgaagagcggtggcgcagcgccagcagcgaaggaagcaaaagtaaccttcacctacatcaatgatttcggcggctataagacgctggaatcaacacctaaaaactga

SEQ ID NO: 522463 - DNA, 2565 bp, Stenotrophomonas maltophilia
atgatcaagtcccaaagcctccctgcgcgccttcggccgcagtcgaattcgctatgccctcgcattgccggactgaacacggtggtcggcggtgtgctgctggcgatcgccaatatggccacggccgcccctgctgcgatggatgctgcttttgacagcacctttctcgtcggcggcggccagtcgatggacctaagcgcctatggcaagggaaaccccatcactgccggcgactacacggtagacgtctttgtaaacaagaccagctttgcgaatgaagatgtgcgctttgtcgaatacaagggcaatgcgaacgcagcacagccttgctttggactggagcagcttcagcgcctgggcgtcaatactacccacttgctggaggatgcgaagcaggacccttcggcgtgccgcgttattgaagagtgggtcgacgacgccagcgccaactatgacagcggtgcgctcaaactgtacctgagcattccgcaggctgcgctgcaacgcggaatcgagggctacgtgcccccgtccaagtgggaccgtggcatcaatgccaccgcagtgggctactccttcaactcgacccgcaacgatcgtggcgagaattcatcgttcctgggcatcaacgccgacgtcaacatgggcgcgtggcagctgaggcactattccacgctcaaccagcaaagtggcgagggtgtccaatggcagcgcctgaacacttacgtgcagcgtccggtggccagcctacgcgctatcgtccaggcgggacagatcagcactaatggcgagctgtttgacagtgccatgatcaacggcgtgcgcatggccagcgacgagaagatgctgcccgacgcattacgtggctacgcaccggtggtgcgtggcgtggccaacagcaatgccaaagtcgagatctggcagaacgggtttctcctgcgtgaaaccacagtagcgccgggtgcctttgtgctggatgacctcaaccccacagggtatggcggagacattaccgtgcgcgtgaccgaggccaatggctcgcggcgcgagttcaaggtgccctacgcttcggttgcgcaactgctgcgcccgggcgcgacccgctacgagtacgctgccgggcagattcgcaacccggcgctgagcgagcagccctggatcgcgcaagcgacgctgcagcgcggcctgaccaacgctctgaccggatacggtggtttccaagccagcgatggctactgggccatgaccgcgggtgttgccagcagttcgttcgctggagcactctcggtggatgtgacacatgccaatgcaacgctacccgccctgtccggttcatcaggcggcaacagcatcaagcttgcctacagcaagatggtgcctggcagcaagaccaacatttccgtcgccagctaccgctattccgactcaggttacatgggccttggacaagcgctggacatgcgtgagcgtgcccgtcgtggtgacagtgacgatacctggtcatctccgcaacgccagcgcagtcgtttctcgctgtctctcagccagcccttgggcagctatggctcgctgtatgtcagcggctccagcgccagctactgggacaatgcaagtgacgatctgcagttccaagccggctatggcggcacagttgggcggctcagctacacgctctcggccacacgcacccagggttcgggcggccgcgcagagaaccagtacttcctgaacctgacaatgccactggggggctccaaggccccctcggtgtcgctcaacggcacctacgccgacaagggcggcagcagcgagcaactccaggtcaacggctcgctgggtgatcgcgcccagttcaactacggcgtgaccgccaaccacgacaattcgggtggcaacagttactcggccaatgcccagtatgcggccgcttacgcctcgctgagtgtggcgcattcgggctccagccagttccagagcacgtcctttggtgcccagggcgggctggtcattcacggcggcggcatcacactgacgccgcagccaggtgagaccatggccgtggtgcacgtaccgggaggcatgggcgcacgcgtaaactacgatctccgcgtggacaggcgcggctacgcggtggtcccttatctgaccccctaccgctacaacgaagtggtgatcgacccgcgcggcacctctcaggacgtggagttcaagaacaccacgctcaaggtggctccctatgcgggcgcagtggtgaaactggatttccagacccgaagcggacgcccggtactcatgacccttcgtgacgagttcggcgatgttgtcccatttggtgcccaggtgaccgatgcggctggcgagatcaagggcctggtcgctcaggccggccagctgtatctgcgtgaggagcgcgacgcgggcaggctggatgtacagtggagtggcccgcgcggagagacccgccgatgtggagccgacttcagtctgccgcgggccatgaaggacgctccggtggaaaccatggcggtaacgtgccggaaccccggcggactggcaggcaaataa

SEQ ID NO: 522464 - DNA, 1254 bp, Stenotrophomonas maltophilia
atggatgccacaccgggtccacgtcggatgaagtcagccctgcgcgggcgctggatggtgccggccggcctgctgttgctggctttgctgccagccagtgcccaggcagcgtatcagtgtcgctatgccgacaacaccaccactcttcggcccacgccgtggacgtgggccggacagccgctgcgtattccttcagacgttgcattaggccagtcgctcggcgtggtcgcaaccgccagtttcccgcaggcagcatcggtccaatattgtgaacactacaaccagttccagtatgcaccaattggcaatcgcatcgcgaaccactacctggacgtaatttcgagctacatcgctgccagtggtacagccgacgctaatggctatttcgtgccgagtgggattcaaggcattgcgtttcgggtgaccatgaccagcagcaaggcgttccccaatggcacccagttgcgccccaactcgtcgctcaattggcctttgccgaactacgttcgcaatccaatcggatttaacgcttccaactcattcttctaccactgcagctggatcgtttccactccagccgacaaccagaacggcaatacctgttactggaatccgtacgaacaggatcatcggttcacggtggaagcgatccggactggtgatgtgcccgctggagtggcaattaccagtgcgatgttgccacaagtggaatggcggcatcaggatcagtacaccaccaacgcacagggtgcctcggcctatgctactcagatcgcctatcgcttggggggagctacgggggggagtccgccatccattccggcacccaagacgtgcactgtcacaagcggttcggccaatcagaccgtgaccctgcgaacggtgcgggtaagtgatttcagtggaagcccaaccgttgcaggtcccaccccctttaacatcgtgttggattgttcaggggccggcggtgcgatgagcttggcaatgaccgactcatcaggtgcgaccaacgacttcggcatgctgaactcctccggtggtacggccagaaacgtgcgcatacaagtgaggcgcggtgctgattgcagcggtaacatgccgctcgccggtgccaatgccgacgcaggcaccgtccctgcgggcacccgccagtacaccatccccatgtgcgcccgctacatccagcctggtggggcttcgccgacggccggtacgatttctggcagggtgacgtacgtcatcacctaccagtag

SEQ ID NO: 522465 - DNA, 687 bp, Stenotrophomonas maltophilia
atgaaattcagcagtattgccatgtcctcattgctcgtactggcatcgtcgcctcagctcgcgtcagccgaagcgaacgaaggctattacgcgaccgtacgggttatcgatgccacccatagagccgccaatatggatgccagcgctcgacccggaattggtgcatttgtagcggggcgcgagcggcgtgaatttgccaccggcgcgctgggtgccggctatgcattcgagaatggctggcgtacagaaggtgagtacagcctgcgcaagaaggagacgttcaccagcggctctacgcgcttcccgaaaagcttcaacaaccacaacgtgcgatccgagcgcgtgatgttcaacgtgtatcgtgacattgccatcgacgcgcaatggtcggtgtatggcaccgccggcgctggtgtggcgcgcctgaggtcaagtggttggcagggtgtctctggccgtgagtatatcgccgcatcgcagaacaacctggcgtattcgctgggtgcaggcattgcgtattctcccgtcgagaaggtgacgtttgatctcggttaccggtacgtggatatgggcaagaccgagagcggctggaacgcattcggaaatgctcgcggccttcaggacgaaaagatgagcttgaacctgtcctcgcgtgaaatcgtactgggcgcgcgttacgccttctga

SEQ ID NO: 522466 - DNA, 312 bp, Stenotrophomonas maltophilia
atgttcaagcgaggggaagacgcgtttctggtgctggagctgcgtgtaagggagtgcgagcgtcgtattgcgaagttggatggccgaaccagggcattggaatgcgcagtgcgggcagttgtcgccagtgcctccaatccctcggccttgcgtgccgcgtgggcgcagctgattccgatcgtcgcggggaaccatgccgacgaacgcggagaatcggccagcgactatctcgagggcctgcgccaaggcctcaagttcgttactgagcagattaacgcagtcccagagcggccctgcccgcttcggaaatag

SEQ ID NO: 522467 - DNA, 2100 bp, Stenotrophomonas maltophilia
atgagtttgagcgcgcatttccaaaacgccggcatcgggcgcgtgctgatcgtggacgacgatttgtcccaaacggtcgatctggccagcctagacaggcatggtcagggcgtcgtgatctccgacgtacttgccgacgcgaatcacgactatacgttcgccctcgacgatgagcttgagcgcttgggtctaccccacgacagccgggatgatcgcctggcagcgctgaaggatcccgaagtgcgagcattggcgcacgaggttctgcgtgacgcatatgagcgcgcgattacggatcgagaagccctgcgagctcccctcgacaagattaaggaatggctcacgatcgagggcaccgagttggaggaatggtcggaggcacgagaccttccggaagcggatcgctacgatcttctggtggtcgattacttcttgatggataacgatccgcaggccacctacaagctcatccgcgagttcaagcaggcgcacgcggagaggaagaacccactccttgtcattctcatgtcctcggatattggcgctattcgagggcatttcgaggacatccgcgacgaatgcgagatctctgcttctcggtttcggatcctggctaagcctgtcatcgccaatcctgattcggacgaggacgtaaaagagaagtggttgcgcgccctacaacagcttgccactgaacgaccgctggtcatgccgatcgagcggttcgtcggggcttgggaggccagtctgtacaaagcctccaaacagatggttcggcgcctgtatgatctcgacgccagtgcatttgcgttgctctcggcaacagctagccaggactcgatgaagctggaagagtacttggccgacgttctctcccggcgtgtcagcgctgaggcggaggaacatgggttcccctttattgagatcgacgcactcaggcaagccctcaatgatgcgcgagccaccattggacccacgatcgaccagggcgtggaggttcggcatgcgcaacgggcgatccggagtctaatgagcgatgtcgcgtggcatcggcgcccctggtgggatccctcaacgcctccaccgaagcccctggaggtgcgagctgaaggggcggcggtggcaatggacgctgcgcctgtggttaatcagttgcgcgaagctgaagagcctcagaagatcaccccggacgtgccaaccgcagccgcacgcgaaccagtggtcgacagcgttgtaccggccgcagctgtcgtggccgaggctgccgatcctgcctataccgaagatcgtctgatctggatgaagaggcatatccggttcggcacgatcctgcgagagaagacgggcgctggccgctacttcgtcaatttgacgcaagcctgcgatgttcagtcagagaagctgaagaacatcaacgaggtgcattacttgctgattcaagggagtagattcccggtagaccgggttgcggtcggggaaaaactgttcgactcaccttactactgcgatgacgtcgattcagacgatttcttcgcgctgcaatggcgtttgagacagccgttcaccccgtccatggcgacattgctaaagacactggagcattacgaatgggtcggccagttgcgcagcgactcggcttatgcggtgttgtcaaagtacctctcccaggcctcgcgtgtcgcccagatccgcatgcccaagatctatcgctattccgtgtcggtttaccgtaagcagtccaccggctgggtcaagcagaattctgatcatagaatcgaagctagtgcctggcagaccgagaagaagcagtggaggatccagtttcccgtggccgatgcccgagcactgcttccgcttctcagcggggtggtcgatgccaagaagcccgaatttgtaagtgagctggtttctggcgtggagttcagtccagacccgctcttcgcttcgaaggcgatcaagaatactggcgcgcttttgatgcgtatggacgcgaaagctgaactagatgacgctgcgttagtcgaggaaatcaacaaggatagcaaaggaaacaagttgcccaccggtgcaaccttgattctgacaagagcactcgcctag

SEQ ID NO: 522468 - DNA, 2118 bp, Stenotrophomonas maltophilia
ttgagctccgctgccaccgaaaggcaggcgggcacgcccacaaaggaacattttgaggcggcactggtccgactaaagcgggccaagagcgtggacgacgcggcgcgcatcattgaagaagtcaacttcatcgaggtaagtgacaccggatgcggcatctcggagagcaatctgctgcccgtgttcctgaccgttggcacggatttcaaggtcggcgcaaagcctcctgcgggcgttgacgaatatctcggcaacaagggcattggccgcctagcgatgatgaggcttggcgagcgtgcttacgtggaaacgtgggtggaagctgccacacgagtctcagcagtcgaatttgattggcgaaaattcgacaacgcttccttgcaaatttccgatgtgcctgttgctgtgcgtaggattgcccgatccacagatgtgccaagtgggactatcgttcggatattcgcgttgcgcagtgactgggctgaagaaggcgagcagataaaggatctgcaatcgttcattcgccggctacgtagtccgttctccaaggcgcgccgcttccgcatcagcgttagcgtcaatgatctgccacccattgccttcccgccgttgcctgatgaggtcaggaagcttgccgatcagtatctcttgttggacttctatccgcagaaggcgaaggattccaaggacgaagtgctgaccgtgactctcaaggttgcgcccggcgatgcgtcggaagacgtgcagacgcgcagtgccggcatcgtcggttcgagcctgatgcccagcggagtgagcctcgacgagcttaaggccattggccccttcaagctccacattctgcggttcaaccgcaggtcgatgcgggaaaagacaaaggactggaacgcgatcattcgaccggaactggatatctggtctggtggcatcgcgatctaccgcgatggcttccgtgtgggcttcaccggctcagagcgcgatggtgattggcttggacttgaccacaaagcgctgcggggcagtggctacatcgttaatcgaatccaggtggtcggcgcactggagattacgcacaagggcaaccctcagttggtagatctaaccaaccgagagggcctggtgactacgccggaggccgagttcctgaagctgttgttactcaagtacgccatcggtccgctgcgatcgctggtggaggccaacgatgaagcactgaagcgacaggagctcgagaacctggtcaacgaggggacctctacgctcaacgatcgcctgacgctggccaggcaggaggtggcgtctctgaaagctgagatcccgaagaatctgcgggccacggtcaactcgctggatgagaatttgcacttcatcaccacccaggtgaccaaattcgagaccgccatcgaaaaggccagtgagggccgtgaggatattctggagctagcgggcatcggtaacgtcatgcacggtgtaatgcatgaactgacgcggactaccgcgcagacacgcaagctgatgcgcgagttggcacaggacgctgatgaggacacgcaggcgctgctcaacaagcttgaggaagaaattcgcgctatcaacactcggctgcgtcagctggacccgctgatgcccggcgctcgacacgccaagcgcgatatcgaggtggtaaagctcacccaaaccatcctagatggctacgcctcccggttcgcgcgccatgacattgaatatgtcatcacggtcacgcccaagaatgcgacagcgaaggttcgcatggtgccaggctttcttagcttggcgctcgagaatctgataagtaactcggtttactggatcgggaagcgcaaggacaccacagagcgcgggcgtatcgagatcgagatcgacgccaaagccagcaccatcagtgtcaccgacaacggtcccggggtgctatccacagatcgtgagcgggtttttttgccaggctttacgttacgtgccaaaggcaagggctacggcctctacttggcccgggaagtcgctgagtatcacggtggtcgtctataccttgatcctgatggcggtgaagacggtcagctacgcactttcatcctggaactgccgggtacggaaaaatga

SEQ ID NO: 522469 - DNA, 1170 bp, Stenotrophomonas maltophilia
atgaggagcgatgctgcggaaccgctgtacctagattacgccgcgtcggcacctccagctgatgaggtcgttgaggcgatgttgccctggctgcgcggccagcatgcaaatccgcacgccgagcattggcacggagcgcgagcctggcgggcgatcgaggacgctcgtgagtcggtggctatgctgcttggaggagatcctgaaggcgtgatctttacctccggtgcgactgaggcgaacaacctggcactaaaaggcttgctcggctccagccgctcacacatttggcttagtgggattgagcataagtcgctcctcgagcccgctcgctcgctcgccgagcatggcgttggggtaacgatgctgggcgttgatgtcctggggcggattgaagcttcggccatgagggcgcaactgctatcgccgaactccgcccctgggctcgttgcgatcgggcatggcaacaacgagatcggtaccattcaggacgtcgcgacactggctaaggtcgcgcacgagcacgggcacctgttacacgttgatgcgtcgcagaccgcaggtcattggcccttgtccgcgagcaacgacgagctcgatctagtgtgcctctctagccacaagatgtacggccctgccggcattggtgctctctacatcgatccaatcctgttgccgcagcttcgaccgatgattcagggtggtggacagcagcatggggtccgctctggaactatcccgccgtttctggccgtgggctttggcgcggcagcagccctagccgagcgtgccgcgctcaagcatcgccagcacctgcaggcgatggcagcagccttccttgcacagttagacgctcaagggctcgcctattcgctgctgggggatccggtcaatcgaattccgggccacctgagcttgcatatccctggcgtggcggctgatgaggtgctggggcgtctgttgcctcatgtctcggcctctagtggcgcagcttgcgcctccggggagttgcgtgcgtctcacgcgcttcgggccctgggattggacgaaagccaggccaggcaggtgattcgcttcagtttcggccggtccagccgtttacgggaagccggcgaggcggccgcgtgcttactggaagtaattcagcggatccatgctttggagcgcccgtag

SEQ ID NO: 522470 - DNA, 837 bp, Stenotrophomonas maltophilia
gtggctgaccagcatgttctcgggatttcgggcggaaaagacagcgcggctcttgcggtctatatgcgcttgcatcatcccgagctcgacctcaaatacttcttcactgacaccggcaaagagctgccggaggtatatgaattcctggggagccttgaaggctttcttggcaagccgatcctgcgcttgaacccgcagcgcgactttgacttctggctgcgcgaatacggcaacttcttgccttctgtcaggacccgctggtgcacgcggcagctgaagttggtgccttttcgcaattggattaagccctggctggaggatggcgatcgtgtgcacagctatgtcgcaattcgtgccgacgagtcgcatcgagaaggatatgactcgggtcatgagaatctgacggtgcatttacctttccgtgaggcagggatcgaccatgcgggtgtgatggagctgctgcagggggcaggtgttggcctgcccaagtactacgattggcgttcccgtagtggctgtaccttctgcttcttccagcaaaagattgaatgggtgcgtctcaagcagcaacacccggagcgctttgaggaagctaagcgttacgagaagaccgccctagagcacggttctcctttcacctggagtgaccgggaatcgttggaggaacttgagcagcccgagcgcgtagctgctattgagcgcgaatttgagcgccgccgggctcgtgcgaaggccaagatcagggtcaacccgcttcgaccagaagcttcttccgaggggctggacatggaggaaatgtttagcgcgggtaaggcatgcctgatttgccaaaagtag

SEQ ID NO: 522471 - DNA, 3372 bp, Stenotrophomonas maltophilia
atggcaagtaacgtggaactgcgcatacaggtcaccccgcgcttccagcgctctgtacagctggagtccgatcttgcgcgtgcggacgcgttggatggatacatctgtcagtcaagctcactcaatgcgctggccgtggtggctcgccacattaacgaatcccagcagcgtgcgttcacgtggacggggccttatggcggtggcaagtcgaccctagctttggccttggcacagctagccggcggcacgccggcggttcgcaagcgtgctaagcaggcgctcagtatcaagaccgacgacgaaatctggaaagccttcgggagcaaaaagtcgtggctggtcttgcctgtggtagggcggcgtcagaccctggaggatgctcttggtcaggcgattgacaggcatgcgccacagcgcggccccaaacgcttgcgcaatgggcgccgtgatgtaatcactgagctggtgcggcgcgcggaagcgggtgagcacggtggcgtggtggtaattctcgatgagatgggcaagctattggaggcggcggccgcggccggggaagatatctatttgctgcaagagctggccgaatccgcgagccgcagcaacggcaaactggttgtcattggcatcctgcatcaagccttcgatcagtacgcctctcgctcgggcctaggcgtccagaatgagtgggccaaggtccagggacgcttcgttgatgtgccggtggtggccggaactgacgaagtcattgcattgatcagcggcgccatccgctgcgaggtatctcatcccggcagccatggcgtcagcgaagtgatcgcaaaggccattcagcgtcgccgacctgcctcaccggcgactctagcccagaccttggatcagtgctggccgctgcacccggtcacagccgcgctgctgggcccatgctcgcgccggcgttttgggcagaatgagcgtagcgtcttcggcttcctgagttcggctgagccgctcggtttccgtgaattcctggcaggccacacacgtaagagtatcgggtactaccagccagcgcatttctgggactatttgcgcgccaacttcgagcccgcgatcctggcctcggctgatggccatcgatgggcgatcagtgcggaagccattgagcgcgtggaagcgcgattccgtgaaccccatgtgtctcttgccaagacaattgcgctgatcgagctttttcgcaatgggtcaggtctggccgccagtcacgacgtgcttgaacactcggtagagggggcgtcgcacaagaccgtccaggctgcgcttgaagagctcgccgccgccagcatcgtcatctaccgtaagcataacgaagcctgggccatctacgcgggtagtgatttcgatatcgacgccgccgtggataatgccaagcgcgagcacagccagagcattgacgaacaacttaagcaactgtgcgtcttgcccccgctcaccgcgcgcaagcattactctaagacaggaacattgcgctggttcgaacgaaccgtggtgacgccgagcggtgcgctgaattcccatatgtcaaccaagagggcaccggccgggcgtttcgcgctgctggtgccaaatgaagagagcaccgttgagcagctggcgcggacggcgcacgagctggctaaggcggcaagagaccctctgaccttgtttggtgtccccaagggtcaccaccgtcttgctgagtatgctagcgagctagccgcgctcgaatatgtggctgaaagtaccccttcactggaaagcgatggagttgcacggcgcgagattcatgcgcggctgcagcagttgcgcggggacctcgaagcggccttgcgtgatgcctttgcaacggcaacttggtacagcgcaagcaaaacgctccatccaacctccgaagaggggctgtcgcctacggctagtcgtgtgtgtgatggggtcttcaaaagtgcgccgcacatctctagcgaactggtcaaccgcgacgtgctttcctccaacgcggccaaggcccaacgtttgttgatgcaccggatgctctcccacggtgaacaccccgaattggattattcgggctatccggctgacgcaggcctgtatcacaccatcctggttccgctcggcttgcatcgaacggtaaagaagcgcggtgcgttctgttcgcccgaagcatcagaagggctggaaggcgcacgttccctagtgccgctttggcaggcttggcgagcggaccttcagcggggcgaagatgcagtcactctagagcagctctacgacacagcgcgccagataccttatggcgttaagcagggcgtactgccgattcttgcgctagccttcctgctggcccatcgcagtgagctcgcgctgtatgtcgatggtatgttctgtccggatctgacagacgcagacgtggacgagtggctgcaggaccctgcgcgcattggctggaagtgggtgcgcattgatgcctcggccaaagagatgctggtgcgccttgctggcagactagaagaagtgacacagcgcccggtctcggccgatccgcttgactccgcgcgggcactggtttcctgggctttctcgcttccgcagtgggcgcagcggacggcgaaggtcagcgatctagcgcgaagcacgcgcacgctcctcctgcgggcttccgatccggtcaaaacgatcttcgttgatctgccggaagtgcttggtacggggcgagatggcaagacactggttgacaaaatcggccaggtcgtcgaggagctcaatcatgcctatccggcggctctgaaagcactggaggccaagctactaggcagtatcgaccatgtcgatgcacctgatgcacctgatgcacctgatgcacctgatgcacctgatgcacttgatgcgctacggcagcgggctcaagcggttcgaggcgtgagtggtgacctgaagttggaggcctttgctagtcggttgtcgacctacacaggcagcaatgcggatattgagagtctggctgcattggccgttagcaggccagctagggagttcagtgatcacgatctagaccaggcggttgtgcagctctcacagtgggcgtttgagtttcgtcgtatcgaggcacttgcttcagtacaggggagaccggccggtcgtcgggcaatggcggtggtctttgggggtcaggacacagtttcggcgacgatcgacatttccgagtccgatgcaccgatcatccatcaagtcagggatggcctgattgagcacctacgaaacaatgccttgaagccggatctaatgctggccgccattgtggaggcaggcgccaaggtgcttgaagaattgcagacacaaggaggcaagcgtggctga

SEQ ID NO: 522472 - DNA, 936 bp, Stenotrophomonas maltophilia
atggctcttccccttcttcctgacgacatccaattttccggtcacgagacctttccgctgcgacagctatggttgcgaaaagcgtatgaggccgcgcagcaccctgacttctctggtaacgctaagttggcgttcgcccctgagaacggcatccgccgttttggggtgggcaagaacatggtgtccgcgatacgccattgggcgttggcctgcgatgtacttgaagagcaggccgccggcaaattgggcgtcggcatcgtggggaaagcacttttcggcacgcgcggtctggatccctacctagagaagccggcaagtgcatggtgggtgcattggctgctcgccggacgtgccaagcgctcgactacttggtggtgggtcttcaacaggattagtcagcaaaccttcgactccgaaacggtggctgccgcgctcggccatgccgccgagcaggctggtcaccgcgtttcacaggtcacgctcaagcgggacgtagatgtatgtctgcgctgctatgtggcgcggcgcgatgggcgtgaggccgatgatgctgctgagccactgctggcagacctaggcttgttgtctgaggggccgatcggcacgttccgttttcggcgcggaacacagtcctccctgccagatgggctcttcgcgctcgcgctgctcgatttttgggagagcagggagcgttccgttgggtcgggccaagcaactctgtcctttgagaccatcgcacacgaattcggcgcgcctggtcgagtattcaagcttgacgaaaactcggtaggagatcgtttgacgaacctcgaggaaatctctgacggacagcttcgctggagtgactcggcgggcgttcggcaggtcagtcggatactggccgagccgctggattcgctcaagcaacgactattgaagcaggcatatggcaagtaa

SEQ ID NO: 522473 - DNA, 156 bp, Stenotrophomonas maltophilia
atggatgtagagatgttcctgcccgtcttcttctcgctgaaaccggaaacgagccgggattttggcatgaaggtgatcacagatctgacgccgcacgcccgaagaacgctgcagactcaaaagcagggggtagtagaactcgtgggcctgccgtga

SEQ ID NO: 522474 - DNA, 363 bp, Stenotrophomonas maltophilia
atggtcaatgaaattgtcgccatcggggaacagatgagcgcgcttattcacgacaagggcggactcacgctttcgtccaatgccgcgcttaccacctccctcggtcgctatctggcgcacttcagcatcctaagggagatcgcgcgcaaggccgagaacccctcttcgctggaggggatgacctataacgtggtctaccccaatgagctggacggacaattgaaaagcgacatcgtatttctccagagcagcattggagcttggtccatattctcggctgagctgtggaagcaggccatgcccgacaccccaatgccggtgcttacgccgcaaacgcctacccggcaacctgaccaaacctga

SEQ ID NO: 522475 - DNA, 1779 bp, Stenotrophomonas maltophilia
atgtgccgaaccctgccgatatggagtgcggaaagcgatttttgccacggtagagagagcatcagtttgacaagaagtcacgcgcgagcttctgcaacgtcaccagcattcttgcccaagcttaaggaattggcccaattagccgaaggagagttgcggcttcattggcacggtgcaatcaagccatctaaggtgtacggtgtccacgggcacaagattgatgcgttgttcatcggcctggatgacccccgcgtcacacatacgatcaccctgccgcttggcagcttcccgcacttggctgtgggaacgatctggaaagacggtgttttcgatggacacgatgtactcgataccaagacggtggagatctcagttcctgggcgcgatcaaccccgatggcgcccctgccgattgtccgacatcctcccagagacgctctatccgacccacaacctggcaaccccggccggttgttttctccttacaacggcagccggcgaggagctaatcgttccgtatgcagagatactgcgcgcctggtattttttcgacagccaagtgattccggctgtgattggtggcgcaattacactcccctatgttctgccactgaagtacctaccatgggtgccagaactgtctggcgaaggtgataacggaagcgttcgaatcgttcacaagaaccgactgagcatctcctctgcccagtgtctggccagactcatatttgatgatgtagctcggaaacgaacggtctccatcaacaaacagatcaaaatgaggctgcaagatcccagcatccctctcccacttatcctccctccgttctacggtccagcaagctgggacgtacgctgctatccaattgagaacacccaaagccgcgcaccccgattcatggttcagcagttgcttcgctcaaatgacaagctcccctacagccgactcgagcgacttccaatcaacgatctccgccccggctcaaccatggccgatgatctacaggaaatcttacgcaacaccactcggaacatttttgaagacggcaatgaaatcgaactgacagggcttggcccagacgattcccttcaatccgtctccgtaattggtctttcgttcggcaacagtgcgctcaaagttcatacagtgattccggcaaaggatgagcagacacacacgggcaaatggatcaaggacgaagactccatcatcaaggatacgagcgtcgatcctactgccgaccccgcacccggaacaccgagcagcagccaggaaacagggacaggaacagatgaggtcgagcttgttcataccatagacattgctgagatcttcggagagatagtctgcactgttgccagccatccttcgttgagaggaatgaactggcgcggcgactttcctttcgaccggcgcaaggtcgtcatcaagcacccaaccgacgataccgctcgctccttcatcattgcccgggtaagcaacggcctcagaaacctatacctgatggacgccgagcctatcaacaatgagaagacggggcgcctaatcgcgtttgagatcaaaagtggcgatacgctttctctcagccaactgaatcgatggctttccagcttcccaagcaggccaggatgtcggtggacgaacactgaaagcctgcgaatgcagctcgcgtttgaaaggatgaaccaccagaagaacaacggaggctctgaagaccacacccgatctctgttcaaggatcgcgtagtgaacagactcttgggaatgatattggactag

SEQ ID NO: 522476 - DNA, 987 bp, Stenotrophomonas maltophilia
atggaacgcccgcgtgccatcggctgggtggcacacccgcacatcctgcggggagaggcattctcctcgtggcttgcgcgctacgcctgggctaatgggttgagtccacactgtttcacgcgaacggcgttcggcgaggtagccatctggacgcgtgacatcgatcgaaccgttgacgcagccaccctagtcaaagctggtcagcttcctggcgtctccccgcgccgccttggcagctcgatcttgcgcgtctatcaagggcgtgtctttgcgccggagttcgctggagcggctttcatcccttggatcacgccactgggggtatatcaccgaacacgtaggcgccatggcagcgcctattgcccggactgtctacgtgagttcgggtgcatgcgcctggactggagattggcgtggatggtccattgcccccgtcatgaacggccgttgctggatgcctgtccggagtgcgatgcacccttcgtcttccatcgcatgttcttggctgatcgcgggagatatccctgtattgcttgcgggtcggatcttggacgggctccggccggacctgtagttgcaatgacggctcggcacctgcagcgggcactaacctgctgtgccgcgggtcatccgcgaaggatcggcactaaagaagtcagtgcgcttgagttcacagcaggtgttcgcgtgctgctgagaggcctttacgcgaatggaagccttgaaggacttgctagcggtctgcacagcgctcggcgagcgtacctaggccggccgcaggcgcctgcacgaacttcattcgaacactggcggatccatgatcgggctgtggccattgcctatctgtttgaggttctgcgttgctggccggagaccttcctacgttcattcaggacggcccgggtctgcccttccaggcttggcagcgaacgggcgcctgcttggattgtggaagcgctgtcgaccctaagccaagcccaacgctag

SEQ ID NO: 522477 - DNA, 894 bp, Stenotrophomonas maltophilia
atgactacggcccatacccatcgagaggacgtcttggaactaggcgcgcctgagcgcctgagcttcatgaggcagacacgatggttcgagtatgcggaggcagaggcaattctggcgcggctggaggacttgctggcacatccaccgagtcatcgtatgcctggaatgcaagttctcggggactcgaacaatggcaagacagctcttggcctggagttcgtcaggcgtcatccgtgggatgagaaccccggcggggatgccatccgagttcccgtagttcgcattgagatgccgcccaacccggacgaaatgcgattgtacgaggagatcctgatctccctgcgccagccactgcgttctcgagattccttgagcgagaagtctcgacaggcacgtgcaaatctctctgtggtgaactgcaggatgctgatgattgatgagtttcagcatgctctggggcctcgaaatgataagaggcgcgttctcattgatgcgataaagtacctcagtaataccctgcagattccaatcgtcgttcttggcactgcggaggcacaggttgcggtgggccgtgatgagcagttgagcaaccgtcttaaaccgagttggctcagcccatggccacgtagcgtggagtacaagcggcttttggcaagctttgaagcggttctaccattgagagagaagagtgccctccaatccagggagctgggtggcctaatccacgatctatctgaaggcctcattggagagacaagagatctgatctgtgacgctgttgcggttgcgttgaagacaggcaaggagcgcgtggacatagagctgctgagagggctggactgggtgcggccctcgcgtcgcaaggatcgcccacttcggagccagacgaggtag

SEQ ID NO: 522478 - DNA, 1887 bp, Stenotrophomonas maltophilia
atgactgagttagatcagaacccgctgttgcttggcgccgaggtcgcagtggatggacgtcggtacgcgatcgtacgctatatcgacttggagaccttgcttgcgctggattgcgaatccggtcagcgcgagttgctgaaggtcgccgatgttgtctctgccctaatgaaccgcaccgaggccgatctagctgccggggggtttgaggggctatccgaggaagattggaccattgccagtagacgggttgcagagatcgagcccttaatgacgccgggtgccacacgcgagcaggctgaagcggtggccaaccagttcggagttcacgttgccacgatctatcgctggattagccagttcaagagaacaggccaagtagcaagtctggcacctgctaagcgtgacggaggaagaggcaaggctagaatcgataccttggccgaggccatcgtttctgaggccatcagtgagctctatctgacaaagcagagactcagcgtggccaagctaatggagagcatcaaggtccggtgcaggcgtgctcaagtagatgctcctcatgacagcaccgttagacggcgcatctcacagctaaaggagcgcctgcaggtggagaggcgccatggcagaaaggctgcagacgacaagtatgcgccaaggcctggtaagttccccaacgcggactatcctggtgcagtgtggcagattgatcacactcctctagatgttctgatcgtcgacgatgttcatcggcgccacgttggtcgaccatggttgactgtagccattgatgtctactcacgttgcatcgcaggcttctatctttctctggatcctcccagcgaagtcagtgttggtatgtgcttggttcatgggatcctgccgaaagagggctggctggcggcgctccaggtcaaggcggggtggccgctctatggcctgcctcacactgtccatgccgacaatggcaaggagttccggagttcaatgatcaccagggctgcggagcaacatcgattccgcgtcgagtggaggaaagtgaagaccccgaactggggggggcacattgagcggttaatcggtaccttcaacagggaaatgcactcgctgccgggtaccacgttctccaatatcgcccaacggggagagtatgcgccccacaaggaagcggttctcaccctggaagagctcgaggtgtacctaaccaactacatctgcaacgtctaccatcagaagccgcattcctctactggtcgtgctccgctgaagttgtttgagcatgggcttttgggtgatggcattgtgcctggacgtggcctgccgcccccgccgcgcgatcccgcaacgttgcggcttgacttcatgcccatgattgagcggacgattcagcagtacggagtgcaacttgatggcatctcctactacgacaatgtgcttaatccttggatccgcgccaaggatagggagacgggaaagccccgaaagttcgtgtttcgtcgtgatcctcgtgacatcagcatcatctatttcctggatccggatacccggcgctactacccccttcagtatcggaacttggatcacccgagcatctctatctgggagttgaaggaagtgaagcttcagcttaagaaggagggacgcagtgaggtagatgaagccctaatcttcgaaacgtatgaacgtctcagcgcgatggtggagcgtgccacgagtacgaccgttaaagcgcgaaaggctgcgcagaagaagcgcagtcgtgagcgaaccaagcaaacggagtctgcgcaggaaggcactgtcagtacgatgaaacgctccgcagaaagccagctcgaatgggatgacgaagaggtcgcaccgtttcacacatctggactgcactga

SEQ ID NO: 522479 - DNA, 753 bp, Stenotrophomonas maltophilia
atgacgaagtcagaggccctgcgactggcgatcagagaggatgcgactagctgtagtattaggtgcagttatgcgactggatatccacgagccttgcctcctgtaagaaagatcggcctcgggcgccgggcactggccggaatgctccctggtaccaagctcccccatgatcagatcgcgaagttcgagtcctcactcgagcgagacttcttcgtgctcttggagttcaatccggatgttcagcgctgggatcctcagcccatccgtctacgtgtagaagagaccggtagggactacacgccggacgttctggtctccttctatcccaaaggccgtgagcgacagccgcgtcgcgtgctctacgaagtgaagtatcgggacgagctacgccagaaatgggtggaactgaggccgcgtctcaaggcagctcgcagatacgcgaagacccatggctgggagtttcggatcatcactgagcgtgaaattcgggagggagggctgctctggaatgccaaatttctgcttccatatgtgtatgacgagccggtcgatcctgacattgctgttctcatcgcgaacttgcgtcgtttgggcatcagtacacccgataagctgctgaaggcgtgctcgaccgatcgttgggagcaagcgcgtctcctcacggttctttggcagcaggttgccgctcgccatgtgcgggtggacctgagcgaaagattgaccatgaattccgagatatggatcgatgactga

SEQ ID NO: 522480 - DNA, 993 bp, Stenotrophomonas maltophilia
atgtccgaaaccataaacattgcggaagttgcttcaagaatatcgaaagagatatttagggtatttcgatggcatacacatcctagaaaggatgataatttcccctgcactgataagagtcacaagagtggtggaagggggaagtcaaaggatcaacatccaacagatgttgtttttagctaccaagacccttactcagcaaaaagagttcatcttctttgtgatctgaaaagctacaagggtgagtcgattacaagtgcctctattcgaaaggcgcttcaatccctagcgatgtcggttgaatgcgcggcctactctgatgtctggaaggaacgcttcgctgtggcggctgatgaagatcatgctgtgcatggtcttctttttgtccataaccatgacggcttgtataaaaagaaattcaaggaagagatcggtaaagtcaaagtcagggggcttgaaattcgcgatggagttctccttcactatctcggtcctgacgatattgacaggctttttaatatagcttccgacataacgaacttgattggtcgtggtgaaatttcgaagtcatattccttctactatcctgatctaattatgtctagaagggttggggatgtctgggatcagcaggctacgttcgaggtgcttgcaggaccgtttgtgattctgaagtatcctcctgactccggaaatcagggaggacacatcatttattacaataggagcggaaagacgagggaggagtttgagtacctcatcgactgtctttcgaggttccaattattagatttaggtggcgagatatctattcgaatgagctctcccgagattaacgatgagttcaaatcgaaatttgctcttgcggcaagaaagtacgctattcagtggggtatggatgaggatagagcgaggcggcttgagtcaatctctattgaccgggtgaatttgtatgtaaattcatataatcctggtgactgcgggtggcggtga

SEQ ID NO: 522481 - DNA, 1095 bp, Stenotrophomonas maltophilia
atggctaagacaaaaagtggcccgtcggtctactacgttaccgacaaaaacatctttgatgctctgaatgagcacaaagtgactgctgaaatcctgtcagacctgcttgcctaccgaaatacgatctcgagcccaaaagagccaaggataagtcttgcaaagtacttctcgcgactgacacacgattatttcgataaccaaaaaattgcctctgtacttggtgttgtccctcgtcgagagagaatgacgtcgctttttgttgctggagaagtttcgctagaatcgataagagttgctctcaataaggttgcggagtcttatcgagaaattggcgatattttcaacgtctccagcgtcgaaaatggatatcgggcattgttgcagtattcgcgcgtcgactatcgccgtagcgagttcaaccaggttcaagtccgcgatgcggaaattgaggtggtcctagccaatggtggagttgaaatccgtagcaatcaaagcgactatgttgatcgagcgcgagacgcttgcgtcgaagagctttctaaagcgaattcgggtctggagcgacgcgatgtttcgctgatagcctttaccgatccaggggttaggtctaaattcttccatgacatattcagtggtcttcctgatttctcattcagggaggtaacggacatatatgtctacaagccgcgatctttggagcaaggagaagcagaagatgatcccgtagttgagcgtatcggcctcaggggaagtgcggttagtggaagtaaatggtacgcagatctaagtaaggacgggtactatgtggccagagttgtttggactgcaaaggaaattatgaatgagggaaatttgttcgtaattgaagccctttttgcagatccaaaaactagctccgatttttcctttctcttgcagggcgttcatgatcgccttgaaagctctcatcagccgcggcgaagagttcccactaaatttgaggttgtgcgagtgacaagggcgatcgagcagcggtcgcggttcctaatggagcaactgcgtgcgtcaatctcacccgagagcgggggggcttcgaacgaagagggaaattcctaa

SEQ ID NO: 522482 - DNA, 675 bp, Stenotrophomonas maltophilia
atgaattcctatcgctggttcgcactgtcattcgctgatatggacgtcgatatatgcagacttatatcgagaatcgacgaagatggcgagcagtgggcgagctgttcgcaaatcgattccactcgtttcgctggtgcttacttcaagagggtcatgctctctgtcggccgcgcggatccatctgggtccgtttcaaatcaggccgtcgagacggttatatctctaaatttcacgcttcttgttaaagaaaacgagttcattcttagggtttctgataataagaggctggcgggatcgttcatatcctggctgatgagatacgcgggctttggcttctctgctcatcccgccgaaattgtgaaattagtagggcgggaggttgaatattttgcagagcttgacgctctcaagatggtcgccctcaaggtctccggtgtagccgtagcccacaacattgtgggtcgcatggaattcgtctcaaagtacggaatgaaaattgatgaaatcaaagcgataccaaaaaatggcttcaccgtttcaatggtccgatacgaaatgaccagatcaggtgtaacagggattatggctgttcactccactggacgggtttctgtatcaggtatgcttgccccatggatcattgattacgtggagaaaaacttacttgttaggtag

SEQ ID NO: 522483 - DNA, 894 bp, Stenotrophomonas maltophilia
atggaactcccattcgaggtgggcgcgctctacaaccgtcaaaatcagatccacggtgtatttggcgggcaacagcaaggcggcatttcgacacccaaggaacatccgctagtcattgcgttcactggcgaggccggcgtgtctcatggctaccatgacttctgggatgacgacgaagtctttcattacttcggcgagggtcaagtcggggacatgaagtatgtggcgggcaaccgagcgattggtgagcacgtcaaagatggcaaaacgctcgtgatgttccagatgatgggcaaggggcggccctaccggtaccttggtaggttcgtgtgcctgtcctcctacgttcaacctggcacctcagatcgagaagggcagccaaggtctgcgatcgtgttccgcttgaaatcactggaagcctcgctgggcctcgcggcgagcgatacggaccaagctgagatcgatgctactaccgatgacgtcagcgcgaccagcgcatggcgcaaaactgaagtgcggacgaagcaacgccttttccgagagcgcctgatcggcgtcgagaaggggtgccggctgaccggaatcgaggacctaagattccttcgagcgagccatatcaagccgtgggcagttagcactcatagtgagcgagttgatggcgagaacggccttctgctggccccgcatgcggacctgctgtttgatcggggctggattagcttttcgccaagcggtcgcgtgctcgtttcgagcgaactaccctctagcgtgcaaggtcgcctcggcctgaacttggatgactctattggacgcggcgaattttcacacagacagctcgacttcttagagtttcatcgggagactatttttaatagccgccgatcaccgcattga

SEQ ID NO: 522484 - DNA, 216 bp, Stenotrophomonas maltophilia
atgatcatgatcgacaccgcatggctggaagcgttcggcaaggagcttcactacctgttcgccatcgaccatggcgatgccggcatggatgagtgcctgctgggctgctacacagacctccctccacgcgaggcggcgctggcgttcggcaacgactacgacctggagcgcggcgatgcgctgtggcgaccgccgggcgtaggggcgcaaagttaa

SEQ ID NO: 522485 - DNA, 855 bp, Stenotrophomonas maltophilia
atgtggttgccggccagcggccggcactaccatcgcgggtactctgtgcgccggaacgcgatctgcgcggcgcctcggttctgctgtgatagcgccggccgccggccggcatcacatccaggccgaccacggccgaagcgcgcaagcggtgctgaacagcgaatggccgcgctgaacgttgattggtggtgccggccgctggccggcagccacgcatctctgcgcgggtcatgcggttgccggccagcggccggcactaccatcgagggtgctctgcgcgccggaacgcgatatgcgcggcgcttcggtttcgctgtggtagtgccggccgctggccggcatcacatccaggccgaccacggccgaagcgcgcaagcggcgctgaacagcgaatggcggtgccgaacattgattggtagtgccggccgctggccggcatcacgcatctctgcgcgggtcatgcggttgccggccagcggccggcactaccatcgagggtgctctgcgcgccggaacgcgatatgcgcggcgcttcggttctgctgtggtagtgccggccgctggccggcatcacatccaggccgaccacgcatacggatactcgccaatctgcccagcaagaccggcgcgcaccggattccccagaatgtacagcgcctgccgcgccagcgactcttcggtccttactgcatgatcgaagtagccgggctgccacaccgtacttcgacggcccgccaggcgattcagggcaagtgcgctcgacgatttcatccggcgcgcgacgtctggaaggtgagctgcacgcagctcgaacatccagtggacgtgatccggcatgacaacccatgcgtgtga

SEQ ID NO: 522486 - DNA, 294 bp, Stenotrophomonas maltophilia
atgaccagcgccaccacggccaccggccgcatccagctgctcgacgtcgacagctcgcagatccacagcatcggccacgacgctgccaccaacatccttgcaatccgcttctaccgcggctggggcgccaacagggtgccggcggccgtctatcactaccccaacttcagcgccgaggaattccaggcgttcaaggacgccgaatccatcggcaagcacttcggcgcgtgcatcaagccgttcccggagaagtacccgtgccacaaggtcgccgagcagcagcaggcctcctga

SEQ ID NO: 522487 - DNA, 609 bp, Stenotrophomonas maltophilia
atgttccacctgaagaacaacccggcggccgtctccaacgtgaacctgcgcattgagaagcacggcgatgagcggcacttggcggccgacctttccgtcaccaccagcaccagcaacctggtgctggaccacttcgacaaggaactgcgcaaggcgttgtttcgcaagccaggcaagggtgagcagcagtcgctgccgaccattggcgaccatctaaccgagatcaagatcccgagcctggagcccatcaaggtgggccacgaattcaaaggtttcgagctgcagatcgacggtgagctggacagcacgcagcagattttcctggtggacgtgaagctcaagaaattcgtcatcgccccgaaggaaggcggcagcgtggaggtgccgttcaaggcctcggccagcgtcacccctgacgaagtcgcggagctgaccgaagcgctgatccgcgaaaacgtcgtcctcactcttctgccccgcaggccagctaaaccacgcagcaggaagacatcgctgcctgatccccctgccctgcgcctccccctgtggcacagggctgacggcccggaaagacgggcaatcctctacccgcccttgagcacaacatga

SEQ ID NO: 522488 - DNA, 153 bp, Stenotrophomonas maltophilia
gtgagccgccgccttgcttacatcctcgcgccggtgctgaagtggggcctgatctgcggcttcgctgccgccggcgccgtcttggccgtcgtccacgacaactacctctcactgctgatggcccgcgcggtgctagccggctcggcctattag

SEQ ID NO: 522489 - DNA, 141 bp, Stenotrophomonas maltophilia
atgagcttcgaacgcgcaatccggaaggaaaccgcgcgcatgtcgatcgagttcatcgcctacggcgcgctgatcggcttcatcgtcggcgcggctgccgtgctcatcgcccaggacatgttgcgggcggtgttgtcgtga

SEQ ID NO: 522490 - DNA, 165 bp, Stenotrophomonas maltophilia
atgaacaccaacgttcgccagatccgcgagttccaggcaatgcgcgatgagatcgcctgcaccggcctgagcccggcgccgctgttccaacgcctcaatgccgagcagcgccggggcaaccgtggcctgtcagtggtcgacaacgcgctgcgcctgcgccgctag

SEQ ID NO: 522491 - DNA, 204 bp, Stenotrophomonas maltophilia
atgagcgccgaccacaaccccttcgtctacttgttcggcggcctgctcgcttcccggcccgagctgatgaccaacgccggccgctacctgcagcaactggaaaccggcgacgcccgcttttcccgccacggcgaggaggtgagcgacgaattgctggccggcctgcgccgcatccagatcacgaccgcaaaggagtcgccatga

SEQ ID NO: 522492 - DNA, 597 bp, Stenotrophomonas maltophilia
atgaaacgggatctttccgcagcaattttaattctggcagctgttgcagggacgtcggtcgcgcgggcggacgagcgaaacttcttaggaattcaggtcggcggcgcaccgccgcaggagtgcccatttgaggtgtccttcggaagccgaagctatcgatacccttctggccaggtgtgcgttacatctcttggctatgcgcctggcactgaccctattgatctgaccggaacaaaggagctgatcgcgcacatcgacagtaaaaccgcgcccaatggcgtggaaagcgtctacgtggatatcgttggcggcatcgtccaaagtgtgctggtctcaacggcgggattctccgtacaagagcagctgctctcggatctcactgccaagtatgggaagccaaagaagctggaacgcagcccggtgcagaccggtgtaggagcaaagttcgatcgaattgaagccgaatggcgtaagcccgacctcaacattggctaccgaggcatgggcaccagcatcacagaagggcatatttcgatccgaacggacgcggggcaagccgcgttccttgagaagtacggcgggcaacgatcgttctag

SEQ ID NO: 522493 - DNA, 366 bp, Stenotrophomonas maltophilia
atgtcagtgagcgagaaagaaatgcgcggcatggctgcggcgattgcagccgctcttggagccaggaccgggaagcgggttcgacgccttgcattggttgatcccgagaagaaccagcctgacgcgctgaacgcgctgcagcgtgacgtcctctattccaggatccgagacttaggtcgaatgtactcactgatgtggctggtgcgccaggagacgacccccgtacatgagataatggagtgccttcaggacgctgagctggaatccttgctcgccgagatggagcgaggacgagaatgcggagtcgagggcatcgcattcgatgacgctgggctagttagaaattcaatgatggagtactcatga

SEQ ID NO: 522494 - DNA, 804 bp, Stenotrophomonas maltophilia
atgggtatccaccagcccgccgcgcgaggtgttgaccagcatcgcgccggtcttcatccgcgccagcgaggcgtcgttgatcagatgctgggtatcgggtgtcagtgggcaatgcagcgacacgatatcggcgcgcgccagcagctcctccagtccaaccccttcgcccacgccggcaaaggccggcgatggatacgggtcgtaccccagcacggtgcagcccatgccgtggaagatgcgcgcggtagccaggccgatcttgccggtgccgacgatgccgaccgtgcgcccatgcagggtgcgtccgagcaggccatcgagcatgaagttgccctcgcgcacgcggttgtaggcgcgatgggtctgccggttgagcgtcatcaccagcgccagcgcgtgctcggccacggcttcgggggaataggccggtacccgcgcgacgaacaggtccagcgctttcgcggcggccaggtccacattgttgaagccggcgcagcgcagcagcacggcgcgcacgcccaaggcatgcagcgcgtgcagaaccggcgcgtccaggcggtcgttgacgaacacgcagacagcaacgcaatcctgcgccagcgctgcggtatgcacgtccagcgcggcatcgaagtacacgaacgcaaagccctgcccggccgcatcgcgctggttggcctcgtcgaggaaacgacgatcgtaggggcgggcactgaaaacggcgatctgcatggaggggcctggcgggagttccctgccgaccataccgcagcacctgccctggtgggatggccccggcgataa

SEQ ID NO: 522495 - DNA, 606 bp, Stenotrophomonas maltophilia
atgactgaccgtcttcgtacgatccgcctgtacggcaagctgggcgcgcggttcggacgcaggttccggctggcggtgaacagcccggccgaggcggtgcatgcactgtgcacgatgcttccgggattccagcagtacctgatgggtgcaaagaccaagggcatggagtttgccgtgttcaacggccggcagaacctgtcgcgggatcagctgcacgacccgccgggacaggatgacatccgtattgcgccggtgatggtgggtagcaagcgtgggggcgtgttgcagacgattgcgggcgttgtcatggttgtcgtgggcatcatcatgctttacacgccggctgcggcttatggccccaatgtcatcgttgccggtgccagcatgattgccggtggcgttgtgcagatgctctccccccagccgaaaggcctgggcgccaaagacacacccgaaaacgcacccagctacagcatgaacggcaccgtcaatacgcaggcgcaaggcaaccccgtgccggtcgcctatggcggccatgacagcaagggcatgttcatcggctcggctgtgatcagcggcggcatcctggcggaggaccagttttga

SEQ ID NO: 522496 - DNA, 1611 bp, Stenotrophomonas maltophilia
  misc_feature (1586)..(1595): n is a, c, g, or t
atgagtagtttggagattaggcgagatctgaagaaaggaaagatctggagccatgtgcgcagtaagtggcttgtggagactccagaagaaacggttcgccaggaatatcttctagtgctggtcaatgagtatgggtttctccttgaccagattggtgaggagatgaatctaactggaagaggttccgcttccgcacgtgccgattttgttctttggcgctcggtccacgacaagattgaagaaaactctccgttcataattgtggagtgcaagtcggatagcgttgccattaagtcgcaggactatggtcagggcgaaaattatgcgcgcatctgtggtgctccattctttgttactcataattccagagagacaaaatactggcgcgtaaaaaaagataaagtgcctgggtacaccgaggaaattgagaatattcctcacggtgatgcttcggacaaggatattgaagagctgctctcgaagctccgagcttttaaggagaaggagtttgcggaccttcttcataaatgtcacaacattatccgtaatcgcgaaaaaaaagatccagctgcagcgtttgatgaaattgccaaggttttgttcatcaaggtgtatgtggagcgctccctcctcactcggcgcagtaggcagaatctatttacggtagacgttctgaaggctcagattgccgaaaacccgctggataacttgttccaggaaacaaagcgcgcatacgcgactgataaaatatttgaagatgatgagcgcatcaatctaaagcccgcaacgggcgaggctattgtaaaagaacttgaaaaatacaacctctctgataccagtgaggatgtcaagggtgtagcttttgaacgttttttggggcgtacgttccggggtgagatcggacaattctttactcctaggacgattgtggagttcatggttcacatggttgatccgcaggagggagatgttatttgcgatcccgctagtgggtcaggtggattcttgattcgcgtatttgagatcgtgcgagagaaaatactcgaagacgctgatcgtgcatacaatgtcttcaaaaaggagattgaagcggacgcatccctcagcgatgagaggcgcgcgaaaaatcttcaggccaagtttaacgaggtacaggagctcatagatcagaagcgagtgggctcccgcatgtggatgctctctaatcgctgcatctacggaaccgatgccaatgatcgaatggctcgcacaagcaagatgaacatgatcatgcatggggacggccacggaggtgttcatcaccatgacggcttcttgaacgtcaacggaattttcgaagggcgctttgatgtcattcttactaatcctccattcggagctagtgttgagccaactgacaagattctagatgttgacatcaagattaatgcggcttcggaggagcggtatattaaggagtacggagatctctatctccaggctcaagatcgagtgagggctgctctcaacaagccaattacgagtctcttcgagctgccaaaaagtgataaaactaaaatcaagacggaggttctctttattgagcnnnnnnnnnnaacaatccatcgttga

SEQ ID NO: 522497 - DNA, 357 bp, Stenotrophomonas maltophilia
ttgtacgaagagcaaatttgcgccgagaaagagcggctggaaagtgcaattgatgctgctaaagaagccagaaacattgatctgcgaaaggagctgtcgaaacagctctcgggctatcttaaggcaatggatggtcggaaactgatcgaagcgcgccagttgctcaagcagcgatttgattaccccatttttatgtacgatgcagagaaggttgggatttccgcaaccggcgaagaaagcgataacgaactttatcccaatgatcgacttccggcggggctcgaaaagacttgtctcgaatggtacaaggattttctcgcggaccccaaatcaatagtcgatgtggagggtttctaa

SEQ ID NO: 522498 - DNA, 1410 bp, Stenotrophomonas maltophilia
atggactcaatgtcgatgcgggtgttcaggcgtccgagtagcattctttggtccgaaattgataaatgggcccctgattccgctttgcttcgtcttggtgaacttccggcaggttggcgtctcctgcgcgttggtgactttgctacccagcttgataacagagagaaggtgacgcctgaaggtgcttaccgaatggcaggtgttcggtggtatggcgaaggggtgttctatcgcgaaacggtcagggggcgggatcagagcgcaagttacctctttccactagttccaggggcgataatatacaatcgattgtttgcttggaaggagtcatttgcggtcgttcctaatgcgttggatggtggctacgtctcaaatgagtttccacagtttcatatagatccaaaggtcgcattggctgaatacttgtatttactgtttggtacaaaaaaaattatcgaagcggttaatgcagcctctgttggctcggctgccgtcagtcggaatcgcttcaaggaatccgaatttctttcgtttagggtgcctgtgcctccgcttaacgttcagcgaaagattgtggcttattggaacttggaaaattcaaaggcgagcgcgaaagtcgttgagtcacaagagttgacgaatcgggcgccctctctgctggcgaggtcagtagggctcgaaagtctagacgctgctcacggaagaagggcatttgtttcccagtggcgcagcactgaacgatggggtgtagacgttgcgcgcgagatttcgcggcggccggacatcgagatgggtggatttccagtcgtctctctctcagacgttattcttgacttgcagaatggctggagccctaaatgcctaagtcggccagcagaagacgatgaatggggcgttctgaagcttggtgcggttagcttcggttggtttgacgctcgtcaaaacaaggcgctcccgaaaaatttggcgccaagggagcagtatgaagtgctgcctggtgatctcattattagtcgagccaatatcgctcgatatgtcggagcctgtgcgctggttggtgaggtgcgtcgaaagctaatgctttgtgacaagctcttccgagtaatatttaagctggattcgcccattcttccaaaatacttgaatgaaattcttaaaattccgcatcttcgctggcagatcgaaaataatcttactggcgcttcaccgaccatgaagaatatatcgaagcctgcgttgttggggctcaagtttccgcttccacctctaggcgttcaaagtgaaattatatccgagatcgagaagatgcggggcgcggcgcgaattttgcgagaagatgccgaggttggtcgtggtcaagcgaaactaaatattgaaaaaatggctcttggacttagttcgatggagtga

SEQ ID NO: 522499 - DNA, 1620 bp, Stenotrophomonas maltophilia
atgtcaaggacgcggcagtacttggagtttgagggtctcttctcagaaagcgttctggggatttttcgaatcattcgtggtttcgctgacttgcgtgatctcgcggctgtgtctgttccttataagatgggagacgggaatcaggcgtttcaagttgtgggtcaccaacgagcggaatcagataggcatgcggaggatattaagagctatttggaacgcagtgagaatcgatttctaccggaggtgattctctcagttcgagtgccagtaaagctgctggtgagtcacggcgagatcgatccggatgagctcggattgggcgagagggttttcggcgtcaaaagtgaaggtggcagtcttgtagatatctttcgccgctattcaagctcaacaatgcgcatgcagcgtttgcgaattcggcgggtaaatttagataggctgagaaatgagaagcttatccgtcggatagatgggaatcaccggcttcacctcgcagagcagcttacggaagaccccaatactccaactaagtatattgctccattctgcatggttctgcttggtgacccgaagaatgaggcagatgacttcgctgaatctttgatcttccatactattaacagtaccgctcttccgcttgagtcggagcatgggttgcggttgctgctgggccaaaagccggagcacgcaatgacgccggacaacgagtttttatataatccatcattgcatttgactaggctgctatccgacaggttgcagggccttccccaaccggcccggcagcggtttggtgagcgacccttgacagcattgtgggaatcggctcgaaacttgatctccatgaacggagccatagccgttgatcggcaagctctaactaagttcgccgatgaattatttgctgctctggcagatgtcgccacacagctgaccttcaatcaggcagctctctgtaggacctatggattctttgaactcgcggcgcgcgtttggtgtgacgctgtagggaacgatcacgacgagcgggttcggtgggccgtgagttatctcgatcgactcggcaactggctcggcacccaagggatcacgaacttgctcaatccactctcgccagcagagcaacttcttgagacctttaaggtggcgcaattgcgcattccgagaagagttttccttgcgcgctggtatccgccgcaagatgccccgcgtgatgctcataacagggcgagattgcgcctggagcagcttaagcagacgctcgctaacgttagggctaagcacggtgtaagtcttgatttgatagatatggggacggaggaggggggcacatttgcgatccacaataggatgtatgaggctatcgcatcgtcggacataataatctgtgacctcactggtcataggcctaatgtttatgttgaggcgggctatgcattgaagcatcacgaggaaaataagcttatttttttgttcgagccggctaatgaggaagatcaggtgcctttcgatttgagtgcctacaaatacctaaagataaatcaagctgctgaaattccggcagtgcttgggccggagctgaaggccgttcttgaatctgcaggcgcgtctgtcaattga

SEQ ID NO: 522500 - DNA, 975 bp, Stenotrophomonas maltophilia
atgcggatagctcttattgttggtataaatcattacgaccacggcggatccttatatgggtgtgtcgatgacgctcacgcggtgcaagcggcacttgctcgtcatggtgatggatcggtcaacttcgattgcaaaatattcaccgggactggcccgaaagatcgcgtcgaccgatccttgttaaaggatcgcgttgaggatctttttaaggcacaggcagatattgcacttttttactttgcgggccacgggcatattgaagcgaccggaggatatttactggcaacggactctcgccgtggcgatgaaggactttcgctctccgaagtgctcgtgcttgccaataaatcaccggcacgcaacaagataattattctcgacagttgccactcaggcatagctggcacgcccccagtcgcaggagagcttgccagcttgtctgaaggattgacaatcctcactgcgtcggcggcggatcagtacgcaacggaagaaaacggcagaggtgtattcacaaatctactggtagacgcccttcatggaggggcggccaacctcactggcgacatcacccccggcagcatttatgcacacgttgaccaatctctaggcgcctgggaacagcgtccaattttcaaaaccaacgtacgccaatttgtgtcgctccgaaaggtcaccccccccatctcgctagatgacctcaggcgtataacggaattttttccgcagcgcggattcgaattcaacctcgaccctacatttgagcccgagatcaaaggaagagatcccggcatgcctctgccagaccctgaaaatacacgaaagtttgcgctactgcagcgatacaatcgcctcaacttggtcgcgccggtgaatgctccgcatatgtggcacgctgccatgcagagtacgtcctgcaagttgacggtgctaggtgagcattaccggcttcttgtggaaaaacaacgtttgtaa

SEQ ID NO: 522501 - DNA, 372 bp, Stenotrophomonas maltophilia
atggcagacaggaaggttgttttcgttgcattcgccattgaggacgaaaggcaaagagactttttgaaaggtcaatcactccttacaagctctcctttcgaatacatagacatgtcagtcaaggaggcctatacgtcggaatggaaagacaaagtccggactcgaattcgccgatcggatggcgtaatcgccttgatcagcaaaaactccttagcgtctagcgggcagaaatgggagatcgggtgcgcacgcgaggaaggcaagagagttttaggcatctggatctattccgatgatcgaaccatgattgaaggattgaatacggtagagtggacatgggacgccatcaagagttttattaacagcctttga

SEQ ID NO: 522502 - DNA, 207 bp, Stenotrophomonas maltophilia
atgaaacccctgaccaaaggcttcctgggaacacaggtccttgccgcgctctttggaacatcgtacttcgctttactagcctatcgccgcaatccagatgccctcaacatcggactccggatctggggctatttcgcgggcatcttcctattgcttcaggccttccttgcagtgaagcagtggtgggaaaactcacgcaggcaatag

SEQ ID NO: 522503 - DNA, 597 bp, Stenotrophomonas maltophilia
atgaatgccattgccgatctactcgaccaggcacgtgctggcggaaacttcaattcagacatgggtttagccgcgcggctgggcgtgtcgcgccagacactacacgcgtggcgaaaaggcaccgcgccgatcccggatgagcgaattgcgcagatcagcgagctgggcaagctggacggagccgtgtggatggccaagattcatgcggaacgagcgacctcacccgtagaacgcagggtgtggagatcagtattggacaggctgagcgcggcggcggcagtgctggtgctggtagtggtcgcagcgccaggcgtcgcacgcgctaaagctattgattcgcaaggcttttcggcgagtggtcagccgcattctgtatattatgttcaaagcatccccggggacgctggcgtaccgttcgcctcaatcccctcgcggcctggcagctacggcttcctccatcgtccgatcagggtcttatgcatgccccaggcgatccagccgcagaccaagccgaccccccgcgacaatgatctcttcctcttcaaaggcggctccattcagtccttgataggtcacgaaagccaacgctctcaatga

SEQ ID NO: 522504 - DNA, 174 bp, Stenotrophomonas maltophilia
atgacacgttccgaatggaaacaggcgtggcgctatgcgcgcaattaccgccgccatgctgcgcatttcgtggtgcgttcccgctcgtactcgctggccctctcagcactatttggccgcgaggcgcgaagcgccgagctgggcttgtctctctctccgacaagtgacaagtaa

SEQ ID NO: 522505 - DNA, 180 bp, Stenotrophomonas maltophilia
atggtggtggcactgacccgggcgagggcggtggcactgatcccggtggcggcaccgaccccggcggtggtggtacgaatcccggtggtggcggtactgggccaggtggtggtggtggcactgaccccggtggcggtggtggtactggccccggtcccgaccccaagccgtgccctgtag

SEQ ID NO: 522506 - DNA, 552 bp, Stenotrophomonas maltophilia
atggagatgattgcatcgcatgcgggaaacacccggggcgccatctattggcacttcaaatcgaaagaacacatcctgagcgtgctgacggagatggagctggcgccctggcacggcaggctgcgctgggatgccgtgaggaagtcggacgagccgctgaggctgcttcgcgatgaactcctgaagtccctgcaggaatttgcacggaacgttcgacttcgcgacatgttcgaggttcttcttcacgcggggccctcggccaatctcgatggcgtgcgcctgattgcccagcgcggcgccctggtggaggtgcacacactggaaaaagtacttcaacgcgcggatgaacttggccagctgatcgcaagaacggacatcaccattgcagcccgttgcctgtataccggcatcgccggcgttctctatgggacgatcctggacccggaggaattcgacatggaacgcgatggggcgcaggtactggactcgttcttgctgttttttgcaccgctgcatgcgctggcccccgcagaatccacgatcacacggtag

SEQ ID NO: 522507 - DNA, 222 bp, Stenotrophomonas maltophilia
atgtcaagtcagaatgccggcgagggcccaatccccaactttcagttccagctggatggcattgctgcaagccgctttgccgatgaacttgaaaagctggcccgctccattcgccaaggccgcatcgcccatgttggcggcggaatggtcatacagccctctggctgcaccatccgaatagagagcaacctggaactgctggtgctgggcgaagcgtactaa

SEQ ID NO: 522508 - DNA, 471 bp, Stenotrophomonas maltophilia
atgtaccggctgacgaatgagccagacttcgttgaaatcgtagccacgggcgagcgggttcccagtgggcaccgcctgtgggatgagtaccagcagtgggtcgctgaagggaacacgccacttccagtatcaccaccgtaccagctgcattcaccgcagcactaccagacaattcgttctgccgcttgggactggatgactagctgggtgaaagagcggcgctacgacaccatcgaaacgtgctgcagctacttcaacagcagcgtgccgcgctaccgtgacgaagcccgtgcgatggttgcctggcgcgacgctgtgaatcaggagctggaggcgttggttctggccgcgcctgctggtatagaaacctgggatcaggtccgggctctgctgccgcagccggaggcattcaactggcccggggaggtctccctgccactgggcaccggtgaatcggcggtgctggaatga

SEQ ID NO: 522509 - DNA, 351 bp, Stenotrophomonas maltophilia
atggacgccatcgagaagcgggcgcgcgcggtggagactcttgctagggctctggcagatgagtaccaagacgacagcttggctcgcgaggtggtcgtgagcctcaaggcaggccaactggagctgttgaacacgagaattgcgatccgagccatcatcgctgcgctcacgccgcccgaggggttcgtgctggtgccggtggagccgactcgagaaatggtggagtgcgctgtttacgcgcaagagccatctgtgggttcgccggcaggcgggagcaacaacgcgaaccgtcttcgccgcaaggcaaaacgtatctgggcggcgatgctcaacgcgagcgggaagtcatga

SEQ ID NO: 522510 - DNA, 264 bp, Stenotrophomonas maltophilia
atgagctaccaaccattactgcagaacctgctgacgagttgcgtcgctgacggtcgcatttcggtcaacgtggcccggcggattatcgctgaatcggagacgccagcggttctgtggtcgccgatttccctcgcgccgcaggacggcacccggctgatcctgtgggactcggtgagcaagcgtccggtgttcgccagctggcgcgggggaaactcggcgatcactcactatgcggccgagccggccgggccggaggtggcctga

SEQ ID NO: 522511 - DNA, 876 bp, Stenotrophomonas maltophilia
atggtcttcgaccgctacccgaacggcggcggcgagatgctgctggccctggcgctggccgaccacgcgcacgacgacggcacgcacatattcccgtcgatcgcgcgtctggccgagaagacccggcagtcggagcgttcagtgcagtaccagctgcggcgcatggagcaatccggctggctggtgctggtgaacgccggcatcggtggccgtcgcagtgggttcggtgaaggtggtcgtacccgccagtaccggatcaaccctgaatggatgaagggtgcagaaattgcaccctttgcaaagggtgcaaaacaggcctccgaagggtgcaaaacgacgcaggaaagggtgcaaaacggcgtcgaaaagggtgcaacagctattgcacccgaaccaagagcaaccaaaagcaaccaagagcaaccctcacaccgcgagtgtgagcgcgaggccgatccgctggcgctgaccaccgggcaggtcgaccgcgagctggccggtttcggcatcacgccgcccggcgtcgaccgcgagcagctggccaggttcgtccgccaccgcgccgccatccgccgcccgctgtcggtccagggctggctgcaggtccgccagcagctgctggacctgatcgccgccggtcacgacccgaacgaatccctgaagcagacgatggccgccggcctggcgctgcccgtgatccctgttccccagcaatccgcaggtgccagccatgcaatcgatcaactcggttctgccgaccgaatcgcccagctccagcgggaaatcctcgacgcacgccgccacggaggcggtgatcacggcgctggcgacgagcgagagcgaatcttcgacgccgatttccacgtcgtcggctga

SEQ ID NO: 522512 - DNA, 432 bp, Stenotrophomonas maltophilia
atggcaaagcaatcggcactgttctgggcgttaccgctgctcgcagcggcgttgtcggcttgttcaacagtcccggtgacggacacgacggcgaaggctgtgcctgcggagcgagtctatgaggcggactatctgtctccgtctccggaacgcaccgcgacaattttcgttgcccgcgacaagggactgctggggtctggctgttcgcacgacatctctttgaacaacgtcaagatcatgtcgctcagacagtcggaggcagcgactttgcatgtcgcaccaggatcatattttctaaagctgtctactggcggcggcctttgcgccaacatctcaacctcgcagaacctgacactagctgcgggagagcgacagtcttatcgcgttacgacgccgtctgacttcaatcttcgcctcactcgcgaggaatga

SEQ ID NO: 522513 - DNA, 225 bp, Stenotrophomonas maltophilia
atgagcgccgccttctccctctctagcaagactcgaattccgtatcgccgcagcttccgaccgtcgatggaagacctagaagcccgaatcatcgcggcctggttcaaccactgccacgcggtcgccaagggggattcggccgagcaatccatctatacgaccgtgctgcacgatcttggcgtcatccgcttcaaggcgctgaagctccaaggcggtgccgcatga

SEQ ID NO: 522514 - DNA, 183 bp, Stenotrophomonas maltophilia
atgaccgaccacgacttcttcgtcgccatggccgtcggcatcccgcccatcgccccgcccgccgcaccggcagcgacttggatcggcatcgacctggccaacggccccgacatgcacgccgaggtcggcatcacggccgacggcacgttctacgtcgccaacaaggaggagaaccatggataa

SEQ ID NO: 522515 - DNA, 243 bp, Stenotrophomonas maltophilia
atgcgccacctggccatgcccttctactgcgctttcatcgtcggcctgatgctggcgctgctcgcgcgcgccatctacaccggcgcccattcgttcgtgttggtcgccctggtcggtatcggctacttcgggccggcatgcgtcatcgaaacccgccgctgctggccggcattccgcgccgaaattcagcggcgctcggccacacgacagcgcgcgccactgcctgccgacgacacccactga

SEQ ID NO: 522516 - DNA, 216 bp, Stenotrophomonas maltophilia
atgagcaataacctcgatcgataccgcgcctccggctcctacaaagacactacttacgacgtcgctgtagatcactggcacggcggcgcgtacgtggtggccgaagtcaacgttgaaggtcttccatcgcgcgaagacaacgatcacagcttcgataccttggaggaggcctttgaggctgcccatgcgcttgctcgccatctgatcgatctgtaa

SEQ ID NO: 522517 - DNA, 213 bp, Stenotrophomonas maltophilia
atgaccagcatcgtccgcaacaacctgctgacgcgtcagggatacgccccgtactgcggcgaagttcgctgcaccgctggcatgccccgcaccacctgggacggcgagcagttccgctgccgatgcggctggcggtccagctttcctgccgatttcatcaccgattacaaagcagcctggccgcagctccgcgctgcgctggccacgaactga

SEQ ID NO: 522518 - DNA, 3018 bp, Stenotrophomonas maltophilia
gtgggtggtccgtacaccatcaccatcaccaagtccggtgaaggcaccaagaccgaagagggtgtctacctgaacctgaaccaggtcaacaccgtcaacgccaacctgggcggtgacctggctgcgaccaacctggacgcggtgaacgttgttgcgaccgccggcggcctggacctgttcagcgccaacaagatgggcactggcagcaacgtgacccgcgaaacgatggacgcgctgccgtcggccaaccgcaacatccaggactacatccgcctggacccgcgcatctcgcaggtcagcaaggctgacggcgcgatctcggccggtggccagaacacccgctacaacgccatccgcatcgacggcatcagcgcctccgatccgttcggcctgggctccaacaacctgccgaccgagcgtcagccggtgtcgatggatgccatccaggaaatcaacatcgacctggccaactacgacaccaccatcgccggcggtaccggtgcggtgatcaacgccgtgaccaagtcgggtaccaatgagttccacggcaccgtgtacggttcgtaccgcgacaaggacatgatccgtacgcgcctggaaggtgacacgacggacttcaacggcttcaaggacgagaagacctacggcatgaccctgggcggcccgatcgtcaaggacaagctgttcttcttcaccaactatgaaaagtacgagcgtagcggcggcggcgtgagcctcggcgaaaccccgtacaacaagccgaacggcatcagcgacgccgacatcgcccgcgtgcagaagcgcatgtccgacctgggctacccggttggcggcatcggcgcgctggacaacaagacctcgatcgaagagtacgcgatcaagctcgactggaacatcaacgagaaccaccgcgcggccctgcgctacaacaagatgaagcaggacgtcgtccgcttcccgcaggtcaacaaaagcgccatctcgctgagcgacttctggtacacccagccgacccagtacgaaacctggatgggtgaactgttcagtgactggtccgagaacttctcgaccgagttcaaggtttcgcacaaggactactcgtccaaccgcgttgctgcctcgcacctgccgcagatccgcgtgcgcttcggcaacaactcgctgtacctgggtaccgagcagaacacccacaccaacatcgtcgagtcgaaggaactgagcgccttcggtgccggtacctggtacatcggtgaccacaccgtcaagttcggtttcgattacaccgacaacgacctgatgaacttctacggccgcaacctgtacggcgcgtacgagttcgccgatctggctgcgtttgaagccggtaccccgtcggcctaccaggtgcgcgtcccgcgcgccggcggcagcgttgacgacattccggccaagttccacctgaagaacaccggcctgttcatccaggacacctgggcgatcaactacaacctgagcctgatgttcggtatccgtatcgacatgccggacttcagcacccagcgcctgtacaacccgcgcatcgaacagctgtacggcttcaacaacacccagctggtcgacaagaagctgttccagccgcgcgtcggcttcaactacaccttcgacaccgatcgtccgacccagctgcgcggtggcgttggcctgttcggcggcgctgctccgaacgtgtggctggcaggtgcctaccagaacaccggcctgaactactccgagtacaacctgacccgcaacccgggtggcttcagcttcgacgccgacaacccgtacatcccgaacccgtcgctggcctcggcccgccagaacgttgacctgatcgctccgggcacccgtctgccgtcggtgtggaaggccaacctggcgttcgaccacgagctgccgtggtacggcatcgtggcgtcggctgaagtgctgttcaccaaggtcaaggatggactgtacttcgaccgcctggacgtgatgaccccgaatgccaaccgttcggtcggtcaggacggtcgcgcgctgtactggaacgactacggcatgaatggtgccaatgccggcccgaacggcatgcaggctggccagaagaatggtcgcgcctgctcggcgaccgatcggacctgcccgggtgaccgcgtcaaccgtccgggtgacatcggcgacgtgatcctgctgcgcaataccgacaagggtcgcggttcgcaggctaccttctcgctggccaagccgctgaccgagaactggggctggtcgctgggttacacctacacccagtccaaggaagtgagcccgctgtccagctcgcagaacacctcgaactggaacaacacgctgagcctgaacgccaacgacaacgttgcgtacaactcgcgctacgcgatcaaggaccgcatcaccggtaccctggagtggaagcacaacttcttcggtgacaacgccacccgcgttggcctgttctatgaaggccgttcgggccgtccgtacagctacgtctactacaacgacgtgaatggcgacggtgccggtaccaacgacctgttctacgtgccgaagggcccgggtgacgtgatcttcaccggcggcgccgacatggagaagaagttcttcgaatggctggcgcagaatccggaactcgaggcctaccgtggcagcgtggtcccggccaactcgcaccgtgccaagtgggtcaacagcttcgacgtccgtatcagccaggaattcccgggcttcgtgaagggtcacaagggtgaagtcgccctggacatcatgaatgtcggcaacctgctgaacaagaagtggggcctgatcgacgactacggcttctacgccacccgtcgcgttgccaactactcgggtatcgacccggctaccggcaagtacctgtacaacttcaccggccgtaccgacaattcctcgatccaggaaaacaataacgacaagggcaacaccgccgtgtcgcgttggtcgatgcagctgaccctgaagtacaagttctga

SEQ ID NO: 522519 - DNA, 258 bp, Stenotrophomonas maltophilia
atgcgcgatgcagcagctgccctgctgtggtccggcgatggcgatggcctgcaggtgcgtaacccaagcgcgtaccacgtgtcgctgagttcgttgacgcttgccgacggccgcagcgtcgaggtggacatgatcgcgccgggagcacaggtacgctatgcactgccggatggcgcagtcatcccagcgtcagtgtcattcacatggctggatgactacggcacacctcgcgattcggaagcccgcgttgagcggtag

SEQ ID NO: 522520 - DNA, 798 bp, Stenotrophomonas maltophilia
ttggggcttcagtctctgacgatgattgcacgctcaagttgccgccgaaatattgacaccaggctgattcgccttttgatgaaaagacccatcagaggagatcacaatgaaaaacatcccacatccacttttgctcgccacaacggctgcgagcttcgtcaccatgctcgtgctctggccgaactatggagcgacgggcaatcagctctctgcatacatggcatcagctgcccttgcactggctctgtgcttgacgcgcttgaagaagatcttggtggcagagcgagtaaaggccaagcgatgaggtctcgaggctttgcactcgtcgagctcagccttgtcgttggccttgctgcgatagctggtgtaggtgcctggatggcgtttggcccaacgtccgctggcactaggatccaacaggaggcggcaaatctcacccaattggctgacgccatcgcttctgacttcgccgtcgcagaagggcgttatcagaacgtcagcgcagcaagcgccgttaagcgtgtgttggccccgactgcctgggtagtcggccaggaactgcactcccaaagcttaggcaagatcgggctctcgtccattgatggagggcagggcttccgaataaccgcgactgcagttcaggccgagctctgccctggtctcgtgcagaactctgccagggcgttttctaaggtccacgtcaatggcgtgctggtctactctcaccgatctctgaatcagagtgctcttgcagagagctgtgctgagagtggggaagtcgcgtttgaccggatctag

SEQ ID NO: 522521 - DNA, 486 bp, Stenotrophomonas maltophilia
atgagccttcttaccaagttctccaacatcttgaaccagcaaaacaagaaagcggtcgatcagggactcgatagcatccatggtgaccaagtcgctcaccaggccgaccgggcccgggactatcgtggacaggcccgcaccgctcagctccagaacgtgcagctcgcaaaccaggttcacgatgcaactgcggagcttgccgtggtcaaggcacagctggcaaaagagcgagagaagacgaagctcttcgaagactgcttgattggcgattttgctgtgatccaatcgctcgaaagcgtgatccgcgtgcttcgaccattcgatctgaatgaaaaggcgctgcgggagcttgttaacgacaaggtgagcaaggcgcgggtcaatcctgaaactgctcatagcggcaggaaccgtctgacaaacttccaagagggtgatgagttttctgatcaacccgatggcggctttttctacgagttctactga

SEQ ID NO: 522522 - DNA, 819 bp, Stenotrophomonas maltophilia
atgagtatcagtgattacgagcgaagaaaattattggaaaaagctgcaaagcttaaagctgaaaaagaagacgggtcatcttttccaactcctctaaacttgcagcaagttcaagatcggaagatggatcagcgcttggaaaagacccaggtcgcggccaaggcaactgcacaagccacgagcggatttgccaaagagcttgcggccaagactgccaagcttgctcaggaacaagcgcagcgtgccaaagcaaaggcagatgcttggaggcaagcacaagatgcgaagcgaacagagcacgaagaggttaatcggatccagaatgctgagcttgatcgggaagagcaaaacccggccatcgagaacacagctgttgccaatccccaagcgctatcgaagcccactttcaagatcctggcttccatagcagtcttcaccgctcttttaggagcaggtgtatggttctggactcagcacgagagcgagaagacccctgagctgcgccaggtcgatgtgccttccacactgcctgttgcgccagcacctcaggtccaggaagcgcccaaagcatctgagcccgtccaggtcatagagcctgtgcatgagatgtctgtgacgccgagtgtcgaggagcagccaaagtcggttgaaccgaagctccagaaggtagaccgatcacctgcacccattgcgattgttcgcgcacccaaaaaacgttcagagatgcgacaacagattgaacaacccaatacaaagggaagtgattgggtagacaaagctaacaatgatctcgatcacttcgcagaacaattaaaataa

SEQ ID NO: 522523 - DNA, 1077 bp, Stenotrophomonas maltophilia
atggagacgacagacaaaattaggatcgagcaagtgaacgaagcgaagcaaagttctcttgatgatccgattgcgaatttcagccaagccatctctgaactttcggctcaccaatcattcaatctgccagcaaaacttcgtgagcatttgagagcgatgcagacctcttgcccgatctgcgcgtctgacttcacccagagatcgtcaatcgtcgtcgctcagatcgttcccgttgagcttggcggcccggatgacttctcgaactgcttcctgtgctgtgagcgctgcaatcgaagacgcggcacttcagatctgctcagccttggcgaaccgttctgcagcccagctgctgccccaccccttccatcgcacggccgcgccctgggcttttctccaaccgacttggtgcagcggcgtctggaattgctagctcgctctgccaaccactggacgcctcatacccgcaattcgatgaagtgcactgtgctgaggcacctggccaagcgttgggctgagccacgctttcgtgtcttcgtccaccattcgtctgacctagccctcattggctttacccggcgctccggtgatggcgggagccttggtatcgccaaggtgctgaccaagtttcagggtgcccgcctagcgctggtgggagaagccgtgagggtctaccaggtagatccagggcgcttcctacccttgatctggtcactcatcgagctcaacgcactcgtcgtgcctgtgcccctcccaagcaatgacgcggtagctcccggtagcgagtggcaagacttctggccggaccatgttcggtcagtcgctgcactcaggtcccgcctgaggcctggtcatgccagcaagttcggtgagctcgcccgctgccctgatgcaacacgcgcgctatctaacaagcctgacgcactgcggaagcgtcggaaaagtgccgcaaaagttgagaccaaccgcagccagcggctcgctctctatcaccaaaatcggatcaaggatgctctccaagacggcgcttgcgccgtcctggaggctcggctagtagcacttcaagacctcataacttaa

SEQ ID NO: 522524 - DNA, 759 bp, Stenotrophomonas maltophilia
atgaatgagttgctcccagggcttgatttttccggctacatccaaggcagggccgagatctgcaacaggattaggagaggctttgatgaaattgaagatgcgataaaaatggccaaggatggcaagctttttgatcggagattgcacgagggcaaacgatatctcagtcgcacagagagcgagctgatcgacactattgatcggtcagcatggcgctacttgatggaacaaagtggactttggtcgtttcttaatgatgcaaggcgcgatgaatggacgcgaggattgggtgggtatgatccagttcctgagttcagttcatataatgttgaggccacttttcgcgaatactatgaatcgcgggagcaaatgcgagacgacggactaagggatatttttttggaacttagtcgtgattataagtgcaatgagcatcactatctcgcggaaaagtgcattgttaagttgtctgactggactggtggctttgatcaatcaagtgtcaatgttatcgatgatttggcaagggtcatgtgctcacttgatggaaagccggagttcgatcatcgaatcactacatttaggatgcttacacagaattgctgggaggacgcaccttggaatgattacttctcattgaaggtattcaaaaacaagaacggacatatcaagtttaagcgactggatctattagaaagattgaataatgagattgggagggtcttttccaatgcactgcctcccgaaattaagttatga

SEQ ID NO: 522525 - DNA, 825 bp, Stenotrophomonas maltophilia
atgctgaaagagttccccaagccgttggctgccaccattggtgatgtcgttggctcctactactacagtcaccgacgcttggagacgatgctttatgaagcaggcgcttctggcgatgttcctgagggaaattgcgttgataaggttcaaaattggcttgtgagagaagggaaggaggatgtctctaaggccttcacgatccttggcaagctcattgaaacgctgatggatggtgaggtctcgacctgggaccccgacaaagagctcactgctcgcaagcgaatcaacgaaattcttgctcgctatcaactgtcctatggatttggcggccgcattctgggcgctcactctgtcacagctccaagcaaggcgttcggcgatgctttgaaggacttctcggtcgcagaggtggaggaagagtttgagcgagcggtgagattcattgacagtgatccggctgctgccgtcacggcagcatgcgccattgtcgaagctctctgtaagcactacatcgccactgagcgcctggatctacccacgagtcagacagtgaagcccctgtgggttgtcgttgctaagcacttgaagctgtcgcctgagcagctggaagacgatgacttgaagcgtgtgctgtcggggctaagctccatcattgatggcctcggtgcttatcgaacgcatgcgggcagtgcccacggccagcacaaacgcgcctacaaggtcgctccaaggcacgcacgtcttgttgtccactcagctcattctttgtgcctgtttgtggtggaaacttggcaggcccgggaagccctggccaaggggagatag

SEQ ID NO: 522526 - DNA, 864 bp, Stenotrophomonas maltophilia
atgcggttgtcgtcaagggaacaggggaagttcgtgcgctctaccatttcaccggccgtcctggccgcactatgcgtcttttttgtaggttgtcagcaggacgcggcttcaacaacctccggtcacgtggcaaacaagcctccgattgtcattacagaggagccttgggtaggcaaagccttcgatggtgagacggttcgtttgaatcctcccatccggttctaccaggaactcatccgggcgcgcaaccaggtggcaaaaggcgagttcgaaaccaccgcggactatgagaagcggaaagcggagctatctctacctgttggcattgatgccggcaaagtctatctcttcgaattcacgacgaaggtcaaatatgatgctgatcaaggggcgtatacagcggatcccagcttttgcacggactacgatttcaccgccttgaagaacacattggcttgccgcctggctagtgtcgagggtgcgccgctagtcaacaggcgggaggtctacggacagacccaactgtttgagaagaagacagacaccgagtattcggtgctcatgtccccacaagatgttcgtaagatcgctaagcgttcctcccaatacgcaagctatgcgttgccctcgaagtgtccagtggccgtagaggaagctaaaaattacggcccgattgccatggcttacggtgtgacctttgagcgacctgacttcgtcaagggagacaccatgcatctgcacacctatccggaatataagaacgaatgggacgtagaaaagataggcgtttttggcaagatgacatcactggtctgctacaccaacgacgagcacaagcgtgtggtctatcggcaggtgctctag

SEQ ID NO: 522527 - DNA, 738 bp, Stenotrophomonas maltophilia
atgtttttatatcactgcactgacagcgaaaatctttgtaaaattgcattagatgattttacgaaggacaatgtcattcgtggactgtgcttttctgataacgctctagatcactttggtgacgtaacgtatcgaatagagcttagagatgaggagaatatgctcactaccgatatgcttcacaacctggatgtatcaccaaccaattctattgactacatgtctgacaggcatggaaacccgttaattattaggggggaagatattagatctgctttcgagaaagcctgccttgaattcgattacgataaagaacagtgggagaacctgtgggcatgcgcgattgagtttgacgactgtagtggcaacgatgagcttattgaatatgccaatggagaagatccagcctgggatttgcagagcatacgcggccgaaccgcctatcatcttggtctggccggagctgtgatttcagatgagaacggaacttcatacatcatctcagatagcagccttcggcttgatcgagtcgaatacgatgacgagaacatggaggatcagtggcgtgtcgtggaaaggtgctcacatactaaaggcgctgatgagtctacgttgacccaaaaagagttccagacaaactcagtggaaattcccccgagcttcaaggaatgcgttgcaagccagcatagtcttggtccggcatctgtaacgcgagtcaccagttcccgtcgtctttga

SEQ ID NO: 522528 - DNA, 384 bp, Stenotrophomonas maltophilia
atgtctgtcattacaatgatcgcgggtgctatcagcactgcttcgcttgttgccttgatccactacgtttgcagtgctcacttcgagcctgaggcgttcgttcgccgcgcccacgtccaatcgggcatgtcacccctaaagtggatctactttggcctcgcgtgggtgggacttgcgatcatgttgtatggaggcacacagagcgcactcttctggatgccggacgactggggctggactgacgaagagggcgacatccaacctttgaaaaccttcattgcggccggagcagcggtgctgctgacgtttcctgccttaggcttcatctaccgtgcggcagcagatcgatgggatgccattgagcggaagagccctggttcgtga

SEQ ID NO: 522529 - DNA, 1101 bp, Stenotrophomonas maltophilia
atgagcccgccgatgacaaatgagcgcctgttgattgaagccgtggcagaaggacgagctgaccaggttcagaggctcctgctggtagcagacgctagaacgggaaattccgcagcgcttcgttgcgctgtggccacccaaagaagtgaaatcataaatttgctcttgccgcattcggatgccaaagcagacaactcttacgtgctgcgacatgccgtagaaataggtcgcagagatttggttgaaatgctcattccatacgctgaccccacggctctgaattcgcaagctctgcgctatgcggctgaacatggagacgtcgacatggtcgagctgctattgccagtctcggacccattggcagatcactgctgtgcattgcaggctgctgcggaaaaagggcatagcagagtcgttgacatgcttcttcctttctcagatctcaacgatcgctcacgagcattaggctgggctgcttttttcgggcataacgaaatcgttgaaatgcttcttcctatctcagatcccatggcagatcgttcaagggccttgctgcatgcggctgaaaagggagacaaagagatcgttgaaatgctccttcctgtctcagattttaaagcaaatggttcaagggcactgatgtatgcgtcagaaaatggacacaaagaaatcgttgaaatgctcatccctgtctctgaccctgagtcaattcgctatgctctatgggatgcctcgaaattgggatatctgcaaatggctgaaattctaattcctgtctcggatcctaagtctcataactcgcaagcattgggttgggctgcttttggtgggcatcaagaaattattgagttgctcattcctgtatctgatgtagacgccgcttgtgagagtcttgatgaaacggagtcggcgatggtaagagctgtcgaagcgaagttaaagatgagagagcagccagggcactgcggccactcaaagagcccaggcccgaaggctctgatgcacctacccaagttcaagatagagccccttcgccggggcttttttgtgtctcccatcggtcgccttgcgctgcgctcccaggtgctggcggtcgggtaa

SEQ ID NO: 522530 - DNA, 972 bp, Stenotrophomonas maltophilia
atgactaatgaagagcaactaattcaagctgcagcgtgtgggcaagtagaaatagttaaaaaactaattccagtatcaaaccctaaggcaaataactcgcaggctctgcgttatgctgcggaaaggggtcataaagaaattgttgaattacttattcctgtatcggaccccaaagccagcgactcaattgcatttagatgggctgctttcaacgggcataaagacattgttgaaatgctgcttcctttctcaaatccaaaggcaaataactcagaagcgctgagggatgccgcacgtgaaagccataaagaaattgttgaaatgctgcttcctttctcagatccaaaggcaaataactcagaagcactgcgggatgccgcacgtaaaagtcataaagacgttgttgaaatgctgcttccactgtctgatccgcgagcaaatgactcagaggcattgtgttgggctgcgggaatgggggccatagaaattgttgaaatgctgcttcctttttcagatccagaggctcgtgattcagctgcattgagggttgccgcatcttgtgagcacagggaaattgttgaattgctaatccctatttcagatcctaaggctcgtgactcagctgcattgagggttgccgcatcttgtgggcacagggaaattgttgaattgctaatccctatttcagatcctaaggcaagtgactcagaagcattaagggatgccgcatgtaaaggatacggagacattgttgaaatgttaattcccgtgtctgatgtggaagcagcttgcgaaaagcttgatgattcaaagatttcaatgataagggctatagaggcggaattgaagatgaaagagcttcaagcgtcaactgtccaaatcccacagagctttaaagactgcgttgatcaagctagctctgacagcttgggcactgcggcaactccaagagcccaggctaggagactctga

SEQ ID NO: 522531 - DNA, 591 bp, Stenotrophomonas maltophilia
atgaagatctgcatgctcaatggaaagggaggagtagggcgcacgactctcaccctcaatctcgctcactgcttgcagtgcacctacccaagttccagcgtctatgtcgccgacctagatgctcaaggctcatccctcgcctgggcaaggcttgccggggagacggccttcacggtgggtgtcgtgaagtcacgtgcacaacacgacttccacctcttcgacacagcaccaaagctgcctgagaacggtcttgttcccgaggccgacgtctacatcatcccaacgctcttggatgcagtgagctttgtcgtgttcttgaaaacaatggagctcgtgcgcaagaaaagcttgcctcacatcattgtggccaaccgtttcaatccggaccgctcagagcatcggcagcgcttcgcacagcttcctcccggggcgctgatcgtgagggatcgggcaatcttcgcctcgtgttatggctacggggagactgtctttgatcgggcgggggtgagagccagccacgctcagcaggacatcaaagcgattgcgcgagcagtgagaggctttgacagccgagcctggggcgatctatga

SEQ ID NO: 522532 - DNA, 147 bp, Stenotrophomonas maltophilia
atgttcaaatatcttttcaaccacgaaagcctgttaatttcactaggctctatggcaacgcttgcggcctttgccttgcttgggtgctacgcagcactgtccggaattggccgtttgatcagtagtgccctgggaacgggcgcatga

SEQ ID NO: 522533 - DNA, 816 bp, Stenotrophomonas maltophilia
atggcagcgaagagtgagcgagtagaaattcatctcgaagacaccagcttggccgttcaaaagctacgcgcaaccaaggtgagctatacggggcctgtgctcaatcagcatcactctttgctctggcagagcatcatttctgcatatatcgagcagaagaccgacagcattgaaattagtggaaatgagctgcttcgaaggatgggtaataaagccacttgctcgcagatgcacagacgcttaatcaagatgctcagggatctgagaagtggtgagatcagctatcaaacggcaacacacgactacatgggagggttggtctctggagtgaagattgcgcgagtcaacgttggcacgagggtgcgaaaagggaacatcacgataacgatcaacaacgaattatccaagctctttgatgatgaagttctggtcaatgatctgactcgtaaagtggcactggggaataatcaacttgcattgtggcttcacgacttcattgctactcacaaagttgttcctccaatctcgctattggagctaaaacgcctggcgcgttccgggttcgagttgaagaaatttaaatttgaagtcaagagggcgttggtagttttgtctgccccggagtgtggactagttaccggtttctcgattaataagcacaacgttctttctgtcagcaaatctcgcaccaacgtcgtcatccttgatcaattccgagcggcaaaggcttcaggtgacgcctcagcgtcctccgaaaagaaggggtcagtcttggcgcgtcatcaacgcgcaatgcgagcgaaggtcgctttatga

SEQ ID NO: 522534 - DNA, 465 bp, Stenotrophomonas maltophilia
atgaaatcacacaccgtattcgcgggacttttcctgctgagcattacgcagtcgtcctactctcaggaccttggtaacttggctttcgacaggttcaacaacacggccaagggcctgtgcggcccaagcatcatcgaatacacaggggtcaatcaaaaccgaactgatggccgcgttggcggatggaactacgatggagaggtgacgatgaaggtcacgtccgggcagaaggtcatcaccccgcccttgggtgtaggaagaatcactgccgtgtgcctgggagagtctcggccgatcttggtggtcatcgaagacaaggaaccttccaagcgatttttcaaagcttacgacgcgcggagtctcgccccaatcagcgagaaggaaggttgcaatttcgtgtgtatggaagaagctggcgtcaagatcccaccgaagcttgcttcgtttgatccgccgattgactga

SEQ ID NO: 522535 - DNA, 240 bp, Stenotrophomonas maltophilia
atgtctttttcagaacacttgcaattgaaggacggcgagacgcttcgcctcgacagctcgcgcgagacaggttttatggggaacgttgacgtcgacaattattcaatcctgagcgccgatggcgaagtggtcggcaaggttgaatacactgttgacactgccgtcaaaggcttgaaggtgacatacaaggtcgtccagaccgatcttgaaggtaagactgtcctgcaaaaattctggtag

SEQ ID NO: 522536 - DNA, 1041 bp, Stenotrophomonas maltophilia
atgagcaagacagacgactacgcgcgcaaatttgctgatctcgtgatccgcagccttgagagccaaacagcaccgtggatgaagccttggaagcccggcgaagtcccggctgggccccacaacggcgtcactaatcgtagctaccggggcggcaatttcatgaacttgctcatgacacagcacgaacgcggctatcagtctgctgagtggttgacgttcaagcagattggggaagccggtggcaaagtgctcaagggccagaaaggcacgtcgatccagttctggaagacgacagagccaagtgcagagcaactggctgaggatccagcggcaaagaagcgcatgcaggtcttccacttcacagtcttcaaccgcgatcaatgcgatggcttgcctgctcccaaagcccagcgccaggttcctgagcaatggcgacatgagaagtgcgagcaactgatgagcgattcgggagttccgttcaacttcaatggcggtgatagggcttactaccgtcctgacatcgatcagatcttcatgccttcgaaaactgcgtttgaaagccaggacggcttctatacaacagcccttcacgagctaggccacagcaccggccataaaaatcggttggggcgtgatttatcgggcaagtttggtagtgagagctatgctatcgaagagctgcgagccgagatcttctcctacatgaccggcgaacgcttgggtattggacatgaccctggtcagcacacggcctacatcaaatcctggatcaaggtcctcaaagatgaccccaaagagatcctccgcgcgtgcgcggatgcagagaagatctgcaatttcttgaagatcgcgcactacctggaacttcaacagagccatgtgcaggaccaagagctaacgggccaagagccccgtcaagaacggccggtgcgtaaggcaggcgcgaaaactatcgatcctttggcacccgaactgctcgacgatcagatcaaagacatgaagtcccggcgcaaagccgaagaactggcagtagcgctatga

SEQ ID NO: 522537 - DNA, 828 bp, Stenotrophomonas maltophilia
atgccggtcatcaacgtcatcggtccaaaatcgggtagatgcaacatctgtggcgccgtagggcctttgaccgaagatcacatcccgcctaaagcgctggcgcaaaacatcgctctgcgactcaaccatctcgtttctgagttgggtgcagagaaggcgcctcccggcaccaagatgccagacggcatcaagttcagaagcctttgtcagcgctgcaatggcgtcgtgttgtcacgctacgacaaggccctagtggcgatggcagaccaggtgactgcgatgttgcgaacaccgatcctgcttgatggatcgcaggccattcgagtcaagccgcaactcgtagccagggcagtgttaggtcacctctgtgcgctaggcatcgatcgctacaacgagggagacccgcagaaatttggcgagtatgtgctcaacgaccaatcgaccttcttgcgagattgtagagtctgctattgggtctatccattcgctggacgaacggtcgcgcgtgatctgtttataacttacatcgggactaagactgcctcgcaagtgatgatcatgaagtgctatcccatagcattcgcaatcatcgtcaataaggcattgccgttagatggttggcagccgccgtcgtttgacttttatgcctctctcggcccggacgatgaggttgagataccgatctaccttgatcagatccccgaccagatctggcctgagatgccgcatcgtgatggcaacatggttgcgatgctgggagaggctgcatacgtcgccaagctgagctcacccaggggtcaggtcctaaagaatcggcttaagccttga

SEQ ID NO: 522538 - DNA, 726 bp, Stenotrophomonas maltophilia
atggcgtcatttccgaccgccaaagcgtcacaggtcgtgctcaccataaggggaaacattagaggtcctataaccccctgccatgcacgatgttcagtattcaagagatcgacgaaatggtctctttgctcgaagcaaagcttcctggttgggccggaacctgcgacgagagccagtttctacggctgctttccggcgcggttgaatatatggcggcgggagcatgtcgggaggcccagcttcactgccttaaacgcaccggatgcatggtgccgaacaacagacaaacctgggcgtgtcagaacgggagaagcgacggcggcgcccctaggggggatttacccgcagggtccggttgatcctctgggccggcacgccacagggcaatcaaaggcgaggcttggcggcgacatttgccaagaccaggcgcgtcgtttgaaccgtaacgcctcctgtggagcggagcaaagtgagcgcgggcggtctccgttccggcaggcacgcagtcgcgtcagacaccactaccgtggagaactctcgggagttggcatcgattgcagtggcgaggatacaagagtccaaggccatacccgcaagcaccagcgtgctgatgtccagctttgcaagaagcaaggccagtggcgtggcaaggaaggccgaatgtttcggcttgagcaccgtgtagtggtccggcccgggaagtgtgctggatcaggaagaccataa

SEQ ID NO: 522539 - DNA, 930 bp, Stenotrophomonas maltophilia
atgaccaacccaacaggccaaaatccccccgacctgcctaccttcgacgctgtcgtggtcggcggaagttatgccggaatgtcggctgctttgcagctagccagggcgtgccgcacggtgctcgtgattgaccaggggcagccacggaaccagcgtgcagcaaaggcgcatggatgcttgggctgggacggggcggaccccgcccagatcattgaggtgggacgccagcagctgctcgcctacgaacgtgtgcaatggtcaaccgacgaggtcgtcgatgccacgggctcgctcgagatgggcttttccatccactgcgcgtccggctggcgctaccatgcacggaggctggtcctggctcacggcgtggtggatcagttgccccaagttccagggctcgcggagagatggggggacacggtcctgcactgtccttattgccatggctatgaaatttgtggatcgcaaatcggggtgcttatcacgtccaaagtggaggcagtggaccaggtcaaagctctttcccagtggggtgcgattactgctttccatgcgggcatgctgacagatattgagatagaggaattgtccggggagttgagcggcattggcgtgacgttggaggaaagccccctgatgagcgtgaccggcagagctgctttgaaccttgcagacggaagcgtgcgggaggtgggagctttgttccttcacccccacacccggctggcatcagaccttccgacacgcttgggttgcgcgatcgaggatgcaggatgcatcaccacggattcggccaagcaaaccaccgttccgggagtgttcgcatgcggcgacgcagcccggttcgctgggaacatcgccttggcagtgggagaaggggcactcgcgggcgtagcagcccatcggtctttgatgggcttgctcgactga

SEQ ID NO: 522540 - DNA, 375 bp, Stenotrophomonas maltophilia
atggcagacgatgtggaagcggtgagtgtattcctggtcgaggatgagccgagcttgatgtatgtgctggaggagtcaatcaagagcctgggcttcgctgtaggggagaaggccgcgtatctacccgaggctttagagcgggcacaaagcgaagccttcgatgtggcgatgctggacgtcaatctgcacggtcaagagtcctttcctgttgcagaccttctcatggagcgcggaatcccattcgtctttacaacagggtttggtgcaaccacgctccctaagcggtttgaaaaagccccggtgatggagaagcctttccggctcagcgatattcgccgcgccatcacggaacttcaggccgcaatgtccttgtga

SEQ ID NO: 522541 - DNA, 1143 bp, Stenotrophomonas maltophilia
gtgactgagttgcagcaccccaaagatgtgttcaatgacgagtcccggcagttcgcccttctggtcaactccgtcaccgactatgcaatctacatgcttgacatagatggcgtaatccggacctggaaccctggcggacagcgaatcaagggctacaccgccgaagacgtcattgggacgaacttctctcgcttctacttgcccgacgatgccgcagccggcgtgcccgagcgcaatctccggacggcagctactgaggggcgatgcatcgaagatgggtggcgggttcgccaagatggttcccgcttcttggcgagcgttgtgatagaccctatctgggtcgatggcgtcttggtcggatacgccaaggtgactcgcgacatcaccgagcggcatgacgctcaagagcggttgcagcaggtccaacatagccttcttcaagcgcagaagatggaagcgattgggaagctgactcttgggttggcccatgatttcaataatctattgaccatcatcgtcaactgctttgatctcattagcgtgcgtgtcaaagacgggcccgctgccaagctgattgagaccgctctgcgcgcggccgagcgtggcgcgcttctctctaggcagttgctaacgttcggccgaggccaaaagctatctcctgagcgcttggatttgactgcctcccttcgtcaatcccaagaaatcttagagcgctctgcgggagaggctgtcaagttggtcttcgacctccatgaggatcttccctgcgtatttgtcgacaaggcacaactagaggcggcggtgctgaacttggtatgcaacagccgcgacgcgatgcccaacggcggcacaattacgatttcgacaggcgcaagggaagcgcgtgatcctgcctcagccaatggcgccctcgagcagcacgtctgcttaacagttgaggatgatggcgagggcatcgcaatcgctcaccaggctcgcgttttcgagccgttcttcacaactaagccggtaggacggggtagcggactgggacttagccaagtttttggattcaccacgcagtctggtggttttccccaacttagcagcgccccgggcgaaggcacccggatcgtgctctgcttccccatccatgagccttga

SEQ ID NO: 522542 - DNA, 222 bp, Stenotrophomonas maltophilia
atggctaaccagaacaatcagcagaacgaccagaacggcgaacaccagaacaaccagcagaaccagcagcagaacgaccagaaccgcgaaaaccagaacaatcagcagaaccagcagcagaacgatcagaaccgcgaaaaccagagcaaccagcagaaccagcagaaccagcagaacgaccagaaccgtcagaacgagcgcaacgagcgcaacgagcgctga

SEQ ID NO: 522543 - DNA, 780 bp, Stenotrophomonas maltophilia
gtggccctagcatcacatgaagtgacagttgcagtcatgatcgactgcgacaacgtagccccatcaatcatcgactttgcacttctcatggcagctcaagctggtcgtgtgatccttcgccggggctatggcaacaaagctacgctcagcaattcctgggaacaagcgttggtccgtcaggcgttcactccctgcctccaataccaatacgcttcaaagaagaatacagctgatattgcgcttgctcttgatgctcaagaagcgctgttcgacaagcgggccgaggtcttttgcctagtcaccagtgactcggactttgcatatctcagccgcagactgagagaacgcggcgctacggtcttcattgtgggcgaagcaaagaccccagatgcactgcgcaatgcgtgcgaccggttcttcgaatggagccctgaacaagccgctgcgcaagcacctgatgcggagactccggaggccaaacctcgggccccagcccaacccaagcccaacgctgcgcccaccccgtctgccaagatcaaacgtcgcccacggttcgtcgtggaagccgtctccctcctggccgcaggcacgcctgatggaagggttagcgtgagcgctctgagccaatatttgaagcgtgccgactcagctttttcgcccagtgcatatgggcattccgggcttgtagacatgttgaagacctatgacctcctcacccctcacctggaggaaggcgggcattggacagtgagtctcgctgctgagcctgacgcggagtag

SEQ ID NO: 522544 - DNA, 381 bp, Stenotrophomonas maltophilia
atggcaatgacttacgcagaaattcagaagaaagagaaagaacttcgtgatgctctgcaaaagcttgagcaggacaaggagaagttgcttgctgccgaggcaaccaagcactttgaggacatccacggcaagatgtctgagttcttccagcacttcactgctgaacaaaaggctgaattgaagtcgttcttcccgtctgacaaggttcgcggagcgaagaagggcggtaagcagtctcaggaaaagggcagtgtgcagccgaagtatgagctgccgacaggcgagaagtggagcggtcggggccgcaccccgattgcttttcaggagtggaagaaagccaacccggatcacgaatatccggcatacccgcacaagtcctga

SEQ ID NO: 522545 - DNA, 1464 bp, Stenotrophomonas maltophilia
atgcgcatccctcacaatctcgttcgagctgcttccggcaacttctctttccgccagcgtgttcctggtgatctacacgcagttgtgggtctcaggctcatcaaacgcgctctaaacactgccgacactagctgcgctcgtatgcgcgcaaccgttctcgcgtcaagctatgctcaggcctatgacttgctgcgagaaagaagtgtggagaagttcggtaaaaaggatctggaagatcttgttgagcggctgagcaaaggtgcaggtcgaaatgatctcactttgcatcggactcaagccgccgatggcacgatcacagagcggtggcagatggatagcgaggaagacgtaaagctcttccgtcaagcgcaagcccaagcgaatgctgcggaagtcgcagcaatcggcgtccttgatcccactcccgttcggcggacacacgcttctcgaccccaagtcaccgaaaccatcagcctcgagaaggctcgcgatgcgtggcttgcaagcatcaaaccgcgcacgctacccaagacctacacgatcaagcttgcagcggtggaatcgttggtttcattccttgggccgaagtccaagctccacactgtgtcccgcccggacctggcgcgctggtatcagcaccttcgcgacaacggcgcatctacgccaacgctcacgaataagcaaagctatgtgggcggaaagggcggcttcttcgattggtcaattgcgtcaggcttctacccgaagggcgataacccggccaccgggcatgtgagctattcgctccgcgagaagcgtgcgcgcaggaagcttggttttaaagcatatgaccatgagcagatccagacgatcttctcacccagcgactttgaaaagctctcccaaaacgccaaatgggcctcgctgatcgggctttacactggtgctcgtgcttctgaggtgggccagttgctggtgacagacgtcttcaatgaagggaaattggcttgtatccgaatttcggatgagggtgaaaatcagaaggtgaagaccgaggtcagtcttcgcaccgtgcctctgcatccagctttgattgaactaggccttcttgtttgggttgagagccgaagagcggcagggcataagcgcctgttcccccaagccaaaggcactgctctcaacgggcaaggaaattggatcaccaaggcatttagccgacacttgtctgtgattggcaaagactggccgaaggctaagcgtggcttccattcgttgagaaaaaccttcatccaggagttgcaaggacttggtgtgtcttctgaacttcgcgctcaaattgtgggtcacgagctcgatgacgagcaccatgcgacatacagcagggacttcactgccgcagaaaagctcaatggtatgggcaagcactcgcccggccttgcggcgctaaattacaagttgagacttggtccggactcaatgaattga

SEQ ID NO: 522546 - DNA, 894 bp, Stenotrophomonas maltophilia
atgcgcaaactgctttttagcttactcatactccttacaccaacaacttcccttgccgctcaagaaccctattggacaaggctcacttcatcgaatttcctagtgagcccgagcacagctcacgctcaattctttgatcaaagttcaaccggaatcatctatggctcttcaactcctgcttcctatggagaagtcgtgtcaacgagcatctcgttccaagccaaaacatcaagatcaaagaagaatccacgcggacgtatctatcgctttttccacccagctcaagaacgggtctggaaaggcgtccatcctgatctcagagaaaagaccgaagcaattcaggaggtgatggaagcggaagggtttgatttacgtcccgtagaaggttacagaagccccgaacgccaagccgacctcctcgcctcagcatcaggagtcaccagtgttggagcctggtcaagctgccacaactatggtttagccttggatgccgccatctatgtcaatggaaagccaagctggaatttgggcgatccgcacgtcatcgcaggctatgagcggttcggcgagctggccgaaattcttggcttgaattggggcggccggtggacttctccaaaagactacccgcacgttgagatgaaagccgagtgtggtcagtccaaatgggcgaaacgacacgggcaaaccctacctaagttcatctcgagcgcaggcgaaccatcatctctaattcttgaacgagcgctgatttcgacttggtgcccaactggaatggaagccacatgcaccgctatgggcaaagatcggttcctttcttgggggtggacagttcagagccaaaacagagcgtgcacagcacgatccaacctctacatctacgctctttcctaa

SEQ ID NO: 522547 - DNA, 1032 bp, Stenotrophomonas maltophilia
gtggattacggaaatctccccgagcaatttcgtttcagtcacaacttctcctttttcctgcacgatcagctggtgtcgacagtaaaagagggggcgaaggcggacatcttttctgtccaggtggttgcaaacgctcccattcaagagggtcttggcggtgatgagctattcaagtggatgacggaaaacggccatcgtgacgaaattaaggagatgtattacaagcagctcacggcggcattgctcggggacttcctaaattttctctatgaggctttaaggtgctctgctaaaggcaagctcacggtcgcatacgcactcttgaggaagcccttaaaagagaaccttctttaccttgaatggttgctcgctgatcccgaggacatgcttactgtgttcgaaggtgaagagcttaaggcgaagtcgatcagtaagatgagtgagaagaggaaattggagctcatcacacttgcgatggaaaaaacgtcgctagggggctggatgcagcccaagtttatgtatgaccttcgctacaacaagcaattcgcttttggctatgaagacctttttcaaaaagcaaatcatcttgtaacaacctttccaggtctagagacagaggcggctaacttcaacttcatattttcgacagaagaagcctggctgactcaatgggagggcttttatagctacctcccgcttgtgatcatgcacacgattgatgttgttgaagctcttgtgtccagcttcgccaaaagacgagacgatgcattggatttaacctttgtcagaacgcggatcggatttgcgcactgggttgatctccgttccaatggtctgggctctaccgaactcatgacagagatcagatctatgcttgacgagctggatttggactgcccgaattgcactaagcccgtgctgtcagacaacgagtccttgttcaagctttacgagcaaaattccatagtctgctctgggtgcggatggagctttgacgtcaatacaggtgttgaagcagcggcggccgattaa

SEQ ID NO: 522548 - DNA, 339 bp, Stenotrophomonas maltophilia
atgaagagctttggcgatagattgcgggaagcgcgtgcagcttccggcctgacacaggagcaactgggctttgctattggtgtcaccaaggcttcgatttcggcctgggagaatgggcgcgaaacgcctagcttccgtgtcctggttgacctgcgcgacgccttgaacaggtctttggacgaacttatttgcggcagagtgagtgccgtagccgagcctgcggctaccaaggaaggcgagctacgcgccaccaatgcgcaggaagaggccttgctggtccgctttcgagccctccgagccaggaagcgcgaagctcttcttgaattccttaagccgtag

SEQ ID NO: 522549 - DNA, 1614 bp, Stenotrophomonas maltophilia
atgcgcaaccaacttagtctcgaggccctcgaatcatggctttgggagtctgccaacattcttcgtggctcaatcgattcatccgacttcaagaactacatctttggcctgttgttccttaagcgcttcaacgatgtctttgaagagcgtgtcgcccatttgctgcataccgagcctctaactcccgccgaagccgaggaagaggtgcaagacagatggggatacttccccgtggccgcacgctggcccaacctgattgcccggaccgagaacatcggcgaggcactggacaaggcattcgccaccatcgaagccaacaaccccgagttgcagcacgtactgaccgccacccagtacggcgacaagcgcgtgctgtccgacgccaccttgcagcgcctgctgcgccacttcaaccagtacaagctgggcaatgccgacctctacaaggcggacatgctgggcgacgcctacgaatacctcatcaagcagtttgccgacgacgctggcaaaaaaggcggcgagttctacacgcccaaagcggtggtgcaactggtggtgcaactcatcgacccgcagcccagccacagcgtgtacgaccccacctgcggcagcggcggcatgttggtggaaagcgcccaccacatcgccaagctgccgggtggcctgctcttgggcgacaagcccaatgtgcttctgttcgggcaggagaaaaaccttggcacatgggccattgccaagctgaacctctacctgcacaacatgcgggccgagattgagcgcggcgacaccctggtggaacccaagcaccttgatggcgactacctgaagacctttgaccgggtcatcgccaacccgccgttttcggccaagcaatggtgggcgccgctggaactggccaacgaggcggagcaagaaggcgacaagaagcccaaggcgcccaactacaagcaggtcagcgacccctacggccgctttgtctatggcattccaccgcgtggctatgctgacctggccttcgcccagcacatgctggccagcctcaaggccgatggccgcatgggcatcatcctgccgcacggcgtactgtttcgcagcggcgaggaaggcaagattcgcgagggcctgctgttcggcaccgacgctgccaacggcaaccaacccggcgacctcatcgaagccatcattggcctgccctctgcgctgttttacaacaccggcattccggcctgtgtgctcgtcctgaacaagcgcaagcccggagcgctcaagggcaaggtcatcatcatcgacgccagccgcgactaccttgaaggcaaggcccagaatagcctgcgccctgaggacattgcccacatcgccagcacgcacaaggcagcgtttgagcaccagaccgaggttgagaactactgccgggtggtgacgctggacgaaatccgcagcaacgacggcaacctcaacattgcccggtacatcgacaacggcgagaccgaagagaccgtcgatgtggcggccactttgtcgcaattggcggcgctggcagaggaagaagcccagattgattcgcgcctaaatggctatctggctgagttgggactgctggagacgacagcatga

SEQ ID NO: 522550 - DNA, 1311 bp, Stenotrophomonas maltophilia
atgagtctggtgggcatgcccggacgccaagaaacgcccgctggttggattccccatgaatgggtggcaacgacattgggtgcggtggccgacttcaaaggtgggaatgccttcaaagagaagttccaaggtaagaaggctggcgacttcccattcatcaaggtcagcgatttcagtctcccgctcaaccagaagttcatccgcgacgcgaacaactggattgacgctgatacgaacaaagagattaaggccaccctgttcgaacaaggggcggtggtgttcgccaaggtgggggccgcattactgctgaaccgccgaagggtgctcactcgaaagacggccattgataacaacttgatggcagccacgccccgaactatcgacccaacgttcttgtatttccacctgcaaaccgttgatttcggcaagttggttcaggacggcgctgtgccgtccgtaaatcaagggcagctacaggcgctccccctagcgcagccccccttagcagaacagcaaaaaatcgccgccatcctgacggccgtggacgacaagctggacgtgattgcgcgccagattgaagccacccagaccctcaagcagggcctgatgcacaccctgttcagccggggtgtcggcacccaagatgccgatggccgctgggtgccgcacgcagagttcaaggagagtgagttggggacaattccagccgcatggggcgtctcgctcattggctcgctgttcgaggttgtcgagcgtgcagtcaggatgaccgacgaacagagctatcgccgcgtgacggtcaaacgtcggtacggcgggattgagcttcgcgatgaactgcgaggcagcgacatcaaagtcaagagtcagtttgcgctggaggcaggtgacttcctgatttcggagcgtcaaattgttcacggcgcctgcggcattgttcccggttggctcgccggagcattggtgtccaacgagtacctggtgctcaaggcgagaccctccgttgatgtccggtacttcaactaccttgttcagcagttgaagtacgcgaagtacttcatgctgtgtagtcagggtgtggacatcgagaagttcctgttcaagcccaaggattggctcaagaagctggtgccggtccctcccgtcgcggagcaagtccgaatcgcggatgtgcttgccactgcggacgaaaagctgaatgcactgagcgccaagcaggttgagttgcagcaggtaaaacgcggcctgatgcaaaagctcctcacgggcgaatggcgggtcaacgtggacgccagcgcggccgggacgtaa

SEQ ID NO: 522551 - DNA, 3285 bp, Stenotrophomonas maltophilia
atgagccagtcaccagaaaagactggcgtcgaaacgcctgccatcgagtcgctgctcaagctgggctacacccatctgcccggccatgcggtgcaggtggagcaccgccacctcgccccggtgcttgagaatgtgctccggccccggctgctggccctgaacccatggctggccacggcgcccggtggggttgatgcggccttgattgaactgcgcaagcgggtcaacgacgaactgctgccggccaacaaggcgttctgggaacaggtggtgcaccgctcggacattcaagtgaaggatgccgagggcaagccgcgcagcgttcgcttctttgacgcgggcacggtcgcccacaacgatttccatgtggtggaccagtacgtcggcaggaatgccgatggcgacattttccggccggacctgctgctgtttgtcaacggcgtgccgctggcgaccatcgaatgcaaggccagccaccatcggctggatgaggcgctagcgcaactggatggctaccaagccagctttccggcccagtttgtgttcaaccaggtgtgtgtgggcctcaaccgcaggcagggcttgtatggtgccatcctgaccccacccgccttttacacacgctaccgcttgcaggacgcagaactggcggcagtgggcgccgtgctgggtgccgacccgagcgagcaagaccagttgctgtgggcgctgtttgagccggggcggtttctggaactcatcacccacttcgtattgtttgagacccgcgacggcaggacggtaaaaaagctgccgcgctatcaacagtggcgggcggtgcgtaagaccatcgcccggctgacggcaacccagcccattggcggggtggtgtggcacacccaaggcagcggcaagtcgctcaccatggcgctgctggcccggatgctgcgggccgacagcacgggcctgaacaacccgaccgtgttggtgctgaccgaccgcaaagacctagacaagcaaatcttcgacacctttcatgcggtgggcatcaaggccattcaggcagtgtcggtggatggcttggtgaagctgctgggcaatgactacggcagcgtgttcaccagcacggtgcagaagttccaagagaacgaacctgctgctgatgccagcgagagcgcagcggatgaggaagatgacctcctgcaagccacccggcacaggcgggtgcgcgagggcaaggacttcttcatgctggaagagcgcaacgccaactatggcctgcacgatgaggacggcgtgctgctggacaccaagtgggaggaggtcagcagggagaaggtgagcttccgggtactgagcgccaagccgaacttctatgtgctggtggatgaggcgcaccgaagccagtacgacttcttggcggccttcatgcgggccagcctgcccaatgccaagttcatcgccttcaccggcacgccgctgctgaacgacgacaagcacacccttgccgagttcggtggcgacacctacatcgacgaataccgcctgcacgaggctgtcgctgacggcgccacgctgcccatcaagtatcaagacgcatgggtgaagctcgcgcccagcagcaagctggaccaagccttcaaggaccagttcgcgcaggaagacgaggccagacagcaggcgctgaagaaggaactgctggcccggtggcggcaggccggggaccgcatggagcaggtggcggcgcatctggtggagcacttcatcactaacgtgcaagcgaagggcctgaaagccatgctggtttgcgacggccgcgacatggcggttcggtacaaggacctgctggatgggctgatgcaggagcggaaggccaagggcttgccgactttcgagagccgcgtcgtcatctcgctggctagtgccacggcatcacgcaccggagcttcggtactggaggcggcggccgagtacaagctcggcccagaacaaattcagtccatcgaagagcgggtcaaggctgaaatcaaggcaggcaaacaacccgtcgcgctgccttcggagcagattgctaacttcgtttccaagctgttcccgctgccctacggcgacgagtccaagggcaaggacgggcagccgcatgcgaacaacatcggcctttgtatagtgtccgacatgctcttaacgggatgggacgcccccatcgtgggcaccctgtacctcgacaagccgctgaaggaacacacgctgctgcaggccattgcacgggtgaaccggacgatggcaggcaagaacgcgggctacatcgttgactaccacggtgtggtggagcaccttgaccacgcgctgaagatttacggtggcgaggttcaatcggcccaagtgtgggagggggtggaaagcgagttgcccaaactgcaggctaccctcgaccgcatcctgaccctgctacccaagaagcacgacccggtcagccagcgcgaggactgtaaggatgatgccgagcgtttcctcgaccccgccacgcggttggatgcagtagaggacttcctcgacttggtgaagcggttcaaccggagcatcgacatcatcttgccggatgtgcggggtgtgcccttcaagccctacttcacgctgttcgcggaaatccggctgatgctgcgcgataagctgcccggtgcgacccatcgcgagcgcatcacgcgactggaatcagcgctgctgcagcaattgctggacgattacatcgacgccagcccggccaagagcctactgggcaaagaggtgtccattctggacgccagcgacatggcccgtctgaaaaagctggccagtcccggaagtcaggcgttggtcatgaagaaccagttgaagcacacgattgcgaccggcagagacaaggacccagccttcttcgacaagctggctgatgagcttgaaaagctgctggctgaggaggctgcgggacgcatcagtcaggcacaattcttggagcaactcgacctgttcgggcaacgcatcgcggacaaggacaagaccggtttcgagcacccggcccattcggcggtctatcactatctggcttcgctgctcagtgaggagacgggtcgcattgcgacgaccaagctgttcgaggatgccgacctgagccggaccatggccgcagccaactggaagcagatgcacgacctgcatcccgagttgcgcgcactgctgcacaagctgctgattccgctggcgggttgggagcgctcggtagcccgcgaccatgccaagcgcatcttggacattctcctgaagaactga

SEQ ID NO: 522552 - DNA, 711 bp, Stenotrophomonas maltophilia
atgccgctgctccagtacggtcaaaccatcattgaatggaagtttcagcccgatgccaagctgaaacggcactacgtcaccgtcgagcgagcgcggccggtgttgttacgtgggccggtagtggctgtagcggagcaagaggctctagtccgtcgtcgtgcacgctggattcgcgagaagctgttgttggtcaatcagtcgcaggccaatgacatcattgttaccggcagtcgcttgcgctactgcggcaggagctattttaccgaggtcaggcaccacccaggcttggacaatcctcggctcaccttcactgcgtcgcgcttcatcattgagagccctgagggcttgagcatccagcaggacgctctcgttccccttatcgagcgattctactgggagcgtgcaaatgaaaagctattggtccgggtgcgcttttgggagcgcaaaacaggcttgcaggctaagggtgctcgtgttcggatgttccggagccgttgggctagctgcgatgcgagtaacactctcgagttccacccccgggtgatggagttgcccggcagcttgcaggattacgtcatcgttcacgagctgtgccacacagtcgaaaaaggccatacaaagacattctgggcactcgtgggtctgcatatgccggactgggagcgccatcatggggcgctagagcttggctggtcgaagggccgccggtga

SEQ ID NO: 522553 - DNA, 1377 bp, Stenotrophomonas maltophilia
atgggtagcgtcggtcaaaccatgacgaacggtggcatgcaggccatgcgcatcctgatctgcgcgcacgacttccagcccaacccgtcaccccaatcactgcgggtgacccagctggccagcggactggccagtcttgggcatgatgtccatgtcctgacccgggcatgtggtgccggcatgcgacggatggaggacccacccggtctgcaggtgcatcggacctcgccgcagggcgtcgaggctctgattgatgtgacgtcgcgcgtactgggccatctgcgccgtctgcggcgccaggacgcggttgcgggaacgcgcccgtccccacaggtggcttcacaggccgcgccgacggctgggacggcggcgttgaaccggaaggggcgcgcgatcgcatggctgcgctcgttcctggatgcgcgggttttcccggatggccgctcgcgttggatcggcggtgccctgcgtcatggccggcaactgatcagccagtggtcgccgcaggtgatcatcggatcacatgagcctgtggcagggctgttgttggcttctgcgctctcgcgcgagtccggcattcctttcgttgccgaacttggtgatcccgtgctgacgtcctatacccccgaacgctggagggcggcgtcgctcgagcttgaaaggcgggtttgccacgaggcggccgctattgtcgttacttccgaggccaccgcggccctgatgcaggagcggcatggtcccgggatcgcgccgctcagcgtgattccgcagggattcgccagggtggaaccgccgctgcccgaggttgtcaggtcggccggcgggttgcagctggtctacacggggcgcttctatccgttccgcgaccccatgccgctggtccgcgcggtgctggcatcgcccggctgcacgctcaccatcgctggccctggtctgccaccagaactggcgaaagcgtgcgcggagcatccgcaggtcctgcgatttgccggaagcctggatcattcccaggccatcgaactgcagcgcagtgcggatgtcctggtcaacatcggcaacgcaggcatgacccagatcccgggcaagctgctggaatacctgggttcgggccggccggtactgcatctgcagccggatgccgccgatccggcggccgccatcatcggcagggagcgttgcgggtttctggccgccaatgaggttgctgcgatcagcgcacttctgcacgaactactgcagcgcaagcagcaagggcggctggatgaaggcctgcgcctggggcaggatgctttcgccgagtatcgttgggatcgcctggctgagcgcctggccgcggtctgtcgtgatgcggcgatggcgggtcaacgacaagcctag

SEQ ID NO: 522554 - DNA, 1695 bp, Stenotrophomonas maltophilia
atgcacatggaaagtcgtccctcttcttccgatgccctcctgcccgacggccaggctgcgcgcaggttcgtcgcctgtgctgttggactggttgtcctgctggccgtttcgaaagcgctcgccgcctacagcggcgtaaaggcagctacctacatactgcccatcctggcggtccttgttcttgcaccccgcattggtctggcctgggccgcccctgcggtcaaggcattgctggtcctttccctgtccgcactgcttttgaacatcgtgccggactcgacatgggacggcaacatgtaccacaaggtcgccattgtcgcgctgcacgatggctggaatccgtggcttttccctgagttttccgactgggccgctacgcgaagcgagatctactattcgtccagcgtatgggacggcaatccgaacgccatgtgggtcagccactacccgaacctgtcctggctgttcagtgcagccttgatggactacggatttggatgggagtccggcaaggcattgaacctgcttcttgcgatcgccctgttcgtatatgcgcgcactgtcttcaggcagtacctgccgaaccgctggcaggtggaagttctcgcgctgcttgcggtggcatgccagccaatcgtcggtcagctgcccacaaactatgtggatggctgcacgtattcggtcattgcgctcacaacgctttgcatccttgatcgcgatcgaagtcctgccgtcaacgtgatcgtctggtgcagcctgatcattcttgccggcgtgaagttcaccggtgccctgtacgcagcgatgcttgcgcttccattcctggtggtacgccgaccgggcctgaaagagattgcgacctggtccctgctgggagccattgcactgtcccacccctacctcaaccacatcgcctcggacctggatatcggctacccggttacgggtacggatatcgttctgcgtggacaggccgaggcatcggtgcttgagaagccgcggatccggacacttgcagaatcactgctcgcccacacgtcaaacgccactacgttcccgggcatgaagattccaggcaccttcgccatggacgagatcaaacaatcgggtgcaccggatccgcgattcgccggattcggccccttgttctcacttgccctgatgatcgccgcagtggcaattgttcttgcactggtgctggaacggcgcaatcgccgccagtgtatcaatcactggtacctgctggccgccgtagcgtatctggtggtcatggccatcgcgcatgcagcgccctggtgggctcgctatgtcccgttcctgtacctcgccctgatacttgtactgctcgtctgttcaggatctacgatcaggggagtccgcgttgcatcttcgcttgccagcctggtgatggtggttaacgccgtcctggtctttgccggcgtggcgcagtacaccagtgatttcgcccttcgtcccgcaatgcaggccaaccgggccatcagtgcgcaataccagcagggcgagcacgtcattgtcgcggctccgcagttctttggtttctccaccctttatcacacgcagcacgtcctcggcataaaggatgtcgagtatcaggtctctggaatggacaacacggcatgtgaaggtccgcagcagatcggcgactggatcggcttctccaagctctgcagataa

SEQ ID NO: 522555 - DNA, 972 bp, Stenotrophomonas maltophilia
atggcccgtcacatcgtcattggtggcagtggtttcaccggcacctacctggtgcgttcgctgctgtcgcagaaccagcaggttacgatcatcgacatcgccgtccttcccaccgagttctcgggacgagtggactatcactgcatcgacatcgtggtccccggtgcgctgcagcaggtggccctggccgagggcgatatcgtctatcacctggcggcgcgccagttccacaacgacgtgccacaccacaaccaggatgcgtggttcgccgaagtcaatgttggcggcaccgccaacgtgctcgaatggatgtcgcagctggcgacgccacggctggtctataccagcacggacatggtctacggcctgccgcagaagctgccggtcccgccggatcacgccaagaatccgctggggccctacgggcgcagcaaggcggcgtccgaacagctgtgcgaacaggcccgtggccgcggtttcaggatcaccatccttcgcccgagaatgatcgtcggcccgggtcgattcggcatcctgaccaagctgttcaagctgatggacctgaatctccccatcccgaccatcggcagcggccgaaaccgctaccagatgatcgccgtggaagatgtcgtcaacgccatccagctgtcggtggcgcacgatctgcccgccgtcgctctgagcctgggctcgggcccggctccggtggtgcgcgagctgctgcgcaacacgatccggcgcattggttcgcattccatggtcattccggtgcctgccggtccgctcaagctgacgctctcgctgttggagaagctgggcaagccgctgctgcaccgcgagcagtaccagatcgccgacatcaactacgtggtcgatatcgcaccgaccgaatccacgctgcagtgggcgccgaccaagaatgacgaagacatgctggtggcggcctacgagcactacagcaagtcccgctga

SEQ ID NO: 522556 - DNA, 378 bp, Stenotrophomonas maltophilia
atgtataccgccttcattccgctgatcctgttttccgtcgctctgaacgccagtgcccagctgttcctgcgccagggcatgccccaggtcgcgctggtgacctcggacggcttcctgccgctgctcgccagtggcgttcgcgtggtcttcaatccctgggtgttcgcgggcctgtcctgctacgcggtcagcatcgtgctgtggatgtacgtgctgtccaaggtccaggtgagcttcgcttacccgttcctgagtgtcggctacgtcatcgtcgttgctgccgcctatttctggttccgcgaaccggtgagcatcatgaagctcgcgggggtcgcactgatctgcgtcggtgtcgttctcgtcgcgaagggaggttga

SEQ ID NO: 522557 - DNA, 1428 bp, Stenotrophomonas maltophilia
atgcaagaaactgatcacgcgctctgcgtagacctggatggcaccctgctgcgatcggatctgctgtacgaatccctgctgaccctgctggccagcaatcccttgtacgtattcctgctgccgctgtggctgctgcgcggcaaggccgcactgaagcgggagattgcctcgcgggtcacgctgccggttgagttcctgccctacgacgaacgcgtgctggagctgctgaagacgacagaacagaggccccgcgtgctctgctcagcgtcggacagcggcctggtcaacgctatcgccgcccatctgggtgtattcgatgaagtcatggccagcgatggccagcgcaaccttgccggccatcacaaggccgacgcgctcaatgcacgcttcggcgcgggccattacgactacatgggcaatgccagcgtagacctgcaggtctggaaacatgccggaggcgcctacgtggtcaacgccggcgccgggctcgccgccagcgcggcccggcagactgcggtgcatgcccattggccggcccgtggcggtggcctccgcacctggatcaaggcactgcgcatctatcagtgggccaagaacctgctggtcctggttccgctgctgaccgcccatcgcttctttgatctacccgcagtgctggatgcggccaccgcattcattgcgttcggactgtgcgcatcgggtgtgtacctgctcaatgacctgctggacctggccccggaccggcagcatgcgcgcaagcgcaagcgcccgttcgccgccggtaacctgccgctgctgcacggcctgctggcagcgccgttgctgaccctggtcgggttcgcgctggccctgtggaccagcccggccttcgcgctggtgctggtcggctactacgtcatgaccctggcctattcgttcgtactcaagcgcatggtcatgatcgacgttgtcgtgcttgcggccctgtacacggtgcgcatcatcggtggtgctgtcgcgatcgatgtggaactgtcgttctggctgctcgccttctcgatgttcatcttcctgagtctggccctgctcaagcgctataccgagctggaggcagtgatatcggccggcaagaccaaggccagcggccgtggctacgccgtcggcgatctgccgctgatccagtcgttcggcgccgccgccggctacatcggcgtactggtgttcgcgctgtacatcaacagcccggagagcctggccctctatcagcagccgaagatcctgtggctgctgtgcccggttctgctgtactggatcagccgtgcctggatcatcgcccaccgcggcaacatgcacgacgatccgatcgtgttcgctgcgcgcgaccgcgtgagccaggcaatcgccctgctcgcgctggccatcgtcggctgcgcaacattccagtggtag

SEQ ID NO: 522558 - DNA, 1242 bp, Stenotrophomonas maltophilia
gtgccgattccccctgtttccgactttgcgcgctacgtcgaagtggcaaccaacctggcgaacgggcagggcctccaggtcgctggcactcccttcattggccagccgccgctctatccggcggcgctgggtgcatggttctcggcgtttggtgcccatgtggcggctggcaaggcgctgaatctcctgctcggatcggcgacgctgctgctgtgggccttcgcaagttcgcgaagtggcatgcgccgatcctggcaatttgccagtcttgcactgctcgcctttcatccggccttgattgcctacaccggggtgctgggcacggaaacgctggccgtgttccttgcggtattggcctttgccctggcttgcctgccgatgtggatgcctgtgtccggtattctgggcgttgtgctggccctgatcgcattgaaccggccgcaactgctgccgttgcccattggcgttgtcttctgcttgctgctgggcaggttcgatctgccccgggtgcgcagttgcctggtgatgttgctcgcatttggcgcagtcctgttgccttggacgctgcgcaacgaagcactgtttgatcatgcgattcctgtcagtgccaatagcggctataccctgttggtcaacaacaatgctgataaccagacaggcggttggatgccgttgagtcgagtgccgttgtcggctcaggacctgaagcgcttccagcaggaagctgatctggcccccgccttcctcgccggaggggatgaggatgccaagttccttcagtggactcccgctgccgatggcgtagccaggtcgattgctctggactggatgagtgagcatccgcaatcggtcctgcgcttggccgcgatgaggataaaggccagcatggatccggccaccctcctgtactggccgttcatcgacgtcgagggagctcccgcctggctcggatgggtcgttgggttgcttgatgtactgcttgtcctgctagccgccatgggagcggtcagggccgggcttcagctgcgacagctgtctttggcgacgctgttggcgcttggcatgctggggctgggatggctgtcgatcgccgtgttcgaggggcagggtcgatacctgattcccatgctgcctgcaatgctctggctgcttgcggcaccgtaccgcgattacaggaatgtctgccggacagcgacaggtcatccttccgttgacacaggaaaggtatcctctacgtcctga

SEQ ID NO: 522559 - DNA, 1173 bp, Stenotrophomonas maltophilia
atgctgcctgacttctacgatgaggcggttgcggacgtcgagagtgaagatgactcgaacttcactgctgttcaactccttgagggagttagtgtcaccgactctgattggacggccgaaacagtgcttagccaattgcagaaggagaatatcctccttaatcctagattccagcgacgagaggcttgggattcgcatcggaaaagcaagttcattgaatcgttgatgcttggattacctgtgcctcagctggtccttgctgagcttgcgggtgtccgtggtaggtatgtagtcattgatggaaagcagaggctgcttgctttgcagaactttgcatctaaaggtcccaatggcttaaagctgagcggattggaaattcgaagcgacctgaatggaatgagttgggcagatttgcagggtgatgtggcgcgccgggatgatgttgcgtcatttgaaaattcagccatcaggacaacgattattaagggttggcgtgatgagaagattttatatctaatttttcatcgtctgaattcgggaagtgttccgctgtcaccccaggagttgcgccatgttctgcatcccgggccatttattgactttgcgtttgattattctgagcagagcgacgagctgattgctctttttggaaacaagggcctccccgattttagaatgcgagatgtggagcttcttattaggttcatagggtttaggtatttccttgctgattacaggggtgatctaaagtcatttcttgatggaacagtcaaggcgatgaacgagaactggggcaggatgtctggcagcgtaatgtcttccgctaaagagtgtgaaaatgcaatcaagtttgtacgaacaatctttggtcgcgactctttcgttaaatggaatgtcgaaggcgcagagagaagattcaatcgcgctgtttttgacgtaatgacgttctactttgccgacgaagatgttcgtgagtcaattatttcaaatgagctccaggagaaagttaggttggcgttcattgtcttgtgtattgagaatgctgaattcaaaagtgcattggagtctacgaccaagtcgaagtcagctgtgtttactcgattgcgagtttgggggcggtcgttggaggaagtgctcggtcgagaagttgagcggacttcactggtgccataa

SEQ ID NO: 522560 - DNA, 753 bp, Stenotrophomonas maltophilia
atgcaatacttccaagacctcgagttcgacctgccagcagctcttttaagggagttggttgagctattcgcacgaatgagcgcagcaccgctcagccaacaatactcgaccgcccttgccgacggacagggtgtgtatcagctctatcatcgaggaaagcttgtctatattggcaagacagacaacgaagccggactgcgcaagcgacttcttagacactgcgagaagattagttctcgattaaacctagatccaagcgacgtttctttcaaggccgtacggatctatgtttttaccgcaatggacttagaaggagctctaattaggcactatcggactgagcaaggtgggctcgcctggaataatagcggattcggttcgaatgacccaggaaggaagcgcgatcactctaaacttaagaatgatcacttcgattattgccaccctatcaatctagatttcagggtgtccgtcggctcgcaacactatttgacagcggccgccatattgactgaactcaaggaaaaactgccctacacaatcagatttgagacgagatctccgggttcaaaacggccgcatacagacctctccaatgctgtcgtcgaacttgatcacggaccgcagaccgtcagatccatactagaatccatctcgagagcactcgggcctgactggcagataacggctcttcccgggtacgtaattgtctatagagagagcgagcactacgaccacgggctggtgatttag

SEQ ID NO: 522561 - DNA, 165 bp, Stenotrophomonas maltophilia
atgtaccgcctctgtatcaaggtccgaggcccggttctgcaacgctttcacatctgggtcggcaaacccgagcgtccgccgcgcatggcgtttggctacttcgacttttggcaacccaacctgatcttgggtgccgacatgccggacgacgttgtgctgagctag

SEQ ID NO: 522562 - DNA, 306 bp, Stenotrophomonas maltophilia
atgcagcgctctcgggaagctcttcctgagaggtcgagcttcgaatgggaatcgggcaccagttcggtagagaagtgcaattcgttcgatgcggtgaatccctgcgtcgttcccaggggacacggcgccatcaccaacatcggccactatgatctctgcaacgaatgggtgttcaagccgtctcagctccacaacattgatatccgcgtgtgcattgcaggccctgaggagggcccgcatgcggccatcgcggaatggatcaggctcatctttggggatgctgaccccccagtcgagaaaatctga

SEQ ID NO: 522563 - DNA, 705 bp, Stenotrophomonas maltophilia
atgcttgatctcgtaacaacatccttctatttgaaggcgcctctctttgataagagcgaatttgaactctattccactcagttgtttgatgagtgggaaagctatgtcgatactcacctcaatctccctgactattcggtttcattggtggtcgaggagggatccattaaggggctcggaaagatcgcagctactgtgggggccctttacatcggaatcggaaactacggtggctttgtgtctggtgttcaaacgatccgagagcaagccacttatgtggccaatgcactattcgatcaggcaaagcagagcttcggctgcaagagttcccttgggaattctaagcacaggggcggggaggtttattacctcaagggcttgtttgaccgagttcaagtgggacagatttcttcggaccaggcggttgctgagttgagggaccgatggggtcaggacgccgagaattcgccggagctactgaaggatcttgcgaggagtctcgccgaggctccaaggcatcctgagcagttgcacctattggatgggttcttggagccatgtgaagaaattccgaagccgatccgaataccgaagccgaggcccccgcgcccaccagaacttcctattccccaacactacaggattgagatttcgcgtcagcgaaaggggggcaacaagaaggtgagtctgactagagtcaaatag

SEQ ID NO: 522564 - DNA, 630 bp, Stenotrophomonas maltophilia
gtgtcgccagaggataaggactcggtttttatcaattgccctttcagtgatgattacaggcagctatttcactcgattgtattcaccgtggtttcctgcgggtttcgccctagatccgccttggaggccggtgatgcgggcgatattcgattggataagattgcgcgactgatagctgagtcggcgtacagcgttcatgacctgtccgcagtcgagttggatgatgtaaacaatcttcccagatttaatatgccatttgagttgggcatggttattggttgtaggaaggttgcccgggcgcgctacgagcgtcgccccatgctgattatggagcgcgctgcatatacctctcagaagtgcttgtcagacattgccggtcaggatttgaaggcacacgctggatcggttccaaaaattatccgtatagtgcgagggtggctacttcagcagtctggtcgtcagaatattcctggctatgtacgcatacaggacgcgttcaattcgttctatggggtgttgccggaactctgcatggaagcggggctggaggctgacgaaatttcatattctgattttgttattttgtctcaacagtggttagtgcagcgaaacgttgaaagcgcgatttga

SEQ ID NO: 522565 - DNA, 135 bp, Stenotrophomonas maltophilia
atgaggttgccggccagcggccggcactaccgcgtcactcgacgtgctgccgcgcaggcgctgggtgcgctgatcgccacgtgtgagcacgccgatccgatgacccgcgagatcctggcgcagctgaagcgctga

SEQ ID NO: 522566 - DNA, 513 bp, Stenotrophomonas maltophilia
  misc_feature (384)..(393): n is a, c, g, or t
atgctcagttttttccgccgcaagaagccccaggacgccgccacaccggacgcgcccaagacccagcactactcggctgaagagctggcggcggcgttcccgtcagccgccccggccgaagacgcgcccaccactgcggtggccgaagccgtagcaccggtacccgtgccggaaccggcccccgtcgcggtaccggcgccggtcaccgaagtgcccgccgtgccggctgcgcaaccggtcatcgcggccgaggatgtccaggccgaagcgctggccgccgccgccgtgctggccccgctggctccggtcgttccggccgcggagccggccgccccggccgccgatctgccggcgctggtcgatgccccgcccgccccggccggnnnnnnnnnngcaagcccggctggcgcgaacgcctgcgcaacagcgtcatcgcgcgcagcttcggcggcctgttctcgcgcaatcccaagctcgacgacgacctgctggacgagctggagaccgcactga

SEQ ID NO: 522567 - DNA, 678 bp, Stenotrophomonas maltophilia
atgggtagtgccggccgctggccggcaaccacgtggtcacacggaacgcccagcggaagccggccagcggccggctctaccaagcggcaaccgaccggtcgccgtacacccggtaggcgtcgacattggccaacctcacgatgggtagtgccggccgctggccggcaaccacgtggtcgccgggaacgcccagcggaagccggccagcggccggctctcccaagcgccaatccgaccggtcgccgtacaccccgtaggcgtcaacatcggccaacccaacggtgggtagtgccggccgctggccggcaaccacgtgatcaccgggaacgccctgcggaagccggccagcggccggctctaccaagcgccaatcctaccggtcgccgtacacccggtaggcgtcgacattggccaacctcacgatgggtagtgccggccgctggccggcaaccacgtggtcgccgggaacgcccagcggaagccggccagcggccggctctcccaagcgccaatccgaccggtcgccgtacaccccgtaggcgtcaacatcggccaacccaacggtgggtagtgccggccgctggccggcaaccacgtggtcagggaacgccctgcggaagccggccagcggccggctctaccaagcgccaatccgaccggtcgccgtgcatccggtag

SEQ ID NO: 522568 - DNA, 201 bp, Stenotrophomonas maltophilia
atgtcgacgctggaagccgctcccgctggcggcatcgtgatcgcgatcggcccggagggcggctggtcaccccgtgatcgcgatcaactggctgcggccggcttccaggggctgcagctgggcccgcggatcctgcgcacggaaacggccgggctggccgcgattgccgcattgcaggcgcggttgggcgacctggggtaa

SEQ ID NO: 522569 - DNA, 447 bp, Stenotrophomonas maltophilia
atgccctcggtgatcgtcgaaaccgcctaccactccaatcctgacgatgtggctgccttgcaggatcccgtcttccgctcggcgtcgatgaaaggggtggaaaagggctatcgcctgtgggctacgggaaagacgtgcgagcccttggcgctgcatccgattccagacaccgatgtgcccgttcaatcggcccgggatgtcgaagtccgttatgccgggaacccccaatatccgttgtcggtggagctctcgctgacgacctgttccgaggtgggtgcgtgctcctcgtcgacgaggacctttgatgatccgatgcaaccggtggtgatcaatcttgcctgcaatggcgtcggcacgggcgtcgcgcgctggagtgcgctcctgagggacgcggacggggttgcgtcggcacctgtcgagttctcgcaggcgtgcgtgcggacgtga

SEQ ID NO: 522570 - DNA, 945 bp, Stenotrophomonas maltophilia
gtgccacaagatgctcgccccgtgctcaaccctgtgctcaacctaaagcgtgatccgaggcgagcgagtgtcactggccgcgaagcgcccgaagaagccgttgttgtggcgcgcttggaaagtcagaggaggatattgtccgaacagctgggagagcttgattcccgatcttcagacgttcatgcagggcgccgccttgtcgccattcgaatgttcgatgactcttttgctccttcttgggagcctgaggcgcttttccacacaaacttcggcgcgccactggttgcacctttccggggcggctacgttgccgagcttggcacctctgcgatatccagcttgcgagataaaatatcgtcaagttcgcgccgcgaggtcagaatctccgtttcaagaataagctcccttcttcctatcaccgatgaagatattttaggaggcagggggattgagcggacctggcagcttgccaccgaggtgagcgaaggcaggttattcgatatctggctagccccctttgctagctcagaggcaagagcaagtgtctcagcaagcatcgaaaaactggcaaatgcggagcatgtcagctctgttattgatctagtctcgattactcgagaagccggttcggatgccgatcagcttcaactccaagatgctcccagctctcgcagtatcgcgcgcggcacccgcgaataccgtcagaacccgttcgtcagaattcatatcgcggtacgggatcagtccggcctttccgccctactctcctccggagcggtttttcgaatagacccagtgaggccaataacttcgacccagacgagggcagctccagatccagagcgccccgtcccagatgaacaatggcatccgatcgttggaatcgtggacggggggctgttcgcacggagctacgaacaaattggaccggccagcctttcgtag

SEQ ID NO: 522571 - DNA, 1161 bp, Stenotrophomonas maltophilia
atgtcctgggatgcgatcatcatcggcggtggccacaatggcctggtctgcgcggcctacctggcacgcgccggaaagaaggtgcgggtgctggagcgtcgtggcgttctcggcggtgctgcggtcaccgaggagtttcatccaggcttccgcaactcggtggcgtcatacaccgtgtcgctgctgcaaccgaaggtgatcgacgacctgcagttgcatgcgcatgggctgcgcatcatcaatcgcccggccaacaacttcctgccattgcccgacgaccgctacctgctgtcggcaccgggccgcacccaggccgaagtcgccagattttccgagcgggatgcgcagcgcctgcccgcctacgaagcgcgcctggagatgttcgccgacgtgctccgcgcatgggccctgcgtgcaccgcccgatctgggcgtggccggcggttggcgtgccctgcccgcgctgtggcagatgggccgcctcggccgcgaactggcggtgctggatccatcgctgcggcaggaactgctggacctgttcacgctgtcggcggccgagtacctggaccgctggttcgagagcgagccgatcaaggccctgttcggcttcgatggcattgtcggcaactatgcaagcccgtacacaccgggcagcgcctatgtcctgctgcatcatgtgttcggccagtgcaatggcgtgaagggtgcgtggggccatgcgatcggcggcatgggcgcaatcagccaggccatcgccgccgctgcacgcgctgctggcgcggaactgcaggtggacgccggcgtgcgacgcgtactggttgaacacggcagtgccgtgggagtggaactggccaacggtgaaatcctgcgtgcacgcgcggtgatcgccaacgtcaatccgaagctgttgtacgagcagatgctggccccggcacaggtaccggacgcgacccgcgaacgcatggcgaactggcgctgcggttccggcacgttccggatgaacgtggcgctgtcgcggctgccggacttccgcgccctgcccggccccggcgatcacctcagcgcggcatcatcatggcacccagcctggactacatggaccgcgcctggctggatgcgcgccgcgacggctggtcgcgcgaaccgatcgtggagatgctga

SEQ ID NO: 522572 - DNA, 492 bp, Stenotrophomonas maltophilia
atgaacgacaagacccgctccgccgccagcgccggtggcgaattcctcagcttcacccttggcgccgagcactacggcgtggacatcctcaaggtgcaggagatccgtggctacgacgccgtcacccgcgttccggacgccccggactacatcaagggcgtgatcaacctgcgtggcaccatcgtcccggtcatcgacctgcgcctgaagctgcgcctggacaacgcccgctatgacgcgttcaccgtgatgatcgtgctgaacgtggaagaccgcgtggtcggcatcgtcgtcgacagcgtctccgacgtgatcccgctgtcggccgagcagatccgcccgaccccggaattcggcgcggccgtcgacacccgtttcatctccggcatcggcacccacgacgatcgcatgctgatcctgctggacatcgagaccctgctcgacagcgccgacatgggccaggccagccttgccgaagacgtcgctgcctga

SEQ ID NO: 522573 - DNA, 699 bp, Stenotrophomonas maltophilia
atgcgcagaaatttacccggggggggaatgaaggtcctcaaagctttggcctatatcctgacagccagtatcggtgtgggcctggtctggttgtcggtttggctgtacatgaatcgcgttttcgcagatccgacagcattgccgcctaaggacggtctagccgcccaggctgcctgggcgcaagccattctgtcggtcttcgctgtgctggctgcagtctgggtggcgcgggtgcaagccaagcagagtcaaaaactcattagtgatgaattggctcgcgtacgagagaaagaagcgcaagaatcagccgagaggcagagcttggcatgcacggcgcttctgagcgtcttcgataaactcacgcgtgtcatcgcgctactctgcgaagatgactacgaaaaatgggagcaagccctgatactgctgcggtccggttcttctcaagcgaccaagaattttcagcgagttgctccggtcctcaacagtacaccgagtggcgcccttcactgcttcaacatcgagcagtcgcttctgaggttcgaaaacgctgtgacagagtacttccagcctttggtgacgcgggatgtattcggtggtctcgtattcggggaaatcaccgatcctggtgtcgccaaggaagtggcagcaagaatccagcacgatgaacaggcactcttgaagcatattgggaggttgtag

SEQ ID NO: 522574 - DNA, 810 bp, Stenotrophomonas maltophilia
atgctagcgagcgctccggttgttccgcccttgaaatgggctggagggaagcgttggttcgtcgcgcgtcatatgaatatggtgccgaccgttttcaataactatatcgagccctttgtgggatcgggtgccatgttcttcgcgctccagccggctactgctgtgttgtcagatgcgaatgctgatttaattaatctatacgaatgcattcgtgactctcccagcgaactggagagtcttcttcgttactatcacgcgcgacactgtgctgagttctactatgaagtgagaaagcagaggcctcgggtcccgctgcgacgtgccgcgcgcatgctctatttgaatagaacctgctggaatggtctgtacagggttaacaagcggggtgagtttaatgtgccgatcggaacgaaagcgtcagttgttctagaatctgacgactttgctcgcctatccacaatcttggggagggcgcggcttgttgcgggtgattttgaggccactattgactctgcaatggagggtgactttgtcttcgtcgatcctccctacacggttgctcacaacaataacggttttgtgaagtacaacgaggacctattcggttgggctgatcagcagcgtctgcgtgcatgcgtcggccgggctgccgagaggggcgcaaaagtattgattaccaatgcggcccatgcgtctatttacgaactgtacgatggcttcgagcaggtctgtgtgagcagggctggggtgattgctggcgccagtcgtgcgcgcggacaatttaatgaagttcttattaagtgctattga

SEQ ID NO: 522575 - DNA, 582 bp, Stenotrophomonas maltophilia
atgaatggaagcagggggcttcatttcaaggccaagcgaaaatttgaagctgcgactgatgccgttaagcattggcattggttcatggctttggttgaggttttcttttcgctatttgtatctaactgtgctttgctgtttgcggtatttatatatctggttaataccaaaagtgccgttcttacttatgatgtggcctttggagtaatagtgcggtccattaatctgggtgagatcatagtctacatattggctgtccttgctcccgcaatgtggatcatggttagcaactggcgcgcgcgaaagtataatgttattttctggattcttggattcttccaggtggcgatcatagtttgttgcttttacatctatggtgtctcgaagactggtgagctcgctaacccggatttcgttaagcgatttgcgatgatttgcttcccgatgtcagttcttatctggtatgtgactgtgttctttcagcgtgcctttctcaatgaggtcacggcgaccgccagcggagcaagtagcgctgcagggagtggtgcgattctggctgaacttaagggtggtggcgaatga

SEQ ID NO: 522576 - DNA, 834 bp, Stenotrophomonas maltophilia
atgacctctgcccgataccccaggatggccgcagcggcgaagatcgggggaccacccttccatcggaacccgaccgtgtcccgacgccttgcccgttccctgctggccgccgctgtactggccgctgtgcccgcactgtcttcggccgccgaccgcatcaccggccacacctttgccacccgttcggaggtgatcgccccgcatgcgatggccgctacctcgcagccgctggccacccagattgcactggacgtgatgaaagggggaggctcggcggtggacgcggcgatcgccgccaacgccgcgcttggcctgatggagccgaccggcaacggcatcggtggcgacctgttcgccatcgtctgggacccgaagacgcagaagctctacggctacaacggttcggggcgctcgccgaagtcgctgaccctggccgagttccagcgacgtggcctgaaggacatcccggctaccggcccgctgccggtctccgtgcccggcgcggtcgacggctggttcgcgctgcacgaccgcttcggccgcaagccgatggccgacaacctggcgccggccatccgctacgcgcgcgagggccatcccgtcgccgaggtgatcgcctactactgggaccgctcggtgcccaagctgtcgcagtacccgggcttcaaggagcagttcacgatcaacggccacgccccgcgcaagggcgagatgtggaagaacccgaacctggccagcaccctgcagcagccgacggcggacgcgatgccttctacaagggcgccattgcccacaccatcggcgactacttcaaggccaatggtggctacctga

SEQ ID NO: 522577 - DNA, 207 bp, Stenotrophomonas maltophilia
atgagactcctgcatttgatatatctgaaagagaggcctttcgcggatcccgagaagcccattgtttctaaacaaaggtttcgtgcgctgtttgataagattgatctcgatgatgacgacttccacaaggatgagttcgttcctggcaccggcggtgagactgcgctgtttaaatacatggctcgtgcactgaagttgcttgattga

SEQ ID NO: 522578 - DNA, 819 bp, Stenotrophomonas maltophilia
atgaaagccctgcactccctgttcctcgccgccgccctggcgccggccctgctgtccgtctccgcccctgcccatgcctggggcgcgcaaggccaccgccttgtcgccgaagtcgccgacgcccgcctcacccccgccgcccgcgccgaagtggaccgcctgctggccaccgaaccggacgccaccctggccagcatcgcgccctgggccgaccagctgcgcgccaaggacccgggcctgggccgtcgctcggccggctggcactacgtcaacattgccgaagacgactgccactacgaagcaccgaagcactgcaggaacggcaactgcatcgtcgaagccctcaaggcgcagagcgccattctgggggaccgcagcctgactgacggcgagcgcctgcaggcgctgaagttcgtcgtgcacctggtcggcgacatccaccagccgatgcacgccggctacgcccacgacaagggcggcaacgatttccagctgcagttcggcaaccgcggtaccaacctgcactcgctgtgggacagcggcatgctcaacacccgcaagctggacgatgccggctacctgccggtgctgcagagccagcgcgcaccgaagctggcgcgccagtccaacccgcagcgcgacccgcaggtctgggccgaggccagctgccgcatctccatgcaacctggcgtttatccggcctcgcgtaaaatcggtgacgagtacaccgagcgctaccggccgctggccgaagcgcagctgcggctggccggtgaaaacctggcgcagttgctgaaccgcgtgctcggcacgcgctga

SEQ ID NO: 522579 - DNA, 630 bp, Stenotrophomonas maltophilia
atgcgcaagacctcccccctgatcgtggccagcctggccgccgccctgtcgctcgccgccgccccggccatggcgcagtccaagggcgactggaccgtctcggccggcgtgcaccaggtggcgccgaagtcgaacaacggctggctggccggcggcaccctgaaggtcgacgtcgacaatgacgtcaagccgaccatcaccggcgagtacttcatcgccgacaacctgggcatcgaagtgctggccgcgctgccgttcaagcacgacatcaacatcaacggcctgggccgcgtcggcagcaccaagcagctgccgccggtggtcaccctgcagtaccacttcaacagcaagggcaaggtgtcgccgttcgtcggcgccggcctgaactacaccaccttcttcagcgaagacactacgggtgcgctggccggcagcaagctgaagctgcaggattcgtggggcctggccgcacacgccggcgtggactttgcgatcggcgagaagggcgccctgcgcgtggacatgcgctggatcgacatcgacagcaaggtgaagttgaacggcgagaagatcggcacggtcaacatcgatccgctggtctacggcgcttcgtacgtcttcaagttctaa

SEQ ID NO: 522580 - DNA, 1005 bp, Stenotrophomonas maltophilia
atggcaatcaaggttggtatcaacggtttcggtcgcatcgggcgtaacgtcctgcgctcggcggtgctgaacttcggcgacgacatcgaaatcgtggccatcaacgatctgctggagccggactacctggcgtacatgctcaagtacgactccgtgcacggccgcttcaaggccgacgtggcggtgcagggcaatgacctgctggtcaacggcaagaagatccgcctgacccaggaacgcgacccggccaacctgaagtgggatgaagtcggcgctgatgtggtgctggaagccaccggcctgttcctgaccaaggaaaccgcgcagaagcacatcgatgccggcgccaagaaggtcatcatgtcggccccgtcgaaggacgacacgccgatgttcgtgtacggcgtgaacgacaagacctacgccggccaggcgatcatctccaacgcttcgtgcaccaccaactgcctggccccgctggccaaggtcatcaacgacaagtggggcatcaagcgcggcctgatgaccaccgtgcatgcggccaccgccacccagaagaccgtcgatggcccgtccaacaaggactggcgcggcggccgtggcatcctggaaaacatcattccctcgtccaccggtgcggccaaggccgtcggcgtggtcattccggaactgaacaagaagctgaccggcatgagcttccgcgtgccgacctcggacgtgtcggtggtcgacctgaccgtcgagctggaaaaggaagccacctacgccgagatctgcgccgaagtgaaggcacagagcgaaggcccgctgaagggcatcctgggctacaccgaagacaaggtggtggccaccgatttccgcggcgaaacctgcacgtcggtgttcgacgccgatgccggcatcgccctggacggcaccttcgtcaagctggtgacctggtacgacaacgagtggggctactcgaacaagtgcctggaaatggccaaggtcatcgccgccaagtaa

SEQ ID NO: 522581 - DNA, 2679 bp, Stenotrophomonas maltophilia; identical to SEQ ID NO: 502890

SEQ ID NO: 522582 - DNA, 1377 bp, Stenotrophomonas maltophilia
atgaggaagtggagcagggcgctgctgccggcgatgttcggcatgctggccgccgtcgtggtgcaggcggctgattaccgcacgcagtatgccgagcaatggccgctcacattgtccagcgcgcagtccggtgcctaccgcatcgtgctggagccggcgatctaccgccgtgccgtgagccccgacctcagcgacctgcaggtgttcaatgcagccagccagctgctgccgtcggcactgctggcgccggaccagccgctggcgcaaccgccggtgcagcgtgaactgccgtggttcgtgctgccgccgctggccgatgcccagcgcaacgatctgcagctgctgaccgagcgtgataccgatgggcgcgtgcgccgggtcgaagcacgggtgagtggcggggcgacggcgaacgggcagggcggctggctgatcgacgccagcatgctcgaccagcagccgctggcggcgctggtgctggactgggccgacagcggccagccgctgcaggcgcaggttcagctggatgccagtgatgacctgcagcactggcgatcgatcggtcgcgacgtgccgctggtggatctgcagcgcgccggcaagcgcctgctgcagcgccgcctgcaggtggacggcactgcacgctacctgcgcatcctggcgcagggcgactcgcggctgccgaccctgcgcggcgtgttggcggaactgccgccagcgccggccacgctgccgtgggaatggctgtcgctggagccgacgtcgaagggcaagggcgaatacaccttcgagatggatggccggttcccggtggcgcgcgccgatgtggccagcaccgacaacagcctggtgcaatggacgctgttcagtcgtgatgatgagagtgccgagtggcagcgccgcagcgcgccgtggatcgcctaccaggtgcaacagggcacgcagggccagcgccagcagtcggcggcgcagccgctgggcggcgtgcaccgcgaccgctactggaagctggtggcgaatccggcggaatctgccactgcgccgacgctgcgcctgggctaccaaccggaagtgctggtgttcctgagccagggtgcggcgccctacgcactggcggtgggcagcgcgaccgcgcgccgcacggacgcgccgatcggggtgttgatcgaggaacttcggcagcgcaacgatccgtcgtggcagccgacgctggcgcgactggaaggcagcccggaaccgctggcgggtgacgcggcgctgaaaccgcagcatgactggaagtcgtggctgttgtgggcgctgctgggtctgggcgtgctggtggtgggtggcctggcgctcagcctgcttcggcagaagccgacgccttcggcttag

SEQ ID NO: 522583 - DNA, 1647 bp, Stenotrophomonas maltophilia; identical to SEQ ID NO: 505216

SEQ ID NO: 522584 - DNA, 216 bp, Stenotrophomonas maltophilia
atgaccaagctcgaccccgcatggctggaagccttcgacaaggagctcctccacctgttcgccatcgaccatagcgacgccggcatggatgagcacctgctgggctgctacgcagacctcacgccgcgcgaggcggcgctggcgttcggtagcgactacgacctggagcgcgacgatgcgctgtggcctcggccgggcgtggcgctgcaaagttaa

SEQ ID NO: 522585 - DNA, 843 bp, Stenotrophomonas maltophilia
atgccagtactcacattgtacccgcatggcgggaagggcggtgttgcgcccatgaaaaacagccatacccgcgccctcaggggtgacgttcagggctggtctcacggcgcgacacgccgtaacaccgagttcctcatgtcggtccgtgaagaccgacttaccggggcaggggttgctctcacacttactcttcgggattgcccgcctacctctgacgattggcacaagctccgccgagcttgggaactccgtatgcgccgctcaggcatggtccgtctccactgggtcacggaatggcagcgccggggcgtaccccacctccattgcgcgctctggtttgaggaccggtacgacattgcctctgcggtagaccactgggtggcagtggcaggcgcctacggcgcgggccaccgtggtcagcatggccgcatcatcgatggtgctgtgggttggtttcagtacctcagcaaacatgctgcccgtggtgtttctcactaccagcggtcaatcgataacgtccctgaggcatggcagaccaagacaggtcgcgtatggggcaaatgcggcgaatggcctgtccaggagaagctgaagatccatctccaagaccaattcggtgacggtggctggttcgcctaccgtcggctcgttcgctcttggcgaagggctgacgcccggtcatcaggggatgcgtaccgcatccggtcagcgcggaggatgctgcaactctccgatccagtccgcgcccgcctgatcgggttcatggagtggatcccttacgaaatccaaagcgcccttttggccaacctggctatgcgtggctatcagatccacagcatctga

SEQ ID NO: 522586 - DNA, 651 bp, Stenotrophomonas maltophilia; identical to SEQ ID NO: 497440

SEQ ID NO: 522587 - DNA, 285 bp, Stenotrophomonas maltophilia
atggctgacagccctgcggtgttaagcgacgacgatatcctcctcttgaatggcgcagtgatgggccgactgttcgcattggagtgcggtgtaagaagcctcatcgcctcacacggcgacgctgagcgcctgcaagtggtgtgggacttgctgtggcccagtgcgattagaggggtgggaagcagcgacccgcttgtcggttttgatcaggggttcatggatcaggggcgccgactggctgaagacattgcgagcttggtcatcgcacatagagccgtgtcctaa

SEQ ID NO: 522588 - DNA, 666 bp, Stenotrophomonas maltophilia
atgtgcggccgattcgtccagctccccgttgtcgacttcggccagccggggctggctgacattgcccccggtctggccgagatccagcccagctacaacctggcgccgacacagcgtgcatcggtgatcctggaccgaggcgaaggccggcaggtcacccggctggcgtggggcctgctgcccttctgggccaaggccaagggcctgcagggatcaaccatcaatgcgcgcatcgagaccgtggccaccaagcccgccttccggtcggcgttcaagaagcgccggtgcgtgatcccgatggccggctactacgagtggtcggtgagcccgatcgacgagaagaaagacccgtggttcatccacgccaccgggccgctgctggccgccggcctgtgggaggacaccagccccctgctccccgacggcaacctgggcaccttcaccatcatcaccggcgacagcagcggcgtctcggccgacatccacgaccgcatgccggtgtggctgcaggccggccagctcgacgagtggatggcggccggcccggacgaggccatggcaatgctgctgacaagcgagccaccggcgatggaggcctaccgcgtcagccgtgcggtgaacacaccccggaacaaccgcgaggatctgctgctgcaggtcgagtga

SEQ ID NO: 522589 - DNA, 468 bp, Stenotrophomonas maltophilia
atgtcccacattgacgcacgcgccgagttctcctcggcgcagtcggtcactgcgaccgctatctcgaccaacgtgatgaacctgaagggcaccggccttgcgccgaatgccaccgagaatcttggcgctccggcgatcacctatctggtgatcgtcgccacccaggctgctgcagcggcaggcgctgccaccgtcgtcgcgtccctggagtcggccgacaacgccgctctgtccaccaacccgagggtgcactacgccaccggcgccctggcactggccgacatgaccgccggtgcggttctggcggtcgtgccgctgccggcgggcgactacaaacagtatctgggcgtgcgctacacggtggcgaccggaccgttgacggctggtgccttcaacgcgttcttgacgctcgacccgaacatctggcgcgcgtacgcggacggcaagccggccaccccggcgtcctga

SEQ ID NO: 522590 - DNA, 993 bp, Stenotrophomonas maltophilia
atggcaactctgacccgtgatgttccgaacatcaccgacatctccacccgctacacccaggacggcaagccgctgccgatcgcggagatcctgaccaagcgcaagccggtcttccaggacattccgtgggttgaagccaacaccacaaatggtcatcgcatcggcgtggaaacgcagctgcccgaggccgttctgcgcaagctcaacgctggcgtgaagccgtcgaccggcaaggccgccgacatcaccgaagccaccgccgagttcgcgtcgctgggccaggtcgacaaggtgctggctgagctgtcgaccaacgtctccgacttccgcgtgaagaagaacggccgccacatcgaggcgatcggccagagcttcgagtcgcagttcttcaacggctccaagatccagtcggccggattcgtgggcctgaaggagcgctacgccgacgccaccggcgacctgtcgcgccagatcatcaagctgtcgggcactggcagcaacttgacctcgatctgggtcgttggctggggcgatgactcggtgtatggcatctacgccaagggcaccaaggccggcatccagcacaccgactacggcgacgaactggtcgacgatggcaacggcggcaagtacccggcctaccgcgactggtttgcgctgcaggctggcctggcggttgaagacccgcgttgcatcgcccgcgtggcgaacatcaaggtcagcaatctgaaggtcgatcccgagccgaacaccgagctggtgctgatcaacgagctgatcaaggcgacacaccgcatcgagcgcctggagagcttgaacacggtgatctacgtcaatcgcgacatttacgagtggctggacatccaggccaacaaccgccgcattctggccctgaagcagaccgaactgaacggccagccggtgaacaccttccgcggcgtgccaatccgtgtcagcgacgcgcttggctgggacgaatccgccgtcgcgtaa

SEQ ID NO: 522591 - DNA, 714 bp, Stenotrophomonas maltophilia
atgtcgactgaaaccgccaccgagaccagcacccaaaattctggcgaaggcgagggcaagaccaccaccagcaccacggaacagcagggcaccggcggcagtggccagccggcaaccgagggtacggggaacggaggtgatgcgaagggcaccaccagcacggacaccaaggacgaaggcggcgagaccggcaagtccaagggcgacaccagcgatggcgcaccggagcaatacgaggcgttcaaggtgccggagggattcactctcgaaggcgaccgcctcgggcaggccaccgagttcttcaaggccaagggttggacgcaggaacaggcccaggaggccgtagacctgtatacccagatggccgggcaggacgcggcggcactgcagcaagccgtggaggctcagcgcctgcagcagctggagcagtggggcgcggatgccaagcagcagttgggcgccaagtacgacgaaaccgtcggcctggccaccaccgcggtgaaggccatcaacgaccccgagctgaccaaggcgttcaacgaactgggctggggcaaccacccgaccatgatcaaggcgttcgccttcttcggcgagttccttcgcgacagcaaggtggacggtctgggcggtaccaccaccagtggcacgcagagcaccggtgaccgcatgtaccagtacgccgaccgcccggccgcacgccagcgcgactga

SEQ ID NO: 522592 - DNA, 1707 bp, Stenotrophomonas maltophilia
atgatggagctgcgagcgcactgccggcgccgcaagaaggccatgaaggacaaccagacggactggaacaccgactggcgccaggtgtcggagtacgtggacccgacccgcggccgtttctacggcgagaccgacacgaagcccaggaagcgcaaccgggccaaggtgatcaacagcacagccaccgaggtcctgcgcacaatgtcggccggcatgatgtcccacatgacgccgaaggcgcagccgtggttcctggtcaagacgccggacccgtcgctgtctgagcagtttggcgtccgggtatggctggacgacgtagcgcagcgcatccgcgacgccttggccagcagcaacttctacaaggccatgccggttgtctacacggaagacgggctgttcggcactgcgccaatgctgatcctcgaagatccgcgcgaggtggtccggttctactcgctgaccgcaggcacctatgcggtggggctggacgatcagcagcgtgtcgactcgctgtggcgccggtacacgaagactgcccggcagctggagcagcgctacggtgcagaccgactgccgcgaaacgttcgggactgcctggccaacaatggcgatcgcgagttcatcgtggaatcgctgatcgagccgaatccaaacgagcgccccggtatcgggccgctggggctgcaggcaccgcagttccgcccataccgcgaggtagtctggatcgatggtgttggcaccgccgatcacgggattctggacatcggcgggcattacgaagcgccgttcgtggtggctcgctggaatccggtggctgaagacgtgtactccaccagcccggcggtcgactgcttgggagacatcaagcagctgcagtatctggaaggcgaaaagctgcgtctgatggaacaactctccgatcccacgctcggggggccggaatcgctgaagcggtccggaggcgcgcgcctgcgaaagggcggcatggtttacctgccgcaggactcggtcaacgccaccgttgcgccggtctacacgcccgacgccagggctttgcagcagatccgcgaagagatcgccaccatcgaggcccggatcgagcgagccttcttctatcagctcttcctgatgctggaagcgctgggcgacaagactgaccgcacggccaccgagatcgccacccgcaaggaagagaaggctgccgtgctggcgcccacgctggagtcgatcacggacgaagttctcgacccggttatcgtccgcgtgttccgccttctggaacgcgccggccgcatcccggacccaccgcaggtgctggcggacctgcctctgaagatcgagtacaccagcatcctggcgcaggcggccaaggccgcagcagtcggctccatcgagcgtacggtgcagttcgttgccggcgtcgcccaggcaaccggcgatccatcggtgatggacaagctggacgcggaccaggtagtcgacgaatacaccactgcggtcggtggtcctgcttcgatcatccgcagcgatgatgcggtggccagtattcgtgccgatcgcgcccagcagcagcgccagcagcagctcgcggcggccgcgcagccgctgaaggacgcaacccaagcactgaagaccgccagcgatacggtgcccgaggaaggctcggcggcccaggcgctgattgacgccatgcagggtgccgcatga

SEQ ID NO: 522593 - DNA, 186 bp, Stenotrophomonas maltophilia
atgttctacaacgtcaaatccgacgaatacgtcgcagtcgtgaatgcactcgaagtcgtactccggttccccggctacgacctatccccctttacaaaggctcgcctggcgcatttcgtcctgttcacccctgcgccgcatcgcgccaccctcaacaacctgatcaggcggtaccagaagcgctaa

SEQ ID NO: 522594 - DNA, 306 bp, Stenotrophomonas maltophilia
atgactattggtagcaatctgaacgtcaccgaaggcgaaaccgctgcagaggaacagaacagggagttcgtgctggtgacggcagctgagcttgtgcaccatgcagagaggacgggcggagagctctctgatccggccgcactcgaaaaggctgaagagcatctgcgcctggagcgcgaggcataccataacgatcccgacgctgaccgcttgccggaagacagttctctgccggagctgatcggcttcgagcccgacccggagcggatcaaggaaattgttgcccgcctgcgcgaaatctattga

SEQ ID NO: 522595 - DNA, 426 bp, Stenotrophomonas maltophilia
atgcagattgacctgatgagtgactacatccggcgccgcatggagcattggggcgaggagttcgcgctgcacaaggattgcgaatacctcggccacgcgtcgaagaacctgctggcggtgctaatggaacaccacgaaatgccgggcagggcgacgggctacaagccgctggagatcaaccaggaggcgcagcagatcgaggacgcggtgttcgagatcagccggcatgccccggccatcggctgggtgctgcgcgcctactactgcggccaaggccggcggaaggtggagcgatggcacaccgccaacacccttctggagatatccggcctgcccaaggtcagccaggccagctacatggacatggctcgacgcggcaccgagcgggtacacggaatactcctggccgtttcatcagccgcttga

SEQ ID NO: 522596 - DNA, 624 bp, Stenotrophomonas maltophilia
atggccgagccgctctactgctaccccttccagatcctctgccagccgctcagctggtggtcgtccgccgcatcttgggctcaggcggtactttctgctctcgcgatttactgggcagctcgcatcgcgacgcaacagcaccgccgggatcttttccagcgagtctcggtgatccaacagttgctcaccgtcagctgcaccgtgtcctccgccaacagttttcacatcggaaagtgtgctagcgagggtgtgccttttgtttcggacgtcgagtacttcaaccagttggttaagacgctgaggcaggtgccgctgcaagagctgcccgatgcgcgcttgacacacatagtggcgggtgtcgctcgaactgcagagaaagtcggcgcgatattcactgatgtagagctgcgcggtaggagcgtggtgccgccgactcttgatcaagcgaaggactgttccgactacacaacgtttatgtggacattccacgctcaagcagtcgctgtgcagatcgactacgagcgtaagctcgttgtattcgggttccccggatactggaagtggctgcgtcgcaagcggaagatcagcaaagcgccaatggagcctgagatcaagtttcagtag

SEQ ID NO: 522597 - DNA, 192 bp, Stenotrophomonas maltophilia
gtggcgataacgaatcagctggccggagccaacgtcctgacgctcatgcgaatgggtgggaagtggttcgtgctgaagcgggtcggcgagcgggtcaacgtgcggccggtcggccaggtagtgcggccgcggcggcgccggcacgtgccgggggtggtgatccccttccccgccaggagggccgtccgttga

SEQ ID NO: 522598 - DNA, 357 bp, Stenotrophomonas maltophilia
atgaaacgactgcttctgggttgtgctgcgctggctgcctcttttgggattgcggccgaagagcagagtgcgcgagcagagacgcttgcctacaagatctgcgctcagacctacgtggacaggtacgcaccgtccggtgaggcggccaaggacgttgccctcgcagcactcggcaaatgccaaaccttctacgcagagatgctggaggcaatccgagaggatctctacacctctgcgggatcatccgtagagagccgccagcgcgcagatcgctgggctcagggcagcgcagacacccgcaaggacgtcattcttcaggcaatgatcgccagggcaatggaacaaaaggtcaagtag

SEQ ID NO: 522599 - DNA, 708 bp, Stenotrophomonas maltophilia
atggcaattgagttctgcccgcttgcggaagaagttggaaatttggccgattggttctcggtcggcgtcggagcagttgccgcagtggcaaccacggtcgtagcaggctttgcttataagacgtcgagacgagcaacagacattgccgaggaggcgaaggggattgctctgcaacagcacgaggaatctgtcgcgaatcggaaggctaccgagcgaattgtcgtggcgctcctgatgcacgaagtttcggagcttccggtccagatcggaatcctcatcaggcgctgcgataggaaagtgccggttgattctgagggggagattaaaaggccagacatcgctgaattcgcgcgtgcattgcgcggtgctagtggcccccttatgcccggtaccgaacaagtcttggatagaattcataccctccaaaacgatgtcggggacagactggctgtgctcgttggatatagcaggacactgagccagatgagcaaggacttttcgcagttcgtcaagattggttctccggctgcgattaataagcgggagaccctcatctacactggaaacgaaagagatatcgggcttttccgcaagtatttggccaatttcctcgcccttgctatcgattttgcgaatgaatttcggaagcacggaaggcagcctgtgcacgactattcggaatgggaacagttgatacaggatgagtag

SEQ ID NO: 522600 - DNA, 429 bp, Stenotrophomonas maltophilia
atgaacgctgcagcttccccctctagcgcatcaaagcttgccgccgtcgcgggcttggcggtaggccttggtctctattttgcaattgggcagtgggttctcggggaggccgcgtcaacgctctcttggcgcgtgatgagcaaggtccaagtgcttattgtgttaggcgtagggttgctcgccgtactgcaggctctgcctgtcagcgaaaccctgggattgggtaagagccgcggctggttgatcgtgctgaacttagttctcgcgggctttgcgctgtggtttggtcagcatctagcggccaagataaatgacgaaaaggtgacggcagcgcaagaggcgaaggacaaacagcgctcagcagaactgagcgatttgcgacggctagagtcagctctgaagcgggttgaactcgcgtgcgctcgttga

SEQ ID NO: 522601 - DNA, 276 bp, Stenotrophomonas maltophilia
gtgatcccggtcagcgaggtggcggccagggatgaattcaccggcatcaagagtgtgacccgcgatgacatgctcgcggcgctgcgcgtgccgccgcagttgctcggcatcgtcccgcagaacagcggcggctttggctcgatccgggacgcagcgacggtgtgggcggcgatggagcttgccccgctgcagacgcgcatgactgcgatcaacgaatggttgggtcaagaggtgatccgcttcgatgccttcgagctgggagcggcagcggcatga

SEQ ID NO: 522602 - DNA, 1191 bp, Stenotrophomonas maltophilia
atgcgattgaagttcaccaccggtggccgcgctgccctggtcaatgccgcgcataccggcaccaaggccgtcaccgtgacccagatcggcgtgacggatcgagccttcacgcccgaccctgcaggtggcgacctggtactgccaggcgagcgcaagcgactgaccaccttcggtggcaaggccgttgccgatgacgtggttcacctgaccgtgcgcgatgaatcgagcgattcataccccctacgcggaatcgccctctatctggaagacggcaccctgctggcgctctacggtggctcggaggtgatcctcgaaaagtcctcacaggccatgatgctgctggccgtcgactggatcctggccgacatggacgccaaccagatccagttcggcaataccgacttcctcaatccccctgcgacaacagagatgcagggcgtggtcgagctggcaacggcagaagaggccatcactggcaaggacggccaacgtgcggtaaccgccagcgcgctactggccacgctggacgcacggctgggcaaaggggcgccgtcaacgctgggcaagtcaatgatgggccgaggtgacgccgcagaggtgcgcgcggatctcgggctcaagagcgctgcgctcaaggatgagggtagtggcaatggtcttgatgctgacaccgtggatggcaagcacgcggcggactttgcggccaagcagcacacccacaccctcgccgagatcaccgatctggtcgccacccggctgctgccggcgggcatggtggcccattttccgactgcaacgccgcccgacggctggctacgctgtaacggcgcggatgtaagccgcactacctatgccgcgttgttcgccgtgatcggtacgaccttcggcaccagtaatggatctacgttccgcctccccgacctgcgcggcgagttcatccgctcctgggacgacggtcgcggcgtggatgcaggccgcgcgatagggtcagctcaggccgctacaaagatccagaacagtctggaaacccaggcgactaccacgattattcccgttcataacggcgaggaacccgtggatgctggccttggagccgttggtggcctcagcgggtacaacggcaatactcagcgctccctctggagcgttcgcccgcgcaacgtcgcgctgcttgcatgtatcaagttctga

SEQ ID NO: 522603 - DNA, 282 bp, Stenotrophomonas maltophilia
atgaagaccatgaccgcatggcagtgcgacgccgacggctacctgctgggccgaaccgtagccgacgaaagcccactcgaacccggcgtatttctgactcccgcaggtgcggtaatgaccaagccaccttactcagcccctccaaaagccgaatggcgctggtccgggagcgcctgggagctggtagcggcgcgtccgccaatgcgcactcttacgcccgaggatcgcctcgccgcattccttcgggataacccggacgtgtcggcactgatctctagctga

SEQ ID NO: 522604 - DNA, 231 bp, Stenotrophomonas maltophilia
atgaaccttgatcgtgtgattcaggttgccctgcaggcaaagcgcatgggcgaaaccggccccttatccaccggcgaggcgctgaccgccgccctggtgctgaatcggtgcgactggcttgcggagatgggatacaccattgctcaggcattggaccggattgactgcgacacgattcaacatctgggagatgccgcacgctgcgtcgtggaggattcttaccatgggtga

SEQ ID NO: 522605 - DNA, 1167 bp, Stenotrophomonas maltophilia
atgaagatcgccattgcgggcaccggctatgtgggcctttccaacggtatgctgttggcgcgccatcacgaagtggtcgcgcttgacctgatcgcagataaggtggagaagctcaaccggggcgagtccccgattgttgacgctgagatccagcaggcgctgcagagcggtacgctgaacttccgcgccacgctcgaccccgttgacgcctatgctgacgcggcatacgtgatcattgccacgccaaccgattacgatcccgaaacgaactatttcaacacccgttcgattgaggccgtaatcaagcaggtgcttgaaatcaatccggccgctacgatggtgatcaaatccaccattcccgtgggttacacccagaatgttcgtgcgaagtttggtgtcgataacattttgttctcgcccgagttcctgcgcgagggtcgcgcactttacgacaatctgtacccgtcccgtatcatcgtgggcggtagttcggctgaagccaaacagttcgcccagatgcttgagcagggtgcggaaaagcaggatgtgcccgtcctgcttacggattcgacagaggctgaggcaatcaagctgttcgccaatacgtatttggccatgcgcgtgtcctacttcaatgagctcgacacgtatgcaatgacgcatggcttggacagccgtcagatcattgaggggatctgtctcgacccgcgtatcgggggagggtacaacaatccttctttcggctatgggggctactgcttgccgaaagacaccaagcagttgttggcaaactaccagagtgttccccagaacatcatccgggcaattgttgactccaatacaacccggaaggacttcattgcaggggatatcctgcgtctgaaacccaaggtagtgggcatctatcgcttgatcatgaagagtgggtcggacaacttccgttcttccagcattcaaggaatcatgaagcggatcaaagcgaagggcgtcgaggtcatcgtgcatgagcccgtattgggagatgcagatttcttcaactcgcgcgtggtcaacgaccttgaggcattcaagcgcgaggctgacgtcatcatcagtaaccggatgtccgaaaatctcgccgacgtaatagagaaggtctacaccagggacctgtttggcgataactga

SEQ ID NO: 522606 - DNA, 1362 bp, Stenotrophomonas maltophilia
atgcctgcccaagccttcgcgctgaacgctgaccggtacgcacgccgcgctggcgtgggctggttgattgcggtggtctgccttgctgtggtgacttggaccagcatcggccttgtccagttcaacccgaccgatcacgttgcctggaagggtgattggcagactgcaaaacactgtcttgaacagacagtccgtttgccatgcgaagggatgagcaagtttccccttgcctatctggtcaatgcgggcataacggagacctccagcggcctcaccgctgtccgcctggctacactcaatttgttctgcttgttgctgccgcttgcggcattgtggcttacaaggggcggggtactgctgctccgtgctggctgggcgtatgtgctcgcgctggccctgagtcccttgccgatgttctacgtccttagtggcgcattggaggttcaggctggtgtcttctgtggcctatacatcgcggcgttcgttcaggtgctcacggcaccaaaccttcagccggccaggtcatcgtggtggatgttgggcctagcagggttcctgtttccactttacaaagacacactggctttgtttatgggagcggcgatggcgttactgctcctcgttgccattcgacctctgcacgccctgtataaacacacggcaggcagatcgcgtctcaggtgcgcgtttgccgttgccgtgggacctgtcctgctgtcgcaggttctggcggctgcatacagttggttcaagtacggggtgccgctgcccaaggcctacatggccgaggctgaactgaccactccagcgctggcaaagagtgctgaattcttctttggatccatcttctccccaaatggcggccttcttgtcttctggggcggggcgctgctcatgggcttggttggttggcggatcgtgggcctcgttccgcgccggcaggcgttgctggcagcgctgaccgtactaatcttgtcggccgtggcctttgcgcgctggtgggcaccattcggctgggatgcctggggcgatcgactcttgttgcctgctgccttggcgttgctcatcagtgccatgtgctgcctccgcatcttggagccggagcaggcaagcaaccgatcctgggtcggtgcggcgctggcgagcattcccttgctggtctgctccagctattacatggctgtcccttatctgagtccgaaaggggaggccatgacccgttcgctctggcccggcccggcctgtgtgacaatgcgcgacgcgttggcgaccgaggccgctgaccaaggccttgcattctggaaaggcaatacctactaccagtgcgcgcgggagcgcatgctccacgtacccgcaccctag

SEQ ID NO: 522607 - DNA, 1638 bp, Stenotrophomonas maltophilia
atgcggctcgcaacgatcatcggtgcgcttcttgtggcgctgttcgctgcgtggtgggcgagcaaggtgctgggtactgggccattggatgttcacaatttgcgttgggtttggggtgatcttgcccaggtgcacgtcgcctggagccagtatctgtctgacacgtcggccagctggctgaccacgttgcgcgtcagctatccagagccgatcagcatctctctgttcgatcccatgccgctgctcctgctgctggccaagccattcgccaatctggttacgccaggtacccagtacttcggctactacttcatggcatgtctggtgctgcaaggcgtgttcggctaccttgcggcactgcgcaccttgcgtcttaccgggcagggtgacgagcttctttcgcgatacgcggccgtcctcattggcatcctgtttgccagcattccctataccttctatcgcttccaaggccacaccgcactttcctcgcagtgggttctggtcatctctatctgggtcgccctgtccaccctggactggaaggggcgtgcatgggtgctcgccaatggagcagtcgtggtactggccaccggcctgaatccgtatctggcactcctggtgctgatcagcaacggaagccttgtcatcatgtcctggtcaacgctgggttggcggcaggttgcagttcgtctgggcagcatggcggcgcttgcggcgtttgggctctgggtgtttgggttcatgggcgggactactgcgagcacgagcggctacggcatctattcgatgaatttgctgggtccgttcgattccaatggaagcgccgcgctacttccgttggatgtccctgatcccactggcggccaaagtttcgagggctatacctacctaggtctgggtgtgctcgcgctgggtgcaatcacgctcctggtgtgtctgaatcaccggctgcaacccagtcgattccccttcatgtcggcactcctggtcgtacttctgtgcaccatcgtcgccgtgtcgaccaccattacgcttgccggacacgcgctggaagttcccgttcccaggagcatcaactacctgttgtcgcgcttccgcggcagcggtcgcctgttctggatggcaggattctggttgctgttgatcttccttgctgccagctctcttcgcctgggactacgtagactggcacttctcctgaccgcggtggtggccgtccagttgctcgatatccgtacgatcggccatcaagtacggctgaacattgactcgtatcaatcgttgcgcctgacggacgtcccaagtggcaattacaccgcgatcttcgtgtacccggcatggcagtgcgaccaccaggctaccccaggtggtgtgcgcaactatgagtcggtgggacaccttgccgcctcgataggaattcccaccaataatttctatgctgctcgtacacccgataagcagactgcatatcactgcgactacgcagcacgtctcaaaacgattgatccaggtgcagtctatcttgtttcgggggcgctactcgagcagcatcgttcgacattgacggcggcgcacgagtgcacgccaatggccaacagcgagggcgcatggaaatgcctgcccaagccttcgcgctga

SEQ ID NO: 522608 - DNA, 600 bp, Stenotrophomonas maltophilia
atgaatcgttacctgcaggcttgcctggctacggtcgcgtttgtgctgacgttgtttgtcatacatttcctgcatgtgcactatttccgtgtcaacgtggtgctgtatgccgcattgattgacgcgctgattgccgcggcggtgacgggaggcgtgctctgggccgtgcgaggtttggccgcgttcagtggtctggaacgcgttctgttgttgtctgtgtgggcgctggccggctatgcgttcgccatcagcgtgccgacggtcgtagatcgttcgctgtcattctacattctggaaaagttgcagcagcgtggtggcgggatccagcaggcgcgcatgggcgatgtattcgtcaatgagtacatggtcgaacatcggcttgttgacatccgcctgacggagcagctgcagtccgggaccattaccatagaaaatggctgcgttcggctgaccgacaagggtcagcgcgttgccagcctggggcgcttctacaggacgcacttcctgcccaaggagcgattgatcatggggcaatataccgatgatctcactgatcccttcaggcatagtgcaaaaggcgtggattaccagtgtcgatga

SEQ ID NO: 522609 - DNA, 408 bp, Stenotrophomonas maltophilia
atgtctcccatgctcgcgagcgctaggacggctctcggcggacagttcttccgctatctgatcaacgggcttgcagcgaccgccgtgcactacggtgttcttcgcttcaacatcgaagtgcttgagatcccatcggcaggcgtggccaatgggatcgctgctgtgttcggaattctcacgtcgttcctgggtagtcgctacttcgtatttcgcgcaaccgatcggagtatcgttcgtcagggttcgatgtttctggcggtctacgccgttattgccgtgtttcacgggcttattctctacgtgtggacagaccggctgggattcgactacaccgttggttttctggtggccaccgtgatgcagatggcctgtagcttcctcgccaacaaattcatggtgtttcgatga

SEQ ID NO: 522610 - DNA, 948 bp, Stenotrophomonas maltophilia
atggtcacgccgtcaaggatcgtggtgatgccggtgtatgaggacgtggaggcgtccacccggctgttccaggaacttgcccgtacccaaggtcctgatatctacgtggtggctgtcgacgacggatcagtgcgccagccgctgcaggtccaggccattgcggatgcaggtctcgacggtgtggtcatcaaactgcgtcgaaatgttggtcaccagcgtgccatcgccattggactgagctacgccgccgagcacttcggcgacgaggcaatcgtcgtggtgatggattcagacggtgaggacacgcctgagagcatgactgaactcgtcgcgggcttgtcctccgccgatgtcgatgtggtcgtggcaacccggaaaagtagggtggaatcgatcaagttcaaagccttctacttggtctacaaattcctgttctccatgctaagcggtcgcaggatcagctttggcaacttcatggtagccaagatgccggcggttcgccgtttggcggcaatgcaggaattgtggacacatgtggcagccagcgttctgagctccaagttgcgtgtacagagctgtccgctggaccgcggcccgcgatatgccgggaagagcaagatgaactttgtgggcctcgcgttgcatggcttcagggcgctgatggttttcgcggaagatgtgctcgtccgtgtaggcatcgcatgtacgttggtggcaggcctgtcggtcgtgggaggagtggtcgcactcctgctcaaggctatgggatttgcaacgccaggttggttctccttggcattcggtattctgctgctcgtgttcctgcagacggccgcgctgacgctcatcatcctcatgctgtcgggcatgatccgcagtggtggcgtgcttggcattggtagttatcgagaattcgttgaccatgtctcccatgctcgcgagcgctag

SEQ ID NO: 522611 - DNA, 876 bp, Stenotrophomonas maltophilia
atgctgaaggaacttcagcagcagggctgccatgtcatcgccctcggtgccgcgggcgccgccaccgaggcgcaggagcacgtgttcgcggacctcaccgatcgcgaggccgtgttcacggcagtagaggctgctcgcgtcgactttgtcgtgcatctcgctgcgctagcatttgtcgggcatggccgtgtagaagagttctacgcagtcaacctgctgggtacgagaaaccttctggatgggcttgagaaggcgtcgcacgccccggcttgcgtcctgcttgcgagcagcgccaatgtttacggcaacagctctgcgggaatgctggacgaagacacagtgcctgcgccggcaaatgactacgcggtgagcaagctggcaatggaacatgtcgccggcttgtggcgggaccgtctgccaatcgtgattacccggcccttcaactacacaggcgtggggcaggccgctcagttccttgtgcccaaaatcgtgtcccatttcgccagaagagcgagcgtaatggaactgggtaacctggaggtctcccgcgacttcggcgatgtccgagccgtggtgtctgcctaccgccagttgctgcagcagacagaggctgtcggccaggtagtgaatgtgtgcaccggtgtcggtcgcacgctgactgagatcgtccgcatctgtgcggaactcacgggtcacgagcttgaggtccaggtcaatcccgactttgtgcgaccaaacgaagtcaagatcttgctgggtgacaaccggcggctgaagtctctgatccaggactggaattggccggatatgcggcagactcttgcatggatgctggaggcggaaactgccaaggtggcacccggggccagcgactga

SEQ ID NO: 522612 - DNA, 2550 bp, Stenotrophomonas maltophilia
atgaagatattgatggacctgcagggcgcgcagtcggagagccgttatcgcggcattgggcgctactccctttcgctggcagaagccgttgtccgtcgtagtcgcggccacgaggtacatattgcgttgaatggtgcatttgttgacaccattcagcctattcgcgagcagctcgccgctcatgtgccgcgcgagaatgttcatgtatggcatgttccgttgcctgtgatcgccaaagacctggtcaataacggacgccgagccgccgcccaagtagtgcgcgaggccgcgctcgcagcgctgagtcccgacatcatccatgtctcaagcctgttcgagggctatgtcgacaactcggtcaccagcgtgccggtgcgcggcgatgtgccgactgtcgtgacgctgtacgacatgattccgctgatgaatccacaggtctacttggattccgaacccggttatcgcgacttctacatggagaaactggagcatgtgaagcaggcggacgccgtgttcgcaatctccgcaagctccggagaggaggcgcggacatacgcgggcgttccagagcagaatgtcttcgagatatccacaggttgcgatgcggtatttcgaccactggctgcggccgatgcctccagacagctcgttcgtgcgaagttcggcgtacatggcgagtttctgctctacacaggtggctcggacgaccggaagaacctggtgcgtttggtgcaagcttacgcgtccgtcgatcctgccctgcggtctggcttgaagctggtatttgcaggtcgtacgcatgcaccccatgtggcgcaattgcgcactctcggagatgagttgggcctggatcaggatgcgcttcagttcattgggtacgtgagcgacgaagagctggtggcgttgtacaacgagtgtctgatgttcgtcttcccctcctggcatgaggggttcgggctaccggttctggaggccatggcctgcggcgcggcggtgctggcgtcagacgcatcgagtatccgtgagatcgccaccgagcgcagtgctttgttcgatccgatggatgtagcatcaatacgctcggtgctggagcgacatctgggtcgccgcgacaccctgcccgccctgcgcgcttactcccttgaacgtgccaaggtcttttcttgggatgtggtcgccgaccggttcttggacgcctgcgaatccgttggcgctcgggatcggggagaattggcccaggccccgatcctggtcaaagcagtggacgccctgagggcttccgggccattggctggacttgacgcgctgcaactggctgatgcattggacagaagcctgccgcctccacatcggacgctgcttgtggacgtaaccgagatggccaaccacgacctgcggactggcatccaacgcgtgacccgcgaggtgattgctgaatggggtcgaaatccaccagcaaactatcgcattcagctcgttcgcattgatcgcgagaagaaggaatacgtatgcgccaaccgttatgcatccgcattcttcggcacggctgaggaggaagacacgccgctggtttgccacgcaggagatgtgttcctgggtctcgatctggtcggtgatgcagtctcctatattccagagtggttcgcgcatatgcgcagaaccggggtcaagattgccttcgtcatctatgacatcctcccgattcgccatcctgagtggtggccggagggtgggggctggcaccacgagcgctggctgcgggacgtcatcacggtctcagatcaagtcgtgtgcatctcacgcgccgtggccgacgacgtcgagtcctgggtgttggagcagtcccatcccaatccgccacaggtcgactggttccaccttggtgccgacctggacggggcggctccacgggcggatgtgccggatagtgcgtcggcgctcatggagcggttgcggcaatctccgtccttcttgatggttggtacgctagagccgagaaagggtcatctgcacgtactcaacgcattcgagcaactttgggcgtccggccagtctgtcgcgctggtgatcgttggaaagaagggctggatggtggatgaactctgcacgcggctggaggcccatccggagcagggacgcaacctgttctggctgccgaaggcggacgacgccctgctggaggcgctgtacgccggctccacggccttgattgcaggttcggaaggcgagggatttgggctcccgatcatcgaagccgctcagcgcgggctgcccgttatcgcgcgggatattcccgtattcagggaagtggcgggacagcacgctcacttctttgcttcctcggcggccaaggatctgtcccgcgagattgacgattggctgaacctgttcgagcgcgggcagcatccgcgcccggatggcttggagtggttgacctgggcacagagcgcggagcgcctgaaggcagcggtgctcgatcctgacggcgctgaaggccgagagacaaagggcgagccactgttaggccggaagggcccggcggtaggctaa

SEQ ID NO: 522613 - DNA, 2085 bp, Stenotrophomonas maltophilia
atgaataacaaggcggcacgcggtgaagacgcgatcactactctggtgagcgcattgcctgagaaataccagcccatctttgggcacccggagttgtctgacggaagttcgcgcagttgcgtggacagattgcggatcattactgatgtcgtccaccggctgcagtcccagcttgggcgtccggtgcgcgtcctcgatctggggtgtgcccaaggattcttctcgctcagcttggcggcggacggctgcactgtcgttggtgcagactatctgcagcaaaacgttgaggtctgcagggcgctggcggctgagagcggcgttggtgccacttttgttcacggaagcattgaagatttggtctgtgagttgaaggctgggcagtacgacgtggtgttgggcttgagcgtgtttcaccaccttgtgcacatgcatggattctcggcggtcactgacatcattgcccaccttgcagctgtcatacctgtgggcatctacgagctggcgttgcgcgaagagcctgtttactgggggccgtctcagcctgagcgcgccagcgatctgctgggctcgtacgccttcgtccgcttcatgggcagccagccgacccatctttccggcattgatcgcccgctttattacgcaagctctcgatactggcatctgggtggcgacttcaggctctttgacgagtacaaggaagtttcacacacgcacgctatgggcagtcaccatggaacgcgccgctacttctttgcaaaaggcgtgatgctgaaacggatgtcgctcgaacacccggacctgctgcttccgaacgtccaggagtacgaacgtgaggtggcgtacttgggcggcagcgaagtgcttccggggtcgccgcgtcttcttgagcacagtcgtgatcaggaggccgtctggttgctgcgggaattactgcccggtcagctcctttcagtgatgatggcgcggcagactccatactccagcgagagggtggtcgactccctcttggatcaattggtcgcgttggagcgcagcgggcggtatcacaacgatattcgaccatggaacgtcattgtcgatgatgctggagatgcttcgtttatcgactacggtgcgatttccgatcaatccgaagactgcgtttggcctgatcatctgttgctggccttcctgatcaccgtgcgtgaaatcaccatggggcaggtaagggagccttatcccacccggcgaccactgctggatgtcaacatgctgccaatgcgctatcgaagcgcattcctgactgtgctttccaagccggcggacgagtggacgttcgctgccctgaaagcggccatggaccagccggccgccgccgcctcgcattcctgggcagtggtagctgctttgaatgagcgcgccctgctcaagtacgaggatgcgcttgaagctaagcaagggcgtctgacacaggttgagcgcgagcttcaggagtccttggacaacgcgcaccgttggttcctgaaggcgaccgagcgggagcagcaggtggcgcagctcagcgaccagaatcaggcgcagacacacggtacccagcgtcttgccgggcggctggaacggctaggttcgagctactcgcatatgcgtgaggagcttgagtcggtacgcggggagttgtccggtgcccaccagagtgcccatcattggttcctccgcgcgacccaactcgaaggcgagatgcacgctttgcaccgaagccgttcctggcgatggactcggccgttgcggttccttagtcatctggtacagcggccgcgctatgcgacccgacgcgttcttctggcactcatgcgtcgtgtgatggcgcgtccagcgttggcacgtgcactcaacaaagtaatcgtggttttcccgggggtgcacgccaagctgcgctcagttgcagtcaaccacgcggtggtcgatgcggccgtgccgcacgtcgaggttgccgggcaggtgcagagcttcgcaggtgcagaagatgaagcgagcaagctctccattcgtggcagggctattcaccagatgttggttgaggaggaacgccaggaggggcggcaatga

SEQ ID NO: 522614 - DNA, 1284 bp, Stenotrophomonas maltophilia
atgagtaccgccatgcacgtcagaaatgtgggtaagtcctatcgcgtgtggggcagcgaatggctgcgcattgccagttggttcggttttccagtgcgaccgaaggaggagcactgggtgcttcggggggtgtcgtttgacattcggccgggtgaatccgtcggtattgttggtaagaatggtgctggcaagagcactttgctcaaaatgatcaccggcaccctgcagcctacggaagggcaggtggtgcgcggaggccggatcgcggcgattctcgagcttggcatgggattcaatcctgagctcacgggacgccagaacgcgaggcacgcggctggcctgatgggattctcccaagcccagatcgacgtaatgatgcctcacattgaagcgttcgctgaggtgggagagtacttcgacactccagtgcggacgtactcaagtggcatgcaggtgcgcgtggcgttcgcggtggcaacagcggaacgacctgacgttctcattgtggacgaggcgttgtccgtcggtgatgcctacttccaagccaaatgcttcaagcgggtcaaagagtacaaggagcagggaacgaccctcatccttgtcagtcacgctgtgggcgatatcgtcaagcattgcgatcgagtgttgttcatcaaggacggcggtctgcacgcagacggcccggcgcgtgagatatccaacctgtacctggacgagctgttcgggaagtcgggcaagagtgacgctaaatccgcaaaagagggtggcgaggcggtgctttcttcaagcgggattgaagacctctttcatacccggcgcggctacaacaaggatgagcaccgttgggggcacggcggcgcacgcatcatcgatttcgcagtggtcgttgacggtgaggcttatcctgcccgtctgagtagcggcgattcagttcagttccagatgaagatccacttcgaggaggatgtggaaagcgcggttcccggcttgctgatcaagaccctcgatggcgtttttctctacggaacaaacgcgttcctggcaagcaatggccaaaaggtgctttcgcccaaggccggcgacgtagtgattgctaccttcaaggttcccttcgcagtcaacgaaggccactacatggtttcgctggggatctccagtggcgacccgttgggtgagttggtacccctggatcgccgttatgactcgatacttgtggatgtgagccgccccatgcagttctggggcatcgtggacatgaatgcggaattctcggctcaaggctga

SEQ ID NO: 522615 - DNA, 795 bp, Stenotrophomonas maltophilia
atgaaagaccttctcaggtcgttgtgggtctacaggagcttcatcctgacctcgatccgcaacgacttcaaagtccgtttcgcccagagcaagcttggtgtgctgtggatggtgattcatccgctgatgcaggtgctgatcttcgccacgattctctctgaggtgctttcggccaagctgccgggaatcgacaacaagtacgcctatgcgctgtacctgatggcgggcaccctctgctgggggctcttcgccgagtcgatcagtcgctgcgtcactcttttcgtcgacaacggcaatctcatgaagaaggtcgcatttcctcgcgtatgccttccattcatttgtgctggcagcatgctgattaacaatgcgttgctggtgcttgccatcttcgcggtgtttgctgtgttggggcatatgccgggtgcaagtgtggtctggctccctatgctcatcctgctgaccctgttgacctccatgtcggtcggattgcttctgggtgtgctcaacgtattcatgcgtgacatcggacaggttgtgcctgtcctcctgcaagcattgttctggctgacgccgattgtctacaacatcagtatcctgcccgagtccgtccgcgaaatcttcaagctcaatccactgtatccgctggtgacggcttaccagcaggtattgctgtatgggaaggatcctgactggatgtctctgcttccgcttacgatagttgccgtcgtactgggcgtggcttcgctgattgtgttccgacgcgccagccaggaaatggtggatgtcctatga

SEQ ID NO: 522616 - DNA, 1326 bp, Stenotrophomonas maltophilia
atgctgaaacgtttgtacgcgctgctctcgctgcgtgggctgcgctgcaggattcgcgcgcggcagttgcaagccttgctcgcccgccacgccttcgtgcgcacggattcgtggtctcgtaccgtccccgcggtagaggcgggtgccgccgtctcacatggtttcccctttggcgtgaacattgtgggatatctgcgaggcgaattcgggctcgcggaaagcgcgcgcatgtatgcgcgtgctttgatcgattctggtacgccggtagcgctgcacaccttggatctgggcgtgccgcacagcatggccgacaccacctttgacggaaagttctgcgctgaccttcctgagcacgtggtcatcatcttcatcaacccggactatttcgacgcagcggtgcgcgaaattggccacgccaagctccagggcaagtacgtgattgcctgctggttctgggagcttgagcgcctgccggaaacatggcttccagtgttgtcgcgcgttgatgagattcttgctgcgagtgaatttattgccgatgcgatagctggagcttcgtcattgcccgtgctgaaggcgcctgtgccgctccctgccatgccgcgtgcggatattggtcgcgacgcatttggaatgacatctggtgcattcgttttcctgtttaccttcgacttcaattcgtgggtagagcggaaaaatcctcaggccgtgctggatgctttcaggcaggcattcccgctgggcaccgagccggtacagctgatcatcaagaccagcaacggtcatcatcaccctgatgcgctgcgcgctctggcagataaggtgagctcggatcctcgggtcatcgtccggaacgacgtcattacccgcgagcagttgaccgcgctgcaggccagttgcgatgcctacgtttcgttgcatcgtgcagaaggctttggcatgggcatggcagagtgcatgcagttgggtaagcccgtcatcgctacctcttggtcaggcaacatggaattcatggatgccgacagtgccgccctggtgagatttactttggttcctgtaaagccaggccagtaccccttcggcgaaggccagcgttgggctgagccggacgctactcatgctgcaagtctgatggcgaaattagcgggcgacccggaggcggccacgcaactgggtgagcgtggacgactgcatgtgcagcgcgtcctatcccccgagcgagtggctcgccagatcatggagcgtgtgagcgtcatcatgtcagacgcgaacgcgcttgccgcatctaaccagacacatggaaacgcccagaggggcaatcaatga

SEQ ID NO: 522617 - DNA, 756 bp, Stenotrophomonas maltophilia
atgtcgaggcgcaagcagagcggagtgctacttgtcctgcgaggaattgacgatacgcatggccattgcgcggaactcattgcacatctgtatcagctcttcgcccagctcagcgatctgctcacagaattccacatcaaacggctccacttcatcttcattgccaagcgggcgtccctcgtccatttcaatggtatcgataaggccttgcacggcatcgagggcggcgttgatacgagcgacgagaggcgacgcgtccaagggcatatgcttgagagcgtcaactcctacgtcaacgcgcttcgagactatccgaagtatttgggtggagatccgaagtcgtccgtaaattcgctgatccgcgggcaagctcaagaacctatcgacgctacttttcaccaaggcggcgtcggcgagggccaaggtcgcggaagttacgtgcgtccgacactcatctgccgctactgccttggcgtgacgaatctcgtccttccgctgcaggtgcccgacaagcgcaaagaaaattgcgccaagtccaatagcccacgtcccgtaggccgcaagccaatcagcgttacttcccgagccgtcgccaggaagactccaggtcattcccgcagtcacccatacggcagcagcacctgcgacaaatgcgatggaaatcgccgcagtgaacaaccctacggacatttgaagcctgttcttgcccatgtcgccccctgtggcgtccctgtcaatacggcgattttggcatga

SEQ ID NO: 522618 - DNA, 261 bp, Stenotrophomonas maltophilia
atgatccagtccctgttcgcattctcccttctcgcagccatcgcggccgtctccattggctgcgtccgcatcgtctcttggctgctcgaccggcgtgattacaccgcctcgcagcagttgcgcgaagcaaccttcgtcgccgaggcccgcgccgaactagccgcatcaggctggaccgctgaagacgaagccgcgttccaatccatccgcgcccagcagggcgtttccttgaggaatctgcaggagatgcgccgtgcgtga

SEQ ID NO: 522619 - DNA, 321 bp, Stenotrophomonas maltophilia
atgcgcaccccgatgaagttcagcggcaagccgcagtcgtacgtgaagacactagaagcacgaattgccgcccttgaggccacagtcagcgccttagtgatgatcaacggatcacccgagctagcgcaggcattgaaggcatccgtgaactggcatgaagaattcatgcgtgaccccgccactcggactccgcccgagtttgtgcgcgactggcgggcagcgcttttccatctgctgagcgagccgtcgtcacaagagggtgactcacctgctgccactccgaacgaatccgtcgatccgcaggagagttcgagaagctga

SEQ ID NO: 522620 - DNA, 795 bp, Stenotrophomonas maltophilia
atgtttgacgacatagttaagggggtcagggagtacgtttctgacaggttcatgagtcctctaggggcttcgctcaccgtgtcatggtgcctctggaactacaaggcattgctgatagtgctgtcaggcgaatccgcgattcgaaaaatacacttgctacatctggtctatcaagacaacgtctactccgcagtccatctggcagctggccccttggctacggcagcattctacattcttgccttcccgtatccgtccaattgggtctatagctattcactaagacgccgcaaggaggcgcttcatctgaagcgtgagattgacaaccagaccgtccttacgcaggaggagtcgcgcgcacttcgaatgcagttcgaagaaatggaccttgagcacacttcttcgacgctaaggcttaatagccgtatcgacgcactgaaagagcagcttaagcaagccgtcgatgaaagagacgatgctctcaaacagttgaacgacgtgcgcgtcacggcagctgagccggccatggaggacaagcatgacggcgttcaagaaattgtgttgagcaagctccagtggcgcgttgtcgacctgcttggccgtcgcggtagttacgttaaggtctctacattggcgacctttcttgagctgggtgaggctgttgtttggctcttgcttggcgagttggagggaatgggcctcgtccgccgcgaggatcatgactatgaaactgacactccaaggaatgcagggctgacagacgatggccttaggctatttatgagcaacctctag

SEQ ID NO: 522621 - DNA, 750 bp, Stenotrophomonas maltophilia
atgtaccgatgggtgagccgattcatcagctaccgcagcttctacctttggcgggcgcggtatttctactacacccgtcacctcgatgcctggacgctttccagtctgctgtgcctttcgggtgcggtcatgctgctctggtattgctggcgcttcaccactgtgccaccgccccgcatgcatccgcaggctgcagccctgcgggtggagggcatcaccaacgaggcgatccaccgcatcgtgctggtgcgccatggtggcagtacgccggggcaggagttcaccacggcgcaggagatccgggacagcaccgtgcgcacgatgcgggtgcggcaggtgctggatggggaagtggcatggcgcctgagagcggatctgctggcggacatcgcggattacatcgaggccaccaatggatgtgtgccttaccgctgcgcgcgggtgcaggaccgcatcgtgttgttgcgcgaggcggcggcggagaacacgggcatcaaccaggccttgcagcggattctggatagcccgagcgacctggtgccgagcctggaaagcagcgaccggcagcgggtgaaaagcggctggtcggactcgttcaacgacatctaccatcagacgtggttgttgaatgatctgcagaccatgcacgcacggatgatggcggaatatcccaggcgcgctgccgcgccgtggctggccgcgtggatgagcgagcccgagcacccgcgcggcaccggaatgccactgtag

SEQ ID NO: 522622 - DNA, 1146 bp, Stenotrophomonas maltophilia
atgaaccggcgttggatgttcgtgttgatgctggtgtgtgcgctggtgctggtgatgccaagggcgtgggcgcagtggccgccggaaacgcatccggccgaccagagccgggacatcgtgatgagctgggatcgctcggcggtgccgggtgatgtggagttgtgggcgccgcggacggtgctggggttcagtcacgacctggcgctgaagtatgggcagatccatgttctatgtgagtcaaggacggactcggagtttggaaaatgtgcaactgaagctgtacttgaccctgatgtcggacggtctgaagtgattatccgattggttgagctgcgcacgggtctgaggactgagattcgcgcggctggatacatgagaagaatcatgtccggtcggctatgtgcatcagatttatggtacgacagggagtatccactgcatgcagctctatggttccgctgtggcgttggagtgggcgcggatgacccgctcggaactggtgttctgcttagcctgatctcgtcggatctggcgcgcctcgtagcaggtcactggaaggccacgatgcgcctgaacatcaaggccgaccccgccgcagcgcccgtcgccacagccaccttcaacttcgacttcaccgtcaccgattacgacgcgatctcgatctacttcccgaccttcgacaccatcgcgccgctggtcaatctcgatctgcgctacgaccccatccagaaggtcgtgggtggcaggaaacaactggacatgtgcctgtacgacggcctgggttcgcagagcgagtacctcgacgtcacggttcgcgacagcggtccgcgcccacctgcgggatcggacttctcgctctggcaccgcgatggcggcagcgatgccagccagcgcctggactatcgggtccacctggactacggcggccatcgcctggcgatgaagcacaacgtcaagcaacagctgcgcggcatcgacagcgcacagctgcggctggtgatgctgccgggcatcagccagccggtgtactgcgtgccgacgccgctgaccctggaaacaccgcccaccccgatcgccagccagcgccccgggctgtacgagggcgagctgaccgtggtgctcgacgtccccaccgccaaaccctga

SEQ ID NO: 522623 - DNA, 348 bp, Stenotrophomonas maltophilia
atgcacgcgaccggattcgaccgcgcggcggagcgcgctgtcgggcgccagcaggcgcttctgcccgaccatttcgtcgagggttcgcgggcgcatgcgctcggccagcgggcgcatgtgttcccgatcgacgctcagcagatcggggccggggaaggaagtggagcgatgtcttggcacccgctcattgtaccgcgccgggtgatcacgattccggtagtgccggccgctggccggcagccccgcaatgtgtcggaaatgagcctaagccgccgcagccaatccatcggtaagccactgattcacatggagcttgctttcgcggggcccgtgcatactcatcattag

SEQ ID NO: 522624 - DNA, 1917 bp, Stenotrophomonas maltophilia
atgatttcgtcgaaacgcgtacggccggaatcctgggggccggtgggagtgaaggcactcgagaagagcgcgctggaagtggttagatctgaggacaaccgttccgtcatcgccggtcctggtgctggcaagacagagctactggcccagcgggcagcatacctacttcagaccgggatggccccggccccgagacggatccttgcaatcagtttcaaacgcgatgcggcggagaacctcgcggcgcgtgtgcggcggcgctgccatcgcagtcatgctgaacgctttgactcaatgaccttcgatgcttttgccaagggtctggtggatcgtttcggccagtcgttgcccgcgatgtggaggccgactgtcgactacgacttacagttccccaatgaacgggcctaccgcgagttcttggcggccctcaagggtattccatcgaacgttggtaccgatggggatgtccgggcgatcttaccgagcactttcgagcggagtttggtgctgggatcgtctttgcccgcagacggttggcaggcgccgaacgcggggcagtgggcggctgctcgcttctggggcagttcgttgcacgcggggaagcgaagtcatctctcgtttccgatgctggggcgactggcggagttgatcttgagggtcaaccccatggcccgacaggcactacagttgacctattcgcatctgttcatggatgagtttcaggacaccacacccgtgcagtatgacctggttcgtcagatattctcgggagcccattccgtgatcacggctgtgggcgataacaagcagcagatcatgcgctgggcgatggcaatggatgatcctttcggcgtatttgagagggatttcgacgccaagcgaacaccgttgtacaacaactaccgttcatcacctgacctggtgaggattcagcacgttctggcgcaggcgctcgatgcgcaggctgtcgaaccgatttccatggcagcagagaatgtcgatggagagagctgcgaaatttggaacttcacgacgccggagaaggaggctcaccatctagcccgctttgtggtcgaagagattcgccggcgcaatctcagtccacgggatttcgtccttctagtgcggcagagggccgatgactatgccgagattctggcgccggcctttgagaatgttggcctttccctgcgaaatgaggcgggcaaggtgggtaatctcagtctgcaggagctgctctcggaagaggcctctcagtggatagtcaatcttctacgattggcgatgaccgagcgttcgggtcgctactggaccgccggtcaggagacattggcctggctcaggggcatctcgagtgaggacgaggtggcaatggagagactcgcacgcgagcttgacgtgttcgcgctccagcttcagaaagcacacccggggccaccggagtcggaggagggggccgaggccctggtgatagagattgcggacttcctggggggggatcgtctcatggcggtcgttccatcctatcggcaaggcgattggttcgccaaagtgttgctttccgtttccaaccatttgctgtcatcttccatgggaaaatcggcgtgggtggatgccttggattcatatgaggggcagcacgccgttcccttgatgacgatacacaagagcaaagggctggagtacaacacagtgatctttgtaggcctagacgatggggcgtggtggaacttttccaaggataagattgaggccaccgcggggttctttgtcgcattcacgcgagcaaagcaacgggtcatctttacctattgccgtcagcggggagcacaggagaagattgcctcgctctatcaactgctccatgatgcgggcgttggaagccgcgatattgatcagttaagcgaggcggggtga

SEQ ID NO: 522625 - DNA, 1566 bp, Stenotrophomonas maltophilia
atgttctggctggattcgctgattgatgagcccgaagaagacgcgcgtcatccggtctctgccgcagatcggggcctcatccagctctattacacaccagcaagccgcgacccggctgcgcaagtcaaggcgacggcgggtgcattggcagctcgattgttgcgggccattgagtggtcctcggaggccgagggtgccgtagagactgcggccgctgatctttcgaaagcgtttggggatgagcctgcgatcgttgcaattggcgatgctctacggaagcgctgggctgatctctatgatgatgaggtggatacgaagccgcgattgagcttggtcagccgacgctttgaggaggtgatcaacaagatcaccgtcctgtttgagcaaggcgctgatggacgggagcgcagcttggatgtgttgagcgacggccagaagtcgctgttctacttcgccttggctgctgccgtgttcgacctggagcgtcaagtggtgaagggaaaagtgacgggctttggggagggaaggctccgcattcccgcgttgagcatctttgctcttgaggagccggagaatcatctttccccgtacttcttggcacggatcatcgaacaggttcgctccctgaccatcgccgatggtggacaggcgctcattaccagccattctccggctgtgctgagtcgcgttgagccgagcgaagtcaggtactgccgtcaggatccgagaacgaggatctctacggtccggagcatccgattgccgcaggaggcggatgaagcgtccaagttcgttcgcggtgcgcttcttgcctacccagagctgtacttcgcgcgctttgttctactggtcgagggggactccgaaagaattgtcctgcccactctcgcaaaggcaatgaatctcttcattgaccctgcattcgtggccatcgtgccattgggcggaaggcatgtgcagcacttctggtttcttctcaagcaactagagattccccatgcgacgttgttggaccttgatctagggcgttccggaggcggctttggcaggatcaaaaccacgatcgagaagctcattcaatttggcacttcaaggagtgccctcctgagcaacgatcaaggcgagatgccagaagaagcgtttgcggagatgcacacttgggaagatccgcagagcatggggtatctcccgggatggacagagtttctggagagatttggcgtgtatttctgcgcgccccttgatctcgaccttgccatgctggaagcgttccccaaggcctatgaggccatcgtgcctccgggaggcggttcgcgaatgactctcgagaaggcatctgaggctgcgctgggtgaggcaggtcctggaatggggctctacgcgacgcactatgcgacgtatcccgcacgctttcctgcctatcgatatcacttcttgacccatagcaagccggtgactcaccttactgcgatggcaaacctcgaggacggggagctggcgcagcagatgcccgcgacgctgaagaggcttctcgagcacgtccaagcgtcgctgcggcaggggtga

SEQ ID NO: 522626 - DNA, 498 bp, Stenotrophomonas maltophilia
atggatcggctacttattgaaatggcgtcgatggtatccgtgatgctcagcgcaatgactgggttgggaaccatcatgattgcgctagttttgacaaaattctggcgagcgaatgaggctcagcgtcacgcagagcgcgtagagcgaacgctgaaggcgctgcagcttcctgagaatgtctcagatgcgctggggaaggtgctttggatgcagcaccaagagctctccgctaaggaagaggaattgtgggagtcgggtgtattctccgctctggacttctttgaaaatcttgcagcgggtattcgcgagggagtgtacgacgaacgcatttcgtacaaccgacttggcgatgcattgccacggttctatggcactgtggcggttgctctatataggcataggggcgaggggttgagtccaagcctatatgtggatctggaggggttggtaaggagctggaaggggcgttcttcaagctcagtgttgaggggggcttga

SEQ ID NO: 522627 - DNA, 615 bp, Stenotrophomonas maltophilia
atgcaatcttcggacgccgcagtgagacaccgccagcccccaatactcgaggattctgtgcacagaactagcttgtctcatccgttgcagattgcgggactttccgtcggtgccaacggaggaaccataggcgttacctttgcccccggtaagcatcagaaagttgcaatgacgggctcgtggtgtagagatctcgagctcgatctagcgtccgtctcagcttggggatgtcgccatctgctttccttgattgaaccgtgggagttcgacgatctcgggatagggtcgctacccgaacgcgcgcgcgctcatggcctgcactggcatggtcttccgattcgtgatggagaagcgccggatcctcagttcttggacgagtggacacgactaggccccgtcctcactgacgatttgctccgcggtgacaaagtagtcgttcattgcaaaggagggcttggcagagcgggcaccgtggcttcgatgctactgctcgagagcagatcatgcctaagcgctgaagaagctatggccagagttcggagtgctcgtcccggagccgtggaaacggcggagcaagagcgcttccttcttcactgggcttctcggatgctctag

SEQ ID NO: 522628 - DNA, 258 bp, Stenotrophomonas maltophilia
atggtgcgacaggtgttctgcgggggctatcgggaattgctggtggcgtggctagggggattctggaaaggcgtgttcaacagcgaagttggagggcgatatagtggctccatgcgcgccaaggtgggggcacagaaggcttgctcagctctgacgcagagaagtgggtatgcgaaagtcgattccgccgtgggctgggttcctctctttcattggttgcctttcgttgcccggtctgcgcgtgggtgtgagcaatga

SEQ ID NO: 522629 - DNA, 555 bp, Stenotrophomonas maltophilia
atggtgcaccccctgcagaacgtctacttcaaccttcttgcgggctctgattggaagcgacgatttgaggtcgattactgggggctggcaaacagatccgcgatcgagtctgtagttgatctgaagggtggacggttgatttcaataaaggccgtcagtaggacaccacttgatatggcgttgctggatatgccaccggattatcgaaagcgcgtggtcattgtaaatgataatgcgagaccagagttcattcttgacaactatcgtggcggttcgatttgcgcggattcgtgcttttcagggggctacgaagagtatttccggaagcaggtggcgggtgaggacgttgtgtttatttccaagttgaaacaaggtttcgtcgcggatccctacttcaatgtagttcccttcgctggtcgaattgcactggatgtggcggccagaattgagcttcttatcatggagtgttcaccagtggtcggtggtgtcagcgctagggttcggataagaaatggttcagattcgatcttgaaaaccatcgagactgaagggtga

SEQ ID NO: 522630 - DNA, 171 bp, Stenotrophomonas maltophilia; identical to SEQ ID NO: 520118

SEQ ID NO: 522631 - DNA, 243 bp, Stenotrophomonas maltophilia
atgggcaggaccgttggcgccatggatggcgccatcgagcccccaaggacgggtttacggcgtgtcctgcccacccacaccgtcccgcccaactcacagacaacccagagccggctgttgctgttgacgttgccttggcttgaagcaggtgcagggctgcaagccctgccgaccccccactacggtagggtggaccgatgccgcgctgcagcttggcgccgccgcagatttgattacacttga

SEQ ID NO: 522632 - DNA, 360 bp, Stenotrophomonas maltophilia
atggacgagattgatcacgacttccaggttcaacacttcgaagcgatggtggccgcggatgatagggacggtgccagtgagccgctattggaaaagttgcaattcgccctgatgcgaaggcaattcgaagtaggcgtgctccacgcactcctgcgcagcaagtgcgggggagatcgcaccttgaaatgcggccatgcagagttccctgaacgggaaccatatttatacaccagtcagttcaatattcagggtcgattagaccccctaacggataattcacacctgtcgaccgcctcctctctctccccctcccgggaggcggccgacgaaaccaaaataattaaaggtgtgtcccgatga

SEQ ID NO: 522633 - DNA, 780 bp, Stenotrophomonas maltophilia
gtggcgctgatcagcgtgccaagcgcaggtgtgccagagctggcctacatccagccggatcatctaggcacgccgccgcgcggtgatcgacctggtgcggaatgtcgcgatctgggagtggagcaacaagagcgaggcgttcggcaagcagattccgagggccgacccggatggggatggtgtggcgctcaaacttgcgctgcgcttcctggggcagcaggcgacggatgcgagtgggtgttctacgactaccagggcgagtatgacccggcagtggggcagtactcgcagagcgacccactcgggctgagcgcggggatgacgacgtacgcatacgtatcgtcgggtccgcttggtgcggctgatccgtttggtctgtgcgaggatgatcacgtctaccgcattgatcgattcagcctctgctctccgcagtccgcattcagagctgcgagagtggtaagtgctccaggcgcgccgccggcccgagaggggttcactccggacgttgagattgtcgggaacggtggacgaaaccacatttcgcaatgggtggactcaaagagcatgacaatcgtgaactcaacgcgtcccggccatcagttccatccaggcacggtatcgtggaaggtggcgcctgggccgctgggaatcgggtcgcagatcacaatcgtgggcgaaggatccgggcccaatccgatactcaacgatgcgcttggttttgggatttttggtccggcggctacattggccgcaacgctttgcatcgttgggccacgttga

SEQ ID NO: 522634 - DNA, 543 bp, Stenotrophomonas maltophilia
atggccgatttcaaacctttacgcggtaatccggcgttcgtgactctgacgctgctgtttgctgcactcctcgttgccaataacgccaatgcggagggccgatgcccggccggccagtaccccatcggcgatcaaggggtgggggggtgtgcccccatccctggagcgggggggagcgcccgtggggcggaacccgctggccagtggcataagacgtggggtgccattgcttcctcgcccagtacgaacgaagcaggcgtggcgacagggagggctacgaaagaggatgcggagcgtgtcgctctcgagggatgcggcatgcgcgctgctcgcgactgccgagtactcatcgcgtaccggaaccagtgtgcggcttgggtcgttcctcagagccaaggcaatggggcgcgtggtggcgttgcgagcggtcaagacttgaaggaagccattgcgcaggcacaaaagatctgcgtggatccggctggaacgcaatgcaaagtcgcctactcagcgtgttctgagccggtttatgaggcgttctag

SEQ ID NO: 522635 - DNA, 189 bp, Stenotrophomonas maltophilia
atgcccgaccggcgggtgcgcaccgttggtgcgcacaccggcacctttgcgttgtgcgcgattcaagccgatactcaggcgcagggaatccacagtcacatagcaggaacgaaaatcgcggactgtgatgcattcctaggtattcttgtcccaatggaattgaacgacccgacatgcctcccgagctga

SEQ ID NO: 522636 - DNA, 804 bp, Stenotrophomonas maltophilia
atgcagcggctggaacaactggttggtaaagagctttttgcgcgtcatggacgtaataagcttttaacagaacatggtattcagcttctgggttatgccagaaagatactgcgctttaatgatgaagcctgtatgtcattaatgtttagcaaccttcagggagtgttaacattaggggcgtcagatgaatcagcagataccattttgcccttccttctcaaccgaattagctcggtttatccgaagcttgccctggacgttagcgttaaacgcaatgccttcatggttgagatgctgaaagaaaacgaggttgacctggtggtcaccacgcatcgacctggccagtatgactgcctgacgctgcgtacttctcctacgcactggtactgtgccgcggagtacgtattgcaaaaaggtgagccaatacccctggtcctgctggacgatcctagtccgttccgcgatatggtgctgactgcgctcaacgaagccagtattccgtggcgcctggcgtacgttgcgtcaacgttgcctgcggtacgagcggcagtgaaggccggacttggcgtaacagcccgtccggtggagatgatgagccccgatctgcgtgtgctgggtcaatctgagggactcccgtcgttgccggatacggagtacctgctgtgccataatgccgccagcaacaacgagctagcgaaagtggtattcgaggcaatggaaaactaccacaatccatggcagtacgcgcctgttactccggaaggaggggatgactccctgattgtggaaagggattttgagtga

SEQ ID NO: 522637 - DNA, 441 bp, Stenotrophomonas maltophilia
atgagtatgtcaacatccacagaagtcatcgctcatcactgggcattcgcaatctttcttattgtagccattggcctgtgctgcctgatgttagtcggcggctggttcctgggcggtcgcgcccgcgcaaggcacaaaaacacacctttcgaatcaggtattgattcagtaggtaccgctcgcttacgcctgtctgccaagttctacctggtagccatgttcttcgtcattttcgacgtggaagcgctttacctcttcgcgtggtctacctccattcgcgaaagtggttgggtgggctttgtcgaggccgcaattttcattttagtgttactggccggtctggtttatctggtgcgtattggcgcgctggactggacacctgtgcgttcacgccgtgaacacatcaacccggaaaacagtatctctaatcgtcagcagtaa

SEQ ID NO: 522638 - DNA, 675 bp, Stenotrophomonas maltophilia
atggattatacgctcacccgcatagatcctaacagtgagaatgaccgttaccccctgcaaaaacaggagatcgtaaccgaccccctggagcaagaagtcaacaaaagcgtgtacatgggcaagctcgaacatgccatgcacgatatggtcaactggggtcgtaagaactccatctggccatacaactttggcctttcttgctgctacgttgaaatggtgacgtcattcactgcggtgcatgacgttgcgcgttttggggccgaggtactgcgtgcttctccacgtcaggctgacctgatggtggtggccgggacctgctttaccaagatggcaccggttattcagcgtctttatgaccagatgctggagccaaaatgggtaatctccatgggcgcatgtgcaaactccggcggtatgtacgacatttattccgttgtgcagggcgttgataagttcattccggtggatgtgtacatcccgggctgcccgccgcgtccagaggcctatatgcaggcgctgatgctgctgcaggagtcaatcggtaaagaacgccgtccgctctcctgggttgtcggcgatcaaggtgtctatcgcgcgaacatgcagtctgagcgcgagcgtaaacgtggtgaacgtattgccgtcaccaacctgcgtacgcctgacgaaatttaa

SEQ ID NO: 522639 - DNA, 1803 bp, Stenotrophomonas maltophilia
atggtgaacaatatgaccgacttaaccgcgcaagaagccgcctggcagacccgggatcatctcgatgaccccgtcattggcgaactgcgcaaccgttttgggccggatgcctttactgttcaggccacccgcaccggggtacccgttgtttgggtgaagcgtgagcaattactggaagttgtcgatttcctcaagaaattgccaaaaccttacgtcatgctgtttgacttacacggcatggacgaacgtctgagaacgcaccgccagggtctccctgctgcggatttttccgttttctaccacctgatctcaatagaccgcaacacggatatcatgctcaaggtggcattgtctgaaaacgacatgcatctgccgacgatcaccaaacttttcccgaacgctaactggtacgagcgtgaaacctgggaaatgttcggcatgaccttcgacggccacccgcatctgacgcgcatcatgatgccgcagacctggaccggccacccgctgcgtaaagactacccggcacgcgccaccgaattcgacccgtttgagctgaccaaagccaagcaggatctggagatggaagcgctgaccttcaagccggaagactggggcatgaagcgcggcaccgaaaacgaggacttcatgttccttaacctcggtccaaaccacccgtctgcgcacggtgcattccgtattattcttcagcttgacggcgaagagattgtcgactgcgtgcctgacattggctaccaccaccgtggtgccgagaagatgggcgaacgtcagtcctggcacagctacattccgtatactgaccgtatcgaatacctcggcggctgcgtaaacgagatgccatacgtgctggccgttgagaaactggcaggcatcaccgtcccggatcgcgttaacgtgattcgcgtgatgctgtctgaactgttccgtattaacagccacctgctgtacatctccacgttcattcaggacgtcggcgcgatgacgccggtcttcttcgcctttaccgaccgtcagaaaatctacgatctggtggaagcgattaccggtttccgtatgcacccagcctggttccgcatcggcggcgtggcgcacgatctgccgcgcggctgggaccgcctgctgcgtgaattcctcgactggatgccgaaacgtctggcgtcttacgagaaagccgcgctgcgcaactccatcctgaaaggccgctcccagggcgttgctgcctacggcgcgaaagaggcgctggagtggggaaccacaggtgctggcctgcgtgcgaccggtattgatttcgacgtgcgtaaagcccgtccttactctggctacgagaatttcgactttgaagtcccggttggcggcggcgtttccgactgctacacccgcgtgatgctgaaagtggaagagctgcgccagagcctgcgcatccttgagcagtgcctcaacaacatgccggaaggcccgttcaaggcggatcacccgctgacgacgccgccaccgaaagagcgcacgctgcaacatatcgaaaccctgatcacccacttcttgcaggtttcctggggcccggtcatgccggcacaagaatccttccagatgattgaagcgaccaagggtatcaacagctactacctcaccagcgacggcagcaccatgagctaccgtacccgcgtgcgtacgccaagctttgcgcacctgcagcagatcccggccgccattcgcggcagtctggtctccgacctgattgtgtatctgggtagtatcgattttgttatgtcagatgtggaccgctaa

SEQ ID NO: 522640 - DNA, 501 bp, Stenotrophomonas maltophilia
atgcacgagaatcaacaaccacaaaccgaggcttttgagctgagtgaagcagagcgtgccgccattgagcacgagatgcaccactacgaagacccgcgtgcggcgtccattgaagcgctgaaaatcgtacagaaacagcgtggttgggtgccggatggggcgatctatgagatcgcaaaagtgctgggcattccggcgagtgacgtagaaggcgtagccacgttctacagccagatctttcgtcagccggtcggccgccatgtgatccgctactgtgacagcgttgtctgccacattaccggttatcagggcattcaggctgcgattgagaagaaacttaatattaagccgggccagaccacgttcgacggacgctttaccctgctgccaacctgctgcctgggtaactgcgacaagggaccgaccatgatgattgatgaggacactcacagccatctgacgccggaagcgattcctgacctgctggagcagtacaaatga

SEQ ID NO: 522641 - DNA, 873 bp, Stenotrophomonas maltophilia
  misc_feature (807)..(816): n is a, c, g, or t
atgaaaactgtaattcgtactgctgagacgcatccgctgacctggcgtctgcgcgatgacaaacagccggtctggctcgacgaatatcagagcaaaaacggctatgccggtgcgcgtaaagccctcggcggcatggcgccagacgacatcgttaatgcggtgaaagagtctggcctgaaagggcgcggcggtgcgggcttctccaccggtctgaagtggagcctgatgccgaaagatgaatccatgaacatccgttacctgctgtgtaacgccgatgaaatggagccgggtacctataaagaccgcctgctgatggaacagctgccgcacctgctggtggaaggcatgctgatctccgcgttcgcgctgaaagcgtaccgtggctacatcttcctgcgcggtgaatacatcgaagcggctgaaaacctgcgtcgcgcgattgccgaagccactgaagccggactgctgggaaaaaacatcctgggcaccgggtttgacttcgagctgttcgtgcacaccggtgccgggcgttatatctgcggtgaagaaaccgcgctgattaactccctggaaggccgccgcgcgaacccgcgctccaagccaccgttcccggcaagctccggcgtgtggggtaaaccgacctgtgtaaacaacgtcgaaaccctgtgtaacgttccggctatccttgcgaacggcgtggagtggtatcagggcatctcatcaagtaaagatgccggtaccaagctgatgggcttctccggtcgcgtgaagaatcccggcgtctgggagctgccgttcggcaccacnnnnnnnnnngcaccaccgcacgtgaaattcttgaagactacgccggcggcatgcgcgatggcctga

SEQ ID NO: 522642 - DNA, 498 bp, Stenotrophomonas maltophilia
atgcgcgatggcctgaaattcaaagcctggcagccgggtggggcagggacagacttcttaaccgaagcccaccttgacctgccaatggagttcgaaagcattggtaaagcaggcagccgtctgggtaccgcgctggcgatggccgtcgaccacgagatcggcatggtatccctggtgcgtaacctggaagagttcttcgcccgcgagtcctgcggctggtgtacaccatgccgtgacggtctgccgtggagcgtgaagatcctgcgcgctatcgaacgtggcgaaggccagccgggcgatatcgagacacttgagcaactgtgtcgattcttagggccaggtaaaaccttctgtgcccacgcaccgggtgccgtcgagccgctgcagagcgcgattaaatatttccgcgacgaattcgaagcaggcatcaagcagccgttcagcaatacccattctatcaatggtattcagccgaacctgctgaaagcacgctggtaa

SEQ ID NO: 522643 - DNA, 2724 bp, Stenotrophomonas maltophilia
atggctacgattcatgtagacggcaaagaatacgaagtcaacggggcggacaacctgctggaagcttgtctgtctcttggcctcgatattccgtacttttgctggcatccggcgctgggcagcgtcggtgcttgccgccagtgtgcggtgaagcaatatcaaaacgcggaagacacgcgtggtcgactggtgatgtcctgtatgacgccagccaccgaaggcacttttatttcgattgatgacgaagaagccaaacagttccgcgaaagcgtagtggagtggttgatgaccaaccacccacacgactgtccggtgtgtgaggagggtggtaactgccaccttcaggatatgaccgtcatgaccggtcacagcttccgtcgctatcgctttaccaaacgtacccaccgaaatcaggatctggggccgttcatctctcacgaaatgaaccgctgcatcgcctgctaccgctgcgtgcgttactacaaagattatgcagacggtcaggatctgggcgtgtatggcgcgcatgacaacgtttacttcggtcgtccggaagacggtacgcttgaaagcgaattctccggtaacctggtagaaatctgcccgaccggcgtgttcacggataaaacccactccgagcgttacaaccgtaaatgggacatgcagtttgcgccaagcatctgccagcagtgctccctcggctgtaacaccagcccgggtgaacgttacggtgaactgcgtcgtatcgaaaaccgttacaacggtaccgttaatcactacttcctctgcgatcgcggtcgttttggctatggctatgtgaacctgaaagaccgtccgcgtcagccggttcagcgccgtggcgacgacgtcattaccctcaacgctgaacaggcgatgcagggcgcggcagatattctgcgccagtcgaagaaagtgatcggcatcggctccccgcgcgccagcatcgaaagcaacttcgcgctgcgcgagctggttggggcggaaaacttctataccggtatcgcccatggcgagcaggaacgtctgcaactggtgctgaaagtgctgcgtgaaggcggtgtacacacgcctgcgctgcgcgaaatcgaatcctatgatgcggttcttgtgctcggggaagacctgacgcagaccggcgcacgcgcggctctggcggttcgtcaggcggtgaagggtaaagcacgtgaaatggcagcggcgcagaaagtggctgactggcagattgcggcgatcctcaacatcggccagcgcgcgaagcatcctctgtttgtgactaacgtcgacaacacccgtctggacgatatcgccgcgtggacctactgcgcaccggttgaagatcaggcgcgcctcggctttgccattgcccacgcgctggacagcaactcgccggccgttgaactggatcgcgacctgcagaacaaggtcgacgtgattgttcaggcgctggcgggggcgaagaaaccactgatcatttccggtaccaacgccggtagcgctgaaatcattcaggccgcagcgaacgttgccaaagccctgaagggccgtggcgctgacgtcggtgtgaccatgattgcccgtgcggtgaacagcatcggactgggcatgattggcggcggctcgctggaagaagcgttaagcgaactggaatccggttctgctgatgcggtggtagtgctggaaaatgacctgcatcgccacgcttcggccgctcgcgttgacgccgcgctctccaaagcaccgctggtgatggttatcgaccatcagcgcaccgcgatcatggacaaagcacacctggtgctctctgctgcaagcttcgcagaaagcgacgggacggtgatcaacaacgaaggccgcgcacagcgcttcttccaggtttatgacccggcctactacgacagtaacaccgtgatgctggaaagctggcgctggctgcactctctgcacagcaccgtgcagagccgtgaagtggactggacgcagctcgaccacgttatcgacgcggttgttgagaaactgcctcagctggcgggcattaaagacgccgcgcctgacgcaagcttccgtattcgcggccagaaactggcgcgtgagccgcaccgctacagcggtcgtactgcgatgcgtgccaacatcagcgtgcacgaaccgcgtcagccgcaggataaagacaccatgttcgccttctcgatggaagggaacaaccagccgtctgcgccgcgttcgcaaatcccgtttgcatgggcaccgggctggaactccccacaggcatggaacaaattccaggctgaagtgggtggtcatctgcgccacggcgatccgggcgtgcgtctgattgaagcctccgaaaccgatctggacttcttctctaccgttccggaacgtttccaggctcaggaaggccactggcgtattgcgccgtactaccatctgttcggtagcgacgaaatgtcccagcgttctccggtattccagcagcgtatgccgcagccgtacatcaagctcaacccggcggatgccgcgaagcttggcgttaacgcgggtgcgaacattgcctttagctacgacggccagacaatcagcctgccgctgattatttctgaaagcctgtcagcagggcaggtgggtctgccgatgggtatgcctggcatcgcgccggtcctggcgggtgcgcatcttgataaccttcaggaggcaaaagcatga

SEQ ID NO: 522644 - DNA, 978 bp, Stenotrophomonas maltophilia
atgagttggttaacgccggatcttatcgacatcctgctgagcattctgaaagcggtcgtcattctgctggtggtcgtcacctgcggcgcgttcatgagctttggtgaacgtcgtctgctcggtctgttccagaaccgttacggaccgaaccgcgtgggctggggtggttcactccagctggtggcggacatgatcaagatgttctttaaagaggactgggttccgcgcttctcggaccgcgtgatctttacgctggcgccgatgatcgcctttacctcgctgctgctggcgtttgctatcgttcccgtcagcccgacctgggtggtggctgacctgaacatcggcattctgttcttcctgatgatggcaggcctcgcggtgtacgcggtgctgttcgcaggctggtccagtaacaacaaatactcgctgctgggtgcgatgcgtgcttccgcgcagacgctgagctacgaagtgttcctgggactctccctgatgggcgtggtggcgcaggccggttcattcaacatgaccgacatcgtcaacaaccaggccgacatctggaacgttatcccgcagttctttggttttgtgacctttgctatcgcgggcgtggcggtgtgtcaccgtcacccgtttgaccagccagaagccgaacaggaactggccgacggttaccacattgaatattccggtatgaaattcggtctgttcttcgtgggcgagtacatcggtatcgtcaccatttccgcgttgatggtaacgctgttctttggtggctggcatggcccgttcttaccgccgttcatctggttcgcgctgaaaaccgcgttcttcatgatgatgttcattttgattcgtgcgtccttaccgcgtccgcgttatgaccaggtaatgtccttcggctggaaagtgtgcctgccgctgacgctcgtcaacttgttggtaacggcggctgtcattctctggcagcagccataa

SEQ ID NO: 522645 - DNA, 543 bp, Stenotrophomonas maltophilia
atgaccttaaaagaattactcgtaggctttggcacccaggtacgcagtatctggatgatcggcctgcacgcgtttgccaaacgcgaaacccggatgtatccggaagagccggtatatctgccgccgcgctaccgtggccgtatcgtgctgacgcgcgacccggacggttccgagcgctgcgtagcctgtaacctgtgtgcggtagcgtgtccggtaggctgtatctctctgcagaaagccgagacggtagacggccgctggtaccctgagttcttccgcatcaacttctcacgctgcattttctgcggtctgtgtgaagaagcgtgcccaaccacggcgattcagctgactccagacttcgagctgggtgagtacaagcgtcaggacctggtgtacgagaaagaggatctgctgatttccggtccgggcaaatacccggaatataacttctaccggatggcgggtatggcaatcgacggcaaagataagggcgaagcagagaacgaagctaagcctatcgacgtcaagagcctgttaccgtaa

SEQ ID NO: 522646 - DNA, 555 bp, Stenotrophomonas maltophilia
atggaattcgctttttatatctgtggccttatcgccatcctggctacgctgcgagtgatcacgcacaccaatccggtgcatgcgttgctgtatttaatcatttcgctgctggctatttccggggtgttctttgcgctgggcgcgcacttcgccggtgcgctggaaattatcgtctacgcgggtgccattatggtgctgttcgtgttcgtggtgatgatgctcaacctgggcggctctgaaattgaacaggaacgtcaatggttaaaaccgcaggtgtggattggcccggcaattttgtcggccatcatgctggtggtgattgtttacgctattctgggcgttaacgaccagggcattgacggcacgccaatcagcgccaaggctgttggtattgcgctgtttggtccgtacgttctggcggttgaactggcctctatgctgctgctggcgggcctggttgttgccttccacgtcggtcgcgaagaacgtgttggtgaggtgctgagcaaccgcactgatgaccgtgcgaaaagaaaaacggaggagcgcgcatga

SEQ ID NO: 522647 - DNA, 303 bp, Stenotrophomonas maltophilia
atgatccccttaacacatggactgatcctcgctgcgattttgttcgttctgggcttaaccggtctggttatccgccgcaatctgctgtttatgctgatcggtctggaaatcatgatcaacgcttccgctctggcctttgtggtcgccggcagctactggggccaggccgacggtcaggtgatgtacattctcgccatcagcctcgcggctgccgaagcgagtattggcctggcgctgttgctgcagctccatcgtcgccgccagaacctgaacatcgattcagtaagtgagttgcgtggatga

SEQ ID NO: 522648 - DNA, 1842 bp, Stenotrophomonas maltophilia
atgaacatgcttgccttaaccattatttttccgctgattggcttcgtgctgctggcattttctcgcggccgctggtctgagaatctgtctgccaccgtgggcattggctcaatcggtctggctgcgctggtgacagcgtatgcgggtatcgatttctttaacaatggacgtcaggcctacagcgtgccgctgtggaactggatgtcggtcggtaacttcaacatcggtttcaacctggtgctggatggtctgtctctgaccatgctctccgtggtcaccggcgtcggcttcctgatccacatgttcgcctcttggtatatgcgcggcgaagagggttactcccgcttcttcgcctataccaacctgtttatcgccagcatggtggttctggtactggccgataacctgctgctgatgtatctgggctgggaaggcgtgggtctgtgctcttacctgctgatcggtttctactacaccgatccgaagaatggcgcagcggccatgaaagcgttcgtcgtgacccgcgtgggtgacgtcttcctcgctttcgcgctgttcattctctacaacgaactgggcacgctgaacttccgcgaaatggtggaactggcgccagcgcacttcgaagcaggcaacaacatgctgtggtgggcaacgctgatgctgctgggtggtgctgtgggtaaatccgcacagctgccgttgcagacatggcttgccgacgcgatggcgggtccaacccctgtctccgcgctgatccacgccgcgaccatggtcaccgccggtgtctacctgattgcgcgtacccatggcctgttcctgatgaccccggaaattctgcatctggtgggtatcgtcggtgcggttacgctggtgctggcaggctttgccgcgctggtgcagaccgacatcaaacgcgttctcgcgtactccaccatgagccagattggttacatgttcctggcgctgggcgttcaggcgtgggacgcagccattttccacctgatgacgcacgcgttctttaaagcgctgctgttcctctcatccggttcggtgatcctggcctgccaccacgagcagaatatcttcaaaatgggcggactgcgtaagtccatcccgctggtctatgtctgcttcctggtaggcggcgcggcgctggcggcactgccgctgattaccgcaggcttcttcagtaaggatgaaatcctggcgggcgccatggcgaatggtcatatcaatctgatggttgcgggtctggtcggtgcgtttatgacctccctgtacaccttccgtatgattttcatcgtcttccacggtaaagaacaaattcacgcccacgcagggaaggggattacccaccacctgccgctgattgtgctgctggtactctccaccttcgttggcgcgatgattgtgccaccgttgcagggcgtactgccggcaacaaccgagcttgagcacggtcgcgttctgacgcttgaaatcacctccggcgttgtggctatcgcgggcatcctgattgccgcatggctgtggctgggcaaacgcacgctggtgactgccgttgccaacagcgcgccgggccgtctgctgggcacctggtggtacaacgcatggggcttcgactggctgtacgacatgatcttcgtgaagccgttcctgggcattgcgtggctgttgaagcgcgatccgctgaacagcctgatgaatatcccggcgatcctctctcgctttgcaggtaaaggcctgctgtacagcgagaacggctatctgcgctggtatgtggcatccatgagcatcggtgcggttgtcgtgctggcgctgctgatggtgttgcgatag

SEQ ID NO: 522649 - DNA, 1530 bp, Stenotrophomonas maltophilia
atgttattaccctggctaatattaattcccttcatcggcggcttcctgtgctggcagactgaacgctttggcgtgaagatgccgcgctggatcgcgctgatcaccatgggattgacgctcgcgcttggcctgcaactgtggttgcagggtggctactcattgacccagtctgcgggccttccgcagtggcagtctgagttcattctgccgtggatcccacgtttcggtatcacgatccaccttgcgattgacggtctgtcgctgctgatggtcgtgctgaccggtctgctcggcgttctggcggtactctgctcctggcgagaaatcgaaaaataccagggcttcttccacctcaacctgatgtggatcctgggcggcgttatcggcgtgttcctggccatcgacatgttcctgttcttcttcttctgggagatgatgctggtgccgatgtacttcctgatcgcgctgtggggccacaaggcatccgacggtaaaacgcgtatcacggcggccaccaagttcttcatctacacccaggcgagcggtctggtgatgttgattgccatcctggcgctggtgtttgtgcattacaacgccaccggcgtctggaccttcaactatgaagatctgctgaagaccccgatgtcccacggcgtggaatacatgctgatgctcggcttcttcatcgccttcgcggtgaaaatgccggtggttccgctgcacggctggctgccggacgcgcactctcaggcgccaacggcgggttccgttgacctggcgggtatcttgctgaaaacggcggcctacggtctgctgcgtttctccctgccgctgttcccgaacgcctccgcagagtttgcgccgattgccatgtggcttggcgtgatcggtatcttctacggtgcatggatggccttcacgcagtacgacatcaaacgtctgattgcttacacctccgtttcccacatgggcttcgtactgattgccatctacaccggtagccagctggcgtaccagggcgcggtgatccagatgattgcgcacggtctgtccgcagccggtctcttcatcctgtgcggtcagctgtacgaacgtctgcatacccgcgacatgcgtatgatgggcggcctgtggggcaaaatgaaatggctgcctgcactctccatgttcttcgcggttgccaccctgggtatgccaggtaccggtaacttcgttggcgaatttatgattctgttcggcagcttcaaagtggttccgatgattaccgtcatctccacctttggtctggtgttcgcctccgtgtactcgctggcgatgctgcaccgcgcctacttcggtaaagcgaagagcgaaattgctgctaaagaactgccggggatgtcgctgcgtgagctgtccatcatcctgctgctggtcgtactgctggtgctgctgggcttctatccgcagccgattctggatacctcgcactccgcgatgggtaacatccagcagtggtttgttaattctgcttctactacaaggccgtaa

SEQ ID NO: 522650 - DNA, 1458 bp, Stenotrophomonas maltophilia
atgacaataactccacaacaactgatcgcgctgctaccgctgctgatcgtcggattgacggtggtggttgtgatgctctccattgcgtggcgacgcaatcacttcctgaatgcgaccctgtccgttctgggtctgaacgctgcgttagtctccctctggtttgttggccaggcgggcgcaatggacgtcacgccgctgatgcgcgttgacggctacgccatgctctacaccggtctggtgctgctggcgagcctggcaacctgtacctttgcgtacccgtggctcgaagggtacaacgacaacaaagaagagttttacctgctggtactgattgccgcactgggcggcattctgctggcgaacgcgaaccacatggccgcgctgttcctcggtattgagctgatctcactgccgctgttcggcctgattggttacgctttccgtcagaagcgctctctggaagcggctatcaagtacaccatcttgtccgctgctgcgtcgtcgttcctgctgttcggtatcgcgctgctgtatgcacagacgggtaacctctccttcctggcgctcggcaagagcctcggcgacggcatgatgcatgagccgctgctgctggcgggtctgggcatgatgattgtaggccttggctttaaactctctctggtgccgttccacctgtggacgccagacgtttatcagggtgcgccagcgccggtctctaccttcctggcgacggcgagtaaaatcgctatctttggcgtggtcatgcgtctgttcctgtacgccccggtgggtgacagcgaagcggttcgcgtggtgctgggcattatcgcgttcgtctccatcatcttcggtaacctgatggcgctgagccagaccaacattaagcgtctgctgggctactcctcaatctcccatctgggctacctgctggtggcgctgattgcgctgcaaagcggtgagatgtcgatggaaaccgtgggtgtgtatctggccggttacctgttcagcagcctcggcgcgttcggcgtggtgagcctgatgtccagcccgtaccgtggcccggatgcagattccctgttctcctaccgtggtctgttctggcaccgtccgattctgtctgcggtaatgaccgtgatgatgctctctctggcgggtatcccgatgacgctgggctttatcggtaagttctacgtgctggccgtcggtgtgcaggcgggtctgtggtggctgactgccggtgtcgttatcggctccgcgattggtctttactactacctgcgtgtggctgtgagcctgtacctgagcgcgcctcagcagctcaaccgtgatgcaccgtccaactggcagtacagcgccggggggatcgtggtgctgatctccgcgcttctggtgctaatcttcggtatctatccgcagccgctgattgagattgtgcagcgcgcgatgccgctgatataa

SEQ ID NO: 522651 - DNA, 1005 bp, Stenotrophomonas maltophilia
atggataatttccagaaagatattgatgacagggcgaacctgacccagtccaaccgttttgaactgttgctgttccgtcttggcacctctctgaacgaaaataaatccgagctgttcggcatcaacgtgttcaaactgcgcgaaattgtgccgatgccgaccttcaccaaaccagcgggaatgaagtctccgctgatggggatggtaaatattcgcgaccaggtgatcccggtgatcgatctggccgccgtcgccggctgcaagccagccaccgggctaaacattttgctgatcaccgaatatgcccgcagcgtgcaggcgtttgccgaggaatcggtggagaatatcatgcgtctcgactggaagcaggtgcacgccgcggaaaccgccgtcagcggtcgctacatcaccagcattgcctgtctggacgataagaccgataccaacgatctggcaatggtgctcgacgtggagcagatcctgtatgacatcaccccggcgaaccacgatctgcacgccacccatctggaaaccaccaaattcaacatcaagcctggctctgtcgcgattgttgctgaagactcgaaagtagcgcgctcaatgctggagaagggattgcaggcaatggagatcccggctcagctgcatatcaccggcaaagacgcatgggagaaaatcactcagctggccgcgcaggctcaggctgagggcgtccccgttaccgataagattgccctggtattaaccgacctcgaaatgccggagatggacggctttacgctgacgcgcaaaatcaaaactgatccagtactgaaagatattccggtggtgatccactcgtctctttccggcaacgcgaacgaagatcatatacgcaaagtgaaggctgacggctatgtggcgaagtttgagctgaatgagctgtcgtcggtgattgaagaggtgctggaccgctcgatgaagaagattgacgggccgcttataagcaggaagcagttagcttag

SEQ ID NO: 522652 - DNA, 918 bp, Stenotrophomonas maltophilia
atggaactgatttttctgggtacgtccgcgggcgtgccaacccgctcacgcaacgtgacggcgattctgctggatcttaagcatcctacccgcggcgggctgtggctgtttgactgcggcgaaggtacgcagcatcagttgctgcatacctcataccacccggggaaagtggataaaatatttatcacccatctgcacggcgaccatctgtttggcctgccgggcctgctgtgtagccgttcgatggccggtaacgctaacccgctgaccatttatggccctgcgggtattcaggcattcgttgagaccacgctgcgcctgagcggctcgtggaccgattatccgctgaaggtggttgagatcggcgaaggtctggtgttcgacgacggagattaccaggtgcgcgcttacccgcttaaccatccggtggaatgctacggctatcgcgttgaggagcatgacaagcccggcgcgctgaacgccgccgcgttgcaggccgatggggtgaaacctggcccgctgttccagcgtctgaagcacggcgagaccgtcacgctggaagacgggcgcgtcatcaacggtcaggattaccttgcgccgccgcagccgggcaaaaaactggctatttttggggataccgccccctgcccttcggcgctccggcttgccgggggtgtggatgtgatggtgcatgaggcaacgctggaagcggcgatggaagaaaaagccaatagccgggggcacagctcaacgcgtcaggccgcgcagctggcgcgcgaggctggcgtccggaaactgattgtcactcacgtcagctcacgctatgacgtccgcggctgtgaaagcctgctggcagagtgtcgggaggtgttcccggcatgcgagctggcggaagattttgctcaggtcagcgtttag

SEQ ID NO: 522653 - DNA, 465 bp, Stenotrophomonas maltophilia
atgatccagtggcaagatctacaccacagcgaactgactattcagtcactctacgccctgctcaaactgcgctgcgaagtttttgtggttgaacaaacctgcccctatcaggatatcgacggcgatgacctggtcggcgagaaccggcacatcctcggctggcgcgataacgagctggtggcgtatgcgaggattctgaaaagcgaagaggattttgaccctgtcgtcattggccgcgtcattatcagcggaagcgcgcgcggtgaaaagctgggctatcagctgatggaaaaaacgctggacgcatgcctgaaacggtggccagacaaggcgttatacctgggcgcgcaggcgcatttgcaatcattctatggccattttggttttaccccggtcacggacatttacgatgaagatggcatcccacacatcggtatggcgcgcgaagcgaaacaggcgcaatag

SEQ ID NO: 522654 - DNA, 306 bp, Stenotrophomonas maltophilia
atgtcatttcaatcctgggatacccgagcagacgacgatctaacgctgttaagcgaaacgctggaagaagtactgcgctcttcaggcgatcctgccgatcagaagtacattgagctcaaagcccgcgccgagcaggcgctgcatgacgtgaaaaaccgcgtcagcaacgcatccgacaattactactaccgcgccaaacaggcggtttatcgtgccgacgattatgtgcacgaaaagccgtggcagggcattggggtcggtgcggccgtagggctggtgctgggcctgctgttagcccgtcgttaa

SEQ ID NO: 522655 - DNA, 1296 bp, Stenotrophomonas maltophilia
gtgcattcgatttccatcgcgctggaacgcctgcgcactcagcttgcgcaagcgttacccgctacacccggtttacgccatttcgatgtctctttcccgttaaacgacgccttcgatccgctggcctggctgggtgtgcagcgatgctatccccagttttactggcaacagcggagcggtgatgaagaacttgccgcgctcggaagcctcgcccattttgactctctggcctcggcctcccggtttttgcacacccatgacgtagccaatgatacccgtatctgcggcctgaacgccttcaacccggcacagggaaagctgtttttaccacgccttctctggcgacggtctggcggggtcgccacgctgcgcctgcaactgtggagcgaaacgtcgctgtgtgatgatgccggtgacgcactgaagtttattgataacctgcgcgacgccgcgccgatccgcccgttgtccgtgcagattgtgcaggaaacccatcatccggaaaaaccggaatggctggcgttgattcgtcaggcgacggatacccttgctcgcggcgattttgagaaagtggtgctcgcacgtgctacagacgtgcagtgccagcagcccgtgaacgccatcgcgctaatggccgccagccgcgcgctaaacctcaactgctatcatttttgtatggtctttgacgccagcaacgcgttcctcggctcgacgcccgagcgactgtggcggcgacgcggcatgctgctgcgcactgaagcgctggcaggcaccgtcgccagccattctgacgataagcaggcccagcgtctgggcgactggctgatgaacgacgacaaaaatcagcgggaaaatatgctggtggtggaagatatctgccagcgtcttcagcaccatacccggacgctggagatcctcccagcgcaggtgctgcgtctgcgcaaggtgcagcatttacgccgctgtatctggaccgaactcaaacagtctgatgacgagcagtgtctgcatattctgcaaccgacggcggcggtagccgggctgccgcgtcaggcagcgcgagaatttattgcgaaagtggagccgtttgaccgggagtggtacgccggatcggcgggctatttatcgcgcgatcaaagcgagttctgcgtggcattacgctccgcccgcgttcatgacgccgcgctgcgtctttatgcgggggcgggcatcgtcagcggctccgatccagagcaggagtggcaggagatcgaaaataaggccgccgggctgcgttccctcctcctgagggattaa

SEQ ID NO: 522656 - DNA, 1671 bp, Stenotrophomonas maltophilia
atgtcagtaagttcttttaaccgacgctgggcgacggtgatccttgaagccctgacccgccatggtgtcaggcatgtgtgtattgctccgggctctcgctccacgccgctcacccttgctgcggcggaaaacagggcttttattcatcacacccattttgacgagcgtggtctcggccacctggcgctcgggctggcgaaagtcagcaacgcgcccgtggcggtgatagtgacttccggcacggcggtggcaaacctctatccggcgctgattgaagcggggttaaccggcgaaaagctgattttactcaccgccgatcgtcctccggaacttattgactgcggcgcgaaccaggcgattcgtcagcctggcatttttgcctcgcatccttcacagacggtctcgttgccgcgccccacccaggatattcccgccagctggctggtctcaactctcgaccacgccatgaacgcactgcgcagcggcgggctgcacattaactgcccgtttgccgaaccgctgtacggcgaaatgaacgagaccggcctagcctggcaacagcagctgggagaatggtgggagagcgaaaagccctggctgcgtgagcagacgcatctggaaagcgctaagcagcgcgactggttcttctggcgccagaagcgcggggtggtgattgccgggcggatgagtgcggcggaaggcaagctggcggcggagtgggcacaaacgcttggctggccgctgattggtgacgtgctttcccagacgggccagccgctgccctgcgctgacctctggctggggaacgcgaaagcggtcaccgagctggcgcaggcgcaaattgtcgtccagctgggctcgagcctgacgggcaagcgactgctccagtggcaggccacctgtacgccagaagagtactggctggtggatccgctcgaaggacgccttgacccggcgcaccatcgcggtcgccgcctggtgagcgatattgacagctggctggaattgcatccggcggaaaaacgcaaaccctgggcggtggagatcccggcgctgtcgcgtcaggcgtgggaactcaccaaagcgcagtgcgaggagttcagtgaagccgggctggcgcaccgtatccgcaaatatcttcccgagcaggggcaactttttgtcggtaacagcctggtggtgcgcctgattgacgccttttcgcagctgcccgcgggttatccggtatacagcaaccggggcgcgagcggcattgacggactgatctccaccgccgctggcgtacagcgtgccagcgcaaaatccacgctggcgattgtgggggatctctcagccctctacgatctcaacgcgctggcgctcctgcgtcaggcgtcggctccgttcgtgctgattgttgttaacaataacggcggacagattttctccctgctgccgacgccgcaaagcgaacgtgagcgcttctatctgatgccgcaaaacgtgcagttcgaacacgccgccgccatgttcagcctgaagtaccatcgcccggaaaactgggacgcgctggagacggcgctgaacaccgcctggcggcagcctggcgcgacgctgattgagctggtggtaaacgattctgacggcgcgcagaagctgcaacatctgctggcgcaggtgagtcacctgtga

SEQ ID NO: 522657 - DNA, 777 bp, Stenotrophomonas maltophilia
gtgatcctcgctggcgtcactcagcccggaaaatcaggctacccctggctggttttcttgcacggtttttccggtgactgtcgtgagtggcagaccgttggggcgtcgctgcatgactaccccagactctaccttgacctgcccgggcacggtggttcagcggatacgggcgtgacgggttttgcagaggtaagtgaattgctcacgcataccttaattagtcacaacatactaaattactggctggtagggtactctctcggtggccgcattgcgatgttccatgcctgccagcatcctgcggggttagatggggtgattgtggaaggtggacaccctgggctgcaagacgtcgaggcgcgccaggcgcggctgacctcggaccgccgctgggcgtcacgttttcgcagtgagccgcttgaagccgtctttgccgactggtatcaacagccggtctttacctcccttacggatgaacagcgcaacgcgctgatcgcgctgcgtagccggaacaacggcccgaggctggctgagatgctggaagccacctcgcttgccgttcagcctgatttacgtcccgcgctcaccgcgcgtgatttttctttcgactatctctatggcgaacgtgacgggaagtttgcagccatcgctgctgaacttaacgccatgcgtcatgctatccctcatgccggacacaacgcccaccgggacaacccggaagcggttgccgcgagtctggctcagatactacgttatcgaacaaaggacacgctatga

SEQ ID NO: 522658 - DNA, 693 bp, Stenotrophomonas maltophilia
atgatccaggcgctggcggatgcccgctacgacgacaacatcggcgtcatcgtcctcaccggggaaggggagaaagccttctgctcgggtggcgatcagaaagtccgcggcgactacggcggataccaggatgatgccggcacgcaccacctgaacgtgctggatttccagcgccagatccgcacctgtccaaaaccggtggttgcgatggtggcaggttattccatcggcggcggtcacgtgctgcacatgatgtgtgacctgactatcgcggcggaaaatgccattttcggccagactggcccgaaagttggctccttcgacggcggctggggggcatcctacatggcgcgcatcgtcggccagaaaaaagcccgcgaaatctggttcctgtgccgtcagtacaacgcccaggaagcgctggacatggggctggttaacaccgtggtgccgatcgccgatctggaaaaagagaccgtgcgctggtgtcgcgaaatgctgcaaaacagcccaatggcgctgcgctgcctgaaagcggccctcaacgccgactgtgacggtcaggcgggacttcaggagctggcgggtaacgccaccatgctgttctatatgaccgaagagggtcaggaagggcgcaacgcgttcaacgaaaaacgccagccagacttcagcaaatacaaacggaacccgtaa

SEQ ID NO: 522659 - DNA, 966 bp, Stenotrophomonas maltophilia
atgcgtcgcgcgcaggtttaccgctggcagataccgatggacgcgggcgtggtactgcgtgaaaggcggttaaaaacccgtgatggctttttcgtgcatctccggcagggcgagcgggaagggtggggcgaaatcgccccgcttccgggctttagcctggaaacgctggatgaggcgcaggcggcgctgatggcctggacacacgaatggcgtgagggggcagatccgtcgctgccggacgttccttccgtcgcgttcggcatcagctgcgcgctggcagagctggacggctgtttgccggatgcggcgaattatcgcgccgcgccgctctgttccggcgatccggatgaacttttcgcgctgctctccgggatgcctggcgagaaggtggcgaaaattaaggtcggcctgtacgaagcggtgcgcgacggaatggtggttaacctgttactggaagccattcccgatctgcacctgcgcctggacgccaaccgcgcctggacgccgctcagggcgcagcagtttgcgaagtacgtcaacccggcgtaccgcaaccgcatcgcgtttctcgaagagccgtgcaaaacgcgcgacgactctcgcgccttcgcccgggaaaccggcattgccattgcctgggatgagagcctgcgcgaagccggttttacgtttgccgccgagccgggcgtcggtgccgtggtcattaagccaacgctgaccggcagcctcgacaaggtgcgcgagcaggttgcggcggcccatgccgcagggctgacggcggtgatcagttcatccatcgaatccagcctcgggctgacgcaactggcgcgcatcgctgcatggttaacgccggacaccgttcccggtcttgatacgctaaacctgatgcaggcccagctgattcgccagtggccggacagcaccttgccgtgcctcgatgtcgggacgctggagccgctgcaatga

SEQ ID NO: 522660 - DNA, 1362 bp, Stenotrophomonas maltophilia
atgacttttaccgactggccgtggcggcactggcgctccaggagtgccgatacacccgcgctgcgtttagacgatataacgctcaactggtcacagctgggcgagcgtatcgatcgtctggcagccggttttcagtctcagggtgtcagggacggtgacggcgtcatgctgctcgcccacaaccatccgcagaccctgctggcctggctggcgttgcttcagtgcggcgcccgcattttgccggtgaaccctcagcttccccgtccgctgctggacgtcctcctgccgcagatgaccctgcgctttgcgctggtgcttaacggtgagtatgacggtctgcccgcgctggcattaagagagggcgaggagcagggcggcgtgacgtggcgggcagaacggctggcctcgatgacgctcacctccggctccaccggcttgccaaaagcggcggtgcacacctgtgccgcccaccttgccagcgcaaaaggcgtgttgtcgctgatgccttatggcggtgatgacgactggctgctgtccttgccgctgtttcacgtctccggtcaggggattttgtggcgctggttgcagggcggaggccgtctcaccgtgcgtgaaaaacagccgctggagcaggccctgcagggctgtacccacgcctcgctggtgccgacgcagctgtggcggctgctcaattcacaccatcccgttgcgctgaaagccgtgctgctcggcggggcggaaatccccgttgagctgaccgaacaggcgcgcaagcaggggatccgcacgttctgcggctacggtctgaccgagttcgcctccaccgtctgcgccaaagaggccgacggcgcgccggacgtgggcagcgcgctgccgggcagagaccttcaggtggtgaacggtgaagtctggatccgggcggaaagcatggcggcgggctactggcgagacggcgccttactgccgctggtcaacgagcagggctggttcgccacccgcgatcgcggcgagtggcatgacggacgcctgaccattctgggccgaatggacaatctctttttcagcggcggagaagggatccagccggaagcgctggagcgcgttatcgtcacacatccgcaggttagccaggtgtttatcgtcccgctggatgacgccgaatacgggcaacgcccggtggcggtagtggaatgtgagccgggcacggatatcacgctgttgccggagtgggttcagggcaggctggcgcgctttgagcagccggtacactggctggcgctgccgtcagaactgaaaaatggcgggataaagatctcccgccaggcgttaaggcaatgggtcaatgccctgttgaggggctaa

SEQ ID NO: 522661 - DNA, 1515 bp, Stenotrophomonas maltophilia
atggatacctggatctatctctctcaggggttcgcggtagcgatgaccccggaaaacctggtgatcgccctgatcggctgtttcgtcgggacgatcgttggcctgctgccgggccttgggcctatcaacggcgtggcgattttactgccgctggcctttgcgctgcacctgcctgcggaatcggcgttgatcctgctggcgacggtttatatcggctgcgaatacggggggcgtatttcctcgatactgcttaacgtgcccggcgatgccgctgccattatgaccgcgctggatggttatccgatggcgcagcagggacgcggcggcgtggcgctctctatttccgccgtcagctcgttctttggctccctgatcgccattggcggcatcatcctcttcgccccggcgctggcccagtggtcgctggcgtttggtccggccgagtattttgccctgatggtatttgccatcgcttgtctcggcagcatgatggcgcagaatccgctgaagtcgtttttgtctgcgttgattggcctcagtctggccaccgtcggcgtggatgccaacaccggggtttatcgctttaccttcgacagcgttcatctctccgacggcgtgcagtttatcgtcgtggtgattggtctgttctctgtctcagaaatcttactgatgctggaacataccagcagcgggcagacgctggtgcgcaaaaccggccgcatgctctttaatgccaaagagggggcacagtgtgtgggtgctaccctgcgttcgtcggtgatcggtttctttgtcggcatcctgcccggcgcgggggcgactatcgccagcgccatcacctacatgaccgagaaaaagctgagcggtaacagcgacagcttcggcaaaggcgatatccgcggcgtggcggcgccggaggcggcgaataacgcctcggcctgcggctcgtttatcccgatgctgaccctcggcgtgccgggctccggcaccacggcggtgatgatgggcgcgctgacgctctataacatcactcccggtccggcgatgtttaccgagcagcccgatatcgtctggggcttgattgcggcgctgctgatcgccaacgtgatgctgctggtgatgaacatcccgctgatcgggctgttcacccgcatgctgaccattcccctgtggttcctggtcccggccatcgccgccgtctctgcggttggggtgtacgcggtgcacagcaccaccttcgacctggtgttaatggtgctgctcggcgtgctgggctacattctgcgcaagatgcacttcccgatgtcgccgctgattttagggtttgtattgggggaaatgctggagcagaacctgcgccgcgccctctccatcagcaatggcaacatggcgatcctgtgggagagcagcgtgacgaagatcctgctggcgatggcgatcatggtgattgtcgtgccgccggtgctgcgctggatgcgtcgacgccagcagaaaccgcagccggatatcggctga

SEQ ID NO: 522662 - DNA, 432 bp, Stenotrophomonas maltophilia
atgagcgatcgcatttttgccgggatatggctgctgctctgcattggcggcctgttcgtcgcctggcagatccacagcgaatacagctatgaacccgtggggccacgcccctttcccgtaggcattgtcggcctgatgctgctctgttcggtggccctgctgctgcgccatccggacaccgtggagtggccgccacgccgcacgctgcaacgtctgctggtaatggtgattgttctgctgatgtacgcgtggggctttgagtggctcggcttcccgatcgccaccgccctgctgacgatggtgattggcatactgtttaacgcctcgctgcctgcggcggggatctccggggtcgtactgggcattttactctggtacgccttcgaccgcctgctggacgtgaccctgccgctcggcgcatggtttaactaa

SEQ ID NO: 522663 - DNA, 981 bp, Stenotrophomonas maltophilia
atgaaaaaacaattactttctacccttgctgcaagcgtattgctgttgagtgcctctgtcgtccaggcgcaggacaccccgtcccgcaccgagtgtatcgccccggccaaacccggcggcggctttgacctgacctgtaagctgattcaggtcagcctgctggagacgaaggccattgagaaaccgatgcgcgtcacctacatgcccggcggcgtgggcgcggtagcctataacgccatcgtcgcccagcgccctgctgaacccggcaccgtggtggccttctccggcggctcgctgctgaacctgtcgcaggggaaatttggtcgttatgacgtaaatgacgtgcgctggctcgccaccgtaggcaccgattacggcatgatcgccgttcgcgcggactccccgtggaaatccctgaaagatctgctgaccgccatggaaaaagatccgaacagcgtggtgattggcgcaggcgcctctatcggcagccaggactggatgaaagccgcgctgctggcgcagcaggccaaagtggatccgcacaaaatgcgttacgtggcctttgaaggcggcggtgagccggtgacggcgctgatgggcaatcacgtgcaggcagtatcgggcgatctcagcgaaatggttccctacctgagcggggataagatccgcgtgctggcggtcttctcggaaaaccgtctgccgggccagcttgcagacgtcccaaccgccaaagagcagggttataacctggtctggccgatcatccgtggcttcttcgtcgggccaaaagtgaccgacgccgagtaccagtggtgggtggataccttcgcaaaacttcagcaaaccgaggagttcaaaaaacagcgcgatctgcgcgggctgtttgagttcaacctgaacggcaagcagctggacgagtacgtgaaaaaacaggtgaatgactaccgcgaacaggcgaaagcctttggtctggcgaaataa

SEQ ID NO: 522664 - DNA, 675 bp, Stenotrophomonas maltophilia
atgcgtctcttactggcggaagataatcgtgagctggctcactggctggagaaagcgctggtacaaaacggatttgccgtggattgcgtcaacgatggacgggcggccgatcaccttttgcagggggaaaactatgccgtcgcgatccttgatatcggcatgcccggcttcgacgggctggaagtggtgcatcgtctgagaaagcgcgggcagacgctgccggtgctgtttcttaccgcccgcagcaacgtggcagacagggtgaaagggctgaatgccggggcggatgactatctgccgaagccgttcgagctggaggagcttgatgcccgcctgcgcgcgttgctgcgccgcagtgaaggacgaacccaggagcgccagcggctgggagagctggagtacgatgatgaaggcttttttctgctgcgcgatgaacctctttccctcacgccgcgcgagctctctttactgaaggtgctgatgcaccgccggacccgtcccgtctcccggcaacagctcttcgaccaggtgttcagcctgaacgacgacgtcagccccgagagtatcgatctctatattcaccgcctgcgtaagaagctgaccggcagcggcgtgcggatcaccaccctccggggactgggctacgtgctggagtgcggcgatgaagtgggttaa

SEQ ID NO: 522665 - DNA, 1410 bp, Stenotrophomonas maltophilia
atgaagtgggttaagccgcagtcgctttacctgcaacttttgctctttctgggtttgccgctgctgctgttatgggggctgtcagcctttaacagctacgttagcgcgctacaggcggcgacgcaggcctatgaccgtacgctgttatcctcggcgcgcaccgtgtctgagcggctggtggtgcacaagggcaagctgctggtgaacgtgccctgggtcgtgctcgacagctttgagctgaacatgaacgatcgcctctactacaaggtggttgaccctgacgggcggacgatctccggctatgacgatctgccaaatatgcctccctccacgtcgcgcaccactcactatccggcgctggcgtggttttatcataccgagtatcgcgggcaggcgatccgcgtggcgaagctgctccagccggttaacgaagataacgtgttcgggatggcggaaatttacgtcgcagaaacgttgcagtcgcggcgctatctggccacacagctgctgttttcctcactcgtgtcgcaggggctgctggtgctgctgacgctggtcctgaccgcctggctgctgcgccgcgtgctgcgcccaatgcggcaactctcttcgctgatggtgcgccgtgagcccgggctgctggccccgctgccggagctgctgccctggtcggaaacgcggctgctgattgtcgcgtttaaccgttacatcgaccggttgcgcggcgtactttcgcggcaggagcgcttcaatgccgatgcctcacaccagctcaaaacgccgctggcggtgctaaaaacgcaggtatccgttgctctgacgcgtaacgatccggcgctgtggcaggagagcttacgggcaatgaacgttacgctggataacaccatcgtgctgacggaaaggctgttacagctttcggcggtgaagcggaaagagcagggggagcgacagtttgcccctgtggatctggtgcaggtggtgcaaaactgctgcttttcgcggctggcacaggcgcgcagcaagggtatcgatctcggttatgacggcgtacagcagccggtaatgattgagggggatgacgttttgctgggcgaactctgcgctaacctgctggagaatgcgatcaaatacacgccggagcagggcatcgtgacggtgtacctgcgcatggataacgatgccgttgagctgagcgtggaggacagcggaccgggtattgccgaagaccagatctcccaggccatgctgccgtttcatcggctggataacgtgggcgatgccgccgggtccggcattggcctggcgctggccaacgatattgcccgcctgcaccgcagccatcttcagctgatgcccagtgaaaatctgggcggcttgtgcgtaaaaatgcgttttttattgatgatataa

SEQ ID NO: 522666 - DNA, 540 bp, Stenotrophomonas maltophilia
atgaaaaaagtggcattaatgggcttaggcctgatgtttgtatcggcagccgccaacgctatttccttcaacggctcggcgggcgaagattatacccacctgggctttggtcttggcacggatagcgcaggcctggcgatgaccggcggctggacgcacaacgacgacgatggggatgcggcaagcctgggcctcggcttcaacgtgccgttgggtcccttcctggcgaccgtcggcggtaaagggatttacaccaacccgaacgacggcgacgaaggttatgcggcggcagtgggcggcggtttgcagtggaaaatcggcgacagctttggcctgttcggtgagtactactactctccggattccctctccagcggtatcgatagctatgaggaagccaacgtgggtggacgctggaccatcatccgtcctgtcaccatcgaagcgggttatcgttatctgaacctggcgggtaaagacggccaccgcgacaacgcgctggcagatggtccctacatcggtgtgagcgcaggtttctaa

SEQ ID NO: 522667 - DNA, 1200 bp, Stenotrophomonas maltophilia
atgataaacgtggaaatgttatccactggcgacgaagtgctgcatgggcaaatcattgataccaatgccgcctggctcgccgatctcttctttgagcaaggattaccgttaacgcgccgcaacaccgtgggtgacaatcttgagtcgctggtcaacgttctgcgcgagcgcagcgaacgctgcgacgtgctgattgtgaacggcgggcttgggcccaccagcgacgatctcagcgcgctggccgccgccacggccagaggtgaaggcctggtcctgcacgaggcgtggctggcacagatggagcgatttttctccgagcgtggccgcgtgatggcccccagcaaccgcaagcaggctgaaattcccgccagcgcggaactgattgataacccggtcggcaccgcctgcgggtttgccgttcagctgaaccgctgcctgatgttcttcaccccgggcgtgccgtcggaatttaaagtgatggtcgagcagcagatcctgccgcgcctgcgcgcgcgcttcacgctgcctgaaccgccgctgtgcctgcgtctgaccacctttggccgctcggaaagcgacctggcccagagcctcgatcacctgcaactgcctcccggcgtgtcgatgggctatcgctcctccatgccgattattgaactgaagctgaccggaccggcgtcagagaaagccgctatgctggcactgtggccggaagtgcagcgcgtcgccggggaaagcctgattttcgaaggaacggaagggctgccggcgcagatcgcagcgcatttgcagtcccgccagctgagcgtgacgctaagcgagcagtttaccggtgggcttctggcgcttcagcttacccgggcgggtgcgccgctgctggccagtgaagtggtgccgttccagcaggagacgctggcgcagacggcgcgctgggcgtccgagcgcagagtgaagcatttcgcggggctggcgctgtttgtgggcgggctggatgaggagcatctcaacttcgccctggcaacaccggaagggacccacgccctgcgggtgaagatgagtattacccgccacagcctggccgtgcgtcaggaggtgtgcgcgatgatggcgctgaacatgctgcgccgctggctgaacgggaaagaggtcgccagcgagcacggctggatcaacgtcgtggaatcgctgttcgtagagtga

SEQ ID NO: 522668 - DNA, 1191 bp, Stenotrophomonas maltophilia
atgaacgacacccgatttgaaagctgtatcaaatgcacggtttgcaccacggtttgcccggtcagcggcgtcgatccgcgctatcccggcccgaaacaggccggccccgacggggagcgtctgcgcctgaaggacggcgcgctctacgacgaggcgctgaaatactgtatcaactgtaaacgctgcgaagttgcctgcccttcggacgtgaaaataggcgatatcatccagcgcgcccgcgcccgctacagtacgcaaaaaccgacgctgcgcgacgcgatactaagccacaccgatctgatgggcagcctctcgacgcctttcgcgccggtcgtcaatgccgccaccgccctgaagccggtgcgcaggctgctggatgcgacgctcaaaatcgaccatcaccgcagtctgccgaaatattctcacggcaccttccgccgctggtataaatccgtggcggcagaacaggcgcagtttgctgagcaagttgccttcttccacggctgctacgtgaactacaaccatccgcagctggggaaagacctgctgaaagtgctgaacgccatggggacgggcgttcagctgctgagcaaagagaagtgctgcggcgttccgctgattgccaacggttttaccgacaaagcgcgcaggcaggcgaaaagcaacgtcacctctttacgtgaggcgatcgtcgacaacgggatcccggtactggcgacgtcgtcaacctgtaccttcacgctgcgcgatgaatatccgcatctgctggatgtggataacaccggcctgcgcgagcacattgagctggcgacccgttttctctggcgcaaacttgacagtgggcagacgttaccgctgggcaaattgccgctgaaggtggtgtatcacacgccatgtcatatggagaagatgggctggtcgatctatacgctggagctgctgcggctgatcccggggctggagctgacggtgctggactcacgctgctgcggcatcgctggcacctacggattcaagcgtgaaaactacccaacgtcacaggccattggcgcgccgctgttccggcagattgaagagagcggcgcagatatcgtggtgacggattgtgaaacctgcaagtggcagatcgagatgtccaccagcaaacgctgtgaacatcccattaccttgctggcaaacgcactggcgtaa

SEQ ID NO: 522669 - DNA, 1218 bp, Stenotrophomonas maltophilia
atgaaatttgataccgtgattgtgggtggagggctggcgggcctgctgtgcggtctcaaactgacgcagcggggtctacgctgcgccattgtcactcgcggtcaaagtgccctgcacttctcttccggctcgctggatttactgggcgcgctatcgttcgccgatctgccgcctgaacatccctaccgcctgacgggcgcagagaatatggcccgctttgcctgcgaaaccgaacacctgctgaccgcctgcggcgcacgcatgcagggtgacgccgagcaaaatcatcagcgcgtcacgccgctcggcactctgcgcgccgcctggcttagcccggaagaggtgcctgtcgcccccatcgctgccgggcgcgtgcgggtggtggggatcagcggtttccttgatttccagccgcatcttgccgccgcgtctctcagacagcagggcattcaggtggatacggcggagattgatctccccgagctcgacgtgctgcgcgaaaaccccagcgagtttcgtgcggtgaacattgcccgcctgctggataatgaacgctactggccgcagctgtacgcagcgcttcaaccgctcggcgagacctgcgacgccctgtttatgcccgcctgttttggcttaacggacaaccggctctggcgctggctctcggcgcgcctgccctgtacgctcggtttactgccgacgctccccccttccgtgcccggcattcgtctgcatacccagcttcaacgtcagtttgtcgcccagggtggcgtctggttggcaggcgacgaggtgaaaaaaatcaccctggcagagggcgcggtaagcgaaatctggacccgcaaccacggcgacatcccgcttcgtgcacgctatacggtgctggcaagcggcagcttcttcagtaacggtctgctgagcagccgggatggcgtgcgtgaggcaattctcgggctggatgtccggcaaagcgcttcccgcgcggactggtatcaaagcgatttcttcaccccgcagccctggcagcagttcggcgtgatcgtcgatacccagctgcgcccgcagctgggcggggagccggttgaaaatctttacgccatcggctcggttctgggcgggtacgatcccgtggcacagggctgcggtggcggcgtctgcgccgtcaccgcgctgcatgtcgcggagcagattatccagcgcagggagggagcacaatga

SEQ ID NO: 522670 - DNA, 1629 bp, Stenotrophomonas maltophilia
atgacaattcacgatccacgcttcagcgatgtgattatcattggcggtggcgcgacgggtgccggcatcgcacgcgactgcgccctgcggggattgagcgtcacgcttctggagcgccacgacatcgccaccggcgcaacggggcgtaaccacggtctgttgcacagcggtgcccgctatgcggtcactgacgctgagtccgcgcgcgagtgtattgctgaaaaccagatcctcaggcgcatcgcccgccactgcgttgaaccgaccaacggcctttttatcacccttcccgaagatgatctcggctttcagcaaacctttatcaccgcctgcacggcggcaggcattcaggccgaggcgctcgatcctgcgcaggcgcgccgtctggaaccctcggtgaacccggcgttactgggcgcggtaaaagtgcctgacggaaccattgatcctttccgcctgaccgccgccaatatgctcgacgcgcgggaacacggcgcacagatcctgaccgggcatcacgtcaccgggcttattcgtgaaggtaataccgtacgcggggtgcgcgtgtgtgatacgcagtacaatgaacaccgcgagctgtatgccaccgtcgtggtcaacgcggcggggatctggggccagcgcatcgcggaatacgccgatttatccgtccgcatgttcccggccaaaggctcgctgctgatcctcgaccatcgcatcaataaccatgtcatcaaccgctgccgtaaaccgtctgacgccgacatcctcgtgccgggggacaccatttcgttgatcggcacgacctcaatgcatgtggactacagcgaaattgattacaaccgcgttaccgccgaagaggtggatattctgctgcgcgaaggggaaaagctggccccggtgatggcgcagacgcgtattctgcgtgcctacgcgggcgtgcgtcccctcatcgccagcgacaacgatccgagcgggcgtaacgtcagccgcggcatcgtgctgctcgatcacgccgaacgcgacggcatggacgggtttatcaccattaccggcggcaagctgatgacctaccggctgatggcggagtgggccaccgatgccgtctgccgtaagctcggtaacaccgcgccgtgcgtgacggcggagcgggccctgcccggctcgcagcaatcgacagaaaaaacgctgcataaaatcatttcacttcctgccccgcttcgcggttcggcgatttaccgccacggcgaccgcaccccgacctggcttggtgaagggcgactcagccgcagcctggtgtgcgaatgcgaagccgtgaccgcaggcgaggtgcaatatgccgtggaaaacctgacggtgaacaacctgcttgatttacgccgccgcacgcgagtcgggatgggcacctgtcagggggagctgtgcgcctgccgtgccgccgggctgctgcaacgttttcatgccacctcctcaacccagtcgctcgcccagctcagcgattttttaaatgagcgctggaaaggcattcagcccgtcgcctggggcgatgccctgcgcgaaagtgagtttacccgctgggtctatcagggactttgcggtctggagaaggagcacaaccatgaaatttga

SEQ ID NO: 522671 - DNA, 1194 bp, Stenotrophomonas maltophilia
atgctcagtatctttaaacctgcgccacaccgggcgcgactgccagaggcagagattgatcctctctaccgccgtctgcgttggcaaatcttcctcgggatcttcttcgggtatgcggcgtactatctggtacgtaaaaactttgcgctcgccatgccgtacctggtggaacaaggcttctcccgcggcgatctgggctttgcgctgtcggggatctccatcgcgtacggtttttcgaagttcattatggggtcggtgtcggatcgctcgaatccgcgcgtgttcctgcccgccggtctgatcctcgcggcagcggtgatgctgttcatgggctttgtgccatgggcgacctccagcattgccgtcatgttcgtactgctgttcctctgcggctggttccaggggatggggtggccgccatgcggacgtaccatggtgcactggtggtcacagaaagagcgcggtgggattgtatcggtctggaactgcgcgcataacgtcgggggcgggcttccgccgctcctgttcctgctggggatggcctggttcaacgactggcacgcggcgctctatatgcctgcctttggcgccattctggtggcgattatcgccttcgccctgatgcgcgacacgccgcagtcctgcggcctgccgccgattgaagagtacaaaaacgactacccggatgattacagcgagaagcacgaagaagagctgaccgcgaaacagatcttcatgaagtatgtgctgccaaacaagctgctgtggtacatcgcggtggcgaacgtgtttgtctacctgctgcgttacggcatcctcgactggtccccgacttacctgaaagaggtgaagcacttcgcgctggataaatcctcctgggcctatttcctgtatgaatacgcgggcattcccggcacgctgatctgcggctggatgtcggacaaagtgtttaagggcaaccgtggggcgacaggcgtgttctttatgacgctggtgaccatcgcgacggtcgtttactggcttaacccgccgggtaatccgggtgtggatatggcctgtatgatcgtaatcggcttcctgatttatggtccggttatgctgatcggcctgcacgcgctggagctggcgccgaagaaagcggcaggcacggcggcaggctttacttcttcggctgggacggtggctttatggtga

SEQ ID NO: 522672 - DNA, 1059 bp, Stenotrophomonas maltophilia
atgaaattaactcagttagcgacaggcctgctgctggcgggcctgatgacaggctccgcgctggcggcggataaaatcgtgatcgcccaccgtggcgccagcggttatctgccggagcatacgctgccggcaaaagcgatggcctatgcccaaggcgcagattatctggagcaggatctggtgatgacgaaggacgaccagctggtcgttctgcatgaccattatcttgaccgcgtgacggacgtggcggagcgtttcccggatcgtgcccgtaaagatggccgctactacgccatcgacttcacgctggcggagatccgctcgctgaagtttaccgagggcttcgagattgagaacggtaagaaggtgcaggtctatccggggcgtttcccgatgggcaagtctgacttccgtattcacaccttcgaagaggagatcgagtttgttcaggggctgaaccactcgacgggcaaaaatatcggtatctacccggaaatcaaagcgccgtggttccaccatcaggaaggaaaagacattgccgcgaagacgctggaggtactgaaaaagtacggctacaccagcaagaaggataagattttcctgcaatgtttcgatgccgcggaactgaagcgcatcaaaactgagctggagccgaagatggggatggatctcaatctggtgcagctgattgcctataccgactggaatgaaactcaggaaaaacagccggacgggaagtgggtgaactacagctacgactggatgtttaagccgggcgcgatgaagcagattgcgcagtacgccgacggcatcgggccggattaccacatgctggtggcggaaggctcaacgccgggccacgtgaagctgacggcgatggtgaaagaggcgcatgcgagcaagatgcaggtgcatccgtataccgtgcgtgcagaccagctgccggagtatgcgacggacgtgaatcagctttacgacgtgctgtataaccaggcggatgtggacggattgtttacggatttcccggataaagcggtcgaattcattcaccggaagtag

SEQ ID NO: 522673 - DNA, 255 bp, Stenotrophomonas maltophilia
atgagccgcgtaacgctgagcctttcgggtacagaggtgttgtgccaggaagagcacccttctctgctggtggcgcttgaagcacatcaggtagaagtcgagtaccagtgtcgtgaaggctactgcggctcctgccgctgccgtctggtcgcaggccaggtagactggctgaccgaaccgctagcctttatcagtgaaggggaaattttgccctgctgctgccgggcaaaaggcgatatagagatcgagatgtga

SEQ ID NO: 522674 - DNA, 1131 bp, Stenotrophomonas maltophilia
atggcatataccaccttttcacagacgaaaaacgaccagctcaaagagccgatgttcttcggccagccggtcaacgtggcacgctacgatcagcaaaaatatgacatcttcgaaaagctgattgaaaagcaactctccttcttctggcgtccggaagaagttgacgtttcccgcgaccgtatcgatttccaggcgctgccggaacacgaaaagcacatcttcctcagcaacctgaaataccagacgctgctggactccattcagggtcgtagtccgaacgtggcgctgctgccgctgatctcgattcctgagctggaaacctgggttgagacctgggcgttctccgagacgatccactcccgctcttacacccacatcatccgcaacatcgtgaacgatccggcggtggtgtttgatgatatcgtcactaacgaacagatccagaagcgcgccgaaggcattgcgcactactatgacgaactgatcgagatgaccagctactggcatctgctgggcgaaggtacgcacaacgtgaacggtaaaaccgtcaccgtaaacctgcggatcctgaaaaaacagctctatctgtgcctgatgagcgtcaacgccctggaagcaatccgcttctacgtgagcttcgcctgctccttcgcgtttgccgagcgcaaactgatggaaggcaacgccaaaattatccgtctgattgcccgtgacgaagccctgcacctgaccgggactcagcatatgctgaacctgctgcgcagcggtgcagacgatccggagatggcggaaattgcggaagagtgcaaacaggaatgctacgacctgttcgtgctggcggcccagcaggagaaagagtgggcagactacctgttccgcgacggctccatgattggcctgaacaaagacattctgtgccagtacgttgagtacatcaccaacatccgcatgcaggccgtcggtctcgacctgccgttccagacgcgctctaacccaatcccgtggatcaacacctggctggtgtccgataacgtgcaggtcgcgccgcaggaagtggaagtgagttcttacctggtcggtcagattgattctgaagtcaacaccgacgacctgagcgatttccagctctga

SEQ ID NO: 522675 - DNA, 2286 bp, Stenotrophomonas maltophilia
atgaatcagagtctgctggtgacaaagcgcgacggtactaccgagcgtatcaatctggacaaaatccatcgagttctcgactgggcagcagaaggactgaacaacgtatctatatcccaggtcgaactgcgttctcacattcagttctacgacggcatcaaaacgtctgatatccacgaaaccattatcaaagcagcggcagatttgatctcccgcgacgcaccggattatcagtacctcgctgcgcgtctggcgattttccacctgcgtaagaaagcctacggccagttcgagccgccaaagctttacgatcacgtagtgaaaatggttgagctgggcaaatacgacacgcatctgctggaagactatacggaagaagagttcgagcagatgaacgggtttatcgatcactggcgcgacatgaacttctcctacgcggcggtgaagcagctcgaaggcaaatacctggttcagaaccgtgtgacgggcgaaatctacgagagcgctcagttcctctatattctggtggccgcctgcctgttctctaattatccacgtgaaacccgtctggactacgtgaagcgtttctacgatgcggtctctacgttcaagatttctctgcctacgccaatcatgtctggcgtgcgtacccctacccgtcagttcagctcctgcgtactgatcgagtgtggtgacagcctggattccatcaacgcgacctccagcgccatcgtgaaatacgtctcccagcgtgctggtatcggcatcaacgctggtcgtatccgtgcgcttggcagcccgatccgcggcggtgaagcgttccacaccggctgtatcccgttctacaagcacttccagacggcggtaaaatcctgctctcagggcggcgtgcgcggtggcgctgcgaccctgttctacccaatgtggcacctggaagtggaaagcctgctggttctgaagaacaaccgcggcgtggaaggcaaccgcgtgcgtcacatggactacggcgtgcagatcaacaagctgatgtacacccgcctgctgaaaggtgaagatatcaccctgttcagcccatctgatgtcccgggtctgtacgacgcgttcttcgccgatcaggacgaattcgagcgtctgtacaccaaatacgaaaaagacgacagcatccgcaagcagcgcgtgaaggcggtcgatctgttctccctgatgatgcaggaacgtgcctctaccggccgtatctacatccagaacgttgaccactgcaacacccacagcccgttcgatccggtggttgcgccagtgcgccagtccaacctgtgcctggagatcgccctgccgaccaaaccgctggacgatgtgaacgatgaaaatggcgaaatcgccctgtgtacgctctctgcgttcaacctgggtgcgattaagagcctggacgagctggaagagctggccgtgctggcggttcgtgcgctcgacgccctgctggactaccaggattacccaatcccggcggcaaaacgcggcgcaatgggccgtcgcactttaggtatcggcgtgatcaacttcgcctactggctggcgaaaaacggcaagcgttactccgacggcagcgccaacaatctgacgcaccagacgttcgaagccattcagtactacctgatgaaagcctccaacgagctggcgaaagagcaaggtgcgtgcccgtggttcaatgaaaccacctacgcgaaaggcattctgccgatcgacacctacaaaaaagacctggatgcgatcgtcagcgagccgctgcacctcgactgggaaggcctgcgcgagtccattaaaactcacggcctgcgtaactcctcgctctctgccctgatgccgtccgagacctcttcgcagatctccaacgccaccaacggtattgagccaccgcgcggccacgtcagcatcaaagcgtcgaaagacggcgtgctgcgtcaggtggtaccggattacgaaacgctgggcaacaactacgagctgctgtgggaaatgccaaacaacgatggctacctgcaactggtgggtatcatgcagaagtttatcgaccagtcgatctctgccaataccaactacgacccgacgcgcttcccgtcaggcaaggttccgatgcagcaactgctgaaagacctgctcaccgcctacaaatttggcgtgaaaacgctgtactatcacaacacccgtgatggtgcggaagacgcccaggacgacctggcgccgtcaattcaggacgatggctgcgaaagcggcgcatgtaagatctaa

SEQ ID NO: 522676 - DNA, 729 bp, Stenotrophomonas maltophilia
atgaatgccgaaaaatccccggtggctcacaacgttgaccacgaagagattgccaaatttgaagcggtggcgtcccgctggtgggatctcgaaggtgagttcaaacctctgcatcgtattaacccgctacgtctgggctatatcgcggagcgttccggcggtctgttcggtaagaaagtgctcgacgtcggctgcggtggcggcatcctggcggaaagcatggcgcgcgaaggggccaccgtcaccggtctggacatgggcttcgaacctctacaggttgcgcgtcttcatgcgctggagtccggcgtacaggtagaatatgtccaggaaaccgtggaagagcacgcggctaaacatgcgcaccagtatgacgtggtgacctgcatggagatgcttgagcacgttcccgatccgcagtcggtcgtcagcgcctgtgcaaaactggtgaaaccgggtggacaggtcttcttctcgaccatcaaccgtaacggcaaagcctggctgatggccgtggtaggcgcggaatatgtgctgcgcatggtgccgaaagggacgcacgacgtgaagaagttcatcaagcctgccgaactgctgggctgggttgaccagacatggcttaaggaacagcacatgacgggtctgcactacaatcctctgacggataaattcaaacttgccccgggcgtgcatgttaactatatgttgcacacaaccgccaaaaacgactaa

SEQ ID NO: 522677 - DNA, 2637 bp, Stenotrophomonas maltophilia
atgagcgaccttgcgagagaaattacaccggttaacatcgaggaagagctgaaaagctcctatctggactatgcgatgtcggtcattgttggccgtgcgctgccggacgtccgcgatggccttaagccggtacaccgtcgcgtactatacgccatgaacgtattgggcaatgactggaataaagcctacaaaaaatctgcccgtgtcgttggtgacgtaatcggtaaataccatccccatggtgattccgcggtgtacgacaccattgtccgtatggcgcagcctttctcgctgcgttacatgctggtagatggtcagggtaactttggttctatcgacggcgactccgccgcggcaatgcgttatacggaaatccgtctggcgaagattgcccatgagctgatggctgacctggaaaaagagacggttgatttcgttgataactacgacggcacggaaaaaattcctgacgttatgccaacgaagatcccaaacctgctggtgaacggttcgtccggtatcgcagtgggtatggcaaccaacattccgccgcacaacatcacggaagtgattaacggctgcctggcctacatcgacgatgaagacatcagcattgaagggctgatggaacacatcccgggcccggacttcccgacggcggcaatcatcaacggccgtcgcggtattgaagaagcgtaccgcaccggtcgcggcaagatttacatccgtgctcgcgccgaagtggaagcggacgccaaaaccggccgtgaaaccattattgttcacgagatcccgtatcaggtgaacaaagcgcgtctgattgaaaaaatcgccgagctggtaaaagaaaaacgcgttgaaggcatcagcgcgctgcgcgacgagtctgacaaagacggtatgcgcatcgtgattgaaatcaagcgcgacgcggtgggtgaagttgtgctgaacaacctttactcccagactcagcttcaggtctccttcggtatcaacatggttgcgctgcaccatggccagccgaagatcatgaacctgaaagagatcctgagcgcgtttgtgcgtcaccgccgtgaagtggtgactcgccgtaccatctttgaactgcgcaaagcgcgcgatcgtgcccatatccttgaagcactggccgttgcgctggcgaacatcgacccgatcatcgaactgatccgccgtgcgccgacgccggcagaagcgaaggcgtcgctggttgcgcgtccatgggatctgggtaacgtggcggcgatgctggaacgtgccggcgatgatgctgcgcgtcctgagtggctggagccggaattcggcgtgcgtgacggtcagtactatctgactgaacagcaggcccaggcgattctggatctgcgtttgcagaaactgaccggccttgagcatgaaaaactgctcgacgagtacaaagagctgctggagcagattgccgagctgctgcatatcctgggtagcgcagagcgcctgatggaagtgatccgtgaagagctggagctggttcgcgatcagttcggcgacgagcgtcgcaccgaaatcacggccaacagctccgatatcaacattgaagatctgatcaaccgcgaagacgtggtcgtgacgctgtctcaccagggttacgtgaagtatcagccgctgaccgactacgaagcacagcgtcgtggtggtaaaggcaaatctgcggcgcgtattaaagaagaagacttcattgaccgtctgctggtggccaatacccacgacacgatcctctgcttctccagccggggccgtctgtactggatgaaagtctatcagctgccggaagcgagccgtggcgcgcggggtcgacctatcgttaacctgctgccgctggaagcgaacgaacgtatcaccgccattctgccggtacgcgagtacgaagagggcgtgaacgtctttatggcaaccgcgagcggtaccgtgaagaaaaccgcgctgaccgaattcagccgtccacgttccgccgggatcatcgcggtgaacctgaacgaaggcgacgagctgatcggcgtggatctgacctctggttctgatgaagtgatgctgttctctgccgccggtaaagtggtgcgctttaaagagaacgccgtgcgcgcaatgggtcgtacggcgaccggcgtgcgtggtatcaagctggcgggtgaagacagcgtggtttccctgatcgttccgcgtggcgaaggcgcaatcctgaccgtcacccagaacggctacggtaaacgtacggcggaaagcgaatacccgaccaagtctcgcggcacgcagggcgttatctccatcaaagtgaccgagcgcaacggttccgttgttggcgcggtacaggtggacgacgcggaccagatcatgatgatcaccgatgccggtacgctggtgcgtacccgcgtgtctgagatcagcgtggtgggtcgtaacacccagggcgttatcctcatccgtactgcggaagatgaaaacgtcgtcggtctgcaacgcgttgctgagccggtggatgacgaagagctcgactctatcgacggcagcgtcgcggaaggggatgatgaaatcgtcccggaagcggacaccgatgatgaagcagcggatgacgctgacgagtaa

SEQ ID NO: 522678 - DNA, 2847 bp, Stenotrophomonas maltophilia
ttgaaatacctcgtctcctttcgtaccacgttaaaagtctctcgctatctgtttcgggcgcttgcgctactgctatggttgctggtggcactgctctcggtattttacatcgttaacgcgttacaccagaaagaagcggagatccgccaggagtttaacttaagctcggatcaggcccagcgctatatccagcgcacgtctgatgtgatgaaagagcttaagtatatcgctgagaatcgactgacggcggagaacggcattcttgccctccgcggtcgggatgaaaaaaccgaagtacctgatttcgaaccgctcttcccggactccgattgttccgcgatgggcaaagcctggcgtggctcactggagtccctgtcatggtttatgcgctactggcgcgataatttttcggctgcttacgatctaaaccgcgtctacctgattggcaacgaaaatctttgcatggcggacttcggtctgcgagatatgcccgtcgaacgcgaagacgcgctgaaaagcctgcatgagcgcatagtgaaataccgcaatgcgcctcaggaagagcgcgggaacaacattttctggataagccaggggccgcgcatgggcgtcggctatttctatgccctgactccggtttacctcggaaaccgtctgcaagcgctgctggggattgaacaaaccatccgcatggaaaacttcttcacgccgggcagtctgccgatgggcgtgaccattctggatgagaacggccacccactcatctcccttaccgggcctgaaaaccgcctgaaagtggagcccagctggatgcaggagcggtcatggtttggctatacctccgggttccgcgagctggtgctgaagaaaagtttaccgccatcgtcgctgagcattgtctattcgctgccggtggacaaggtgctggagcgcattcgcatcctgatccttaacgccattttgttgaacatcgcggtaggggttgcgctgtttatgctggcgagaatgtatgagcggcggatctttattccggcggaagcggatgctcagcgtctggaggagcacgagcagtttaaccgtaagattgtcgcctcggcgccggtggggatctgtatcctgcgtactcaggacgggacaaatatcctcagtaacgagcttgcccataactacctgaacatgctcacgcatgaagaccgccagcggttaacgcagatcatctgtgggcaacaggttaactttgtggatgtgctgaccagcacccacaccaacctgcaaatcagcttcgtccattcgcgctaccgcaatgaaaacgtggcgatttgcgtgctggtggacgtctccgcgcgcgttaagatggaagagtcattgcaggatatggcgcaggcggcggagcaggccagccagtcgaaatcgatgttcctcgcgaccgtcagccatgagctgcgtacgccgctgtacggcattatcggtaacctcgatcttctccagaccaaagagctgccgaaaggggtcgaccgcctggtgacggcgatgaacaactcgtccagcctgctgctgaaaattatcagcgatattctcgacttctctaaaattgaatccgagcagttgaaaatagaaccgcgtgagttctccccgcgcgaggtgatgaaccatatcagcgccaactatctgccgctggtggtgcgcaaacagctggggctgtactgctttatcgagccggatgtgccgctgacgctgcatggcgatccgatgcgtctgcaacaggtcatctcgaacctgctaagcaacgccatcaaattcaccgatatcggctgtattgtgctgcatgtctgccgggcaggggagtacctgactattcgcgtacgcgacacgggtgttggcattccggcgaaagaggtcgttcgcctgttcgatccgttcttccaggtggggacgggcgtccagcgtaatttccaggggaccgggctgggtctggcgatttgcgagaagcttatcagcatgatggacggggatatctccgtcgataccgagccgggtatgggcagccagttcaccatccgtatcccgctctactcggcacactatccggtgaaaaccacggtcgacgggctgagcgaaaagcactgctggctggcggtgcacaacgcctccttacatgatttcctgacctcgatgctgaccagcagcggtgtgcgggtctcacgctatgaaggccagacgccggacgcagatgacatgctgattactgacgttgagccagacaaggcgtgggcggggcggggcgtggtgatgttctgccgccgtcatatcggtattccgattgagcgttcgcccggggtatgggtgcacagtgtggcgacaccgcacgaaatgttgggcttgctggcgcgtatttacagcgtacagcttgaggacagcgatggcgctaccgtgctggcttcccctgatgagctggcatcggtgaatgacgatatgatgattctggtcgtcgacgatcatccgattaaccgtcgtctgctcgcagaccagcttggctctctgggctatcagtgtaaaacggccaatgatggcgtggatgccctgaatgtcttaagtaagaatcatattgatattgtgctcagcgatgtgaacatgcctaacatggacggctatcgtctgacgcagcgtatccgacagctggggctgacgctgccggtggtgggggtgacagccaacgcactggcggaggagaagcagcgctgtctggagtcgggaatggacagctgcctgtcgaagccggtcacgctggatgtactgaagcagacgctatccgtgtatgcggagcgggtgcgaaaagcaagacaataa

SEQ ID NO: 522679 - DNA, 651 bp, Stenotrophomonas maltophilia
atgaacaatatgaacgtaattattgccgatgaccatccgattgtactgttcggtattcgcaaatcacttgaacagatcgagtgggtgaatgtagtcggtgaatttgaagattccacagcccttattaacaacctgcctaaacttgatgcgcacgtgctcattaccgatctctccatgcctggggataaatacggtgatgggattacgctcatcaaatacattaaacgccacttcccggacatttcgatcattgttctgaccatgaacaataacccggcgatcctgagcgccgttctggatcttgatattgaagggattgtgctgaaacaaggcgcacctaccgatctgcctaaagcgctggcggcgctacagaaagggaagaaattcacgcctgagagcgtctcacgcctgcttgaaaaaatcagcgcaggtggctatggcgacaagcgtctctcgcctaaagagagtgaagttctgcgtctgttcgctgaaggtttcctggttactgaaatcgccaagaaactgaaccgcagtatcaaaaccatcagtagccagaaaaaatccgcgatgatgaagctgggtgtggataacgatatcgccctgctgaactatctctcttccgtgacgctgagcgcaacggacaaagattga

SEQ ID NO: 522680 - DNA, 2673 bp, Stenotrophomonas maltophilia
atgagtcagactgaaactaccgccccgagcaaattctcccttctaccgggcagcatcacccgtttctttcttctgttgatcgttgtgctgttagtcacaatgggagtgatggttcagagcgccgtgaatacctggcttaaagataaaagctatcaaattgtcgatatcacccatgcggtgcataagcgcattgatacgtggcgctacgcgacctggcaaatctacgacaatatcgccgccgcacctgccacctcatcaggcgaagggttgcaggaaacgcgccttaagcaggatgtgtattaccttgaaaaaccgcagcgcaagacggaagccctgattttcggctcgcacgacagcgcaacgcttgagatgacgcagcggatctcctcctatctggacaccctgtggggcgccgagaccgtaccgtggtccatgtattacctgaacggtcaggacaacagcatgatcctgatctcgaccctgccgcttaaggatctctcgtcgggctttaaagagaccaccgttggcagcattgtcgattcccgtcgggcagaaatgctgcaacaggccaacgcgctggacgagcgcgaaagtttctcgtcattacgccgtcttgcctggcagaatggccactactttacgctgcgaaccacctttaaccagccgggccatctggcgaccgtggttgccttcgatctgccaattaacgatcttatcccgccggatatgccgctggacagtttccgactggagccagacaacagcacccaaaatatgcgcacgccgtcggataaagaaggcccggacagcgtagcgatctcctttaatggctcgaagattgagattgcctcatcgctcaactcaaccggtatgcggctggtgtggcaggtgccttttggcaccctgatgcttgataccctgcaaaacattatgctgccgctgctgttgaatatcggcctgctggcgctggcgctgtttggctacagcaccttccgtttccagtcgggccgccagagcgactcgacgtcggtatcagccgggaccagcaacgagttgcgtgttcttcgtgccctgaatgaagagattatttccgtgctgccgcttggggtgcttgttcacgatcaggaggcaaaccggacggtgatgagcaacaaaattgccgatcaccttctgccgcatcttaacctgcaaaatattacggccatggcggaccagcatcagggcgtcattcaggccaccattaataatgaactgtatgagatccgtcagttccgcagtcaggtcgcctcgcgcacgcaaatcttcatcatccgcgatcaggatcgcgaagtgctggtgaataaaaagctcaagcaggcgcaaaggctgtatgagaaaaaccagcatggccgcgcggcgtttatgcaaaacattggcgatgcctttaaacagccgctgaagtcactcgccacgcagattgctgatttaagcacgccggaaagccgacagcttagcagccaggccgactcgctggttcgtctggtggacgaaatccagcttgcgaacatgctggagaatgacatctggaagggcacccctacgctcttctccatccaggatctgattgatgaggtggttccggaagtcctgccggtgatcaagcgcaaagggctccagctgctgatcaacaaccatttaccggccaacgacgagcgtcacggcgatcgcgatgccctgcgtcgcatcctgatgatgttgattcagtatgccgtcaccacgacacagatcggcaagatcacccttgaagtcagcaccgatgagtccaccgacgatcgtctgacgttccgtattctggatacgggcgaaggcgtcaccgtgagcgaaatcgataacctgcacttcccgttcctgaacgatacccagcgcgaccactacggtaaggcgaatgccctcaccttctggctctgcgatcagctggcgcgtaagctgggcggtcatctgaacattaaggcgcgcgaatccctcggcacccgctactccttgcatgttaaaatggcggcgaatcctcaggaagaggatgaagagcgtctgctggatgatgtggtggtgatggtggacgtgacctccagtgagatccgtaatatcgtcgttcgtcagctggaaaactggggcgcgtcctgcattaccccggacgaaaggctcgcgagtcaagaatttgatctatttttaactgataatccgtctaatcttactgcctccggcttgcttttaagcgatgatgagccaggcgtgcggaaaatcggccctgggcagctgcgcgtcaactttaatatgagcaatgcaatgcaggaagctgtattacaactgattgaagagaatctggcgcaggaagagatcctggagtcaccgttaggcggcgatgaaaatgccgaactccatgccagcggatattattcgctcttcgttgatacagtaccagatgatgttaagcggttgtatactgagtccgctgcgcaggattttgcagcgctggcacagacagcacaccggcttaaaggggtgtttgccatgcttaatctggttcccggcaagcagttatgtgaaacgctggaacatctaattcgtgagaaagatgcctctggcattgaaaaatacatcagcgacattgacgcttacgtcaagagcttgctgtag

SEQ ID NO: 522681 - DNA, 1092 bp, Stenotrophomonas maltophilia
atgaaagttaaagtactgtccctcctggtaccagctctgctggtggcaggcgcagcaaatgcggctgaaatttataacaaagacggcaacaaattagatctgtacggtaaagtggatggcctgcactatttctctgatgacgacagtgcagacggcgaccagacctacatgcgtctgggcttcaaaggcgaaactcaggttaacgaccagctgaccggttacggccagtgggaataccagatccagggtaactctggtgagaacgaaaacaactcatggacgcgtgtggcgttcgcaggtctgaaattcgctgatgcgggttcattcgactacggtcgtaactacggcgttgtttacgatgtgacttcctggaccgacgttctgccggagttcggcggcgatacctacggttctgacaacttcatgcagcagcgtggtaacggcttcgcgacctaccgtaaccaggacttcttcggtctggttgatggtctgaacttcgcgttgcagtaccagggtaaaaacggcagcccaagcggcgaaggccagaccaacaacggtcgtgacgcgctgcgtcagaacggtgacggctacggcggctctctgacttacgatctgggcgaaggcttcgcactcggtacggcagtcaccagttctaaacgtactgctgaccagaacgctgcgggctactacggtgaaggcgatcgcgcagagacctacaccggtggtctgaaatacgacgcgaacaacatctacctggctgcacagtatactcagacttacaacgcgacccgcgttggcgatcagggctgggctaacaaagcgcagaacttcgaagtggttgctcagtatcagttcgacttcggcctgcgtccatccgtggcttacctgcagtctaaaggtaaagacatcgaaaactatggcgatcaggatatcctgaagtatgttgacgtgggtgcgacttactacttcaacaaaaacatgtccacctatgttgattacaaaatcaacctgctggatgaaaatgacttcacccgtcagacaggtatcggtactgacgatatcgtcgcgctgggtctggtttaccagttctaa

SEQ ID NO: 522682 - DNA, 1056 bp, Stenotrophomonas maltophilia
atggatatgacttttttacgcgccagcgttctggcgacttttttactcctgaccgcgtgtgactcttctacacagcccgcaaaaatcgacgcacccgccgcgacggtgctggaagggaaaaccatggggaccttctggcgcgtcagcgtgatggatattgataagtcccgcgctgaagaactacgcggtaaaattcaggcgcagctggatgccgacgatcagctactctctacctataaaaatgactcagcgctgatgcgtttcaatcgctccagcagcacctcgctgtggccggtgagcgaagcaatggccgatatcgtcacggaagccatgcgcgtgggctacaaaaccaacggcgcaatggatgtgaccgttgggccgctggtgaacctgtggggatttggccccaacaagcagccggtgaccacacccgatcaagccgccatcgacgacgcccgcgcgcgtacagggttacagcatctggcggtgatctcccagtacggtcagcaatacctgcaaaaagacattcccgacctgtttgtggatctctccacggtaggcgaggggtatgctgcggatcatctcgcggccctgatggcgcaggaaggtattccccgttatctggtttccgtcgggggcgcgctcgtcagccggggcatgaacgccagcggcaggccgtggcgagtggccatccaaaaaccaaccgatcagcagaacgcggtgcaggcgattgtcgacatcaacgggcacggtatcagcacctccggaagctaccgcaactattacgagctggatggcaaacgtatctcgcatgtgattgatccgcaaaccggacgcccgattacccacaacctggtgtccgtgacggtgatagcgccaactgcgctggaagccgacgcctgggataccggattgatggtgctcggcacggagaaggccaaagaggtggtgcgtcaggaagggctggccgtttatatgatcaccaaagaggctgacgggtttaaaacctggagttcaccgcagttcaacagcttcctggtgagcgaaaaaaattaa

SEQ ID NO: 522683 - DNA, 1059 bp, Stenotrophomonas maltophilia
atgaaaaacacaacctatcttaccgatgaggatcgctggcaggctgttctggcccgcgatccgcgtgcggataaccagtttgtctttgccgtgcagacgaccggcatttattgtcgtccgtcctgccgtgcccgccacgcgctgcgtaaaaatgtctgcttttatcctgatgctcaccaggccgcgcaggcgggtttccgcccctgtaagcgctgtaggccggaccaggtcgaccctatggcgcagaaaaaggccaacgttgcgctggcctgccgactgcttgagcaggatgccgcgctgaacctggaggccctggcgcagcaggttggcatgagtccgttccatttccaccgcttgtttaaatccgtcaccggcatgacgccgaaagcatggcagcaggctgcgcgtgaacaacgcctgcgtagcctgcttgcacagggcggtaaaatcaccgacgccgtactggccgctggcttcccggacggcagcagctactaccgtaaagccaacggcgcgctgggcatgacggcgaaacagtaccgtaacggagaggctgcggtccgctatgccatcagcgactgctcgctgggccactgtctggtggcggaaagcgagcgcgggatctgcgcaatactgctgggtgatgacgacgccgggctgacggctgagctgctctcactgtttccgcttgccgtccgtgaaccgatggaaggcgcatttgccgggcgtgttcgtcaggtgattgcctctgtcgacagccgcgcgacgccgttgacgttaccgctggatatccggggtaccgctttccagcagcaggtctggcaggcgctgcgggctatcccctgcggtgaaacggcgagctatcagcaggtggcgaaggccattggtaaacccaatgccgtacgtgccgtggcgggggcctgcggagccaacaaactggcgatagttatcccctgtcaccgcgtggtgcgtaacgacggtgcgctgtcgggttatcgctggggcgcagcgcgtaaggtgctattgttgaaacgtgaggcgaacaacccggagggataa

SEQ ID NO: 522684 - DNA, 651 bp, Stenotrophomonas maltophilia
atgctcgatctttttgctgatgctgaaccctggcaggagccgctcgcgccgggggcgacgatcctgagacgttttgcgctttcccgcgcggcggcgctgttcgacggtattgataccgtcaccgcccgttcgccgtttcgccatatggtcacgccgggcgggtataccatgtccgtggcgatgaccaactgcggcgaactgggatgggcgacgaatgagcggggctatgtatatgccgcgaacgacccgctgacggatcggccgtggccgccgatgccggaggcgtttcaggcgctgtgtcacgatgccgccgtcgcggccggctatcctgattttcgtcccgatgcctgtctgatcaaccgctatgccgtcggggcaaagctctccctgcatcaggataaggacgagcctgacctgcgcgcgccgattgtctcggtatcccttgggctgcccgctgtctttcagtttggcggcctgcggcgcaacgacccgctcaaacggctgatgctggagcatggcgatgtggtggtctggggcggtgaatcacggcttttttatcacggtattcagccgcttaaaaatggcgatcacccggtggcgggggcgtttcgctacaacctcacgttccgccaggcagcgtacagagaataa

SEQ ID NO: 522685 - DNA, 1644 bp, Stenotrophomonas maltophilia
atgcaactacttcttcttgtctggcggcagtatcgctggccttttatcgcggtgatggcgctaagccttgccagcgcggcgctggggatcggcctgattgccttcattaacgtgcgtttgatcgaaatggtcgacacgtcactctccgtcctgccggaatttctgggtttactgctgctgctgatggcagtcacgctcgggtcacagctggcgctgaccgcgctcggccaccacttcgttttccgtctgcgcagcgagttcatcaaacggatccttgatactcaagtggaacgcatcgaacagctgggaagtgcttctctgctggcggggctgaccagcgatgtgcgcgccattaccatcgcctttgtgcgcctgccggagctggtgcaggggatcatcctgacctttggctcggcagcctatctcgcctggctctccagcaaaatgctggcggtaacggcgctgtggattgttattaccatctggggcgggttcctgctggtatcacgcgtctataagcacatggcggtgctgcgcgaaacggaagacaagctctataacgattatcagacagtgctggaagggcgcaaagagctgacgctgaaccgcgagcgcgccgaacatatcttcaaccatctctatatcccggatgcgcacgaatatcgtcatcacattattcgcgccgatacgttccacctgagcgccgtgaactggtccaacatcatgatgctgggtgccattggcctggtgttctggatggcgaacagcctggggtgggcggataccaacgtggcggcaacgtactccctgacgctgctgtttttacgcacgccgctgctgtcggccgttggcgcactgccgacgctgctgagcgcacaggtggccttcaaaaagctgaagaagttcgaccttgcgccgtttaagtctgagttcccgcgcccgcaggcctttccgaactggcaaacgcttgagctgcgtaacgtgaccttccgctatcaggataacgccttctccgtggggccgataaatctgaccattcaccgcggcgaactgctgttcctgatcggcggtaacggcagcggcaaatccacgctggcgatgctgctgacgggcctctaccagccgcaatcaggcgaaattttgctggatggcaaagcgctgagcgcggagaaaccggaggactaccgcaagctcttctcggcggtatttaccgacgtctggctgttcgaccggctgctgggcccggaagggcagcaggcggatccggcgctggtggagaagtggcttgcgcatctgcaaatgtcacacaagctggagctacaggatggcaaaatcctgaatctcaagctgtcgaaagggcagaagaagcgcgtggcgctgctgctggcgctggccgaagagcgcgacatcatcctgctggatgaatgggccgccgatcaggacccgcacttccgtcgcgagttctatcaggtcctgctgccgctgatgcaggcgatggggaaaaccatttttgccatcagccatgacgatcactacttcattcacgccgaccgtcttttggagatgcgcgacggcaaactgagcgagctgaccggcgatgagcgcgatgcggcgtcacgggacgcggtggcgcgcacggcctga

SEQ ID NO: 522686 - DNA, 1437 bp, Stenotrophomonas maltophilia
atgtcggtattaaagaaaaacagcgccaggcagcgtgaccaggagcgtgcgcggctcatctggctcctgacgaccgataaagcggtcacgtcaacgttattgggtaagctaaccctggctgagcaatatgatgtcggcacgctggccgacgatattgctgaggtaggtgcgctggttgcacatttaccacctccggatctggcggacaccctggaggcattgccttccgaggagcgccacgccctgtggcggctggtgcaggatcatgagcgcggtcaggtgctgcttgaagcctcggaaaacgtctgggatgaccttatcgatgagatgagcgatcgggacattcttgacgccctgcaaacgctggatatcgatgagcagatttacctcgttcagcatcttccgcgcaacctgaccggacgcctgctggcttccctgcctgccgaggagcgggcgcgcgtgcgtcaggtgatgcactacgagaaaaacagcgtcggcgcgatcatggagtttggcgtcatcaccgtgcgtccggacgtcaccctgggtacggtgcagcgctatcttcgtcgcctgggcagtatgccggacaacaccgataaactgttcgtcacctcgcgggataagaccctgctcggggagctggagcttaaaacgatcctgctgaacagcacccagcagcgggtaagtgaggtcatggaaaccgagccgatggtcttctcgccggaagacgatgccgaaaaagccgcgcgtaccttcgaacgtgatgacctggtgagcgcggcggtggtggattcggtgggcaagctgatggggcgtctgaccattgatgagatcgttgacgtggtctatgaagagaccgataacgacctgcgtgcccttggcggtatcagtgccgaagacgatgttcatgcctccgtcggcaaggccgtcaaaacccgctgggcgtggctcgccatcaatttatgcaccgcgttcgtggcgtcccgcgttattgacggcttcgaacataccatttcccagctggtggccctggcgtcgttgatgccgattgtggcggggatcggcgggaacaccggcaaccagactatcaccatgatcgttcgcgccctggcgctggaaaacattcagccgggtaatttttcgtggctgattttcagggagatgggcgtcgcgctgattaacggccttgtctggggcggcatcatgggcggcattacctggtggctgtacgatgatatggcgctgggcggggtcatgatgctggcgatggtgctgaacctgctggtggcggcgatgatgggcgtgattatcccgttgaccatgacccggctggggcgcgaccccgcggtggggtcgagcgtgatgatcaccgccattaccgataccggcggtttctttatttttcttggactggcgacgatttttcttctgtag

SEQ ID NO: 522687 - DNA, 1299 bp, Stenotrophomonas maltophilia
atgatgctgcactttgtgatcgcgcgcacggaagcctgcccctaccagcgaattgttatgtcattacctcactcgtctgtaccccaagaaggccatgtcgccaccgttttacgttcgcctcaacgtctgatgcgcgaaaccctggccggcgtgattaccgcgctggcgctgatcccggaagtgatttcgttttccgtggtcgcgggcgtggatccgaaagtgagccttatcgcctccgtggtgctctgtttcgccctttccctgctcggcgggcgtccggccatggtgacggcggcggccggttccgtcgcgctggtgattggcccgatggtccatcaacacggcgtacagtacattctgcccgcggtggtgatggctggcgtgattcagatcctgttcggcgcgctgggaatggcgcggctaatgcgctttattccccagtcggtgatggccgggtttgttaacgcccttggcattttgattttctttgcccaggtgccccatttctggagccgaagcccgctgatagtaggcctgttcgtgctgacgctgctgattgtgctgtgggtgccacgctatatcaaaagcgtgccctccccgctgattgccattgtgctgctgactttgttcaccgtcaccagcgggcaaatcctgccaacggtaggggatgaaggctccatgagcggcggtttgccgggctttacgcaactgctggtgccgctcaatctggaaaccctgagcattatctggccgtgtgcgctaagtatcgcttttgttggcctgctggaatccttgctgacggcaaaactggtggatgaactgaccgttaccccttcaagcaagcgccgcgagagcatcggtctgggcgtggggaatattatggccgggttctacggcggcattgcgggctgcgcgatgattgggcagaccatcgttaacgtggagatggggaaaggcagaagccgtatctccacccttgcggcgggtatcgtactgcttgtgctggttacggcgctcagcgaggtgatggccaaaatcccgatggcggtactggcgggtattatggccattgtggccgtcaagacctttagctggcatagcgttcagcccggaacgctgaaaaacgcgccggtggctgaaaccgtcgtgatgctggtgacggttgtggcaacggtttccaccggcaacctggcgattggcgtgctgggcgggattgtgatgatgttcatcctccctgcccgacttaagcaaaaagcactggctacagaagaaaaatcgtcgccagtccaagaaaaataa

SEQ ID NO: 522688 - DNA, 741 bp, Stenotrophomonas maltophilia
atgatgaaaaaaatgactgccgtgctcttttctctggccgtggggctgaacgccgtctcgctggcggcgaaggctgacgcaccaaaagagcaggaaacggatgtccttttaattggtggcggcatcatgagcgccacgctgggcacatatcttcaggaattagagccgaactggtccatgacgatggtcgagcgccttgatggcgtggcgcaggaaagctctaacggctggaataacgccgggacggggcactcggcacttatggaactgaactatacgccgcagaaaaaggacggttccattagtatcgagaaggcggtagagatcaacgaagcgttccagatctcacgtcagttctggtctcaccaggtgaacagcggtgtgttgcacaatccgcactccttcatcaacaccgttccgcacatgagctttgtgtggggcgatcaaaacgtcaacttcctgcgtgcgcgttacgctgccctgcaacagagcacgcttttccgcgggatgaaatactctgaagatcacgctcaaatcaaagagtgggcgccgctggttatggaaggccgcgatccgaaccagaaagtggcggcgacccgcactgaaattggtactgacgttaactacggtgaaatcacccgtcagctggtggcctctctgaagaaaaagagaactttaacctgcaactcagctccgaagtgcgtggtttcaagcgcaacgcggataacagctggagcgtga

SEQ ID NO: 522689 - DNA, 954 bp, Stenotrophomonas maltophilia
gtgcgtggtttcaagcgcaacgcggataacagctggagcgtgaccgttgccgatctgaaaaacaacgaagccgagcatgtgattaaggcgaagttcgtgtttatcggtgctggcggcgcggcgctgaaactgttgcaggagtccggtattccggaagcggacgactacgccggcttcccggttggcggccagttcctggtgtcggaaaaccctgaagtggttaaccgtcatctggctaaagtgtacggtcaggcttctgttggtgcaccaccgatgtccgttccccatatcgacacccgtatgctggacggtaagcgcgtggtgctgttcgggccgttcgctacattctctaccaagttcctgaaaaacggttccctgtgggatctgctgagcgcgaccacgacgtcaaacgtcaagccaatgatggacgtgggactggataacttcgatctggtgaaataccttattagccaggtgatgctctctgatgaagaacgcttcgaggcgctgaaagagtactatccgcaggcgaagaaagaagactggcgtctgtggcaggcgggtcagcgcgtgcagatcatcaaacgcgatccgaaagagggcggcgtgctgcgtctgggtaccgaagtagtaagcgataaggatggcactattgccgcgctgctgggagcatccccgggggcgtctaccgctgcgccaatcatgctacacctgatggaaaaagtgtttaaggacaaagtatccagcccggaatggcaggcgaagctgaaaaccattattccatcctacggtacgaagctgaacggtaacgttgacgccacggaacaagagctggaatacaccagtcgcgttctgcaactgcaatacgtcaaaccgcaggctgcggatgctgcgccacaggcagagctgaagcctcaggcggaaaacaagccggttgcggatatcgcgctgtaa

SEQ ID NO: 522690 - DNA, 504 bp, Stenotrophomonas maltophilia
gtgaaaaacgcacctaaatttgccatcgcccttatcgccgctgcgtgcgcgagcaccagcgctttcgccagcgaaaccccaaaagagcagccgctggaaaaagttgccccgtatccgcaagcggacaaagggatgaagcgccaggtaattcagctcccggctcagcagaatgaagggaatttcaaagtcgagctgttaatcggccagacgctggaagtggactgcaaccagcatcgtctgggcggccaactggaaagcaaaacgctggaaggctggggttatgactactatgtcttcgacaaagtaacctcgccagtctccaccatgatggcgtgcccggacggcaagaaagagaagaaatttatcaccgcctatctgggtgataacagcctgctgcgctataacagcaagctgccgattgtcgtttatacgccggaaaacgtggatgtgaaatatcgcgtatggaaggcggatgagacggtaggacaagcagtagttcgttaa

SEQ ID NO: 522691 - DNA, 261 bp, Stenotrophomonas maltophilia
atggtacgggaaaaactgaagacacctgaaggccgcaagttcctgctggcgttactggttgtgtttatgattgctgctgcatgcgtggggcgagcaaccattgtcggcgtgatcgagcagtacaacatcccgctctctgcgtggacaaccagcatgtttgtcctgcaatcagcgatgatctttgtttacagtctggtgttcaccgtcctgctggcgattccgctggggattttctttctcggtgggcgtgagaagcactaa

SEQ ID NO: 522692 - DNA, 1761 bp, Stenotrophomonas maltophilia
atggtgacgaatcgtcagcgctaccgtgaaaaagtctcccagatggtcagctgggggcactggtttgccctgttcaacattctgttggcgatggtgctcggctgccgttatctgtttgtggcggactggccaaccacgttaaccgggcgtatctactcgtggatgagccttgttggtcactttagctttctggtcttcgccacctatctgctgatcctgttcccactgacgtttatcgtcatgtcgcagcggctgatgcgcttcctgtccgccattcttgcgacggcgggcatgacgctgttgcttatcgacagcgaagtttttacccggttccacctgcacctgaatcctgtcgtctgggagctggtgattaacccggatcagaacgagaccgcccgcgactggcagctgatgtttatcagcgtgccgattatcctgctgatcgaaatgttgttcgcgacgtggagctggcaaaagctccgcagcctgacccgacgccgacattatgcgaagcccgtcgcggcgctctttttcgcctcatttatcggttcgcacctgatgtatatctgggcagatgcgaacttctaccgcccgattaccatgcagcgcgcgaatctgccgctctcctatccgatgacggcacgtcgtttccttgaaaaacacggtctgctggacgcgcaggagtatcagcgtcgtctggtcgaacagggtaatccggaagcggtcagcgtgcagtatcccctgagcgatctgaaatatcgcgacatggggcgcggtcagaacgtgctgctgattaccgtcgatggcctgaactattctcgctatgagaagcaaatgcctgccctggctgaattcgctgagaacaacatcgtattcactcagcatatgagttccggtaattcgaccgacgcgggtattttcggtctgttctacggcatttcaccgagctatatggacggcgtgctgtcggcccgtattccggctgcattgattaccgggcttaatcagcagggctaccagctggggctgttcgcctctgatggtttcaacagctcgctgtaccgccaggcgctgctgtctgatttctcactgccagccgcgcagagccagtctgacgatcggactgctgaccagtggatagactggctgaagcgctatgcacaggaagataaccgctggttctcctgggttgcgtttaacggcacaaatcttgatgacagcaatcagaaaggcttcgcgcgccgctatagccgtgcggcgggtgatgtcgatgcgcagatcgctcgcgtgctgaccgccctgcgcgacgcgggcaagctggacaatacggtcgtcattatcacggcggggcatggcgtgccgctcggcgacgaagcgaagggcatggactggtcgcgcccgaacctgcatgtcccgctggtgatccactggccgggcactcccgcgcaacgcatcaacatgctgaccgaccataaagacgtcatgaccacgttaatgcagcggctgctgcacgttagcacgccggcaattgaatactcgcagggacaagacctctttagcgccacgcggcgtcataactgggtcacggctgctggcgaaaacacgctggtggtgaccacgccgacgctgtcccttgtgctgaacagcaacggcaattaccagacgtacagcctcgaaggtgagaagctgaaagaccagaaaccgcagctcagcttgctgttgcaggtactgacagacgagaagcgctttatcgctaactga

SEQ ID NO: 522693 - DNA, 228 bp, Stenotrophomonas maltophilia
atgccacaacattcccgctacagtgacgaacacgttgaacaactgctcagtgagctggtcaacgtactggaaaaacataaaacgccaaccgatctctccctgatggttttgggaaatatggttaccaacctgatcaataccagcgttgctccggctcagcgtcaggcgatcgccaaatctttcgcccaggctttgcagtcatccgttagcgacgaccaggcacactaa

SEQ ID NO: 522694 - DNA, 1008 bp, Stenotrophomonas maltophilia
atgagtctggaaatcaaccagattgccttgcaccagcttatcaagcgtgatgagcaaacccttgaagtggtgctacgcgattcgttactggaaccaacgcctaccgttgtcgagatgatggcggagttgcatcgcgtctacagcgcgaaaaataaagcctatggcttgttcagcgaagagagcgagctggcggatagcctgcgcctgcaacgtcagggcgaagaggatttcctggcattcagccgcgctgcaaccggccgtcttcgtgacgaactggcgaaatatcccttcgccgatggcggtatcgtcctgttctgccactaccgctatctggcggtagagtatctgctggtcaccgtgctgaataatttaagcagcatgcgtgtgaacgagcagttggatatcagctcaacgcactatctggatatcaaccatgcggatattgtggcgcgtattgatttaaccgaatgggaaaccaatccggaatcgacgcgctacctgaccttccttaaaggccgcgtgggccgcaaagtggccgatttctttatggacttcctcggtgccagtgaagggctgaacgccaaagcgcagaacaaaggtctgctccaggcggtggatgactttaccgctgaggcgcagctggataaatctgagcgtcagaccgtgcgtcagcaggtttacagctactgtaacgagcagttacaggccggggaagagattgagctggagtcgctgtccaaagagctggcgggcgtcagcgaagtcagcttccaggaatttaccgcggaaaaaggctatgagctggaagagagcttcccggcggatcgcagtacgctgcgtcagctgacgaaatttgccggtagcggcggtgggttaaccattaactttgatgccatgctgctcggggaacgtatcttctgggatccggcgaccgacacgctgaccattaaaggcacgccgccgaatctgcgcgatcagctccagcgtcgcacctcaggcggtaagtag

SEQ ID NO: 522695 - DNA, 285 bp, Stenotrophomonas maltophilia
atgttcactatcgaagcagaagtacgtaacgtgcagggtaagggtgcgagccgccgcctgcgtaacgctaacaagttcccggctatcgtttacggtggcgaagctgctccagttgcaatcgaactggatcacgacaaagtgtggaacatgcagaacaaagctgaattctacagcgaagttctgaccatcgttgttggcggtaaagaagaaaaagtgaaagttcaggctgttcagcgtcacccgttcaagccaaaactgtctcacatcgacttcgttcgcgcgtaa

SEQ ID NO: 522696 - DNA, 1761 bp, Stenotrophomonas maltophilia
atgacgttcacactacgcccctatcagcaagaagccgttgatgccaccctcgcctggtttcgcaagcaccgggaacccgctgccatcgtgctcccgaccggagccggtaaaagcctggtgattgccgaactggcgcgcctggctcgcgggcgcgtgctggtgctggcgcacgtaaaagagctggtggcgcaaaaccacgccaaatattgcgcgctcggcctggaggccgatatttttgccgccgggctgaagcgcaaagagagccacgggaaagtggtgtttggcagcgtacagtccgttgcgcgcaacctggacctgtttcgcagcgagttttccctgctgattgtcgatgagtgtcaccgcatcagcgatgacgacgacagccagtatcagcaaatcctcactcatctgagagaggtgaaccctcacttacgcctgcttggcctgaccgccacgccatttcgtctgggcaagggctggatttatcagtttcattatcacggcatggtgcgtggcgatgaaaaggccctgttccgcgactgtatctatgagcttccgctgcgctacatgatcaagcatggctatctgacgccaccggagcggctggatatgccggtcgtgcagtacgatttcagccgcttacaggcgcagagcaacgggctgttcagcgaggcggatcttaaccatgagctgaaaaaacagaagcggatcacgccgcatatcatcagccagattgaagagtttgcgcaaacgcgcaaaggggtgatgatttttgctgctaccgtcgaacacgcgcgtgaaatcacggggcttctgcccaccaacgacgcggcgttaattaccggtgaaacccccgggccggagcgcgacagcctgattgaggctttcaaagcccagcagttccgctacctggtgaatgtctccgtattaaccaccgggtttgacgccccgcacgttgacctgattgcgattcttcgcccgaccgaatccgtcagcctgtaccagcagattgtcggccgtggcctgcgcctggcaccgggcaaaaccgactgtctgatcctcgattatgccggtaatccgcacgatctctactccccggaagtgggcacgccaaaaggcaagagcgacaacgtgccggtacaggtgttttgtccggcctgcgggtttgccaacactttctggggcaaaactaccgccgacggcacgctgatcgaacattttggccgccgctgtcagggctggtttgaagacgatgaaggccatcgcgaacagtgtgatttccgcttccgcttcaaaaactgcccgcagtgcaacgccgagaacgatatcgctgcccgccgctgtcgggagtgtgacacggtgttggtcgacccggatgacatgctgaaagcggcgctgaagctgaaagatgcgctggtgctgcgctgttccggcatggtcttacagcccggtgcggatgaaaaaggcgagtggctaaagattacctattacgacgaggacggcgcagacgtcagcgagcggttcagggtccagacgcccgcccagcgcaccgcgttcgaacagctctttatccgcccgcatacccgcacgcccggcgtgccgctgcgctggataaccgttgccgatatcgtgcgccagcaggcgctgctgcgccatcctgattttgttgtcgcccgtaaaaaagggcagttctggcaggtgcgtgagaaggtctttgactatgaaggacgctttcgccgggcaaacgaattgcgcggttaa

SEQ ID NO: 522697 - DNA, 708 bp, Stenotrophomonas maltophilia
atgcgacttgataagtttatcgctcagcaactcggcgtaagccgcgctattgccgggcgtgaaattcgcgccagccgcgtaaccgtggacggcgacattgtgaaagacagcgcttttaaactccagcctgaccaccaggtggagtatgacggcaacccgctgacccagcagaatggcccgcgctacttcatgctcaacaaaccggaaggttacgtctgttcaacggacgatccggatcacccgacggtgctctacttcctcgacgaacctgtggcgcacaagctgcatgcggcagggcgactggatattgataccaccggcctggtgctgatgaccgatgacggtcagtggtcgcaccgcatcacctccccgcgccatcactgtgagaaaacctatcgggtgacacttgagtcgccggtctcggatgacacggcagagcaattcgcgaaaggcgttcagctgcataatgaaaaagatctgaccaaaccggcggtgctggaagtcattaccccaacggacgtccgtctgaccatcagtgaaggccgctaccaccaggtgaaacggatgtttgccgccgtgggcaaccacgttgtggggctgcatcgtgaacgtatcggcgcgattgaactcgatccagacctggcgccaggggaatatcgtccgctgacggaagaagagattgccagcgtcgggctgctttcacgctaa

SEQ ID NO: 522698 - DNA, 1200 bp, Stenotrophomonas maltophilia
gtgaccaccaggccacactcgtcgtttaaaatcgtatttatccttggcctgttggccatgctgatgccgctgtctatcgatatgtatctgcccgcgctgccggtgatttccgcgcagtttggcgtaccggcaggcagcgcacagatgacgctcagcacctacattcttggttttgcgctcggccagctcttttatggcccaatggcagacagcctggggcgcaaacccgttattctgggcgggacgttgatatttgccgcagcggcggtggcctgcgcgctggcgcagagtatcgatcagctgatcgtgatgcgtttcttccatggcctggctgcggctgcggcaagcgtggtgattaacgcgctgatgcgcgacatctacccgaaggaagagttctcacgcatgatgtcgttcgtcatgctggtcacaaccattgcgccgctggtcgcccccatggtaggcggggcggtgctggtgtggttcagctggcatgcgattttctggatcctggcgattgccgcgctgctggcctcggtgatgatcttcgtctttatcgatgaaacgctgccggtcgagcgccgtcagaagtttcacgtccgcaccacgcttggcaactttgcctcgctgtttcgccataagcgcgtgctgagctatatgctggccagcggctttagctttgccgggatgttttcgttcctgagcgcggggccgtttgtgtacatcgaactgaaccatgtgtcaccccagcactttggttactacttcgcgctgaatatcgtgttcctgtttgtgatgaccattatcaacagccgctttgtccggcgggtcggggcgctgaatatgttccgcgccgggctgtggatccagttcgtgatggctatctggctggtattgagcgcattgttgggcgtaggtttttgggcgctggtggtgggcgtggcggcgtttgttggctgcgtctcgatggtctcatccaacgcgatggcggtgatcctcgacgaattcccgcatatggcgggcaccgcctcgtcgctggcagggacgttccgtttcgggattggcgcgattgtcggggcgctgctctcaatggcgacgtttaatactgcctggccgatgctgtgggcgattgccctctgcgcgacttgctccatcctcttctatctttacgccagccggccccgtaagacggcgcataaatga

SEQ ID NO: 522699 - DNA, 345 bp, Stenotrophomonas maltophilia
gtgaatacattacaactctccattgtccatcgcttgccccagagctatcgctggtcgacgggttttgcaggttcgaaagttgaaccgattccgcaaagcgttgccggggaggataattgtctggtggcgctcaagctgcttagcccgagcgatgaaaatgcgtggccggttatggaacgtctcagccaggcgctgacggacatcgaagtagacagctccgtgctggaatgcgaaggtgagccgtgcctgtttgttaacagccaggatgaatttgctgcgacctgccgtctgaaaaacttcggcgtggcgattgccgaaccgttctccggtcaatatcctttctga

SEQ ID NO: 522700 - DNA, 1590 bp, Stenotrophomonas maltophilia
atgacccggcctcttctgagcatagaaaatctgtcgattgcgttttcaaagcagggcgaatctcgcccggtggtgacggatttatcgttgcagatccagcgcggagagacgctggcgctggtcggggaatccggctccggtaagagcgtttcggcactgtcggtgctgcgcctgctcccttccccgccggtcagctatccgcacggggatattctgttccatggacaatccctgctgaacgctgatgagcaaaccctgcgcggcattcgtggcaataagattgccatgatttttcaggagccgatggtgtcgctcaatccattgcatacgctggaaaaacagctctatgaagtgctgtcacttcatcggggaatgcgtaaagaggcagcgcggggggaaattctggactgccttgaacgcaccggcattcgtaatgcggcgaaacggctgaacgatttcccgcatcagctttccggcggcgagcgccagcgcgtgatgatcgcgatggcgctgctgacgcgccccgaactgttgattgcggatgaacccaccaccgcgctggacgtcacggtgcaggcgcaaattctgcaactgctgcgcgaactgcgcgacgagctgaacatgagcctgctgtttattacgcataacctgggcatcgtgaaaaagctcgctgacgcggtggccgtgatgcaaaatggccgctgcgtcgaacagaacagggcaactgccctgctgagcgcgcctcagcacccgtatacacagcgcctgctcgatagcgaaccctctggcgacccggttccgcttaacgctgacagcgcaccgttgctgaaggttgaggacctgtcggtgtcattcccgatccgcaaaggcattttgcgtcgcgtggtcgatcacaatcatgttctgaaaaacatgagcttctctctgcgtccgggcgagtcgcttgggcttgtgggcgaatccggttcgggcaaaagcaccaccggcctggcgctgctgcgcctgatcgcctcgcagggaagcattctctttgacggcatgccgctgcaaaacctgagccgccgccaaatgctgcccgtccgcccgcgcatgcaggtggtctttcaggatccgaactcttcgctgaacccgcggctgagcgtattgcagattattgaagagggcctgcgcgttcatcagcccgcgctgacggcacaacagcgtgaaatcgacgtgaagcgggtgatggcggaagtgggtttagatcccgagacccggcaccggtatccggctgagttttccggcggacagcgccagcgtatagcgattgcccgcgcgttgatcctgaaaccggagctgatcgtgctggacgagcctacctcttcactggaccgcaccgtgcaggcgcaaattctggcgctgctgaaggggctacaggaaaagcatcggctggcctatatctttatcagccacgatttacaggtggtgcgtgcgctttgccatcaggtggtggtattgcggcagggagaagtcgttgagcagggagagtgccagctcgtattcactgcgcctgcgcaggattacacgcgccagctattgtccgctgactag

SEQ ID NO: 522701 - DNA, 1026 bp, Stenotrophomonas maltophilia
atgttgcgtttaagccccgtcaatcaggcccgctgggcgcgctttcgccacaaccgtcgcggctactggtcgctgtggatcttcgccgtcctgtttgccttaagtctgtgttccgaactgattgccaacgataaacccctgctggtgcatttcaaagatcgctggtacgtgccggtgcttactacctatagcgaaagcgattttggcggtccgtttgcgacgccagccgagtatcaggatccctggttacgtgaacagatcgcgcagcacggctgggcgctttgggcaccgattcgctttggcgcgaacagtattaactacgccacgtccacccccttcccttccccgccttcctcgcagaactggctgggaacggacgccaacggcggcgatgtgctggcgcgcatcctctatggcacccgcatctcgctcctgtttgggctgcttctgacgctctttagcagcgtgatgggcgtcgtggcgggcgccatgcagggctattacggtggaaaaatcgatttgtgggggcagcgcgtaattgaagtctggtccggtatgccgacgctgtttctgattatcctgctgtccagcgtagtacagcctggcttctggtggctgttaggcatcaccgtcctgttcggctggatggcactggtcggcgtggtgcgcgcggagtttctgcgcacgcgaaattacgattatattcgcgccgcgcaggcattaggcgtgagcgatcgcgcaattatcttccgtcacatgcttcccaatgcggtggtggcgaccctcaccttcctgccgtttattttgtgtagctccattaccaccctgacgtcgctcgattttcttggtttcggtttgccgctgggctcaccgtctcttggcgaactgctgttgcagggcaaaaacaacctccaggccccctggctgggcatcgccgcattcctctccgtggcggtgctgctttccctgctgatttttattggcgaagccgtgcgcgatgccttcgatcccaacaaggcggtatga

SEQ ID NO: 522702 - DNA, 1095 bp, Stenotrophomonas maltophilia
atgggcgcttatcttatccgcaggctgctgctggttatcccgacgctatgggccatcattaccattaacttttttatcgtgcagattgcccccggcggcccggtggaccaggcgattgcggccatagaatttggtcacgctggcggcatgccgggcggcggcggtgaaggaatgggggccagccatgcccggacgggcgtgggcaatatcagcgaaagccactaccggggcggtcggggactggatccggaggtgatcgccgagatcacccatcgctatggttttgacaagccgctgcacgagcgatatttcaggatgctctgggattatgtccgtttcgattttggcgacagcctgtttcgcagcgcctcggtgctaaccctgatcaagcaaagcctgccggtttccatcacgctcggactgtgggggacgctgattatttatctggtctccattccgctggggatccgcaaagcggtctacaacggtagccgttttgatatctggagcagcacgttcattatcatcggctacgctatcccggcgtttctgtttgccgtgctgctgattgtctttttcgctggcggcagttatttcgacgtcttcccgctgcgcgggctggtctctgcggatttcagcacgttgccgtggtatcagaaaataaccgattacttctggcacatcacgcttccggtgctggcgacggttatcggcggttttgcggcgcttacgatgctgaccaaaaatgcctttcttgatgagatccgcaaacagtacgtcgtcaccgcgcgcgccaaaggcgtcggtgaaaagcagattatgtggaagcacgtttttcgtaacgccatgctgctggtgattgccggttttcccgccacgttcatcagtatgttttttaccggctctctgctgatagaagtgatgttctctctcaacggtttagggctgctcggctatgaggccaccgtctcccgtgattacccggtgatgtttggcacactgtacattttcaccctgatcggcctgctgctgaatatcatcagcgatatcagctatacgctggtcgatccccgtatcgattttgagggccgctga

SEQ ID NO: 522703 - DNA, 1830 bp, Stenotrophomonas maltophilia
gtgaacaaagggatccgccgcactatgattatgcgcgttgtattgatgctgttggcgctggtgagcctgtcgggccaggcgcagaccatcaaagagagcacggcctttgccgtcattggcgagccgaagtatgcggtcaactttactcactacgattatgtgaaccccgccgccccgaaaggcgggaacgtgacgctttccgcgaccggaacgtttgacaactttaaccgcttcgccctgcgcggcgtggcggcagcgcgtaccgaatccctctatgacacgctgttcgtcacctccgacgacgagcccggcagctattatcccctggtcgctgagaacgtgcgttacgccgatgattttagctgggcagaaatcgcgattaatccgcgggcgcgttttcacgacggtacgccggttagcgcccgcgatgtggcgttcacctttcataaatttatgaccgaaggcgtgccgcagtttcgtctggtgtacaagggcaccacggtgaaagccatcgccccgctgaccgtgcgaatcgaactccctgagccaaacaaagagaatatgctgagcctgttctccctgcccgtcatgcccgaatcattctggaaaaaccataagctgagcgatcccctctcttccccgccggtggccggaggaccgtatcgcattaccgactggcgaatgggccagtacgtgatctattcccgcgtgaaagattactgggcagccacgctgccggtaaaccggggccgctggaacttcgatacaatccgctacgactactacctggatgataacgtagccttcgaggcgtttaaggcaggcgcatttgatttacgtgtcgagaacagcgccaaaaactgggcgacccggtatatcggaaaaaatttcgcgaaaggctatatcgttaaagacgaacataaaaacgaatccgcgcaggacacgcgctggctggcgtttaatattcagcgcccggttttttccgatcgtcgggtgcgtgaagccattaccctggcgtttgatttcgaatggatgaacaaagcgctgttttacggagcctacagccgggcgaacagctatttccagaatactgaatatgccgcccgtgattatccccacgcggacgagctggttttgctggcgccaatgaaagcggagctcccgccggaagtgttcacccgcctatttgaaccgccaaaatccgacggaaacgggttcgaccgggacaacctgctgaaagccagcaaactgctggatgacgctggctgggtgttgaaaaatcggctacgagtaaatgttaaaactggtaagccgctcagcttcgaactgctgattgcctccggcgcaaacgatcagtgggtgctgccgtttaagaagaaccttgcccgtcttggggtgaccatgaatatccgccaggtcgatattgcccagctgaccaaccgcaagcgcagtcgcgattacgacatgatgcaaaccctgtgggctgcccagccgtggccgagttcagacctgcaaatctcctgggcatcggggtatatcgactcctcctacaacgctccgggggtaaagagtccggtgattgatgcgctgatcgcgaaaatcgttgccgctcagggcgataaagagaaacttctgccgctcgggcgcgcgcttgaccgggtgttaacctggaactattacatgctgccgatgtggtacatgggtgaagatcgcgtggcccgctgggacaaattctccctgcccgccgttcgcccggtttatacgcttggttttgatacgtggtggtatgacgtgaataaagccgcaaaactgcccgcagcgcggcgttga

SEQ ID NO: 522704 - DNA, 1395 bp, Stenotrophomonas maltophilia
atggagaactttttcgacgagcttaaaacctctattgatacgctccagccgctcacgctgaacagctgtgaagaggtcagtgcggcgctcacctcacgcgcggccttcagtattaacgtgcgcgcctttttgctggtccgggataaacaggccttctgctcttcggcaacaggtccgatgaataccccaatggaaacgcttatccctcagctacacatcagcaaacctgttgatatcgcgctcctgccgggcacgcccatgctgccggataaacccgcgatcgctatctggtatcgcaatccgctggtaaaagacggcggcgtatttacctccgtgaacatcaacctgacgccttaccttctttatacgtcacgtcaggatgaattttccggaatatcgatcgtcattggcgactccgcgttatccacccagtccggaatgctggttcaggcgcgggatttgcctgaggtccccgctcgcactgccacgctgaaaaatattcctctgaccgttaacgtctatgcgcaagcctggaagaccgatgaactgctctacgccgtgttcttcggcctggtctgcggtattgcggcaggtctgctgaatttctatattctcactatccgtcttaatcccgggaaagagatccttacggccatcaagcacgaccagttctacgtggtctatcagcccgtcgtggatgcgcagtcgctcagaatgaccgggctggaagtcctgatgcgctggaagcacccggtgatgggcgaaattccaccggatgcctttattaattttgctgaagcgcagaagctgatcgtcccgctgacgctgcatctttttgacctgattatccgcgatgcccctgtcctgcaaacggtgctcccgcctggggccaagtttgggatcaacatcgcgcccggtcatctgcatgcggaaagctttaaggaggatatgcgcgcgtttgccgctgcccttccgcccgatcacttccagattgtgctggaaataaccgagcgcgacatgatcaaccaccgcgaggcaaatcagctgtttgaatggctgcacaatgaaggttttgaaatcgccatcgatgattttggcaccggccacagcgcgctgatctatctggaacgcttcacgatggattacctgaaaattgaccgtggcttcgtgaatgccatcgggactgaaaccgttacctcgccagtgcttgacgcggtgctgacgctggcagaacgcctgaatatgttaaccgtcgccgagggtgttgaaacgcccgagcaggcggcgtggctgcgcgagcatggcgtgaactatcttcagggctactggatcggccgaccaatgccgctggagcagttcaggacgtggcaacccgacatcacgctcggggaataa

SEQ ID NO: 522705 - DNA, 570 bp, Stenotrophomonas maltophilia
atggtcaaatctcaaccaattttgagatatatcttgcgggggatcccggcgattgcagtggcggttctgctttcggcatgtagtacgacgaacaccgcgaagaatatgcatcctgagacgcgtgttgtgggaatggaagattcctcttcactgcaagcctctcaggatgaatttgaaaatatggtacgtaatctcgacgttaagtcgcgtattatggatcagtatgctgactggaaaggcgtgcgttaccgcctgggcggcagcaccaagaaaggcatcgattgctccgcattcgtacagcgtactttccgtgagcagtttgggttagaccttccgcgttctacttatgaacagcaggaaatgggcaagtccatttcgcgcactaaactgcgtacgggcgatttagtcctgttcagagcaggttcaaccggtcgacacgttggcatctatatcggtaacgatcagtttgtccatgcttccaccagcagtggtgtgacgatttccagcatgaacgaaccttactggaagaagcgctacaacgaagctcgccgcgttctgagccgtagttaa

SEQ ID NO: 522706 - DNA, 705 bp, Stenotrophomonas maltophilia
atgacgactcgacttcctgctattttattgctcaacgctgccggtctggcgctctttttctcctggtatatcccggcggatcacggtttctggttcccgctggattccgggctgttccacttctttaaccaggcgctggcgaagagtgaagccttcctgtggctggtggcgatcaccaacaaccgcgcgtttgacggctgttcgctgctggcaatgggctgtctgatgctctccttctggctgaaggaggacaaaacgggtcgtcgccgtattctgattatcggcctggtcatgctgctggcagccgtgattatcaaccagctggcgcagcatctgatgccggttaaacgcgccagtccgtcgctctctttcccgaatattaaccgcgtcagcgagctgcttcatattccaaccaaagacgcgtcgaaggacagcttcccgggcgaccacggtatgatgctgctgatttttgctggcttcatgctgcgctatttcggtaaaaaagccttcgccatcgccctggttattgtggtggtatttgcattcccgcgggtgatgattggcgctcactggctgacagatatcgccgtaggctccctcacggcggtgttaattggtttaccctgggtgctgatgactcccctgagcgatcgcgtaataagtatttttgatcgctatcttcccggcaaatttaaacaagtctga

SEQ ID NO: 522707 - DNA, 987 bp, Stenotrophomonas maltophilia
gtgaccaaaaccaacctgatcaccggttttctcggcagcggtaaaactacgtccattctgcatttgctggccaataaagatccggcggaaaagtgggccgtgctggtcaacgaatttggcgaagtggggatcgacggcgcgttgctcgccgacagcggcgcgatggtgaaagagatcccgggcgggtgtatgtgctgcgtgaatggtctgccgatgcaggtcgggctgaatacgctgctgcgtcagggcaagcctgaccgtctgctgattgaacccactgggctgggtcatccgaagcaaattcttgatttactgaccgccccggtctacgagccgtggcttgagctgcgtgcgacgctttgcctgctcgacccccgccagctgctggatgaaaaagcgatcaataatgacaatttccgcgaccagctcgcctcggcagatatcatcgtggcgaataaatccgatcgcgcgacgcctgaaagtcaggccgcgttcaatgcctggtggcagcaggctggcggtggacgtcagtatgtgcagaccacccagggcaacattgatggcgacctgctcgatcttccccgcctcaaccagacgcaactgcctgccagcgcagagcattcacatagccacggcgcgaagcaaggtctggctgcgctgagcctgccggaacatcagcgctggcgtcgaaatctgaacagcggccagggacaccaggcctgcggctggatcttcgatgccgatacggttttcgacaccattggtatactggaatgggcgagactggcgccggttgagcgggtaaaagggatcatgcgcaccccggatggtctggtgcgcattaatcgtcagggcgaggatttctttatagaaacccagaacgtcgcgccacccgacagccggatagagttaattagtgcggttaataccgactggaatgccctccagtcaagcctgttgaagcttcgtttaagtttgggcggctaa

SEQ ID NO: 522708 - DNA, 1467 bp, Stenotrophomonas maltophilia
atgaagactattgcctccaccgcgcttcctgctcatgtccagcagccccgctacgatcgcgagcagttacgctcccgcatcgtccatttcggctttggcgcgttccaccgggcgcatcaggcgttgttaacaaaccgggtgctgaacgccaaaggaggcgactggggtatttgtgagattagtctctttagcggcgatgttctcatgcgccagctccgcgcgcaggatcatctgtttaccgtgctggagaaaggtgccgaaggcaatcaacccattattatcggtgcggtaaaagagtgcctgaacgcaaaactcgactcgctggcagccattattgagaagttctgcgaaccgcaggtggccattgtctccctcaccattaccgaaaaaggctactgcatcgatccggcgacggggaaactggatatgcacaacagccgcattctgcacgatcttgagcatccgtctgagccgcattccgcgccgggtattctggtcgaagcgcttcatcgccgccgcgagcgcggcctgccggcgtttaccgtgctctcctgcgacaacattcccgataacggccacgtggtgaataatgccgttctcggcatggccggaaagcgttccgcagagctggccggatggatcgaggcgcacgtgagcttccctggcaccatggtcgaccgaatcgtgcccgccgccactgacgcctcactcgcggaaatcacccaggaacttggcgttgaagatccctgcgccatcagctgtgaaccgttcattcagtgggtagtggaagataactttgtcgccgggcgtccggaatgggaggttgcaggcgtacagatggttgaggatgtcctgccctgggagcagatgaagctgcggatgctgaacggcagccactccttcctggcgtatctgggctaccttgccggctacgcgcacataaatgaatgtatgcaggacgacagcttccgcgaggctgcccgcaggctgatgctgaatgagcaggcccctacgctgcgcatcaccaacgtcgatctgacagcctatgctgacagcctgcttgaccgcttcgccaacccggcgctacagcaccgcacctggcaaatcgctatggacggcagtcagaagctgcctcagcgcatgctggatgggatccgcatgcatcttgagcgtaacaccgcctggccattactggcgctgggcgtcgcaggctggatgcgctacgtcagcgggacggacgaccagggcaacgccattgacgtgcgcgatccgctgagcgacaagtttcaggccattgtcgcttccagcagtgacgcagaacgcgttagcgccctgctgacgctaaaagaaatctttggcgacgacctgccgcaaaaccctgtctttgtcgaggcaatcaccggcgcgtaccagcgcctcgtccggctcggcgcgcgtcaggccgttaacgaaacgttaaaaatttag

SEQ ID NO: 522709 - DNA, 1194 bp, Stenotrophomonas maltophilia
atggaacaaacctggcgttggtacgggccgaacgatccggtttctcttgatgatgtgcgtcaggctggcgcaacgggtgtggtcacggcgctgcatcatattccgaacggtcaggtgtggccggtggaggaaatccaaaagcgtcaggcacagctggcagagaagggtctaacctggtctgtcgtggaaagtattccggttcacgaagatatcaaaacccactccggtgagtgtgaaacctggattgcgaattatcagcagagcattcgtaacctggcggcctgcggtattgataccgtctgctataactttatgccaattctggactggacgcgtaccgacctggaatatgaaatggccgatggttcgaaggcgctgcgtttcgatcaaatcgcttttgcggctttcgagctgcacattctgaagcgtccgggggcggaagcagactacaccgccgaagagcagcagcagcaggcgctggcgtggttcaatgccgccagtgaagcggacattgagaagctggttcgcaatattatcgcgggcctgccgggggcggaagagggctataccctcgatcagttccgcgcgcgcctggcggaatatggcgatatcgataaaaaccagctgcgtgaaaacatggcgcacttcctgcgcgctattgtgccggtggcagaagaagtcggcgtgcggctggcggtccatccggacgatcctccgcgcccaatcctcggcctgccgcgtatcgtgtcgaccattgaggatatgcagtggctaaaagagacggtggacagcatctacaacggctttaccatgtgtacgggctcttacggcgtgcgtgcggataacgatctggtgcggatgatcgaaacctttggggatcgcattcatttcactcacctgcgtgcaacctgccgtgaagagaatccaaaaaccttccatgaagcagcccaccttggcggcgacgtgaacatggttgcggtggtggatgccattctctctgaagaagtacgtcgtaagcaggcgggggatgtacgtcctatcccgttccgtccggatcacgggcatcagatgctggacgatctgcgcaagaaaacgaatccagggtattcggcgattggccgtctgaaagggatggcggaagtgcgcggtatcgagctggcgctgaaaatgacgaagtatccagagcttctgtaa

SEQ ID NO: 522710 - DNA, 573 bp, Stenotrophomonas maltophilia
atgccaagagcgaacgaaatcaagaaaggtatggtactgaattacaacggcaaactgctgattgtgaaagatatcgacattcaggcacccagcgcccgtggcgcagcaacgctgtataaaatgcgtttctccgatgtccgtaccggcctgaaagtggaagaacgttttaaaggcgacgatatcgtggataccgtgaccctgacccgtcgctacgttgatttttcttatatcgacggcaacgaatacgtgttcatggataaagaagattacaccccgtatatcttcaccaaagatcagatcgaagaagagctgctgtttattcctgaaggtggaatgccggacatgcaggtgctgacctgggatggcgtgctgctggcgctggagctgccgcagaccgttgatctggaaatcgttgaaacggcaccgggcatcaaaggcgcgtctgcaagcgcgcgtaacaaaccggctaccctgactaccggtctggtcgtacaggtgccagaatacctgtcagcgggcgagaaaatccgtatccatatcgaagaaaaacgctatatgggtcgcgctgactga

SEQ ID NO: 522711 - DNA, 255 bp, Stenotrophomonas maltophilia
atggattgtcgttccgactgtggcgcgtgctgtaccgcaccgtccatctcaagccccattccaggcatgccacaaggcaagcctgccaatacccgctgcgttcagctctctgaatctaacctgtgcatgatctttggctcgcctttacgcccgaaggtgtgctccgggctccagcctggcgccgaaatgtgcggcagtacgcgccagcaggccatcacttatctgcttgagctggaagcgctcaccgcgccttaa

SEQ ID NO: 522712 - DNA, 1233 bp, Stenotrophomonas maltophilia
atgacaggcggcgtaaactccgcctctctctgttactcgcaaagactgaacatgcataacacccccgctgccgcctcaccaaagccctttgatttgacgtcaacggcgtttttgattgttgctttcctcaccggtattgccggtgcgttacaaacgcctacgctgagcctgtttctgaccaacgaagtccacgcgcgtccggcgatggttggcttcttcttcaccgggagcgccatcattggcatcctggtcagccagtttctggccgggcgttccgacagaaaaggcgatcgcaaaagcctgattgttttttgctgtctgctgggcgttttcgcctgcgtgttgtttgcctggaaccgcaactatttcattctgctgtttgttggggtgttcctgagcagcttcggctcgaccgccaacccgcagatgttcgcccttgcccgcgagcatgccgaccgcaccgggcgggaagcggtgatgttcagctcgatactgcgcgcgcaggtgtcgcttgcgtgggtgattggccccccgctcgcctacgcactggcaatgggttttggctttacggtaatgtacctcagcgcggcggtagccttcgtggtgtgtggcgcaatggtatggttcttcctgccttccatgcgtaaagagccgaaagtggcgaccggtacgctggaagcaccgcggcgtaaccggcgcgacgcactactgttattcattatctgtacgctgatgtggggaacgaacagcctctatatcattaatatgccgttgtttattattgatgagctgcatctgccggagaagctggccgggatcatgatgggaaccgccgcggggcttgagatccccaccatgctgattgcgggctattacgcgaagcgcttcggcaagcgctttttgatgcgcatcgccgccgttgccgggctgctgttttatgtcggtatgctgacggttcatacgccagccctgcttcttgctttacagctgctgaacgccatttacatcggcattctggccggtatcggcatgctctacttccaggatctgatgccgggtcaggcaggcgctgccaccaccctttatactaataccacccgcgtgggctggattattgcaggctcactggcgggcgttgtggctgaaatctggaactatcatacggtgttctggattgcgctggtgatgtgcgtcctgacgctgagctgcctgacgcgaattaaggacgtttaa

SEQ ID NO: 522713 - DNA, 1131 bp, Stenotrophomonas maltophilia
atgttccagttatctgttcaggatatccacccgggcgaacaggccgggaataaagaagaggctattcgccaggtcgccgctgcgctcgtgcaggctggcaacgtggcggacggctacgtcaacggcatgctggcgcgtgaacagcagacctccaccttcctcggtaacggtattgcaattccgcacggcaccacggacacccgcgatcaggtgctgaaaaccggcgtgcaggtttaccagttcccgcagggcgtgctctggggcgaggggcaggtggcttacgtggcgatcggtatcgcggcaagcggtgacgaacacttgggcctgctgcgtcagctgacgcacgtgctgagcgatgatgccgtcgcggaacagcttaaatccgccaccactgctgaagagctgcgtgccctgctgatgggcgaaaaacagagcgaagcgctgaagctggataatgaaaccctgatgctggacgtcgttgcgtccgatctggtgacgctccaggcgctgaacgcggctcgcctgaaagaggtgggggcggctgataccgcctttgtgacccgcaccatcaatgataagcctttaaacctgggtcagggcatctggctgaacgacagtgctgaaggcaacctgcgcagtgctatcgcggtcagccgtgctgccgttgcctttgagacagacggggaacgcgccgcgatgctggtaacggttgccatggctgacgatcagccggtatccgtcctgaagcgccttggcgatctgctgctgaacaataaagctgaaaaattgctgaacgcagacgcggcgacggtgctggctctgttgaccagcgacgatgcgctgacggacgacctgctgagcgcagagtacgtggtgcgtaacgaacacggcctgcatgcccgtccgggcaccatgctggtgaataccattaaacaatttgaaagtgagatcaccgtgaccaatctggacggttcgggtaaaccagccaacgggcgcagcctgatgaaagttgtcgcgctgggtgtgaagaaaggccatcgtctgcgttttaccgcgcagggtgctgatgctgaacaggcgctgaaagcgattggcgacgccatcgcggccggtctgggggagggcgcataa

SEQ ID NO: 522714 - DNA, 939 bp, Stenotrophomonas maltophilia
atgagcagacgtgttgcgaccattacgctgaacccggcttacgatctggtgggcttctgcccggaaattgagcgtggcgaagttaacctggtgcgaaccaccggcctgcatgccgcagggaaagggattaacgtggcgaaggtgctgaaagatctcggcatcgacgtcaccgttggcggcttccttggcaaagacaaccaggacggttttcagcagttgttcagtgaactgggcatcgccaaccgttttcaggttgtgcagggccgtacccgtattaacgttaagctgaccgagaaagacggtgaagtaaccgatctgaacttctccggcttcgaagtgaccccggctgactgggagcgcttcgttgccgattccctgagctggctgggccagtttgacatggtgtgcgtcagcggcagcttgccgtccggcgtcagcccggaagcgttcaccgactggatgacgcgcctgcgcagccagtgcccgtgcattatttttgacagcagccgcgacgcgctggtcgccggtctgaaagcctcgccatggctggttaagcctaaccgccgtgaactggaaatctgggcgggccgtaagctgccagaattaaaggatgtgattgacgctgcccatgcgctgcgcgagcagggtatcgctcatgtggtgatttcgctgggtgcagaaggtgccctgtgggttaacgcctccggggaatggattgccaaaccgccttctatggaagtggtcagcaccgtgggtgccggggattcgatggttggcggcctgatctacggtctgctgatgcgcgaatccagtgaacataccctacgccttgctaccgccgttgcggccctggccgtgagccagagcaatgtcggtattaccgatcgtacccagttagccgcgatgatggcgcgcgttgacttaaaaccttttaactaa

SEQ ID NO: 522715 - DNA, 1686 bp, Stenotrophomonas maltophilia
atgaaaacgctgctgatcattgactccggtctcggacaggctcgtgcctatatggcgaagaccctgctgggcgcggcggcacaaaaagcgcatctggatatcattgataacccgggtgatgctgaaatggcgattgttctgggcgacaaaatccccgcggacagcgccctgaacggcaaaaaagtatggctgggcgatattaaccgcgcggtggcacaccccgaactgtttctgagcgaagcaaaaggtcatgcgacggtttacagcgcacccgttgaggccgcgccggtcgcaaccgctgggccgaaacgcattgttgcggtaacggcctgcccgacaggtgtggctcacacctttatggcggctgaagccattgaaaccgaagcgaaaaaacgcggctggtgggtgaaggttgaaactcgcggatctgttggcgcgggtaatgccatcacgccggaagaggtggccgaagccgatctggtgatcgtggcggccgatatcgaagtggatctggcgaagtttgccggtaagccgatgtaccgcacctcaaccggcctggcgctgaagaaaactgcgcaggagtttgataaagcgctggcggaagccaaaccttatcaggcgaccggtgcggctaagacgcctggcgaaggtaagaaagagtctgcgggtgcctatcgtcacctgttaaccggggtttcctacatgctgccgatggtggtggcgggcggcctgtgtattgcgctctcctttgcctttggtatcgaagcctttaaagagcagggcacgctggcggcagcgttgatgcagattggcggcggctccgcgtttgcgctgatggtgccggtgctggcgggctttatcgccttctccattgctgaccgtccgggtctgacgccgggtcttatcggcggtatgctggccgtgagcactggttctggctttatcggcggtattattgccggtttccttgccggttacgtggcgaagctcatcagctctaagctgaagctgccgcagagtatggaggcgctgaaacctatcctgatcatcccgctgatttccagcctggtggtcggtctggcgatgatttacctgattggtaagccggtcgcgggcattctggaaggtctgacccactggctgcaaaccatggggacggcgaacgcggtgctgttgggcgcaatcctcggcggtatgatgtgtaccgacatgggcggtccggtaaacaaagcggcatacgcgttcggcgttggcctgctgagtacccagacctacgcgccgatggcggcgatcatggcggcaggtatggtgcctccgctggcacttggcctggcgacaatcattgcccgtcgtaagttcgataaagcgcagcaggaaggcggcaaagcggcgctggtgctgggtctgtgcttcattaccgaaggcgcaatcccgtttgcggcgcgcgatccaatgcgtgttctgccatgctgtatcgtcggcggtgcggtaacgggagctatctccatggcggtaggtgcgaaactgatggcaccgcacggcggtctgttcgtcctgctgatccctggcgccatcacgccggtgctgggctacctgctggcgattgttgccggtacgctggtggcgggtctgtcttacgcggtgctgaagcgtccggaagcggaagtggtcgcaaaagcagcctaa

SEQ ID NO: 522716 - DNA, 858 bp, Stenotrophomonas maltophilia
atgaaatatgttggagcgcacgtcagcgctgccggtggccttgcgaatgccgccattcgcgccgccgaaatcgaggcgaccgctttcgccctgttcaccaaaaaccagcgccagtggcgcgcagctcccctcaccgcggaagtgattgatgacttcaaagccgcctgcgagaaataccgctatgggcctgggcagatcctcccgcacgacagctacctgattaacctcggccacccggttgctgaggcgctggaaaaatcccgcgaagcattcctggatgaggttcagcgctgtgaacagctggggctgacgctgctgaacttccatcccggtagccatctgatgcaaatcgacgaagacgcctgtctggcgcgcatcgccgagtccatcaacatgacgctggataaaacccagggcgtgacggcggtgattgagaataccgccggtcagggcagcaacctcggctttaagtttgagcatctggcggcgatcatcgacggcgtggaagacaaatcccgcgtgggcgtgtgcattgatacctgccacgcgtttgccgccgggtatgatctgcgcacaaccgaggccacgaaaaataccttcgaagagttcgagcgtattgttggctttaagtatcttcgcggtatgcacttaaacgatgcgaaaagcgcgttcggcagccgcgtagaccgtcaccacagcctgggcgaaggtaatatcggccacgatgcgttccgctttatcatgcaggatccccgcttcgacggcattccaatggtgctggaaaccatcaatccggatatctgggcagaagagattgcctggctgaaggcacagcagaccgctgaacaggcggcataa

SEQ ID NO: 522717 - DNA, 1047 bp, Stenotrophomonas maltophilia
atgtcagaaatcaccttacaacatcatcgtacagtgtggcacttcgtgccgggtctcgcgctcagcgccgtggttaccggcgtggccttatggggtggcagtataccagctgttgccggcgcagggttcagcgccctgacgctggccattctgctcggcatggtggtcgggaacaccgtttacccgcacatctggaaatcctgcgacggcggcgtgattttcgccaagcagcatttattacgtctcgggatcatcctttatggcttccgtctcaccttttcgcagatcgcggatgtgggtgtcagcgggattgccatcgacgtcctgaccctttcgagcacctttttactggcgtgctttatcggccagaagatctttggactggacaaacagaccagctggctgatcggtgcgggtagcagcatctgcggcgcagcggctgtactggcaacagagccggtagtcaaagccgaagccagtaaagtcacggttgccgtcgcgacggtagttatcttcggtacgttggcgatcttcctgtatccagccatgtatccgctggtggcgcactggtttagcccggaaacctacggcatttatatcggctcaaccatgcacgaagtggcgcaggtggtggcggcaggtcacgccattaacccggaagcggaaaacgcggcggtcattgccaaaatgctgcgcgtgatgatgctggccccgttcctgattttcctcgcggcgcgggttaaacagctggctcctgcaggcggcagcgagaaaagcaaaatcaccattccgtggtttgcgatcctgttcatcgtggtcgctatcttcaactctttccacctgctgccaaaagtgatggtggatatgttggtcacgctggatacggtcctgctggcgatggcgatggcggcgctgggcgtcaccacgcacgtcagcgcgctgaaaaaagccggggcgaaaccgctgctgatggcgctggtgctgttcatctggctgattgttggcggcggtgcgattaaccttgcggtacacagcctgttggcataa

SEQ ID NO: 522718 - DNA, 867 bp, Stenotrophomonas maltophilia
atgcacattacattgcgtcagctggaagtttttgccgaggtgctgaaaagcggctcgacaacccaggcgtcacaaatgctggcgctctcgcagtccgccgttagcgcggccttgaccgatcttgaagggcaactgggcgtccagcttttcgacagggtaggaaagcgactggtggtgaacgaacatggccgcctgctgtatccgcgtgccctggccttgcttgagcaggcaacggagatcgaacagctgttccgcgaggacaacggcgctattcgcgtctacgccagcagcacgatcggtaattacatcctgccggaagtgatcgcccgctaccgccgggattttccgaccctgccgctggagatgagcgtcggcaacagccaggacgtgattaacgcggtgattgatttccgcgtggacatcggtcttatcgaagggccgtgccacaacgtcgatatcattgcggagccctggcttgaggatgagctggtggtgtttgcttccccggcctcttctttactccagggcgaggttacgctggagcgtctggcgcaagcgcagtggatcctgcgagagcagggctccggcacgcgtgagattgtcgattatctgctgctgtcccatctgccgcagttccagctagggatggagttaggtaactccgaggccattaagcatgccgtacgtcatggcctgggcattagctgtctttcccgacgggtgatcgccgaacagctggaaaccggctctctggttgagatccccgttccgctgccgaagctggtgcgcacgctgtggtgcatccaccatcgtcagaaacacctttccagctcgctccagcgttttcttcgctattgtgccatttaa

SEQ ID NO: 522719 - DNA, 1470 bp, Stenotrophomonas maltophilia
atggtttcagaaactaaaaccacagaagcgcccgcgctacgtcgcgcacttaaggcgcgtcacctgacgatgatcgccattggcggctccatcggtacgggtcttttcgttgcctctggcgcaacaatttcggcagccggcccgggtggggcattattctcttatatcctgattggcctgatggtctacttcctgatgaccagcctgggcgaactggcggcatacatgccggtgtctggttcgttttcgacctacggacaaaaatacgttgaggaaggcttcggcttcgcgctgggctggaactactggtataactgggcggtgaccatcgccgttgacctcgtcgccgcacagctggtgatgacctggtggttcccggacacgcccggctggatctggagcgccctgttcctggcggtcatcttcctgctgaactacatctccgtgcgcggtttcggcgaagcggaatactggttctctttaattaaagtggcaaccgtcatcatctttatcgtcgtcggtgtggcgatgatcgttggtattttcaaaggggccgaaccggcgggctggagtaactggacaataggcgatgcgccgtttgccgggggcttctcggcgatgattggcgtggcgatgattgtcggcttctccttccagggcaccgaactgattggcattgcggccggtgaatccgaaaacccggagaagaccatcccgcgcgcggtgcgtcaggtgttctggcgtatcctgctgttctatgtgttcgcgatcctgattatcagcctgatcattccgtataccgacccaagcctgctgcgtaacgatgtgaaagacatcagcgtcagcccgttcaccctggtcttccagcacgcgggtctgctctctgcggcggcggtgatgaacgcggtgatcctgacggcggtactgtctgcgggtaactccggtatgtacgcctccacccgtatgctttacaccctggcctgcgatggtaaagcgccacgtattttctcgaaactgtctcgcggtggcgtgccacgcaacgcgctgtatgcgaccacggtgattgcgggtctctgtttcctgacctccatgttcggcaaccagacggtctacctgtggctgcttaacacctctggtatgacgggcttcattgcctggctgggcattgccatcagccactaccgtttccgtcgcgggtacgtcaagcagggtcatgatctgaataacctgccgtaccggtcagggttcttcccgctggggccgatcttcgccttcgttctgtgcctgatcattaccctgggccagaactatgaggccttccttgcggacaccattgactggggcgccgtcacggccacctatattggcattccgctgttcctgatcatctggtttggctacaaactgacgaaaggaacgcgcttcgttcgctacagtgaaatggatttcccggaacgatttaaacaataa

SEQ ID NO: 522720 - DNA, 1986 bp, Stenotrophomonas maltophilia
atgacaataccacgcattaagctcctggccgtcgccattggcgctgccacatgttcccccttcgttcacgcagccgatcaggataccgttgtcgttaccgcgacgggttttgaacaaaagatccagaatgcccccgcctccatctctgtgatttcaaaacagcagattgaagataaagcctaccgtgatgttaccgatgccctgagagatgtcccgggcgtcgtcgtcaccggcggtggaagtagcagtgatatcagtattcgcggcatggcctctcagtacaccctgttcctggtgaacggcaaacgcgtcagtacgcgaagcacccgcccaaacagcgacaactcgggtattgaacaaggctggctgccgccgctggagtccattgagcgcatcgaggtcatccgcggcccgatgtcctcgctttacggctccgatgctatgggtggcgtcattaacgtcattaccaaaaaagtctcgaacaccaaagcctggaccggttcgttgcatggcgacgccaccttccaggaaaaccatgactccggcgatatcttccagaccaacgcctacgcttctggtcccctgattgatgggctgctgggtgcaaaagtgacggggctgttgtcacgccgcgcagaagataaaatcgtgaacggctataacgagcagaaaatgcgtaacggtggcattacgctgaacttcacgccggacgagaagaacgatttcgatctcgactttgctcgcgagcttcaggacagaaacagcaccccggggatgtcgaaagcggctgaaacctgccggggaacaacctgtacgccaaataccaaaagcgactcgcgctatgagcacacgacctactcgttaacccacagtggttattacgacgacttcaataccaccagctatatccagcaggaagagaccaataatccaggtcgcaaaatgcgttcctacaacaccacctttaacaaccagaaccagatcttcctcggcgatcatacgttgaccctcggcggacagtaccgttatgagaaattgcgcgacaacggcaatcagctggaagctgctgacggcctgaacaaactgacgcgctggagctgggccctgtttgccgaagatgaatggtcaatgacggaaagctttacgttgaccggcggcctgcgtatggataaagaccaaaactacgggacgaactggacgccgcgcggttacggcgtatggcacctggccgatcagtggacgttgaaaggcggggtttctgctggctatcgtgcgccggatctgcgtcagtcgtctgccagctggggccaggtgacaggtggcggccgtcttgacggtatcatcgtcggcaacccggatctgaaacccgagaagagcctgagcgaagagctcgccctgctctgggataacaacgataaccttaatgccggtgtgacgctgtttaataccgacttcaaggataaaattacggaagttcgccgctgtaacagcagcgccgatcccgcctgtacgattggcgatcatagctatgatttcgtcagcgatcgcgtcaacgtggacaaagccaatatgcgcggtgtggagtcctcgttcggctggaaaatcacgcgcgatgtgaactggactgcaaactacacctatacggaatccgagcagaagagcggccagttctccggcaagccactgaacaaaatgccaaaacacatgttcaacaccaccctggactggcaggcgacgcccgacgtcggcttctggagccgtctgaacctgcgcggtaaaacgtctgagtacctgagccgcacgtcaatgtcccagggtacaccgtcctacactcaggttgatgtcggtatgcgctacaacgccaacaaaaacctgctggttactgccggtgtgtataacgtgctcgataagcagattgactacgatacgtatgacaccgtgctggatggccgtcgctataccgttggcatgacctacagcttctga

SEQ ID NO: 522721 - DNA, 828 bp, Stenotrophomonas maltophilia
atggaactgctcgaagagcatcgttgttttgaaggtcgacagcagcgctggcggcacgactccaccacgctgaactgtgctatgacgttcagtattttcctgccccctgcggacaatccaccggtgctgtactggctttcaggcctgacctgcaacgacgaaaacttcaccaccaaagcgggcgcccagcgtattgccgccgaactgggcattgcgctggtgatgccagatacgagcccgcgtggcgatgacgtggccgacgatgccggatacgatttgggtaaaggcgccgggttctatctcaacgccacggaacaaccctgggcgagccattaccgcatgtatgactacattcgcgatgaactgcctgccctggtgcactctcagttcgcggtcagcgagcgctgcgcgataagcggacattcgatgggtggccacggggcgctgataatggcgctgaaaaatccggggaaatacaccagcgtgtccgcatttgcgccgattgtgaacccaacgcaggtgccgtggggacaaaaagccttcacgcactatctgggtgaggatgcagagaaatggcaggaatgggacagctgtgcgctgatgctggcgagccagccagaagacgctatcccgatgctggtggatcagggtgatgccgatcagttcctcgccgggcagttacagcctgcgttgctggcggaagccgcgcgccagaaggactggccgctgacgctgcgcatacagccgggatacgatcacagctattacttcatggcgtcctttattgaagatcatcttcgcttccatgcgacacatttgttcgcgtaa

SEQ ID NO: 522722 - DNA, 1149 bp, Stenotrophomonas maltophilia
atggcgctgcgtatcgcgctcagcggatttgtggttctggtcgtggcgatggggatagggcgcttcgccttcacgcctcaggtgccgctgatgattgccgccgggcaactcacgctcaccagcgcggggctggtggcggcaatgaactacctgggctatctggtgggggcatgggatgctatgcgcgctcatcgcttcgttgaaacgcgtctctggcttggcatcactggcgcggtggcgctgacgctgctctctgcggcggcagataatgctgtcgttcacggtctgctgcgctttgtgatcggctgcatgagcggctggtcgatggtgctgattgccgcctggaccaacgagcggctggggcagttgggcaagccggggcttagtgcagccgtctttgccggacccggggccggcatcgccctgagtggcctgctggcggtctatattcaggcgagatccctgtctgccggcgcggcatggcaaatctacggcgtactggcgctggtgctaattgcgctggtggcgcgctacctgccgcgcgcgggccagcttcatcgccccggtaccgcgcctgagccgttgctgctgactacggatctcaggcgtctggtctggagctacagcctggcagggttcggctatatcctccctgcgaccttcctgtcgcaaatggcggcggtgcgtttccccggcagcctgtttgcccagtttgtctggccaatatttggcgccgcctcggtggtggggattgcgatcagtattgccctacggcatacatcaagcgctaaccgcaggctggcgattgttctctggttacaggggataggcgtgctggcagcctggctgctgccgggcattggcggcttgctgacgggtgggctgctggtgggcggcgggttcctctgcgccgtgcagctctctcttcagtacggtcgcgagctggcgccagatcatacgcgttatatggcgggactgctcaccaccgggtatgccattggtcagctgattggtccggtcacgtcggcactctcgacctggctcacgcaccggctggaacccgcgctggggctggcggggatcgcgctgttcgctggcggagcgttagtctggaaccgtcaggctgaaaggcaacagcaattgcaataa

SEQ ID NO: 522723 - DNA, 669 bp, Stenotrophomonas maltophilia
atgtcatcactcagtaaagaagcagcccttgtccatgaagcgctggttgcgcgcggtcttgaaacgccactgcgcccgcccgtgcaggagctggacaatgttacccgcaagagtctgatcgccggccatatgacggagatcatgcaactgctgaatctcgatctgagcgacgacagcctgatggagacgccgcaccgcatcgcgaaaatgtacgtcgacgaaattttctccggcctggattacgcgaacttcccgaaaatcaccgtcattgaaaacaagatgaaggtcgatgagatggtgacggtacgcgatatcacgctgaccagcacctgcgagcatcactttgtgaccatcgatggtaaagcgacggtggcctatattccaaaagatacggtcattggcctgtccaagatcaaccgcatcgtgcagttctttgcccagcgtcctcaggtgcaggagcgtctgacgcagcagatcctgaccgcactgcaaaccctgttggggactaacaacgtggcggtgtctatcgacgcggttcactactgcgtgaaagctcgtggcgtgcgtgatgcaaccagcgcgactaccaccacctcgctgggcggcctgttcaaatcgagccagaacacccgccaggagtttctgcgcgccgtgcgccaccacaactaa

SEQ ID NO: 522724 - DNA, 1158 bp, Stenotrophomonas maltophilia
atggagcgaaacgtcacgctcgattttgttcgcggcgtcgccattctcggtatcctgctgctgaatatcagcgccttcggtctgccgaaggccgcctatctgaaccctgcgtggtatggcgacatcacgcgcagcgacgcctggacatgggcaatccttgatctcttcgcacaggttaaatttctgaccctctttgcgcttctgtttggcgcgggacttcagcttctcctcaaacgcggtacgcgctggatccagtcgcgtttaacgctgctggttatcctcggttttattcacgggctgcttttctgggacggcgatattctgctcgcgtatggtctggtgggcctgatttgctggcggctgatccgcgacgcgcccggtgtaaaaagcctctttaacactggcgtgatgctctatgtcatgggactggccgtgttattgctgcttggcatgatcgctgatgcttccaccagtcgttcgtggatcccggatgcggccaatctgcaatatgagcagttctggaagctgaaaggcggcatagaagcgatcggcaaccgggccgatatgctcggcgataacctgctggcgctgggggcgcaatacggctggcagctggcggggatgatgctgatgggcgcagccctgatgcgcaccggctggctgaaaggagaatttagcctgcgacactatcgtctcacaggcgctggcctggtactgctcggcgtgatgattaaccttccggcggtgatcttacagtggcatcttcagtgggattaccgctggtgcgcgttcctgttgcaggtgccgcgagagctgagcgcgccgttccagaccattggctatgcggcgctgatctatggcttctggccccagctttctcgcctgtggatcgtcagtgcggtggcctgcgttggacggatggcgttaagcaattacatcctgcaaacgctgatatgcaccacgcttttctaccgattcggcctgtttatgaaattcgaccgcctgacgctgctggcgtttgttattccggtctggattgttaacgtggtgttttcagttatctggctgcgttttttccgccagggcccgctggagtgggtatggcgacggttaaccgcccttgcgtcgggcgtgtcattgcgtaatacatccagataa

SEQ ID NO: 522725 - DNA, 1023 bp, Stenotrophomonas maltophilia
atgatcaccattcgtgacgtcgcccgccaggcgggtgtttctgttgctactgtctcccgcgtgctgaacaacagtgcgctggtcagccctgaaacgcgtgaaaccgtaatgaaagccgtgacccagctggggtaccggccaaacgccaatgctcaggcgctggcgacgcagatcagcgataccattggtgtcgtggtgatggacgtgtcggacgccttcttcggcgcgctggtcaaagcggtggacgtcgttgcccagcagcaccagaaatatgtgctgattggcaacagctatcacgaggctgaaaaagagcgttatgccattgaggtactgatccgccagcgctgtaacgccctgattgtgcactcaaaagccctgagcgatgaagagctggccgggtttatggagcagatccccggtatggtgctgatcaaccgtatcgtccccggttatgcgcaccgctgtgtcggtctggataacatcagcggcgcgatgatggcgacgcggatgctcatcagcaacggccatcagcgcattggttatctggcttccagccacggtattgaagacgacatgatgcgccgcgagggctggcaaaacgccctgaaagaacagggcattgcgccgctggagagctgggttggtaccggttcgccggacatgcagggcggtgaagcggcaatggtggaactgctggggcgtaatcttcagctgacggccgtgtttgcctataacgacagcatggcggcaggtgcgcttaccgcgctgaaagataatggcattgcggtgccgcagcatttatcgctgatcggttttgatgatattccgattgcccgttacaccgatccgcaactgacaacggtgcgttaccccattgcgtcgatggcgaaactggcgacagagctggcgttacagggggcggcagggctgttagatcctgacgcaacgcattgttttatgccgactttagtacgccgccattcggtcgctatccgacaaactgtggctccgatcactaactga

SEQ ID NO: 522726 - DNA, 999 bp, Stenotrophomonas maltophilia
atgaataagaaggtgttgactctgtctgctgtcatggcaagcatgctttttggcgcagcagcacacgcagcggatacccgtattggcgtgactatctataaatacgacgacaacttcatgtccgttgtgcgtaaagcaattgaaaaagatgctaaatcagcgccagacgtgcagctgctgatgaatgactcccagaatgaccagtctaaacagaacgatcagattgacgttcttctggcaaaaggcgtgaaagcgctggctattaacctggttgacccggctgcggcaggtacggtgatcgagaaagcacgcggccagaacgtgccgattgtcttcttcaacaaagagccttcccgtaaagcgctggacagctacgataaagcgtattacgtgggtactgactccaaagagtccgggattatccagggcgatctgattgcgaaacactgggcggcgaacccaaactgggatatgaacaaagatggtcagattcagttcgttctgctgaaaggcgaaccgggccatccggatgctgaagcacgtaccacctacgttattaaagagctgaacgacaagggcctgaaaacccagcagctggcgttagacaccgcaatgtgggacaccgctcaggcgaaagataagatggatgcgtggctctctggcccgaacgccaacaaaattgaagtggtcatcgccaacaacgatgcaatggcaatgggtgcagttgaagcgctgaaagcacacaacaaatccgccattcctgtattcggtgtggatgccctgccagaagcgctggcgctggtgaaatctggcgcaatggccggtaccgtgctgaacgatgctaacaaccaggcgaaagccaccttcgatctggcgaaaaacctcgctgatggtaaaggcgctgctgacggcaccagttggaaaattgaaaacaaaatcgttcgcgttccttacgtgggcgtagaccagtccaacctggctgagtttatcggtaaataa

SEQ ID NO: 522727 - DNA, 1521 bp, Stenotrophomonas maltophilia
atggtcagcacaactactcagtcgtccggtgaatacttgttggaaatgaccggtgttaacaagtcattccccggtgttaaggcgctcgataatgttaatttaaaagttcgtcctcactctattcatgcgttaatgggtgaaaacggtgcgggtaaatcaacattattaaaatgcctttttgggatctatcaaaaagattctggcagcattctttttcagggaaaagagatcgacttccattcagcgaaagaagcgctggagaacggtatctcgatggtacaccaggaattaaacctggttctgcaacgttcagttatggataatatgtggttgggccgctatccaaccaaaggtgtctttgtcgatcaggataaaatgtatcgcgacaccaaggccattttcgatgagctggatattgatattgacccgcgcgcacgcgtcgggacattatccgtttcccagatgcagatgatcgaaattgccaaagcgttctcctatgatgcgaaaatcgtgatcatggatgaaccgacatcgtcattaacggaaaaagaggttaaccacctttttaccatcatccgtaagctgaaagatcgcggctgcggcattgtctatatctcacataaaatggaagagatcttccagctgtgcgatgaaattaccatcctgcgcgatggccagtggattgccacccagccgctggaagggctggacatggacaagatcatcgccatgatggttggccgttcattgaaccagcgcttcccggataaagaaaacaagccgggcgaagtgattctggaggtgcgtaacctgacctcactgcgtcagccgtccatccgcgatgtctctttcgatttgcacaagggcgagatccttggtatcgcagggctggtgggcgctaagcgcaccgatatcgtggaaaccctgtttggtatccgtgagaaagccgaaggcaccattaccctgcacggtaagaaaatcaacaaccataatgctaacgaagccattaataatggcttcgcgctggtgacggaagagcggcgttccaccggtatttacgcttatcttgatattaactttaactcgttaatttctaatattcgcaattacaaaaacaaggtcgggttgctggataattcccgcatgaagagcgatacccaatgggtgattgactccatgcgcgtgaaaacgccgggccaccgcacgcaaattggctcactctcgggagggaaccagcagaaagtcattattggtcgctggctattaacccagcctgaaatactgatgctggatgaacctacgcgcggtatcgacgtgggtgcaaaattcgagatttaccagctgatcgcagagctggcgaaaaaagataaagggatcattattatttcttccgaaatgccggaattgttagggatcacagaccgtattctggttatgagcaatggtctcgttgccggtattgttgaaaccaaaacgacaacgcaaaacgaaattttgcgtcttgcgtctttgcacctttaa

SEQ ID NO: 522728 - DNA, 1011 bp, Stenotrophomonas maltophilia
atgagtgcgttaaataaaaaaagttttctcacttatctgaaagaaggcggtatttacgttgttcttttagtcttgctggcgataattattttccaggacccaacgttcttaagtctgctgaacttaagtaatattctgacccagtcttccgtacgtattatcatcgcgttgggcgtggctgggctcatcgttacccaggggacagacctttcggcagggcgccaggtgggtctggcggcggttattgcggcaaccctgttgcagtcgatggaaaacgccaacaaggtgttcccggagatggcgaccatgccgattttcgtggtgatcctgatcgtatgcgccatcggcgcggtaattggcctgattaacggcatcatcattgcttacctgaacgtgacgccattcatcactacgcttggcacgatgatcatcgtttatggtatcaactccctgtactacgatttcgtcggcgcgtctccaatctctggcttcgaaagcggcttctcgaccttcacgcaggggtttgttgcgctgggcagcttccgtctctcctatatcaccttctatgcgctgattgcggtggcgttcgtctggatcctgtggaacaaaacccgcttcggtaaaaacatctttgctatcgggggtaacccggaagcggcgaaagtctccggcgtcaacgtggctctgaacctgctgatgatttatgccctgtccggtgtgttctacgccttcggcgggatgctggaagcaggccgtatcggctctgccaccaacaacctcggctttatgtacgaactggatgcgattgcggcctgcgtggtcggcggcgtctccttcagcggcggcgtgggtaccgtgctgggcgtggtgaccggtgtgatcatcttcaccgtgatcaactacggcctgacctacatcggcgtgaacccgtactggcagtacatcatcaagggcgcgatcattatcttcgcggttgccctggattcactgaagtacgcgcgtaagaaataa

SEQ ID NO: 522729 - DNA, 711 bp, Stenotrophomonas maltophilia
atgttaaagcgcgtgttttacagcctgtctgtcctggtcggcatactgctgttgatcgtgctgggtctcgaccgctggatgagctggaaaacagctccctacatttttgatgacctacaggacctcccctaccgccaggttggcgtggtgcttggcaccgccaagtattaccgcaccggcgtcatcaatcagtattaccggtatcgtattcagggcgcactgaacgcctataacagcggcaaggtgaactatctgctgttaagcggcgataacgccctgcaaagctataacgagccggtgacgatgcgcaaagacctgattgccgcaggcgtcgacccggccgatatcgtgctcgactacgccggattccgcacccttgattccatcgtgcgtacccgtaaggtgttcgacaccaatgatttcatcatcatcacccagcgtttccactgcgagcgggcgctgtttatcgccctgcatatggggatccaggcccagtgctacgccgtgccgtcgccaaaagatatgctgagcgtacgcgtacgtgagtttggcgcccgttttggcgcgctggctgacctgtacctgttcaagcgtgaaccgcgctttttaggcccgctggtgccgatcccaacgatgcacgaagtgcctgaaaatgcgcaaggttatccggcggtgacgccggagcagctgctggaaatgcagaagaagtaa

SEQ ID NO: 522730 - DNA, 885 bp, Stenotrophomonas maltophilia
atgcatccacgttttcaagctgctttctctcagcttgcaaagaatttgcaatcagccctggctccggttctggcggatgcgcatttccccgccctgctgacggcagatcaggtcacgacgcttaaacaggcaacggggctggacgaagacgcgctggctttcgccctgctgccgctggcggctgcttgcgcccgcgctgacctttcccattttaacgtaggcgcaattgcgcgcggcgtgagcgggacctggtacttcggcgggaacatggagtttctcggtgcgaccatgcagcaaaccgttcatgcggagcagagtgccatcagtcacgcctggctgcgcggcgaaaaggccctgcgcgccatcaccgtcaactataccccttgcggccactgccgccagtttatgaatgagctgaacagcggtcttgaactgcgtatcaacctgccgggacgcgcgccgcatacgctgggtgattacctgccggatgcttttggccctaaagatcttgagatcaaaaccctgctgatggacgagcaggaccacggttacgcgctatcaggggatgcgctcagcgaagcggccattgccgccgccaataaaagccacaccccatacagcaaatcaccaagcggcgtcgcccttcagtgccgcgacggccgcatcttcaccggcagctatgcagagaacgccgcgtttaacccgacgctgcctccgctccagggcgccctgaacctgctcagcctgaacgggtatgactacccggatattcagcgcgcgatcctcgctgaaaaggccgatgcaccgctgatccagtgggacgcgaccgcagccacgctgaaagcgctgggctgttcaaccatcgaccgcgtgctgctggcataa

SEQ ID NO: 522731 - DNA, 696 bp, Stenotrophomonas maltophilia
atgatggcgaatatctggtggtccctgccgttaaccctggtggtgttctttgctgcgcgtaagcttgcggttcgtttcaaaatgccgttgctcaacccgctgctggtcgccatggtggtgattattccttttctgctgctcaccggcatttcttatgaacgttacttcgccgggagcaagatcctcaacgatttgttgcagcctgccgtggtggcgctggcgtttcctttatatgagcaactgcatcagatccgcgcgcgctggaaatccatcataaccatctgctttgtgggtagccttgttgcgatgatcaccggtacctcggtggccttattgatgggcgcatcgccgcagatcgccgcctctatcctgcctaaatccgttactacgccgattgccatggccgtgggcggcagcatcggcggcattccggccatcagcgccgtgtgcgtgattttcgtcggtatcctgggcgcggtgtttggtcatacactgctgaatatcatgaaaattcggaccaaagcggcgcgcggtctggcgatgggtaccgcctcgcacgcgctgggtaccgcacgctgcgcggagctggattatcaggaaggggcattcagctcgctggcgctggtgatctgcgggattataacctccctgcttgcgccgtttatcttcccgattattctggcagtcatgggctaa

SEQ ID NO: 522732 - DNA, 396 bp, Stenotrophomonas maltophilia
atgagcaaatcactgaatactatctggcaataccttcgcgccttcgttctgatttatgcctgcctgtacgccggcatttttatcgcgtcgctgctgcctattaccatccccggcagcattatcggcatgttgatcctgtttgtgctgctggcattacaggtgctgcccgcgaaatgggtcaacccggggtgcttcgttctcattcgctatatggccctgctttttgtgcctatcggcgttggggttatgcagtattacgatgtgcttaaggcgcagttcggcccgatagtggtctcctgcgcaatcagtacgctggtagttttcctggtcgtcagctggagctcacacattgtgcatggcgaacgtaaggtcatcggggagaaaacaaaaaaatga

SEQ ID NO: 522733 - DNA, 936 bp, Stenotrophomonas maltophilia
atgcgtgttttactggccccgatggaaggcgtgctcgactctctcgtgcgcgagctgcttaccgaggtgaacgattacgatctctgcgtgacggagtttttgcgcgtggtcgatatgttgctgccagaaaaatcattttatcgtctctgtccggaactgcatcgtcagagccgcaccccctccggtacgctggtgcgcgtccagctgctcggccagtatcctgagtggctggcggaaaacgccgcccgcgcggtagcgcttggctcgtacggtgtcgatcttaactgcggctgtccgtcaaagctggtcaacggcagcggcggcggggcgacgttactcaaagatccggaattgatttatcgcggcgcaaaggccatgcgtgaggcggtgccatcgcatctaccggtgacggtcaaagtgcgtctgggatgggacagcggcgacaggcagtttgaaattgccgacgcggtgcagcaggcgagcgccaccgagctggtggtgcacgggcgaaccaaagaggatggttataaagccgagcgcattaactggcaggcgattggcgagatccgcaaacgtcttactattccggtgattgctaacggcgaaatctgggattatgagagcgcgcaggcctgcctcaaagagaccggctgtaatgccgtgatgattggccgcggtgcgctgaacgtgccgaacctcagccgggtggtgaaatacaatgagccgcggatgccgtgggcggacgtggtgaaactcctgcaaaaatacacgcggctggaaaagcagggcgataccgggttgtatcacgtcgcgcgcattaagcagtggctgagttatttacggaaagagtacgacgacgcgctgggattatttcaggagatccgtacgctacagacgtcggcggatattgcccgtgtgatccagtcgaagcactga

SEQ ID NO: 522734 - DNA, 1419 bp, Stenotrophomonas maltophilia
atgaaacgttctcttactttatctctgagtgctccccttatttttatgctgtccgcctgcgcgccggaacatgccacggtgtctccagtgaaaacgcaagccgccgccgctgctgtaaatacccaactaagtcatgccgactggccaaaaaacgaatggtggaaagattttaatgaccctcagcttaacgcgctgattgctaaagcgctggcggatgcaccggatatgcaaattgcccggcagcgcatcaccctggcagaagcacaggcgaaagccgctgtcgctgctgatggtccacaaatggatttttccgcagatgtggaacggcaaaagatgtcggcagaggggctgatggggccattcgccctgactgacccggcggcggggacaaccggaccctggtacaccaacggcacctttggtctgacggccggatgggatctggatttatggggtaaaaaccgcgcccaaattgaggcccgcatcggtaaggtgaatgcgcaaaaagcggagctggagcagacccgccagctgctcgccagcagcgtcgcgcggctgtactgggactggcagaccgaggccgtggtgggtgacgtgctcgcgcagatcaaacgggagcaggaaaatatcatcggtgccgatcgtgagctttatcagcacggcattacctcctcggtggaaggcgttgaaacagatatcaatgccagcaaaaccgatgaacagctcgctgacgtgcacggcaaaatgaaggccattgaggcgcgtctgaatgcattgaccaataccccttcagtcacgctcgcccggcatgccttacctgacgcagaggcgtcgctgccgtcaacgctcggttatgagctgctggctcgccgcccggatttgcaggaggcgcactggtatatcgaagcgtccatgagcgaagtggatgccgccagagccgcgttctaccctgacatcaatttgatggcgttcttgcagcaggatgcgttgcaccttagcgacctgttccgctcatctgctcagcaaatgggcgtaaccgcggggctgacgctgccaatttttgacagcggtcggttaaatgcgaacctggatatcgcccaggcgcaaaacaacctctccgtggcgaactacaacaaggccgtagtggacgccgtaaaccaggttgcccggacggccagcgaagtggaaaccctgaccgccaaaaatcagcaccagcagcagatcgaaaaagatgcggcgcgcgtcgttgcgctggcacaggcgcgcttcagcgcggggatcattgccggctcgcgggtgagtgaagcaaaaattccggcgctcaaagagcgtattgccgggttgatgctgaaaggtcagtacgtggatgctacgctccagctcacctccgcgctgggtggcggatatcatcgcagctaa

SEQ ID NO: 522735 - DNA, 765 bp, Stenotrophomonas maltophilia
atgacgcgagtcgcaatcgttaccgcatcggattcaggaattggcaaaacgacggctctgatgctggccgaacgcgggtttgatatcggggtgacctggcattcagatgaggaaggggcgctggcaacctgccgtgaaattgaagcgcgcgggcagcgtgccgaggccatccagctcgacttaagcaatttgccggaaggcgcaaaggccattgaaaccctgattacgcgtttcgggcggctggatgtgctggtaaacaatgccggggcgatgaacaaagggccatttctggacctgtcgtttgacgactggcggcacatatttaccgttgacgtggacggcgcgtttctctgctcgcaaatcgcggcgcgtcagatggtgaagcagggagaaggggggcggatcgtgaacatcacctcggtgcatgaacatacaccattgccggacgccagcgcctatacggcggccaaacatgcgctgggcgggttaacaaaatcgatggcgctggagctggttaaacataagattctggtgaacgccgttgcgcctggtgcgatcgccacgccgatgaatgatatggacgacagcgaagtgaaagaaggttcaatgccggaaatcccgctggcacggccagggcataccaaagaaatagccagcctggtggcgtggctgtgtgacagcgacgccagctacaccaacgggcagtcgtttatcgtcgacggcggttttatgctggcgaatccgcagtttaagccagcagaataa

SEQ ID NO: 522736 - DNA, 573 bp, Stenotrophomonas maltophilia
atggatatcaacggtcttattgaacaatatggatacgccgcgctggtcatcggcagcgtggcagagggtgaaaccatcacgctgctgggcggagtggccgcacatcagggattgctgaaattcccgctggtggtcgccgccgtcgcactgggcggtatgattggcgaccagctgctctactttctgggtctgcgctttggtccgacgcttttacaacgttttgctaagcatcaaaagaaaattcgtcgtgctcagcggcttatccagcggtatccctatatgtttgtgattggcacccgctttatgtatggctttcgcatcattgggccaatactgattggcgcgagccgcttaccgccgaaaattttcctgccgctgaacattatcggggcgattgcctggacgctgatttttaccacgcttggctacatgggtggcgaagtgataggcccgtggctgcataatctcgatcagcatcttaaacactgggcctggctgatcctggttgttgcggtggtgattggggtacggctgtggctcaagcatcgtgaaaagcggcgggatgaagagtga

SEQ ID NO: 522737 - DNA, 588 bp, Stenotrophomonas maltophilia
atgaaccatgtctggggacttttctcccatcccgatcgtgaaatgcaggtcatccgtaacgagaacgaaacggtcgcgcatcactacacccaccacgtcctgctgatggcagcggtgccggtggtctgcgcgtttattggtactacacaaataggctggaactttggtgacggcaccgtggttcagctttcctggtttaccggactgtacctggccattctgttttatggcctgatgctggccggggtggcggtaatggggcgggtcatccactggatggcgcgcaactatccgcagcgcccgtcgctggcacactgtatggtcttcgccggatacgtcgcgaccccgctgttcttaagcggtattgttgcgctctatccactggtctggctgtgcgcgctgatcggtacggttgccctcttttacaccggttatctgctgtatgtaggagtgccaaccttcctcaacatcaataaagaagagggcctgagcttctccagctctacgcttgccatcggcgtgctggtccttgaggcgctactggccctgacagttattctttggggttatggataccgtctcttttaa

SEQ ID NO: 522738 - DNA, 924 bp, Stenotrophomonas maltophilia
atgctgaaatttcgagtgtcactccttagtcttgcgctactgttgggcgtctccgctaccgcgccagccatcgccaaaacgcccgcagttgccaccgctgctgcgcaaccccagattgcgtccggcagcgcgatgatcgttgacctgaataccaacaaggtgatctacgccagtcacccggatctggtgcgcccgatcgcttccataaccaaagtcatgaccgcgatggtggtgcttgatgcacgactgccgctggacgaaaagctaaaagtggatatcagccacacgccagagatgaaagggatctactctcgcgtgcgtctgaacagtgaaatcagccgtaaaaatatgctgctgttggcgctgatgtcctcagagaaccgcgcggcggcgagccttgcccaccattatcctggcggttacgacgcgtttatccgcgcgatgaatgccaaagccaaagcgctggggatgaaaaatacccatttcgtggagccaaccggtctgtcgatccataacgtctcgacggcgcgtgatttaaccaagctgctgatcgccagtaagcaatacccgctgattggtcagctcagcaccacgcgtgaggagatggcgacattctcgaacccggcgtatacgctgccgttccgcaacactaaccatctggtgtatcgcgataactggaatattcagttaaccaagaccggattcaccaatgcggcagggcactgcctggtgatgcgcaccgtgtttaacggtaaaccagtggcgctggtggtgatggatgccttcggcaaatatacccactttgcggatgccagtcgcctgcgcacctggattgaaaccgggaaagtgcaaccggtgccggcttcagcgatggcgtataaaaagcagaaagcggaacagatggcgacggcgcagaacgactga

SEQ ID NO: 522739 - DNA, 555 bp, Stenotrophomonas maltophilia
atgtcggctgtagagattttacccgaaactgaaatcgaggtgcgcgacgcccttcctgacgatgcacatgccatctcggcgatatacgcctggcatgtgcttcatggccgtgcgtcgttcgaggaagttccccccaccgtcgatgagatgcgtcagcggatgaagagtgtgaccgacagcggtttaccgtggctggttgcgctgtatcgcggcattgtcgtcggctactgctacgccacgttttatcgtccacgtcaggcctaccggtacacccttgaggaatccatctatgtggatgccagcaccaccgggcgcgggtttggctcggcgctgatggatgccctgattgcacggtgtgagcaaggtccctggcggcagatgattgctgtggtcggtgacggaaacaataatgcgggatcgttacggctgcataaaaaacatggcttcgaggttgtcggtcaactgcgcagcgtggggtataagaagggcgactggcgggatacgttgatcatgcagcgtccactcaacgatggtgactggacgctgccggagtag

SEQ ID NO: 522740 - DNA, 1758 bp, Stenotrophomonas maltophilia
atgtcttctgttcgaactgacgataacactacatttattaacgaactgtctcgcctggttggtcactctcacctgcttaccgacccggccaaaaccgcccgctatcggaagggctttcgctccggccagggcgacgcgctggcggtagtcttccccggtacgttgctcgaactgtggcgcgtgctcagcgcctgcgttgcggcagacaagattattttaatgcaggctgctaacaccggcctgaccgaaggctccacgccgaacggcaacgattacgatcgtgacatcgtgattatcagcaccctgcgcctcgacaaactgcacctgctggacaagggcgaacaggtgctcgccttccccggcaccacgctttactcgctggaaaaagcgcttaagccgctgggacgcgaaccgcactcggtgatcggctcatcgtgcattggcgcctcggtgatcggcgggatctgcaataactccggcggctcgctggtgcagcgcggcccggcctacacggagatgtcgctgtttgcccgtatcgatgaaaacggcaagctgacgctggttaaccatttggggatcgatctgggtgtaacgccagagcagatcctcagcaaacttgacgatgaccgcgtgaaggacgaagacgttcagcacgatggccgtcacgcgcatgaccacgattacatcacccgcgtgcgcgatatcaatgccgatacgccagcgcgctataacgccgatccggatcgcctgtttgaatcctccggctgcgcgggcaagctggccgtttttgcggtgcgcctcgataccttcccggcagagaaaaagcagcaggtgttttacattggcaccaatcagccggaggtgctgacggagatccgccgtcatattctggccgagttcactcacctgccggtggcgggcgagtatatgcaccgggacatttatgacatcgctgagcgctacggcaaagataccttcctgatgatcgacaagctcggcaccgacaaaatgccgttcttcttcaccatgaagggccgcaccgacgcgatgctggagaaagtgtcgctgttcaaaccgcacttcaccgaccgctttatgcagaaactgggcaacgccttcccggcgcatttaccggagcggatgaagacctggcgcgataagtatgagcaccacctgctgctgaaaatggccggggacggaattgccgaagcgcagagctggctcaccgagttcttcaaaactgccgacggggatttcttcgcctgcacgccggaagaaggcagcaaagccttcctgcaccgcttcgccgcggcgggtgcggctatccgttatcaggctgtgcattccgaagaggtagaggatattctggcgctggatattgccctgcgtcgtaacgataccgagtggtttgaacatctgccgccggagattgacagcaagctggtgcacaagctctattacggccatttcatgtgctatgtcttccaccaggattacatcgtcaaaaaaggggtggatgcgcatgcgttgaaagagcagatgctggcgttgctgcacgagcgtggcgcgcaatatcctgccgagcacaacgtggggcatctgtacaaagcgccggagacgcttaaacagttttatcgcaaaaatgaccctacaaacagtatgaaccccggcattggtaagacaacgcggaagaaatactggaaagagagtgccgaaacagaggagcacaatacgcaagcctctgatgaacgcctatag

SEQ ID NO: 522741 - DNA, 2298 bp, Stenotrophomonas maltophilia
atgaaatggctatgttctgtaggtgtcgccgtcagcctggcgctgcaacctgcgctggcagaggatttgtttggtaatcacccgctcacgcctgaagcccgcgacgcctttgtcacggatttactcaaaaagatgacggtcgatgagaaaatcggccagctgcgcctgataagcgtcggcccggagaacccgaaagaagccattcgcgagatgatcaaagacgggcaggtaggagccatttttaacaccgttacccgccaggatatccgcaaaatgcaggatcaggtgatggaactgagccgcctgaaaattccgctgttcttcgcctacgacgtggtgcacggccagcgtaccgtcttcccgattagcctcggcttagcctcctcctttaacctcgatgcggtgaaaaccgtcgggcgcgtatcggcatatgaagccgcagacgacggcctgaacatgacctgggcgccgatggtagacgtctcccgcgatccgcgctggggccgtgcttcggagggctttggggaagatacttatttaaccgccacgatgggcaaaaccatggtggaagcgatgcagggcaaaagtccggcagatcgttactcggtgatgaccagcgtcaagcacttcgccgcctatggcgcggtggaaggcggcaaagagtacaacaccgtggacatgagtccgcagcgcctgtttaacgactatatgccgccgtacaaagcggggctggacgcgggcagcggcgcggtgatggtggcattgaactctctcaacggcacgcctgccacctccgattcgtggctgctgaaagatgtgctgcgcgaccagtggggcttcaagggcatcaccgtttcggatcacggggcgattaaagagctgatcaagcacggcacagcgtctgacccggaagatgcggtacgcgtggcactcaagtccggcatcaacatgagcatgagcgacgaatactacagcaaatacctgccggggctggtgaagagcggcaaggtgacgatggcggagctggacgatgccgctcgccacgtgctgaacgtgaaatatgacatggggctgtttaacgatccttacagccatctggggccgaaggagtctgatccggcggacaccaatgctgaaagccgcctgcaccgcaaagaagcccgcgaagtggcgcgcgaaagcctggtgctgctgaaaaaccgtctcgacacgctgccgctgaaaaaatccggcaccattgccgtggtcggtccgctggccgacagcaagcgtgacgtcatgggcagctggtccgccgcaggcgtggcggatcagtccgttaccgtgctgacaggcattaagagcgctgtgggtgataatgcaaaagtggtttacgccaaaggcgcaaacgtcaccgacgataaagacatcgtgaccttcctcaaccagtacgaggaagcggtgaaggtggatccacgcacgccgaaagagatgatcgacgaagcggttaacgccgcgaagcagtccgacgtggtggtcgccgtggtaggtgaagcgcaggggatggcgcacgaagcctccagccggaccgacatcacgatcccgcaaagccagcgtgacctgatcgcggccctgaaagccaccggcaagccgctggtgctggtgctgatgaacgggcgtccgctggcgctggtgaaagaagaccagcaggctgacgccattctggaaacctggttcgccggtaccgaaggcggtaacgccattgccgacgtgctgtttggcgattacaacccgtccggcaagctgccgatgtccttcccgcgctccgtcgggcagatcccggtttactacagccacctgaacaccggtcgtccgtacaacgccgacaagccgaacaagtacacgtcccgttacttcgacgaggctaacggcccgctctatccgtttggctatggcctgagctacaccacgtttaaggtctctgacgtgaaaatgtcggcgtcgaccctgaagcgtgacggcaaagtgaccgccagcgtggaagtgaccaacagcggcaaacgcgaaggcgcgacggtgatccagatgtacgttcaggatgtcacggcctccatgagccgtccggtgaaacagctgcgcggcttcgaaaaggtcaacctgaaaccgggcgaaaccaaaacggtcagcttcccgattgacgtaaatgcgctgaagttctggaatcagcagatgaaatacgatgccgagcctggcaaattcaacgtcttcatcggcgtggattccgcccgggtgaacaaagccgagtttgaactgcaataa

SEQ ID NO: 522742 - DNA, 918 bp, Stenotrophomonas maltophilia
atgacgattattaaggggataacagggtcggcggtgcttctggcggcgctgagcctgccgttacaggccgcagagccggttaaggtgggttccaaaattgataccgagggcgcgttgctcggcaatatcattttgcaggtgctcgaaagccacggcgtgaaaacggtcaataaagtgcagcttggcactacgcctgtcgtgcgcggtgctatcacttccggcgagctggatatctacccggaatacaccggcaacggggcattcttcttcaaggatgaaaacgatccggcctggaaaaatgccaaagccgggtacgaaaaagtcaaaaagctggacgcggaaaaaaataagctggtctggcttacaccggcaccggccaacaacacctggaccatcgcggtgcgcaaagatatcgccgagaaaggcaagctcacctcgcttgacgatctcagccgctacctgaaagagaagggcgagtttaagctcgcggcctcggcagagtttatcgagcgcgctgatgccctgccagcgtttgaaaaagcttatgatttcaagctcgatcaggcacagctactttctctggcgggcggcgacacggcggtgaccattaaggcggcggcgcagaaaacctccggcgtcaacgcggcgatggcttacggcaccgacggcccggtcgcggcgcttggtctgcaaaccctgaccgacccgaaaggcgttcagccaatttacgccccaaccccggtcgtgcgcgaggcggtgctgaaagcctacccggatatcgacgattggctcaaaccggtgtttgaaaaactggatgcgaaaacgctgcaacagctgaatgccagcattgccgtagaggggctggatgccaaaaaagtggctgccgacttcctgaaacaacaagggcttgtgaagtaa

SEQ ID NO: 522743 - DNA, 1158 bp, Stenotrophomonas maltophilia
gtgccaataaaatgtcataaccgcgtcctgctgctgttggtctgtgtggccatcgtggcggtcgcgttaccttttgtgaatgtcgcgccaaaccgtctggtgtcgggcgaaccgcgcgcgctgtggcagatctgggcatttacgccgctgctgctgggcgcggcgctggcgagtaccgtagtcttagccttctggccggggcgaaccgcgctgtggctgacgcttctactcagcgaagcgctgtttatcgtactgttctggagcgcgggacaggcggcaacgcagatggcctcggttgaaagccctctggcgcgcacgtcgattggcagcggcctgtggctgtggctggcactctgcctgctggcctgtagcgatgccattcgccgcctgacgccgatacctgtgtggcgctggctgctgaacgcgcaattctgggttattcccctgctgatcctcttcagcggcgatctgaatcaactctcgctgttaaaagagtacgtcaaccgccaggaggtgtttgacaacgcgctggcgcaacatctgacgatcctgttcgggacgctggtcccggcgctgctgctgggcgtgccgctgggcatgtggtgctaccgacatcccagccgccagggtgccgtctttaccgtgctcaacgttattcagaccatcccctccgttgccctgtttggcctgctgattgcccccctcgccggtctggttaaatccttccctgcgttggccgcggcaggcattgccggaaccgggctgaccccggcgttgattgcccttgtgctgtatgcgctgctgccactggtgcgcggcgtggtggcggggttaagccaggttccgcccgacgtgctggaaagcgcccatgcgatggggatgagtgcgcgccagtgtttctggaaaatacagctgccgcttgcgcttccgctgctggttcgcagcctgcgggtggtgacggtgcaaaccgttgggatggcggtaattgccgcgctgatcggggcgggcggctttggggcgctggtgttccaggggctgctcagcagcgcgctggatctggtgttgctgggcgttgtgcccacgattgcgctggcggtcgttctggatgccctgtttgccctgtggctcgcgctgctcaggagaagagccaatgattga

SEQ ID NO: 522744 - DNA, 951 bp, Stenotrophomonas maltophilia
atgattgaatttcatgatgtgagtaaaacctttgcgggccgtccggcggcaagccatctcaatctgcattttgccgagggggcgttctcggtattgatcgggacgtcggggtcgggaaaatcgacgacgctgaagatgatcaatcggctggtggagcacgacagcgggacgattcgctttgccggagaggagatccgcagcctgccggtgctggagctgcggcggcgtatgggctacgccattcagtccatcggcctgtttccccactggacggtggcgcagaacattgccaccgtgccacagctggaaaaatggtcccgggggaagatcaatgagcgtgtcgacgagttgatggcgctgctgggcctggacgcgtcgcttcgtaaccgctatccgcaccagctttccggcggacagcagcagcgggtcggggtggcgcgcgcgctggccgctaacccgcaggtactgctgatggatgagcccttcggcgcgctggatccggtcacccgcggcgcacttcaggccgagatgagccgcatccaccgtattctcgggcgcaccatcgtgctggtgacgcatgatatcgacgaagcactgcggctggccgatcgtctggtactgatggatcacggcgaagtcgtccagcagggtacgccgcttgagctgttaacgtcgccggcaaacgattttgtgcgtgaattctttggccgcagcgagctgggcgtcaggctgctctcgctgcgcaccgtcagggactatctgcgtccgcaggatgcgcaaatcggtggtgaaccgctgcatgacgggatgagcctgcgcgatgccctttcggcgtttgtcgcccggcagtgtgaggtgttacccgttgcggacgggcaggggacaccatgcgggacgatccattttcgcgatctgctggcgggggaggtgacgcgtgaagtgggtccgtga

SEQ ID NO: 522745 - DNA, 738 bp, Stenotrophomonas maltophilia
gtgaagtgggtccgtgatccgttactctggctgacagggctgtttatcgccttactctacctgatgccgcacagcgcggcgctgtttaatgcgcttattcccgggctgccgcgcccggtgtaccagcaggagagctttgttaatctcgccctggcgcacttctggctggtagcggcgtcaagcgtgatttccatcgtgctgggcacaggtgccggtattgcggtgacgcggcctgcgggcagggagttccgtccgttggtggagaccatcgccgcaacggggcagaccttcccgccggtggccgtgctggcgattgccgtgccggcgatcggttttgggcaggagcctgccatcattgcgctgatcttgtacggcgtgttgcccattctgcaagggacgctggcgggcattgcggcggtgcctgcatcggtgctgagcgtagcggaagggatgggaatgagcgcctggcagcggctactgaaggtagaactgccgctggcagcaccggtgattattgccggtgtgcggacgtccgtgatcatcaacattggtacggcaaccatcgcgtcgacggtcggggtcaatacgctggggacgccaatcattattgggttaagcgggtttaacacggcttatattattcagggggcggttctggttgcgctggcggcgattgtggtggatcgcctgtttgaacgcctggccggatacctcagccaacaccgccgcgaacaataa

SEQ ID NO: 522746 - DNA, 741 bp, Stenotrophomonas maltophilia
atggcgctttacacgataggtgaagtggcactcctgtgtgatatcaatcccgttacgctacgggcgtggcagcgacggtatggattgcttaagccgcaaagaacggacggcgggcaccgcctgtttaacgatgcggatattgaccggatccgcgagatcaaaagctggatcgacaatggcgtacaggtaggcaaggtgaagtcgcttctgagccaggacgatcctgatacgcagcatctctggcgcgagcagcaggaaacgctgctgaggctgttgcagaccggcaatttgcagcgtctgcgcggctggatcaaagaacagggtcgagactaccccgcgcaaaccctgatcacccatctttttattcccctacggcgtcggcttcagtgtcagcaaaccaccttacaggcactgctcagtatgcttgatggcgtgctgattaactatatttccgtctgtcttgcctcagcgcggaataaaaacagcaaagatgcgctggtgatcggctggaacgtccacgataccacccggctgtggctcgaagcctggattgccacccagcagggctggcgcgttgacgtgcttgcacactccctggcacagctcaggccggaactgtttgaggggcagacgctgctggtctggtgtggcgaagtcccctccgcttcccagcagcagctcctgacggaatggcgcgaacatggttatcccgtttactcgctggggccaaatgcgttgtaa

SEQ ID NO: 522747 - DNA, 1686 bp, Stenotrophomonas maltophilia
atgtacgagtttaatctggtgctgctgttgcttcagcagatgtgcgtgtttcttgtcatcgcctggttgatgagcaaaacgcgcctgttcattccgctgatgcaggtcaccgtccgtctgccgcacaaattcctctgctacgtcgtattttccatattctgcattatggggacctggtttggtctccatattgaagattccatcgccaatacgcgcgccattggcgcggtaatgggcgggctgctcggaggcccggtcgtgggcggtctggtggggttaaccggcggcctgcaccgctattcgatgggcggtatgacggcactaagctgcatgatctccaccattgtcgaagggctgctcggtggtctcgtccacagctatatgattaagcgcggacggccggataaagtgttcagtccccttaccgccggggcgatcaccttcgtggcggaaatggcgcagatggcgatcatcctgctgatcgcgcgcccgtttgacgatgcgttacatctggtcagcagcattgccgcaccgatgatggtcaccaataccgttggtgcggcgctgtttatgcgcattctgctcgacaaacgcgccatgttcgaaaaatacacctcggcattttctgccaccgcattaaaagttgcggcgtcgacggaagggatcctgcggcagggattcaacgaggagaacagcatgaaggtggcgcaggtgctgtataaagagctggatatcggggccgtggcgattaccgatcgcgaaaagttgctggcgtttaccggtaccggggacgaccaccatcttccaggtaagccgatctcctcggcctacactttgcgcgctattgaaacgggtgaagtggtgtatgccgacgggaatgaagtgccgtaccgctgttccctgcatccgcagtgcaaacttggctctacgctggtcattcccctgcggggcgaaaaccagcgcgtcatgggcaccattaagctttacgaagccaaaaatcgcctgttcagctccatcaaccgcacgctgggggaggggatcgcccagctgctttcggcgcaaatcctggcggggcagtatgaacggcaaaaagcgctgctgacgcagtcagaaattaagctcctgcacgctcaggtgaatccgcatttcctgtttaacgcgctcaacacgctgaaggcggtgatccgccgcgacagcgatcaggccgcgcagctggtgcaatttctgtcgacatttttccgcaaaaacctgaagcgtccctcggagatcgtcaccctcgcggacgagattgagcatgtaaacgcctatctgcaaattgaaaaagcgcgcttccagtcacgattacaggtgtcgttatccgtcccggatgagctggcgtatcagcatcttccggcctttaccctgcaaccgattgtggagaacgccattaagcatgggacgtcgcagctgctgggaaccggagaaatcatgatttccgcttcccgttttaaccaccatctggtgctggatattgaagataacgcggggctgtatgaagcctccgcgtcaggcggtctgggcatgcgcctggtggataagcgcctgcgcgcacattttggtgatgactgcggtatcaccgtcgcctgtgagccagaccgctatacccgaattaccttacgattgccgctggaggagaacgcatgttaa

SEQ ID NO: 522748 - DNA, 720 bp, Stenotrophomonas maltophilia
atgttaagagtgctgattgttgatgatgagccgttagcacgggaaaacctgcgtgttctgttgcaggagcagagtgatatcgaggttgtgggggaatgtgccaatgcgattgaaggcatcggtgcggtgcataaactgcgcccggacgtgctgttcctcgatattcagatgccgcgcatcagcggtctggagatggtcggcatgctcgacccggagcaccgtccctatatcgtctttctgacggcctttgatgagtacgcggtaaaggcgtttgaagagcacgcgtttgattatctgctgaaaccgattgaagagaaacgccttgaaaagaccctgacccgtctgcgccaggagcgtaccgcgcaggacgtgacgctgctgccggagcatcagcagcccctgaagtttatcccctgtaccgggcacagccggatttacctcctgcaaatggacgacgttgcctttgtcagcagtcgtctgagcggggtatacgtcaccagcgctgaaggcaacgaaggctttaccgagcttacgttacgcacgctggagagccgcacgccgctgatccgctgtcatcgacagtatctggtgaacatggcgcacctgaaggagatccgcctggaagataacggccaggccgaactggtgctacgtgcagggcaaaccgtgcccgtcagtcgtcgctatctgaaaagtttgaaagaggcgatagggctgtaa

SEQ ID NO: 522749 - DNA, 471 bp, Stenotrophomonas maltophilia
atgctaagtaacgatattcttcgtagcctgcgctacaccctgaaagcgaacaataatgacatggtgcgcattcttgcgctctccgacatggaatccacgtccgccgggttcgacacctggatgactaaagaagatgaagagggttttgttcgctgcccggacatcattctgtcgggcttcctgaacggcctgatctacgacaagcgcggcaaagatgaatctgcgcctgagctggcgctggagcgtcgggtgaataacaacacggtgctgaaaaagctgcgtattgcgttctccctgaaaactgacgacattctggcgatcatgaccgagcagaaatttcgcgtgtcgatgccggaaatcaccgccatgatgcgcgcgccggatcataaaaattaccgcgagtgtggggatcagtttctgcgttatttcctgcgtgggttgacgcagcgggtgcataaccagaaggggtga

SEQ ID NO: 522750 - DNA, 2034 bp, Stenotrophomonas maltophilia
atgactcaagtcgcgaaaaaaattctggtaacgtgcgccctgccgtacgccaacggctcaatccacctcggccacatgctggagcatatccaggctgatgtctgggtccgttaccagcgaatgcgcggccacgaggttaatttcatctgtgcggacgatgcccacggcaccccaatcatgctgaaagcgcagcagctgggaatttccccggaacagatgatcgccgaaatgagtcaggagcatcagaccgattttgctggctttgacatcagctatgacaactatcactccacgcacagcgacgagaaccgcgagctgtcagagctgatctacacccgtctgaaagagaacggtttcattaaaaaccgcaccatctctcagctgtacgatccggaaaaaggcatgttcctgccggaccgtttcgtcaaaggcacctgtccgaaatgtaaatccccggaccagtacggcgataactgcgaagtgtgtggcgcgacctacagcccgaccgagcttatcgagccgaaatccgtggtttccggcgccacgccggtaatgcgtgactccgagcacttcttcttcgacctgccgtcgttcagcgaaatgctgcaggcgtggacccgcagcggcgcgctgcaggagcaggtggcgaacaagatgcaggagtggtttgaatccggtctgcagcagtgggatatctcccgcgatgcgccatacttcggcttcgaaatcccgaacgcgccgggcaaatatttctacgtctggctggatgcgccaatcggctacatgggctccttcaagaacctgtgtgacaagcgcggcgataccctaagcttcgacgagtactggaagaaagattccaccgccgagctgtaccacttcatcggcaaagacatcgtttacttccacagcctgttctggccagcgatgcttgaaggcagcaatttccgcaagccgactaacctgttcgtacacggctacgtaacggtcaacggcgcgaagatgtccaaatctcgcgggacgtttattaaggccagcacctggctgaaccacttcgatgcggatagcctgcgctactactacaccgcgaagctctcttcccgcatcgacgatatcgacctgaatctggaagatttcgtgcagcgcgtgaacgcggacatcgtcaacaaggtggtgaacctggcgtcccgtaacgcaggttttatcgctaaacgctttgacggcgtgctctctgccgaactggccgatcctgagctgtataaaaccttcaccgacgccgccgctgcggttggcgaagcctgggaaagtcgtgaatttggtaaagccattcgcgaaatcatggcgctggcagacgtggccaaccgatatgtcgacgagcaggcaccatgggtggtggcgaaacaggaaggccgcgacgccgacttgcaggcgatctgcaccatgggtctgaacatgttccgcgtgctgatgacctggctgaagccggttctgccgcagctggcagcccgcgcggaagcattcctgaacaccgaactgacctgggatgccatccagcagccgctgctcggccacaaggtgaacaccttcaaggcgctgtataaccgcatcgagatgaaacaggttgacgcgctggtggaagcatcaaaagaagaggtgaaagcggctgccgcgccggtgaccggcccgctggcggacgatccgattcaggagaccatcacctttgatgatttcgccaaagtcgacctgcgcgtggcgctgatcgaaaacgcggagttcgtggaaggttctgacaaactgctgcgtctgacgctggatctgggcggcgagaaacgtaacgtcttctccggcattcgttccgcgtaccctgatccgcaggtgctgatcggtcgtcagaccgtgatggtggcaaacctggcgccgcgtaaaatgcgcttcggcatctctgaagggatggtgatggccgcaggcccgggcggaaaagacatcttcctgttaagccctgacgaaggcgcgaagccgggtcagcaggtgaagtaa

SEQ ID NO: 522751 - DNA, 1110 bp, Stenotrophomonas maltophilia
atgagttctcaatcccaggccaaatcaccggaagccttacgagcaatggtcgccgggacgctggctaattttcagcatccaaccctgaagcacaatctcacgacgctgaaagcgcttcatcatgtcgcatggctggacgatacgctgcacattgagctgcagatgccgttcgtctggaccagcgcctttgatgccctgaaagagcaaaccagctctgagctgctgcgcattactggcgcaaaagcaattgactggaagctaagccacagcatcgccacgctcaagcgcgtgaaaaatcagccgggcgttaacggcgtgaagaacatcatcgccgtcagttctggcaagggtggggtgggtaaatcgtcgaccgccgtgaacctggcgcttgcgctggcggcagaaggggcgaaagtcggcattctggatgcggatatttatggcccgtccattccgaacatgctgggtgctgaaaaccagcgtccaacttcgccggacggcacccacatggcgccgatcgtggcgcacggtctggcgaccaactccattggttacctggtcacggacgataacgcaatggtctggcgcggcccgatggccagcaaagcgttgctgcaaatgttgcaggagacaatgtggcctgacctcgattatctggtgctggacatgccgccgggcaccggtgatatccagctgacgctggcgcagaacattccggtcaccggcgccgtcgtggtcaccacgccgcaggatatcgcgctgatcgacgccaaaaaaggcatcgtgatgttcgagaaggtggaggtgccggtactcggcatcgtcgaaaacatgagcatgcacatttgcagcaactgtggacaccatgagccgatcttcggtaccggcggtgcggagaagctggcggcgcaatatcacacccagctgctggggcaactgccgctgcatatcacactgcgtgaagatctggatagcggtaagccgacggtggtcagccgtcctgatagcgaattcacggaaatctatcgtcagctggcggggcgcgttgcggcgcaactgtactggcagggggaagtgatcccgagcgagatcgccttccgcgcggtgtaa

SEQ ID NO: 522752 - DNA, 540 bp, Stenotrophomonas maltophilia
atgaccgcctcccggccatccgggtgggtgcagagcggcgagcgctgggatctgtggtggaacggccgttcggtggcccgtatcgtgccgcatgccgcgctcgggttccgcctgtacctggacgcacgcaagatgtcacaggccaaggtcgtgtccgccaccagcacccgtcaggccaagcgctacgccgagcgctggtgtgctgcacggctctgcccgcagttgcctctgcgcgatgcggtggcgcggttggtggctgttgcgcccggcgcgggcgccgtgccctcgcagctgctgacgcgggagcagcggcagcaggcccggcgcctggctgaagccggggcaggggagatggggcggatcaaggaagcgctggcaccaaggccgcgcatgatggccgccaggcccgaggtgcagggacgaggtggaacctggtctgtacccggccaggttccatcctccccgcgccgaaacgggaacacatccccagccaggactacgccgagagctcctcacgcacgatccgggccccttcgctga

SEQ ID NO: 522753 - DNA, 447 bp, Stenotrophomonas maltophilia
atgaacggacatcacgccccccatgcgcgccgccgcatgcgtcggctcctcgcattgggcctctgcgccctggctggatccgccctcgccggaacaacgcaaccggcacgcacctggcttgtcagtggagccgaactcatcaccctgctgcagggcaaaggcgctgatgggttctgcgacggcgagcagtgccggaacctgtccagcgctcgcgccagcgcctatatccagggcgttgccgatgccagccacggccagtggtgtggccaaggcaggattcttccgcatgagctggtcgaccgtgtgtcctcccatctccggcagttgccccgcgagcgattgcagcaggatgcgtcttcactggttgccgaagggctgcggtcggcatttccctgtggcggcggcgcatcacgtggtagcagtgccgagcccggcaaagacgaatga

SEQ ID NO: 522754 - DNA, 213 bp, Stenotrophomonas maltophilia
atgctgcgcgcggtgtgcgccgccttccacgcctacgacgtagacgaaacggccatcgaacttggcctgcgcgccctgcagcacgtcatcgtcctgcagggcgcgcttgagcgacttcatccatgcccgttcgggcgtgctgtccagctccacaacgattgcagcgccgccgcagtccagggacatgcactccacgcgcagtgcgctgggtga

SEQ ID NO: 522755 - DNA, 444 bp, Stenotrophomonas maltophilia
atgggaacaaagaatctggtagcctggtcattcttactctgcgtctcgctcgcgggtttgtttggttgtcgggccgccccgccaagcggttatgatgcgaaccttaccgccgaggcgtgcgattcgagaaaatcaccgagtaaagaagtatccatcgaggagctggtggcggcgccagagaaattccacgacggctatgtgaggacgactggattctactgctctggatttgaagagagtgggctatattcagcacctggatgcaatcacgacaaaaagcttggtgtttggctcacgggaactgctcccgatagtaatttcagagggcaaaaggtggcgatcacgggaaaggtcgacgcgggaaacaatggtcaccttgcgcagtgggcggcgcaagtctgcgtctccgaactcaaggttctcgacaaacgatcaactgaatag

SEQ ID NO: 522756 - DNA, 288 bp, Stenotrophomonas maltophilia
atgagagctcttctggcaattggatgtgactcctatgatcatgtaactcctctctcgggggcagagagggatgccgatagggttttcaacgcgcttttgagcgcaaaaatcccattctatgatgtggatcgatcaactctacttcgttctccgtgcaccgacgtcgttcggttggctctgaaagagctgctttttgatggcccgaagctcgacgtactgaccctctacttcgccgggcacggcaaggtggcgaacggaagctttttcatttgtctgcgcgatacatga

SEQ ID NO: 522757 - DNA, 528 bp, Stenotrophomonas maltophilia
atggatggaccgggcgttcgcgcgcgagcgaagccgcaaggcgtagatgatcaggggcagggcgcgccaggcacgttctcccacccgcctggaattcgccgaaacgcgatcccgttgatgcagcgatattcatccttatttgctgggttggatcggcccgcagcggcacgttcggccgcaacctctctaagcctcacttcggtccatttcgcctcgatctccgcacgttcgcggcgcgccctgatctcggcgatgaacgcgtctttttccgctgttgtcggctgcgtcgtcaccgatggctgggccacaactgacggtggttcgtggctctggaatcgtgcattccaagcgtcaccagtcttcaaatgcagccagataccggcaccagccatgcccagcagcagaactgcccacatgccgagccacggaaactcccagcgcgtgcgcgggatgggttgtaggtactccggtcgttcgcgtgccatacggcccccaaggcgtcctgcgcgcattgtagccggggtgtag

SEQ ID NO: 522758 - DNA, 474 bp, Stenotrophomonas maltophilia
atgatctacctcgatcgagacgacgttcgctcactcaccgccgacgatctgcgtgaagggcgatggctcactgcagagggatgcgcaatctatcttggtctgttcccgcacaagggggcggccatagttcgtcgcaagacgttccctgctcctggatcgactgacagcgacgaccagccgctgtgggatatagcagcggtctcagactgggccgcacagcatgtgaggcaggaagcaaagtcgcaggaaacgtgcctataccgtcacttcaatgtggacggcgacctgctgtatgtcgggatatccatatcgatcatgcagcggacgcgaacccatggctatgccgccgcgtggttccgggacgtcagcaggatcaccgttgaatggcaccccacccgcgccgaagccgagaaggctgagcgggtggcaattcggcaagagaagccgaggttcaataaggcccacaccaagtga

SEQ ID NO: 522759 - DNA, 1029 bp, Stenotrophomonas maltophilia
atgggaaggaaaccgaagaagccgggggctatcccccggttccgcccccggaagcagaaatctggcgtggtgcactactactacgatcacggtggcaagccgcgcaaggaaactgcgctgggcagcgattacggcctggccatccagaagtgggccgagcttgagcgtgcggcgacgatccccaccgatgcgaagctgacgttccggcaggccgccgagcgctaccgcatcgaggtgattccgaccaaggccgagggcacgcgcaaggcgaacctgcgcgagctggatacgctgctgaagttcttcgacgatccgccgggcccgctcgatgccattcgaccgacgcacgttttcaacttcctgcagtggcgtcgcgccgcgccggtcagtgcgaaccgcgagaaatcgctgctgtcgcacctgtggaactggtgccgcaagaagggctacaccgatctgccgaacccatgcgcgggcgtgaaccgcaaccgggaggacggccgcgacgtgtacgtggaggacgacgtgctgcagcgcgtgtacgacgctgcggaccaggtgctgaaagacgcgatggacctcgcctacctgaccggccagcggccggcggacgtgcgcgaactggaccgccgcaacatcaaggacggagtgctggtgttgcgccagagcaagacgaagatgcagatgcgcatcgccattaccggcgagctgaaggtgctgatcgaccgcctggtgtcgaggaagcggccggacgatgcaccgatcagcacgcgcctgctgctgggcgaggactggctaccgatcggcaaggacgcactgcgctaccgcttcgatagggcgcgcgagcgtgccggcatcccgaaggaccagttccagttcagggatttgcgcgccaaggccggcaccgacaaggcagattcggcgggcgacattcggaaggcgcagcagcagctcggccaccagtcggtgaccacgacagagatctatgtgcggaagcgccgcggtgcgctgaccagcccgacgaagtga

SEQ ID NO: 522760 - DNA, 153 bp, Stenotrophomonas maltophilia
atggctgaccagctgctcaccaccgcgctgacgtggggcatcgccggctcgctgttcctgctggtggccggcgccttctggctggcccggcaggcataccgcgccgcgcgcgcagggctgcgctggtgctggcggaggtgcgctcatggctga

SEQ ID NO: 522761 - DNA, 441 bp, Stenotrophomonas maltophilia
atggctgacggcggcgcgtacatcgattggtacgggaagggccggcatcagaactggcgcactcccagcagcatcttcgatgctctgcacgccgagttccacttcaccctggatggcgccagcgagccggggaatgggttgctgcccttggcatccactgccgatgccccgatcagctggacgggccaccacgtgttctgcaacccgccatggtcgaatatccgcccgtttgttgaccaagctccgtgggctgatctggccgtgttcctggtgccagccaggaccaacgtgggctggttccatcatgcactgcagctcggtgcacgaacccggttctttctcggccgacccaagtttgaactgcccgaccacagcggcaacggccacaacagcccggtggactgcttgctcctgatcttcggaggacagacccatggctga

SEQ ID NO: 522762 - DNA, 261 bp, Stenotrophomonas maltophilia
atgggtgagtacgccgacatgatgatcgacggcgacgtgtgcgaaggctgcggcgtcaacctaccgggctgcggcgaagggtttgcccgctactgccggcactgccagccaaccaaggctgagcgcaaggccgagaacatcgcacgtcacgccgccgaccaggcccgcaagaaaaaggtgccctgcccgacctgcggccgccgcgtgcgccagatcggcatggccgaccacaaccgggatgcccacggggtgacgccatga

SEQ ID NO: 522763 - DNA, 183 bp, Stenotrophomonas maltophilia
atgagcaacgacaccccctctcagaaggtcacagcggcggcccgcgcgttgtgccgtcgcgcctcggaagcctgcaacgtcgacttcgaggacaactggaagatctacgggcacgaattcatcaaggacgccgaggtagctctggtcgctgctggcgtgatcgcggtggccagccatgggtga

SEQ ID NO: 522764 - DNA, 1692 bp, Stenotrophomonas maltophilia
atgaagaccgtggaactgatccagggcaccccggaatggcacgcccaccgcgccgcccacttcaacgccagcgatgccccggcgatgatgggctgcagcccttacaagacccgcacccagctggtgcgtgagttcgccaccggcgccgcagtcgagcacgacgccgcgaccttgcagcgcttcgccgacggccaccgcttcgaagacctggcccggccgctggccgaacagatcctcggagaagaactgtttccggtcaccggaacgcatggcaagttctcggccagcttcgacggcctgacgctgctggaggacacggcgtttgagcacaagtcgctcaacgacgacctgcgtctggccatgcacgacgggaatgatgccctgccgctgcactaccaggtgcagatggaacatcaggcgatggtcagcggcgccgagcgcgtgctgttcatggcctcgaagtgggccggcaacgaactggtcgaggaacgccactgctggtacatcccgaacccggagctgcgcgccaagatcgttgcgggctgggcccagttcgaggctgacgtggcagggtacgagccagcgccggtggccgagccggtttccgccggccgcacgccggaccagatgccggcgctgcgcatcgaagtgaccggcatggtcaccgcttcaaacctggccgagtggaaggatcaggccatcgccgtgttccagggcatcagcaccgagctggtgagcgaccaggactttgctgacgccgagaccaccgtgaagtggtgcgggaacatcgaggaacagctgaaggtggccaagcagcacgccctcagccagaccgagagcatcgacctgctgttccgcacgatcgacgacatcgccgccgaggcgcgggcaaagcgtctggatctggagaagctggtgaagcggcggaaggacgagcgccgcaccgagatcgggaacgccgcgcgccgagcggtgctggcgcatgtgcaggccattaacgacaccatgggcgagcacgccatccccgtgtccccgacgctggtcgccgacatcggcgatgccatgaagggcaagcgctccttctccagcatgcaggaggcagtggacgcggttgctgccaacgccaaggtggacgccagccaggtagccgaccggatccgtgccaacatccgcgtcatggaaatggaggtgggcacgcatgccgccttgttcccggaccgcgtgcagctgtgctccacgaaatcggcggaagacctgcgcaacctgatggcggcgcgcatttcccagcaccagcaggccgagcaggcacggctggacgctgagcgcgacaagatccgcgagcaggagcaggccaaggctcaggaagtggtggctgcggcccaggcggcacaggtccagcaggtgccagtggcggaagcagcatcggcgcaggccgaggccgctactgccgccagcgcaccgtcgacgagcgccacccagcggcagatcgttcggatcaagctcgggcagatcgtggatctgatcgcaccgctgaagattgacgcagagggcctgcgtcagctcggcttcgagccagcggccaccgagcgtggatcgaagctgtacgacgccgaccaggtcgacgcgatgcgcgccgccatgatccgcagcctgcagcgtccactgtcgggcatcaatgcgcaggccgcctga

SEQ ID NO: 522765 - DNA, 480 bp, Stenotrophomonas maltophilia
gtgcatagcttccgccaccaagatcacgggtacatcagcccgtgccacattccgctgaagcgcagcggggacgactgctccctcgaccgtgatggatattctcgggccagctccgctgccgacagatcgcagcgcatgcatcgtctggtctatcagcgcctgcacggccaggtgccggacggaatggtgctggatcatctgtgcggcaaccgtgcctgctgcaacccggcgcacctggagcccgtgactcaggccgtcaatgtgcgtcgcagccgcctcgcgcagctctcgcccgagcaggtggcccgcatcaaggaactgcggaaggccggcatgcgccccacggcgattggccggctgttcggcgtgacccagagccatgtgtcgcacatctgctccaaccgctactggcgcaccgacggcgctccgtcctatcgaaccatcaagctgcggcaggccaaggcctgcgccgggcagtaa

SEQ ID NO: 522766 - DNA, 1545 bp, Stenotrophomonas maltophilia
atgaccatttccgccaatgaccgccgcaagacctacgtggggaacggcgtcgccaccgcgttcaacgggccgagggcgttcctgtccagccacatccaggtgttcaccggcacgcacccggtctacaacctggtgccggcggctcagtacaccgtgacagggctgcgggcgaacgccagcacgatcaccttcaacgctgcgcctgccttgaacctggacatcttgatccttcgtacggtgccgctcgatcagccagccgacatcaccaaccagggtgcgttccttccggagatccacgaagacgccttcgactaccgcgtgatgcagctgcagcagttgatggatagcggcatgcagctggtgcaggaccccagcaccggcgaatttgtgtgggacgcaaagggtaaccggatcgccaacgtgggcgatgccaccgccgatgccgatgcgctcaatctccgttctgccctgatgctaatcgagcgggtactgggcggtggcggcagtgtaggtgtcacgccgaagttctgggagtttgatggcgatggtgaagtgaccgacttccctctggccggcgcggacgtgctggatcccctgttctatgacaccgccgcggagctggccgcaggcgtgggcaattacaaagtgtcccggccggtggatgccaacggcgttggggagttcatgatcgtgccaggcacggaaggggcgccgccagccatccgctttaatccgccgctcggcgacggcgtgcgtggcttcacgaccctgcgcggctacgcccgcccgtggattggccagccccctgtctacacggttgcgccacggatcgtcagcatcaccggcaacaccatgctggccggggacatgcacaacactctgatcctggccaactcggcctcgccgatcaccctgaccatccgggcgaataccggtggcagtgcggactggaaggaaggacagttcttctctgtgctgcaggttggcgccggtcaggtgacgctcgttgtggaaggaggcggcccgatcacgatcccgccgagcttccaggccaagacccgtgcacaaggctgcatcatcagcggcacctgccttgcgcctgatgccgacgcatgggtggccgcgggtgacctgctgcgggtggccgcggcggtcgacctgcagtgcttcgacctgatcgaccgttccgcgctgatcagcgccaatatcgccgctggcactggtaaagacagcctgatcctgccctatggcctggtgctggatacggtggccaatggtggcatctacgccaccgtggcgaccgcgcaggccaccggtctggtactgaccgtggacgtcaaccgaaacgggaccagcatcctgtccacgaagctgaccttcgacaacaacgagcgcagcacgctaactgcggcaactccccctgtgcttgtacccggcggcgagattctggcgaagggcgacgagatcaccatcgacgttgaccagatcggcaccgccaacgccaagggtctgcgggtgtacctggtcggtcagagggcaagctga

SEQ ID NO: 522767 - DNA, 1398 bp, Stenotrophomonas maltophilia
atgactgcacgcatttacgatcggcctgatctggatcagtccgtttctcgcctgggactgtacgtctccggtcagttttccaatggaaaaccaagggtggcctacgagggaaggctgcagattcacaatgccgttggggcgtgcactgtgagacagatcgacggagactcgctgccgctcggccatcgattgtatgtcgatcaagcgactcgagaagttgtgcttgcttggcctgactacgagaccaatgctgcgcctatcgcaaatccaggctttgaaagcggggcaactgcatgggaggctggtgccggatgggtgatcgcgacggagaatcctccgagcggaatgtgggctgccggctataacaacaaccgaggggagtcggtcatctcgagcacctcgaggtatccggtctaccccggacaggtcaccaacgcgaaatgcaaggtgcgccaaggggcttcatcggaaggcaacgcaggagcgtctgtcctgctggaataccgaaaccagatcggggatgtggtggcccgcttcgagggcaatcgtgtcatgtcggcaagcaagaatcgtgtgtacgactcgaacgtcagaggggttgcgccggataccgctgattcagtcaatgttgctgcaaacggaattcgctatcgcgagaacaagattctttttgtcgatgactttgaatgggatcacgttgtcgcggccgccggtgttggccaagacagcctgttccagataaccctgcaggtgtccgattccgcaggaagatcggcaatatggaaaggttcggtgcgggtggtagatgttctttactggaatccaacggatgcgcatccgctggtggtgctgagcgaccaagatcgccgcatggaggccgtgaacaacaatccagtcagtgcgatgggtggttctgtcagggcttaccaggctcgcagctcagggcgccgatacgtcgagttcgaatgggcccgattcaatgatgcggcgagggcattcgctggattgttcagagcgaacacaagtttgtcgttgttcccgggtgactatcccacggcaaacgactgtagcggcgtgttccagaacgggcagttcatggttgtaggtactacgagtttcgactcagggttcgctcccactgcggggtcgagagtgggcgttgccattgacttcggtacgggccgggcgtggatcaggcttgatggccattggttcagaaatgcgaacccacagaatacgccgggcggtctgttcggaaatgtagtaccggctggcgatcttttccccgctgcgtttgctgaggatcgtgcggcggacctttcgaatcagatcagattgcttgtaaaggcggaggaaatgcttttccggccggacgggttcatggcgtggggtgagtag

SEQ ID NO: 522768 - DNA, 996 bp, Stenotrophomonas maltophilia
atgagtcttgtaccaaccgtttacgaaagcaccgatccgggcgcgccgcagcttactgggcaggttggcagcctggtcgcgcttctagacgccgtcctcgtggatgggtatggcgtgggggcatcgaggaagaacggagcgggatggacccgtgagttcagcgctctgaatgtgcgagcgtaccgaggaagtttggtcagcggcagcgggtacttcctccgcattgatgattccgcaactgtggggaatgctcggcatggctttgcgcgtggctatcagtcgatgacctcggcgtcatcgggcaataaccctgtgcccgcttctactcagaaagccaatggcgtgcttctgccgaagtcgataactctggatgggacttctcgccggtggcgagttgttgccaacgagcgatttatctacctgttcgtcgatacgcgcaacgcaggtagctttttcagttggtttgccggtgattgtattagctacaagcctggcgatatgcatggatttgtcattgcgtgcgttgatccacaggagtggaatggtgggtacgtggaaagcgcttattcgttgagctgggaggactacacattcgctccaagtgaaagctcatgtggcctgtatgttgccaggtcgcatactctcgcgatcggtgctgtggcatgcaatttctttgggattcttcgcgggagacttcagttcggtggttctggcaccggtgcctacccaagtggctcgaccatggggctcctctacgagtccgttaggtttgtaaacggagcttggtttccgcgtggtgagcttcctggggcgctcgcgccaatgcaacagatcgggatcatcgacagtcttccggatggcatgatcattgaggggctcgatggaactgtgacggatcgagttctcgttgttcgaattaatcgtgcatgcaacatcgaagtcgatgcgcgatggcgtggtgcgctactcattcgcataagtggagcatgggattga

SEQ ID NO: 522769 - DNA, 318 bp, Stenotrophomonas maltophilia
atgaatgcgcagggtttttttatgagggcatcgcgcccgccagaattctgtgggcggggggttatcggtggattgccacctgatcaaactggcagcgacgggcgccttcgaaagctgaaccagcctttccgagggcgggtgcttgtgctggaacgaagcacgctcgtctgctgcgctcaggtccttagtaacggtgctggggagtggttggtcagcggactgtctcctaaccatcgctacatggtggtcggaatagacgcgacgggtgaggtcaactccgcaattcaggactgggttcagccctacgccgaaagctga

SEQ ID NO: 522770 - DNA, 711 bp, Stenotrophomonas maltophilia
gtgggatcgggatcggggtcgggatctgggcccgggccgggcgttgggcgaacgccccaaggaactcgccgcgcggcgccccagggcaaccgggaggcccttcggcttgcaactggatttgcccacgctatgaagcgaccggcactagccggggtcagccgactaccccactgcaaaccgcgagagatccgctcggccgcaagccagcgagcaggcaacgtggtcaatcgcctcaagctgtgcatcgaagagtgccatgcgtacagtgcttggcaccctgctagcggaagggtgccccaccccgctcgccacttgcccccaaccagtgccatgccggttcgccactcaaaccccgtctctccgtggatcaaaccgctcattccccaaccgacagagatctctcgccgaactcgagacgattcaacccaccactggcggacagccatatcgactgcagctgagcgttgccactggatcgaagaaagacggccaagccgccccgcaggcgcccaggcaattgcagcagcctgccgaattccccggatgaccggttccggagcatcgtcgtcccagtacaccccaagattgagtccagcgcgtcgcgcatccgcctcgacgaagggacccaaattaagtcgcagacgcaaaggagtaggatcggtcatcagctttcggcgtagggctgaacccagtcctgaattgcggagttga

SEQ ID NO: 522771 - DNA, 621 bp, Stenotrophomonas maltophilia
atgcggcccgatggacctgtaccagccgcagagtacgaactaccacaggggaccgaagtgaaaggatcaaacggcggagtcgccagagagatagccattgcgggagcaggcggattggtcacgaccgcttgcaccactgtcgccgcttggcttagcccccgcgctcaggagtacctgacgggatcctcccgttttttggtctgggaagtgttggcagtattggtaattgcattgatcctggggactattctcggcctccttgttggctaccacagggggcaggtgagcgtagagccagaagcaccaaccccagtcgcaccagccaaaccagtggtgccgatacccacaccgttcgagccgacaccgctgcaagttctctgcattcaggcactacgggtcgccgacaacaggcatcaacccttagcagtgatttcggcattcctggcgaggatagggcaccccaccccactgtcagacatcgagcagtctcttgaaggtctaatcgaccaagcctgggtgtccaacattatcgacccctcaaagggggtgtgggagtacagattgataggcgaaggaaccgcctacgcgcgcgaccgaggattcccggtctctgggatgtga

SEQ ID NO: 522772 - DNA, 867 bp, Stenotrophomonas maltophilia
atgaggcagttagccaaggtcgtccgacttgatcgggacaagggcatgcgcggggacgggtttgaatgggccgtccacgaggcaatcattggtggcgagccaaccgtgacagagctggtgcatgacggtatccggcgggcctctcgttctatcagtggtgcaaagcccgagtcactactgttcggctatgagcgggctaagtacctagggttccttgaggcaacgatcaaagctgcaggtgaagcaccatacctcctgcctgatggaagaggtcgaccctacaaattcgatacctgggtagcgaaggcggcgaagggtcaggaagcggaagctgagctgaccgaacgaatccagaagatctggaaaacggacttgttcctcacgggaacaggagacgagagatacttggccgcgacggtgaagtccaactatcgattgctggagggagggcgtggcctaaagatcggtatcgttcccgagtcgaccgtaactggacacaagcccggtgtgacgttcgataagaagcatggattgtggctcgtcactttagaagatccaacaggatttaccggcttgtacaacgatgcgtacttggccgttggtagggcgatgtgctcgttgggtaagcaagaggctccgccgtactacacgaagccgagtgccaaggcacagaagatgcaggagcaacttgagaagtaccccactgcaacggttgtcgacatcgaaggtgcacttgatgaagctgcgcagcagaacttggtgaatgtcgctcatcagcttgttagcgttaacgcgcccgattggctgcatctcaaacaggctgctcccaggatcattgcgccgaagccaagtttcgagcgcctataa

SEQ ID NO: 522773 - DNA, 684 bp, Stenotrophomonas maltophilia
atgcagaacgtgccggatattcaagagcgttggggtgatgagctttgctttgatcgataccgccgcatcctttgcgacctgtttcctcggttgctggagtttcctcgtgagagagagctcgagcgcaactttctgctcgcggtattgaggagaacgttatccctagagagggcctttctaagcgcggttggggacaataacggtcagatggcactgacgcttgttcgactaaacctggactcgttggctcggacttacgcgctctattgggcggatgagactgctggaatgggggccgaggcattcgccaagaaggtctggagcggagttgcaattagggacatcaggctttcgcgcaaaggtaagaaggcggcgcgtgcaacggatgcttggttgatagatcagatcaagccgctagccacctggattcccgacgtctacaaggctacgtccggtgcaatccatttctccgatttccatatgaagcagatgttgcaacagacaacatcgaagggtgtgcgacaggatggggtactggtcgtggaactggctttcgggccaacagatacgggggtggggccgcagcactacgaagaggtccgtcaggcattcgtacatgtgacggcgctcctagccacctgcatagatcatcgctgcccggactccgcaattggtactgcttag

SEQ ID NO: 522774 - DNA, 582 bp, Stenotrophomonas maltophilia
atggaagatatccgatcgttcttactatccataattccagatcaggcaaaacaatttggggacgttcttcgggaactcctgtaccaaaccacagatggggctcgcgttagcggatggggggtccatctaagtccagacgagctgcacagggttggcatcctgctctccatggcccgagatcttcataaagagggcaaggctgaggaaggctggttctatcttgtccaggcccagaagacaatggcgcaccgcgaaggtttaatggaggcagcgtacgagtcttctgatgaggcggcggcgagacgcgttgcagccaagaatggcgccattggtggcagaacccccaaggctgaacttctggctagcagacagcgggtaactgcatcgatcttagcaattaactcccaaaatccattcaggttcactgcggattttcgccaagcgatgtttgatttggaagatgggaaggggaaggatgagaactggttccgacgcaccttgcaggcttcgcccaagctgactgcggtctatgccacgctgactaagaagaaggtcctgacaaggacgaaggccggtcagtga

SEQ ID NO: 522775 - DNA, 219 bp, Stenotrophomonas maltophilia
atgtctgataaaccattaactaaagtcgattatttgatgcgcctgcgacgctgtcagtcaattgacacgctcgaacgtgttattgagaaaaataaatacgagctgtctgataatgaactggcggtattttattcagctgccgaccatcgtcttgctgaactgaccatgaataaactctatgacaagatcccctcttcggtatggaaatttgttcgttag

SEQ ID NO: 522776 - DNA, 552 bp, Stenotrophomonas maltophilia
atgagtgaagaaaaacagaagatgattgccggtgaatattatcgccccggcgatgacacgctgagggctgaccgtttacgcgctcgtcatattgttcaccgctataaccataccgcacccgatgagaaggccgaacgtcgcgccttattatctgacctgctgggtcaaagcgaaggcgcttatattgagccgagtttccgctgcgactacggctataacatctatctgggcaacaatttttacgccaacttcgactgcgtcatgctggacgtctgccctatccgcattggcgataactgtatgctcgcaccgggggtgcacatttatacggccacgcatcctctggacgcgaccgaacgtaacagcgggctggagtacggtaaatcggtcaccataggccataacgtctggatcggcggacgcgcggtgattaatccgggcgtgaccattggcgataatgcggttatcgcttccggcgcggtagtgaccaaagacgtgccggccaatgcggtagtgggcgggaatccggcgaaaatcattaaaatgatctaa

SEQ ID NO: 522777 - DNA, 468 bp, Stenotrophomonas maltophilia
atgacagagatacagcgcctgcttaccgccaccatcgacgagctcaatacccgcgaaaagcgcgacaatcgtccgcgctttagcatcagctttattcgcaatcatcccggattgttcgtcgccatgtacgccgcctggctggcaacgcttatcgtcatgctgaagtctgaaacgctggtcgattccgtctggctgctggttgtgctgttcgtggtgtttaacgcgtttttctttttcgacgtcaatccgcgttaccggtatgaagatatcgacgtactcgatttccgcgtctgctacaacggggagtggtacaacacgcgttacgtgccgaaggagctgatcgacagcatcctgcactcgccggctgtcgaagccgggcaaaaagagaagttgcagaaaatggtcctcaccaagggccagctctctttttatgatgtctttaccctttcccgccccgctgctgtgtaa

SEQ ID NO: 522778 - DNA, 1461 bp, Stenotrophomonas maltophilia
atgaatataccgggtgatgagctatacaccctgctccatgctgcgctgaaaaaacgtggggaagaaacgctccagcgcgcgctctaccttgctttgcgggaggccatactgtgcggaaggcttcggtccggcagtcatttgcccggctcgcgaacgctggcgcagcagatctcggtgtcccgaaacaccgttaatgcggcgctggaccagctcacgctcgaaggttatttgctgcgtagccgccagggtacgcgggtggggcaattcgctcatcgtacgattgcccggacattaccggacccggacgtcaggctgacaaaacgtgttgccctgctgcccgagcctgtgccgcgcgacactccggtgatggcatttacgccaggaacgcctgccatcaactatttccccttgccgctgtggcggcggttatacgatcgcgtcctgcgcgaggaggggagcgccctgttagggtatggcgacccggccggcgagccgacgctacgggccgccattgcccgccatcttgcgctctcccgcggcattgactgcgatgccagccagattgtgataaccgaaggggcactggagggcgtcaatctgtgcacgatgctgttaagcgagccgggggatgtcgcctgggttgaaaatcccggctatagcggcgctaaaagcgctttcgtcaaaaccggcctggcgatgagcggcataccggttgatgacgagggaatgtgctgggaagggttgtgtgcgccttcacccacgctgatttttacctcgccatcgcatcagttcccttacggaagcgtgctcagcgcgcggcggcgtctggcgctgctggaactggcccggcagcacagcgcgtggatcattgaggacgattacgacagcgaattccgttatgccggtgagcccgtaccggcgatgctgggaatggtcaacaatgcgcccgttgtgtatctggggacgttcagcaaaacgctgtttccgtcgctcagaatggggttcatggtattaccgccagcgctggcgaaggcagcgcgtccggccatcggctcgctgctgcgcggcgggcatcgcgctgaacagcgcaccctggcgctatttattgaggaaggccactatgcgcgacatcttgccgccatgcgccgactttatcgtaagcgataccgccagctgcgggaggtgctaagtgcagagcttcatacgccgcaccgtgttcttgccggagaaggagggatgcacctggcgctggcgattgacggtatcgacgaccagcggctggtggagcaggcaagagcgtttcagctggcacccgctgcactgagcgggtactaccttgagacgacgcaggggcaaaccggtctggttttaggttacggcaatacctctgcttcgcagtttgcgccgggtattcgacgtcttcaggcgctcattacacagcagcggggcgggaaagggtaa

SEQ ID NO: 522779 - DNA, 711 bp, Stenotrophomonas maltophilia
atgagtgtattcaatgagtttggacaacctgtaggggaaagccttaccgactggcagcctcgcccgcacccgtcccggatggtacttcagggtcgctattgtcggcttgagccgctgcgcgtggagcatgcccacgcgttgttctctgcgtattccctggccggagatacccgaagctggacgtggctgctgcgtgaacccgatgccaccgcagtggagtttgccgaatgggtagcgagcgtgagcaaattatccgatcccatccactttagcgttatcgataaccagacccaatctcctgtcgggacgctgtcccttatgcggatcgatcctaaaaacggcgttgtagaagtgggacatgttcacttctcgtcactgttaagccgcacgcccatgtcgacagaagcgcagtatctgctgatgcggtacgtgttcgataccctgggctaccgacgttatgaatggaagtgcaacagcctgaacgaaccctcccgcaaagcggccctgcgtcttgggtttcagtttgaagggcgttttcgccaggcgctggtcattaaaggccgaaaccgggacaccgactggttttcaattctcgacaaagagtggtcagcgctggcgagcgcgtttgaaagctggcttgccaccgacaattttaccgtcgatggcaaacagaaaagatccctggaaagctggcgagaaacgcgcgtctag

SEQ ID NO: 522780 - DNA, 141 bp, Stenotrophomonas maltophilia
atgcaggtgcttaactcattgcgcagtgcaaaacagcgtcacccggattgccagatagtcaaacgcaagggacgcttatacgtgatttgcaaatctaacccgcgctttaaggcggtgcaggggcgtaaaaaaagacgctag

SEQ ID NO: 522781 - DNA, 261 bp, Stenotrophomonas maltophilia
atgaaaccgaatatccatccaacctatcgcaccgttgtgtttcacgacaccacggctaatgaatattttaaagttggctcaacgattaagacagaccgtgaaattgaacttgaggggaaaacgtatccctacgttactcttgatgtctcctctaaatcacatccgttttataccgggaagcagaagaccttctcgacggatggcagcgcggcacgcttccgcaagcgttttggtggctttcttgatgcgaagcgaggctaa

SEQ ID NO: 522782 - DNA, 1560 bp, Stenotrophomonas maltophilia
atgcgaacccgacatctggtcagcctggtgacaggcgtactgatcttctctgtgctggtccctgtgtgcctcagtatctggctggcgcatcgtcaggcagaggcgaaatttgtggatgcactggacagatatgcctcgcgcgccctgatccgtaccgacagagtcgttgcgcaggcaaaacaggcgctcacgcacctacagttgttcaacgccccgccctgcactcctccgcacttacgcgaaatgcgtcgtgtcgcgttctcatggcgctatattcaggaagtgatgtatatcgataacctgaagccgctctgctcctctctggaacaatccagtaatacggcgatcttaccgcccccgatgcggatcaccgcagacggatatagcgcgtggctcacctcgcaaaacgacctcggcattcaccgttatatggccgttctggggaaaggacattatctggtaatggtcgatccggcgtcgcttgtggatgttgtcccgttcggtgacatttcgatggatgccgccctggtgggaagcgaaacccatcggatatttgccagaagcaatattctcgacccgtatattctttctgtcgttaaggagcagcaggacgttaagcgcgtgcaatacaacggctcgatgtacgtgttgaaaccggtgccagaactggggcttacggttattgcctgggcatcgttaaaaccgctcgcggcatcctggcatcagcagctgatcatctggctaccggcaggcatactgataagcctggttgcagcccttattgtgcttcgcatcctccgccgtttgctttccccgcgtaaccggctgatcgacgcgatcaacaaccgggagatcgaggtttactatcagcccattgtggcgctatgcagtggaaaactggtgggtgcagaagcgctgatgcgctggccgcagccagatggcagtgacctgtcgcctaatctctttgttcccctggcggagcagacggggcttatttcaacgctgacacagctggtggtgaataaggtgtttgaggatttaggtgcctggctgcatcatcacccggaactgcacatttctgtcaacctttcgccagccgatttaacgtcccccgagctgcctcgcctgctgagtcaattgctcaacaaatggggcgtccacccgcgccagatcgcccttgaattgaccgagcgcggctttgccgatcctgccgtcagcgcccctgccatcgctgcgtttcggcgctccgggcatgccatctacattgatgattttggtacgggttactccagcctgagctatttgcaggatcttgatgtcgataccctgaagattgataaatcctttgtggacgcgctggagtataagaacgtgactccccacatcatcgaaatggccaaatcgcttaagctggcgatggtcgcagaaggcattgaaactgaagggcagctcgaatggttgcatcgccacggcgtgcagtacggacagggctggtatttcagcaaggcgctgcctaaagaagatttcattcgctgggccgagcacaacctcaggaaataa

SEQ ID NO: 522783 - DNA, 3090 bp, Stenotrophomonas maltophilia
atgtcttctacattgccgctgaccctcagcgcaattctggctcgtcgtgactgggaaaacccgggcgtgacgcagtggaatcgtctggccgcacacgcgccttttcatagctggcgcgatgaaaccctcgcccgggaggataagccttcgctgagcaagcgtctgcttaacggcatctggcgattcagctttttcccggcaccagagcaggtgcccgaggcatgggtaacggacgatctgtctgatgccgttgagatgcccgtgccgtcgaactggcagatggagggatttgatacccccatctacaccaacgtcacctatccgataaatgtgaacccgccctatgttccggctgaaaacccaaccggttgttactcgctcacatttgagatggatgatgcctggctgctcagcgggcaaaaccgcattatctttgatggggtgaattcagcttttcatctgtggtgtaacggccagtggataggctattcccaggacagccgtctgcctgcggagttcgacctcagcgcggtgctgcgaccggggcagaaccgcctggcggtgatggtgttacgctggtgcgacggaagctaccttgaagatcaggacatgtggcggatgagcggcattttccgtgacgtctcgctgctgcacaagccggaaacgcagattgccgattatcagatcgtgaccgatctgaatgccgaatgcgatcgggcgctgctccaggttgacgttgcgctggaaggcttacgctatgccgaatgcgaggtggcgtttaccctgtggcgtaacggcgaagcctgcgcgcaaatcacgcaacagcccggatcggccatcgtggacgaacgcggcagttgggcggagcggctcacggtggcgatacccgtgaacaatcccgcgctgtggagcgctgaaacaccggaacgctatcgtttgaccatgtcgcttcgggatgtgcagggcaacatgctggagactgaagcctgcgatgtcggtttcagacgcatcgaaatcagcaacggcctgctgaagcttaacggcaaaccgctgctgatccgcggcgtgaaccgtcatgaacatcatcctgagaaggggcaggtgatggatgaggcgaccatgcgccgcgacatcgaactgatgaagcagcataacttcaatgccgtgcgctgctcgcattatccgaatcaccctctgtggtacacgctttgcgatcgctacggcctgtacgtggtcgatgaggcgaatattgaaacccatggcatggtgccgatgagccgcctggcggacgatccgcgctggctgcctgccatgatcgaacgcgtcacgcgtatggtgcagcgggaccggaatcatccgtccatcatcatctggtccctggggaatgagtccgggcatggggcgaatcacgatgcgctgtaccgctggctgaaaaccaccgatcccacgcggccggtgcagtacgaaggcgggggggccagtacggcggcaactgatattatttgcccgatgtatgcccgcgtcgatcaggatcagccgttcccggcggtgccaaagtggtcgattaaaaaatggattggtatgccggacgaaacccgtccgctgatcctgtgcgagtatgcccacgcgatgggtaacagctttggcggctttgccagctactggcaggcattccgcagccatccccggttgcagggcggctttgtctgggactggctcgatcaggcactgacgaaaaaagcggaagacggcacggcattctgggcctacggcggcgattttggcgataagcccaacgaccgtcagttctgcctcaacgggctggtgtttcccgatcgcactccgcatcccgccctttacgaggcgcagcgtgcccagcagttctttacctttacgctggtgagcaccgttccgctggtcgtcgagatccagagcgattatctgttccgtcatactgacaacgagagtctgcgatggtcggtggcgcgtgacggtgcggtgttggcttccggcgaaataaccctttctgttgcgccccagggaacacagcgcgttgagatcccgcagactgaattgggcgctgaaccgggcgaggtctggctcaacgtggagatcgttcagccgcaggccacgccgtggtcgccgtccggccaccgttgtgcctgggatcagtggccgctcccggctccgctgtaccttacgccaccgaaagcagacggaaccccaccacagttaacggtgcaggaagaggtgctggacatcactcatcagcagcagcgctggcagtttagccgtctcaccggcaacctgacccagtggtggaacgcgggcgctgaaacgctccgttccccgctaacggatagctttacccgggcgccgctggataatgacattggcgtcagcgaggcgacccgcatcgatccgaacgcgtgggtggaacgctggaaagcggcagggatgtatgagatatcctcgcgccttatccagtgtgaagcggaacagcatgcccgtgaggtggtggtgaccacgcagcacgtctgggagcatcagggtaaagcgctgtttatcagctacaaggtctggcggattgatgaccacgggttactgcacggtgatgtgcaggtgacggtggcgtctgacattcctgaacccgctcgcgtgggcctgagcgttatgctggcggatatcccgcaaacggtgcgctggctggggctgggcccgctggagaactatccggacagaaaactggcggcgcagcgggggcgctgggcgttaccgctggacgccatgcagacgccgtatatcttcccgacggagaacggtttacgctgcgacacccgtgagctgacgtttggctcacatcacttccagggacagttccatttctccctgagccgttacagccagcagcaactgcatacgacaacgcatcagcacttgctgcgggaagaggctggctgctggttgaatcttgatgccttccacatgggcgtggggggggacgactcatggagcccgagcgtagctcccgccttcattctgcaaaaccgtcggctgcgctacacgttttgctggcagcagaacggctga

SEQ ID NO: 522784 - DNA, 1071 bp, Stenotrophomonas maltophilia
atgaaagcgatcactctttatgacgttgcccgcgtagcgggcgtttcttatcagaccgtttcccgggtgattaacgacgcggaacacgtttctgcccgtacgcgggaaaaggtccgacaggccatggcggcgctacactatgtacctaaccgtggcgcgcagcagctggccggaaaacgcacccgcacgctggggctgatgaccagcgatctggcgctgcatgcgccgtcgcaaatcgcctcagctgtaaaatcccgggcagtggagcagggggctggcgtgctcatctctatggtggagcagcccgcgcagtgtcaggctgctttgcaggagttactggcgcagcgcgtggaggcgctgctggtgaacgttccgctggaagatgctcaggcagaaatgcttcaggaaatggcctcgccgaccccggttctttttcttgatgtttcccccacagctcgggttaacagcctcgttttcaatgctgaacagggcgctggcttgggggcggagcatctgctttcgctggggcaccggcgaattgcgctgctcgccgggccggaaagttctgtctctgcccgggctcgcctggcgggatggaaaactacgctggctcaggctggcgtggaggcgtttgcggtggcgcagggcgactggagcgcggcttcaggctacgagaaagggcatcagctcctggcgggcgcacagctgccggaggcgatccttgtggcgaacgatcagatggcgcttggcgttttacgcgcctgtgcggaaaaaggcgttgcggtaccggggcagatctcggttgtcgggtttgatgatacggctgacagcgcgtggttttcccctccgctgaccaccgttcggcaggcgttccgcgaggccggtgaacgcagcgtggagtggctcctggcaacagcccgtcacgccgaaccctggcaacaacaacttcccgttacgttgatcgttcgtcattccaccgcgccgcgcgccgtacaacaggccgatcgtgaagagctggcgcaacagctaagaacgctggcgctgctggcggagaaactggcgcgcagctag

SEQ ID NO: 522785 - DNA, 612 bp, Stenotrophomonas maltophilia
atggtgcgtcgtctggtacaactttatgtcggtttagccctttacggactttcaaccgcgatgtttattcgttcggatctgggtgttgatccctggaatgtttttcaccttggcgtcgccatccaggccggaatgagcatcggcacggtgatgattttaaccggggctgcggtgctgctgctatggatcccgctgcgtcagcttccggggctgggtacggtcagtaacgtgatttgtattggcctggcggcagatgcgtcaatggcattgatcccggaactcacctcgctgcccgtgcgcatcaccctgctggtttccggcattgtggttaacgcccttgccaccggaatgtatatcggcgcgggttttggcgcaggcccgcgcgacggtctgatgaccggcatacacgcccggctgggctggtcgatccgcagcgtgcgtaccgcaatcgaggtgaccgtgttgatcgtcggctatctcctcgggggagcgtttggcgtcggaaccgtgctatatgcgttaaccatcggcccgctgatccagctttgtttgccgtggtttcgccagagaccgcgcatgcagaaagccgcgcagccggagcggattgcttaa

SEQ ID NO: 522786 - DNA, 1422 bp, Stenotrophomonas maltophilia
atgtcatcacgtcgttttggaagccagtctctggttcgcctgttagggcactggcaacaaacctcttcccgcaccccgcggtggcgccagctggctgacgcgttacgcctgttaattctggatggcaggctggcgctaaacacgcgcctgcccggagagcgggaactggccgccgcactggacgtcagccgcaccaccatcagcagcgcgctggcgcatctgcgtgaagagggttttctggagagccgtcacggcagcggttcccgggcgatcctgccagacagccgggccgtgcccacgctttccactgccagcgcggcgctggatctctctaccgccgcgctcaacgcagggccagagatccatcaggcctacacccacgcgctgacgaccattacgccgaatctggcgctgaccgggtacgatcagcttgggcttccagcgctgcgtgaagctatcgccgcccgctacaccgcacgcggtctgcccacccgggcagacgaagtgatggtggtgaacggtgccgtcagcggcttcgccctgatcttaagaatgatgaccgggcccggggatcgcgtggtggtggatcatcccacctacccgctggcgatagccgcgattcagggggcgcaatgccggcccgtgggcgtctcgctgccagaaacgggttgggataccgatggttttgccgcaacgcttgcccagacagccccgcgtctggcctatctaatgccggattttcataatccgaccgggcgctgcatggatgccgcgacgcgtcagaccataaccgacatcgccgcgcaaacccgcaccacgctggtggtggatgaaaccatggtcgatctctggttcgatgctcccccgccgccgccgctggccgcctttaacccggaggccgcggtgattacgctgggttccgcaggcaaaagcttctggggtgggcttcgtctcggctggatccgcgcctcgtcccgcactatcgccacgctcgcacagacgcgcgatacgctggatctgggctctccggtgctggaacagctggccacgctgtggcttatcgaaaacagtgaaaccttcctgcctgcccggcggcaaatgctggcagaacggcgtgaccgctgcggccagatgttacgggagcatttccccgaatggcgatttcaggaagcggagggaggactttcatactggattgaactacccggcatgctggcgactcaactggcggcacgtgcggaaacgacaggcatcattatgggcaccggcacgcgctttgggctttcaggcgcgtttgaccgctacctgcgtatgcccttctcactcaattcgccagaacttgaagaggcattactgcgtatcaaaccgctgtggcttgccttaaataaaagtacaccgccagtaaaacggagcctggtgtaa

SEQ ID NO: 522787 - DNA, 216 bp, Stenotrophomonas maltophilia
atgaaacaacaactatcgacagccagtgattacaacgaggcctgcaatctgttacgttcgggctatgtgaaacatgttcgtcttggctggaatgtaggaagcgatgagttctttcgaattgcgtctgactggtgtgataccggtgcaaaaataaagaaagaaggtgaaaatttcattatttcgctgaaaggcttcccgattcctcctcaacattaa

SEQ ID NO: 522788 - DNA, 252 bp, Stenotrophomonas maltophilia
atggtaactgcggttttaaacgttaaaattgatgaagcgctaaaagaaagactccgccactatgcggaagacaataatgagaatttaagcgtgaccacagagaaactgctgctgctggcatttgaagcagtagaagaggcgggagtatcggaagaggatgttgataatcagcatacggaagaagagagcgtaaatccatttactcctaaagaaatcaaagcactacgtaaacttctgaagaagagaaaatga

SEQ ID NO: 522789 - DNA, 312 bp, Stenotrophomonas maltophilia
atggacgaacacgactctttcccacagcgagtgtggcaaatcgtggcctcgattccggaaggctgtgtcacgacctatggggaggtcgcccgactggcgggctctccgcgcgcagcgcgtcaggttggcggcgtgctaagaaggcttccggagggaagtacgttaccatggcaccgggtcgttaatcgccatggcgccatttccctcaccgggccagacttgcagcgccagcgtcaggcattactctcagaaggggtacaggtgtccgggacgggacagatagatatgcagaagtatcgctgggaatactga

SEQ ID NO: 522790 - DNA, 528 bp, Stenotrophomonas maltophilia
atgaaactcgtgcctatgttaagcggtgttgcaatggcggtggcgttgtccgcctgtgcggataagagtgccgatgtagcggtaccaacggcgaccccaaacgggattaacaccctttcacagcaagctattcgacagcctaacgtgtccggtaccatctggatcaaacagaaagtcgctctgccgccggacgcggttttaacggtcacgttatccgatgcgtcactggcggatgcaccgtctaaagtccttgcacagcgtgcagttcgtacagagggtaaacaggcgccgttcagcttcgtgctgccgtacaacccgtctgacgttcagcctaacgcgcgtatcctcctgagcgcggcggtaacgatcaacgataagctggtctttatcaccgataccgtgcaggaagcggtcaacaaagggggcaccaaaatcgacctgaccctggtcccggtgcagcagactgaagtgcctgtggcaacgcagaccaatcagccgaccttgcctacaccgccaacacagttgtaa

SEQ ID NO: 522791 - DNA, 702 bp, Stenotrophomonas maltophilia
  misc_feature (541)..(550): n is a, c, g, or t
atgagtcaggcactgaacaatctgctgacattgctgaacctggaaaaaatagaagaagggctttttcgcggacaaagcgaagatttaggcttacgccaggtttttgggggccaggtcgtggggcaagcgctatatgccgctaaggagaccgttccggcagaccgtctggtgcactcattccacagctactttttacgccccggtgacagcgctaaaccgattgtgtacgacgtggaagttctgcgtgacggccaaagcttcagcgctcgccgtgtggcggccatccagcatgggaagcccatcttctacatgaccgcctccttccaggcgccagagccgggctatgagcatcaaaaacagatgccgtctgccccatcgccggacgatctgaaatcggaaaccgaaattgcccgcgcactcgcacatctgctgccgccgcaggtaaaagagaagtttctgtgcgataaaccgctggagatccgcccggtcgaatttcataacccaatgaaggggcatactgctgagcccacccgccaggtgnnnnnnnnnngtgtggatccgcgccaacggcagcgtaccggcagacttgcgcgtgcatcagtatctgctgggttatgcgtcggatttcaacttcctgccggttgcgctacagccgcacggcgtgggattcctggaaaaagggatgcaggtcgccacgattga

SEQ ID NO: 522792 - DNA, 1287 bp, Stenotrophomonas maltophilia
atgatgaaagcaacaatgaaaacaggtctgggttcgctggcactgctgccgggcctggcaatggctgcacctgctgtggcagacaaagccgataatgcctttatgatgatttgcaccgcgctggtgctgttcatgacgattccggggatcgcgctgttttacggcggcctgatccgcggcaagaacgtactctccatgctgacgcaggttgccgtcacgttcgcgctggtgtgcgtgctgtgggtggtttacggttactcgctggccttcggggagggcaacgccttcttcggcaacgttaactgggcgatgctgaaaaatatcgaactgaccgcggtaatgggcagcttctatcagtatattcatgtcgcgttccagggctcattcgcgtgcatcaccgtggggctgattgtgggcgcgctggctgagcgtatccgcttctctgcggtactgattttcgtggtggtctggctgacgctctcctatgtcccgattgcgcatatggtctggggcggtggtctgttggcttcccatggcgctctggactttgcgggcggcaccgttgttcacatcaacgccgccgtagccggcctggtaggcgcatacctgattggcaagcgcgtgggcttcgggaaagaagcatttaagccgcacaacctgccgatggtctttaccggcaccgccatcctctactttggctggttcggcttcaacgcaggttcagccagcgccgctaacgaaatcgccgcgctggccttcgtgaataccgtggtggcaactgccggggccatcctctcatgggtatttggcgagtgggccgttcgcggcaagccatccctgctgggtgcctgttctggggcgattgccggtctggtaggtattacgccagcatgcggttacgtgggcgtgggcggcgcattgctgatcggtatcgtcgcgggtctggcggggctgtggggcgttaccgcactgaaacgtattctgcgcgttgacgatccgtgtgatgtattcggcgtacacggtgtgtgcggcattatcggctgtatcatgaccggtatctttgctgcacaatctttgggcggcgtgggttatgctgaaggcgtgaccatgatgcatcaggtgctggtccagctggaaagcatcgcgatcaccgttgtctggtccggtgttgtggcctttatcggttacaagctggctgatatgaccgttgggctgcgcgtgccggaagagcaggagcgcgaaggcctggacgtcaacagccacggcgagaatgcgtacaacgcataa

SEQ ID NO: 522793 - DNA, 339 bp, Stenotrophomonas maltophilia
atgaagctggttacggtggtaatcaaaccattcaaactcgaagacgtgcgtgaagcgctgtcttccatgggtattcagggactgactgtcaccgaagtgaaaggctttgggcgtcagaaaggtcatgccgagctttatcgcggggcggaatacagcgttaacttcctgccaaaagtgaagattgatgtggcgattgccgacgatcagcttgatgaggtgattgatgtcgtcagcaaagcggcctacaccggaaaaattggcgacggcaaaattttcgttgccgaactacagcgcgtcattcgcatccgtaccggcgaatctgacgaagcggcgttgtaa

SEQ ID NO: 522794 - DNA, 1782 bp, Stenotrophomonas maltophilia
atgcgtaagtttggacagatgtggccgacgttaaaacggctgctcgcctatggctcaccgtggcgcaaaccgctttccattgccgtgctgttactgtggatcgccgcgattgcggaggtgaccggtccgctgcttatcagctattttatcgataacatggtggcgaaaagctatctgccgctggggctggtggcggggctgggtgtggcgtatgtcgggctacagctgacggcggcggggctgcactatgcgcagtcgctgctgtttaaccgggccgccgtgggcgtggtccagcagctacgcacggatgtgatggatgccgcgctgcgccagccgctgagcgagtttgatacccagccggtcgggcaggttatttcgcgcgtcaccaatgacaccgaggtgatccgcgacctttatgtgaccgttgtcgcaacggttctgcgcagtgccgcattgattggcgcgatgctcgtggcgatgttcagtctggactggcggatggcgctggtggcgatcgctattttcccggcggtgctgattgtgatggtaatttaccagcgctacagcacgccgattgttcgtcgcgtgcgcgcttaccttgcagacatcaatgatggcttcaacgaagtgatcaacggcatgagcgttatccagcagtttcgccagcaggcgcgttttggcgagcggatgggagaagccagccgttcgcactatatggcgcggatgcagacgttacgtctggacggcttcctgttacgcccgctgctgagcctcttctctgcactggtgctgtgcgggctgttgatgctgtttggcctgacgacgcgcggaaccattgaggtgggagtgctgtacgcgtttatcagttaccttggccgtcttaacgaaccgctgattgaactcactacgcagcaatcgatgctgcaacaggcggtagtcgcgggtgagcgtgtgtttgagctgatggacaggccgcgtcagacctatggcgatgatgaacgtccgctggaaagtggatccatagcgtttgatcatgtctcgtttgcctaccgcgacgatcagcttgtcttgcaggatatcaacctcgaggtaccgtcgcgcggttttgtcgccctggttgggcataccggcagcggcaaaagcacgctcgccagtttgctgatgggctactatccgttgacgcagggggagatccgtctggatggacggcctctttccgcgcttagccacaacgcgttgcgtaaaggcgtcgcgatggtgcagcaggatccggtagtgctggcggataccttttatgccaacgtgacgctgggacgatctttcacgcctgagcaggtatgggaggtgctggaaacggtgcagctggcagatctggcgcgcgggttaagcgaggggatcaatacccggctgggcgagcaaggcaataacctctctgtcgggcaaaagcagctcctggcgctggcgcgcgtgctgattgagacgccgcaggtgttgattctggatgaagcgaccgcaagcatcgactccggtaccgaacaggcgatccagctggcgctggctgccgtgcgggatcgcactacgctggtggtgatcgctcaccgcctctcaacaatcgtcgatgccgataccattctggtgctgcaccgtggccaggccgttgaacggggaacgcacaaagcgctgctcgaggcgaaaggacgctactggcagatgtatcagttgcagctggcaggcgacgagctggccgccagcgtgcgcgaggaggagtcgctcagcgcctga

SEQ ID NO: 522795 - DNA, 1755 bp, Stenotrophomonas maltophilia
gtgcgattatttgcccaattaagctggtactttcgtcgggagtggcaacgctacctcggcgcggtggccctgcttattatcattgccattttgcaactgatcccgcccaaagtggtgggatacgtcgtggatggtgttacggaacaacattacaccgccgcacgggtgatgatgtgggtcggtacgctggtgttgacggccgtggtggtttacctgctgcgttatgtctggcgcgtgctgctgttcggcgcgtcctatcagcttgccgttgagctgcgcgaggacttttaccgccagctgagccgccagcaccctgagttttatctgcgtcaccgtaccggggatctcatcgcccgcgccactaacgatgtggaccgtgtggtgtttgccgccggtgaaggggtgttaacgctggtggattccctggtgatgggctgtgcggtactgattgtgatgtctacgcaaattagctgggagctcacgctgctggcgctgctgccgatgccgctgatggcgctggcgattaaccgctacggcgagcagctccatgaacgctttaagctggcgcaggcggcgttctcgtcgttaaacgatcgcacccaggagagcatgaccagcatccgcatgatcaaagcgtttggtctggaagacaggcagtccgcgctgtttgcggccgacgccgccgataccggcgcgaaaaacatgcgcgtggcgcgtatagacgcccgctttgatccgacaatttatattgcgattggcatggcgaacctgctggcggtgggcggcggcagctggatggtggtgcgaggcaccatgaccctcgggcagttaaccagctttgcgatgtacctcgggctgatgatttggccgatgctggcgctggcctggatgtttaacatcgttgaacgtgggagcgccgcctacagccgtatccgcgccatgctggcggaagtaccggtagtgaacgatggcagcgagccggtaccggaaggtccgggtgttctgaaggctgatatccgcgtcttcatctacccgcaaacggaacatccggtgcttgaaaacgtcagtttcacgctgcgtcctggtcagatgctgggcatctgcggcccgacgggctccggtaaaagcaccattctgtcactgattcagcgccattttgacgtgagcgaaggcgatatccgtttccatgacgtctccctgccacgtctgctgctggatgactggcgcagccgcctggcggtcgtcagccagacgccgtttttgttttcagacaccatagccaacaatatcgcgctcgggtgcccgacggcgacacaggaccagatcgagcatgtggcgcgcttagccagcgttcatgaggatattctgcgcctgccgcagggctacgacacagaagtgggtgagcggggcgttatgctctccggtggacaaaaacagcgtatctctattgcccgcgcgctgctgctggacgctgagatcctgattctggatgatgcgctgtccgcggttgacgggcgtaccgagcatcaaattctgcataaccttcgccagtggggggaggggcgcacggtcatcatcagcgcgcaccgtctgtcggcccttaccgaagccagtgaaattctggtgcttcagcacgggcatattgcccaacgtggtcaacatgaacagctcgccgggcaggccggctggtatcgggatatgtaccgctatcaacagcttgaagctgcgctggatgaggaggtcaccgatgcgtaa

SEQ ID NO: 522796 - DNA, 459 bp, Stenotrophomonas maltophilia
atgttagataaaattgatcgtaagctgctttctttgctgcaaagcgactgcaccctctctttgcaggcgctggcagatgccgttaatctgaccaccacaccgtgctggaagcgactcaagaagctggaagatgatggcattctgctgggacgtgtggcgctgctggaccccgaaaaactggggcttggactgaccgccttcgtcctgataaaaacgcagcatcatagcagcgaatggtacagccgcttcgtcacccaggtttccgacatgcccgaggtgctcggtttctggcgcatggcgggggaatacgactatctgatgcgcgttcaggtggcagacatgaagcgctacgatgatttttacaagcggctggtcaatagcgtaccgggcttgtccgatgtcacctccagtttcgccatggaacagattaaatacaccacagcgttacccattgaataa

SEQ ID NO: 522797 - DNA, 1047 bp, Stenotrophomonas maltophilia
atgaatagcacctgggttaaacatgccatcagcgaaataaatgccgactatcagcgctcggcagacacccacttgatccgcctgcctctgcctggatttcccggcattcagctttacctgaaggatgaaagcacccatcctaccggcagcctgaagcatcgcctggcgcgttcactctttttatacggtttatgtaacggctggattaaagaaggcaccacgattattgaatcgtcgtccggatcaactgccgtctcagaggcctactttgcccgcctgctgggcctgccgtttatcgctgtgatgccctcctgcacggcgaaacgtaaagttgaacagatcgaattttacggcggacgctgccactttgtggaaagcgcctgcgaaatctatgcggcctccgaaatgctggcccgcgaactaaatggtcactatatggaccagttcaccttcgccgagcgcgccaccgactggcgcggcaataataacattgcggacagcattttccgccagatgacccacgagccacatcccgtcccctcttacattgtcatgagcgcgggcacgggcggaacctccgccaccatcggacgttatatccgctgtcagggttatgatacgcagctgatggtggttgaccctcagaactcggtgttccttgattactggcaatctcgcgatgccagcctgcgcagccctgtggggagcaagatcgaaggaattggtcgcccgcgcgtcgaaccctcgttcattccggacgttgtggatgagatgctccgcgtgccggacgccgccagcgtcgcgacggcgcactggctggagacacagcttggccgtaaggtcggagcctctaccggcaccaatatgtggggggcgctacaactggccgcgagaatgcgtgaagaaggccttagcggctctgtcgtcacgctgctgtgcgacagcggggaacgctacctggacacctattacaacgcagaatgggtacaggccaatattggcgatgttgaaccgtggaaagcgcagattttgcatctggtgaaataa

SEQ ID NO: 522798 - DNA, 819 bp, Stenotrophomonas maltophilia
atggctcggctcgctgcatttgatatggacggcacgctgttaatgccggatcaccgtttaggggagaaaaccctgaacacacttaagcgcctgcgcgagcgtgaagtcaccctgacgtttgccactggtcgtcatgtgctggagatgcgccatctgctgggaacatttgccctcgatgcgttcctgatcaccggcaacgggacgcgcattcactccgtcgagggcgatgtgctgcaccgtcaggatctggatccggaagtggcggacatcgtcctgcacagcacctgggatacgcaggccagcgtgcatgtttttaacgatgaaggctggtttaccgggcgtgagatcccggccttgctgcacgctcacgtttacagcggctttaaatatcagctcatcgatttgcgccgcattccggcacacaaggtaaccaagatctgcttctgcggcgatcacgacgatctctgccgcctgcgtattcagcttaacgaggcgctgggcgaccgggcgcacctgaccttctcggcggtggactgtcttgaagtgctgccggtgggctgtaacaaaggatctgcgctggcggtgctgagcgatcgtctggggctgacgatgcaggactgtatggcctttggtgacgccatgaacgaccacgagatgctgagcagcgtaggccgtggtctgattatggggaacgcgatgccgcaacttatcgccgcgctcccgcatttaccggttatcggacactgtcgtaacgaagcggtgtcccattttttgacgcattggctggacaaaaataacctcccatattcccccgaatag

SEQ ID NO: 522799 - DNA, 1701 bp, Stenotrophomonas maltophilia
atgcgccagcttaaccgtcttaaccagtatcagcgtctgtggcacccctccgccggcgcaacgcagcaggtgaccatcagtgaacttgccagccgctgcttttgcagcgagcgacatgtacgcaccctgctgcgccaggcgcaggaggcgggctggctaagctggaacgcccgctccggacgaggaaagcgtggggaattacgctttcacgtcaccccggattcgttgcgtaatacgatgatggaagaggccctgaaaagtggacagcagcacaacgcgctggagctggcccagctcgcgcctgaagatttgcgatcgctgctgcatccgtttatgggcgggcaatggcagaacgatacgccgacgctgcgtattccctactatcgctcgctggagccgcttcagccggggtttctccctggccgggcggagcagcatctggcgggacaggtattctctggtttgacgcgttttaatggtaacagcagtgaacccacgggcgatctggcgcatcactgggaagtctctgctgacggcctgcgttggcatttctacatacgctccaccctgcactggcataacggcgataaaatagagacggcacagctcaggcaaagcctgacggcgctgctatcgcagcccggcatggacacgcttttccgcagcgtcttacgtatcgaaaccacgcatccgcaaagcctgacgtttattctccatcaacctgactattggctggcgcacaggctggcaacctactgtagccgtctggcgcatcctgattaccccgtggtgggcagcggtccctttcggctgagcgtttttgagcctgaactggtgcgtctggaaagccacgagcagtatcaccttggtcatccgttacttaaggctatcgagtactggatcacgccccagctttttgactacagtctgggcaccagctgtcgccacccggtgcaaatcgccattggcgaggccgacgagctggccagcctgcggctggtgagtaacagcaccagtctgggcttctgctacctcacgctgaaacaaagtccgcgtctgagcgaacttcaggcaaagcggctgattaatatcattcatctctcaacgctgctgcacacgcttcccctgaacgaagggctcatcactcctaccgaggaactgcttcccggctgggcgatcccccagtggactgatttaaccgacgttgtgctgccagaggcattgacgcttgtctaccacctgccggttgagcttcacaccatggccagtcagttaaaagcataccttgcgcggcaggggtgtgaactgaccgtcatctttcacgacgccaagacgtgggacggttgccagcagcttgccgatgcagacatcatgatgggagacagactgattggcgaagcgccagcgtacacccttgagcaatggctccgctgcgatgcgctctggccgcatctgctgagcgcaccggcatacgcccatttgcaggccacgctggatgcggtgcagacgcaggccgacgaacgtgaccgacacgcaggacttcaggctatcttcagccggttaatggagacagccgtcctgacgccgctttttaactaccagtatcaaatcagcgcgcctccgggggtcaacggcatacgccttaacactcgcggctggtttgacttcaccgaagcctggcttcctccaccaaacgcgtga

SEQ ID NO: 522800 - DNA, 696 bp, Stenotrophomonas maltophilia
atgaaacgtgccgtcgtcgtgttcagcggaggacaagattccacaacctgcctgattcaggcacttcaccagtatgatgaagtgcattgcgtcacttttgattatggtcagcgtcatcgcgctgaaatcgatgtcgctcgtgaactggccctcaaactgggcgcccgcgctcataaagtgctggacgtgacgctgttaaatgaactggccgtcagcagcctcacccgcgacagcattccggttcctgattacgaaccggatgccagcggcattccgaataccttcgtacctgggcgtaatattctcttcctgaccctgacggcaatctatgcctaccaggtgaaagccgaagcggtgatcacgggcgtgtgtgaaaccgacttctctggctacccggactgtcgggatgaattcgtgaaagcactcaatcacgccgtcgatctgggtatggcaaaagagacccgcttcgaaacgccgctgatgtggctggataaagccgaaacctgggcgctggccgactactggggcaagctggatatcgttcgcaacgagaccctgacctgctacaacggcattaaaggggacggctgcgggcagtgtgccgcctgtaacctgcgcgcgaacggtctgaatcattttcttgcggataaagcgggcgtgatggccgcgatgcagaaaaagaccggtctgaaataa

SEQ ID NO: 522801 - DNA, 399 bp, Stenotrophomonas maltophilia
atgcagacacaaatcaaagtccgtggttatcacctcgatgtttaccagcacgtcaataacgcccgctaccttgaatttcttgaagaggcgcgctgggatggcctggagaacagcgaaagtttccagtggctgaccgcacacaacatcgcgtttgtggtcgtcaacatcaacattaactaccgccgcccggctgtgctgggggatgtgctcaccgtgaccagtgaggtccaacaactgaatggcaaaagtggtgtattgagccaggtcgtcacgcttgagccagaagggcaggtggtggccgatgcgctgatcacctttgtctgtatcgatctcaaaacccagaaagcgttgccgctggaaggggagttgcgcgaaaagctggagctgatgatcgcgtaa

SEQ ID NO: 522802 - DNA, 381 bp, Stenotrophomonas maltophilia
atgaaatgtggaatcaaagcactgttaattacactggctattgccacttccgggatgagtgcgggcgcgctggcggcgtcgccctcggctaaagcgcaggctgcacagaccaaaacagactcagctgcgcaggctcatacgcaatcaaaagcgactgatgccggtaaaagtgcagaggatgacggtacgcgagtcagcatcaattcggcatcggcagaagagctcgcgcgcgtgatgaacggtgtgggacttaaaaaagcccaggccattgttagctaccgcgaggagtacggtcctttcaaaacccttgacgatctcaagcaggtgccgggtatgggcagcgcgctggttgagcgcaatctcgcacacctgacgctgtaa

SEQ ID NO: 522803 - DNA, 189 bp, Stenotrophomonas maltophilia
atgcagggtaacgtggtgattctggcgctggatgaagtcaaagccggcacgctgccagacgcgcagaagaaggccatggttcagggaattactcagaataatgcccagattgctttcgaagcgatgatgagcaacctgcgtaaagaagccaaaatcaagctgggtgatgtggtgacccaggagcaataa

SEQ ID NO: 522804 - DNA, 1701 bp, Stenotrophomonas maltophilia
  misc_feature (1667)..(1676): n is a, c, g, or t
atgatggacagcttacgcacggctgctaacagtctcgtgctcaagattattttcggtatcattatcgtgtcgttcatattgaccggtgtgagtagttacctcatcggcggtggcgcgaactacgccgcaaaagtgaatggccaggaaattagccgtgggcagttcgagaacgcttttgctggtgaacgtaaccgcatgcagcaacagctgggcgaccaatactctgaacttgcagccaacgaaggctatatgaaaaacctgcgtcagcagacgctgaaccgccttatcgacgaagcgctgctggaccagtacgcgaaaagcctcggtctgggcatcagcgatgagcaggttaaaaaagccatcttctcgacgcaggctttccagtctaatgggaagttcgacaacgcgcgttacaacagcattgttaaccagatggggatgacggctgaccagtacgcacaggcgctgcgtaaccagttgaccacgcaacagctgatcaacgcggtggtgggcaccgatttcatgctgaaaggcgaaactgaagcgctggcggcactggtagcgcagcaacgcgtggtgcgtgaagcgacgattgatgtcaatgcactggcggcgaaacagcaggttagcgacgctgaagttaatgcttactacgagcaaaacaagaacaacttcatctctcctgaacagttccgcgtaagctatatcaagctggatgcagccgcgatgcagaaaaacgcgactgacgccgagatccagtcttattacgaccagcatcaggatcagttcactcagccgcagcgtaaccgttacagcgtgatccagaccaaaacggaagcagaagcaaaagccgtgctggacgagctgaacaaaggcgctgatttcgcgaccgtggcgaaagcaaaatccaccgacattatttctgccaaaaacggtggtgatatgggctggctggaagattccactaccccggacgagctgaaaaatgcgggtcttaaagagaaaggccaactgtctggtgtaatcaaatcctccgttggcttcctggtggcgcgtctggacgatgtcgtggcggcgaaaaccaagccgctggctgacgttcgtgatgatatcgctgcgaaagtgaagcaggagaaagcgctggacgccttctatgctctgcaacagaaagtgagcgatgccgcaagcaacgacaacgaatcactggcgggcgctgagcaggctgctggcgtgaaagcggttgagacgggctggttcagccatgaaaatctgccggaagaactgaacttcaaaccggtttcagatgccattttcaatggtggtctggtaggtgagaacggtacgccgggcagcaactcagacatcattaccgttgacggtgaccgtgcgttcgtactgcgcgtcagcgagcacaaagccgaggcagtgaagcccctggcgcaagtgaaagatcaggtggtggcgctggtcaaacacaacaaagcggcacagcaggcaaaactggatgcagagaaaattctggccgatctgaaagccggtaagaacgatgcactgaaagcggctggcctgaactttggcgaagccaaaacgctgagccgtaccggtcaggatcctgtcagccaggcggcgtttggtttgagcctgccggcgaaagacaaacctgtctnnnnnnnnnngcaccacgaccgatatgcagggtaa

SEQ ID NO: 522805 - DNA, 273 bp, Stenotrophomonas maltophilia
gtgaataaatctcaactgattgacaaaattgctgcgggtgctgatatttctaaagctgcagctggacgtgctttagatgctttaattgcttctgttactgaatctctgcaagctggggacgacgttgcactggtaggcttcggtacttttgcggttaaagagcgtgctgcccgtactggccgcaacccgcagaccggtaaagagatcaccattgctgccgctaaagtgccgggtttccgtgcaggtaaggcgctgaaagacgcagtaaattga

SEQ ID NO: 522806 - DNA, 2355 bp, Stenotrophomonas maltophilia
atgaatcctgagcgttctgaacgcattgaaatccccgtattgccgttgcgcgatgtggtggtttatccgcacatggtcatacccttatttgtagggcgggaaaaatctatccgttgcctcgaagccgccatggatcatgataaaaaaatcatgttggttgcgcagaaggaagcatcaacggatgagccgggtgtaaacgatcttttcaccgtcgggaccgtggcctctattttgcagatgctgaagctgccagatggcaccgtgaaggtgctggtggaaggcttacagcgcgcgcgtattaccactctgtcagacgatggcgagcacttctctgcgaaggcagagtaccttgattcaccggaacttgatgagcgcgagcaggaagtgctggtacgcaccgcgatcagccagtttgaaggctacatcaagctgaacaagaaaatcccacctgaagtgctgacgtcgctgaacagcatcgacgatcctgcacgtctggcggataccatcgctgcgcacatgccgctgaagctggctgacaaacagtccgtgctggaaatgtccgacgttaacgaacgtctggaatacctgatggcgatgatggagtctgagatcgatctgctccaggttgagaagcgcattcgcaaccgcgtcaaaaagcagatggaaaaatcgcagcgtgagtactatctgaacgagcaaatgaaagccattcagaaagagctcggcgagatggacgatgcgccggatgaaaacgaagcgctgaagcgtaagatcgacgcggcgaagatgccgaaagaggcgaaagagaaagccgaagctgagttgcagaagctgaaaatgatgtctccgatgtcggcggaagcgaccgttgtacgcggctacattgagtggatggttcaggttccatggaatgcccgcagcaaggtcaaaaaagacctgcgtcaggcacaggaaatccttgataccgaccactatggcctggaacgtgtgaaagaccgcattcttgagtacctcgcggtacagagccgtgtgaacaaaatcaaaggtccaatcttgtgcctggtagggcctccaggggtgggtaaaacctctctgggccagtccatcgccaaagcgaccggacgtaagtacatccgtatggcgctgggcggcgtgcgtgatgaagcggaaatccgcggtcaccgccgtacctatatcggttctatgccgggcaagctgatccagaagatggcgaaagtgggcgtcaaaaacccgctgttcctcctcgacgagatcgacaaaatgtcttcggacatgcgtggcgatccggcgtcggcgctgcttgaagtgcttgatccagagcagaacgtggcgttcagcgatcactatctggaagtcgactacgacctgagcgatgtgatgttcgtggcgacgtcgaattccatgaacattccggcaccgctgctggaccgtatggaagtgatccgtctgtccggttataccgaagacgagaagctgaacattgctaagcagcacctgctgccgaagcagattgaacgtaacgcgctgaaagctaacgagctgaccgttgaggacagcgctattgtcggcattattcgttactacacccgtgaagcgggcgtgcgtagccttgagcgtgagatctctaaactgtgccgtaaggcggttaagcagctgctgctggataagagcctgaagcacatcgtgattaacggcgacaatctgcatgcttacctcggcgttcagcgcttcgactatggccgtgcggacaacgaaaaccgcgttggtcaggtgactggactggcgtggacggaagtgggtggcgatctgctgaccattgaaaccgcctgtgtaccgggtaaaggcaagctgacctacactggctcgctcggtgaagtgatgcaggagtccatccaggcagcgttgaccgtggtgcgtgcgcgcgcggaaaaactgggtatcaacccggatttctacgaaaaacgcgacattcacgttcacgttccggaaggggcgacgccgaaagatggcccaagcgcgggtattgctatgtgtacggcgctggtttcctgcctgacggggaacccggtccgtgctgatgtggccatgactggtgaaattacgctgcgtggtcaggtactgcccatcggcgggttaaaagaaaaactgctggcggcacaccgtggtgggatcaaaaccgtattgattccttacgagaataaacgcgatctggaagagattccggacaacgttattgccgatttgcagatccatccggtgaaacgcattgaggaagttctgactctcgcactgcaaaatgaaccgtccggaatgcaggttgtaaccgcaaaatag

SEQ ID NO: 522807 - DNA, 1275 bp, Stenotrophomonas maltophilia
atgacagataaacgcaaagatggttcgggcaaactgctgtactgctctttttgcggcaaaagccagcatgaagtgcgtaaactgattgccgggccgtccgtgtatatctgcgacgaatgcgtcgatttatgtaacgacatcattcgcgaagagattaaagaagtcgcgccgcaccgtgagcgcagcgcgttaccaacaccacacgagattcgccaccacctggacgactatgtcattggtcaggagcaggcgaaaaaagtgctggcggtggcggtatacaaccactacaagcgtctgcgtaacggcgataccagcaatggcgtggaactgggcaaaagtaacattctgctgatcgggcctacgggttccggtaaaacgttgctggcagaaacgctggcgcgcctgctggatgttccgttcaccatggcggatgccaccaccctgaccgaagccggttatgtgggcgaagacgttgaaaatattatccagaagctgctccagaagtgcgattacgacgtacagaaagcccagcgcgggatcgtctatatcgatgagattgacaaaatctcccgtaaatcagacaacccatccatcacccgtgacgtctcgggcgaaggcgtgcagcaggcgctcctgaagctgattgaaggtacggttgcggctgttccaccgcagggtgggcgtaaacatccgcagcaggaattcttgcaggttgatacctccaaaatcctgtttatctgtggtggtgcgtttgcaggcctggataaagtgatctctcaccgtgtggaaaccggctccggcattggttttggcgcaacggtgaaagctacgtctgaaaaaccaaacgaaggccagctgctggcgcaggttgaaccggaagatctgatcaaatttggtttgattccggaatttatcggccgtctgccggttgtggcgaccctgaacgaactgagcgaagacgcgctgattcagatcctgaaagagccgaaaaacgcgctgaccaagcagtatcaggcgctgtttaatctggaaggcgttgagctggaattccgtgacgaagcactggacgcgattgccaagaaagcgatggcgcgtaaaaccggtgcccgtggcctgcgttctatcgtggaagcagcattgctcgacacgatgtacgatcttccttctatggaagatgtcgaaaaagtcgtgatcgacgagtccgtcattggtggccagaccaagccgttactgatttacggtaaaccggaagcgcagcaggcatctggcgaataa

SEQ ID NO: 522808 - DNA, 615 bp, Stenotrophomonas maltophilia
  misc_feature (454)..(463): n is a, c, g, or t
atgtcatacagtggcgaacgagataactttgcaccccatatggcgctggtgccaatggttattgaacagacctcacgcggtgagcgatctttcgatatctattcccgtctgctcaaggaacgcgttatctttctgaccggccaggtggaagaccatatggctaacctgatcgtggcgcagatgctgttcctggaagcggaaaacccggaaaaagacatttacctgtacatcaactcgccgggcggtgtgattacggcgggcatgtctatttatgacaccatgcaattcatcaagccggatgtcagcaccatctgtatgggacaggcggcgtccatgggggctttcctgttaaccgcaggggcgaaaggtaagcgtttctgcctgcctaactcccgcgtgatgattcaccagccgctgggtggttaccagggccaggcgacggatattgaaatcnnnnnnnnnnaagtaaaagcgcgcatgaataaacttatggcgcagcatacgggtcaaccactcgagcagatcgagcgcgataccgagcgcgatcgcttcctgtctgcacctgaggcagttgagtacggcttagtcgactccattttgacccatcgtaattga

SEQ ID NO: 522809 - DNA, 720 bp, Stenotrophomonas maltophilia
atgatcccaggcttcgaagacggtatcaaaggccacaaagcaggcgaagagttcaccatcgacgtgaccttccctgaagaataccacgctgaaaacctgaaaggtaaagcagcgaagttcgtcatcaacctgaagaaagttgaagagcgcgaactgccagaactgactgaagaattcatcaagcgtttcggcgtggaagatggttctgttgcgggtctgcgtgctgaagtgcgtaaaaacatggagcgcgagctgaacggcgctgtacgtaaccgcgtgaagtctcaggcgattgaaggtctggtgaaagcgaacgacatcgacgttcctgctgccctgatcgacagcgaaatcgacgttctgcgccgtcaggctgcacagcgcttcggtggcaaccagcagcaagcgatggaactgccacgcgagatgttcgaagagcaagcgaaacgtcgcgttgttgttggcctgctgctgggcgaagtgattcgtacccacgagctgaaagctgacgaagagcgtgtgaaaggcctgatcgaagagatggcttctgcatacgaagatccatcagaagtgatcgagttctacggtaagaacaaagagctgatggacaacatgcgcaacgttgcactggaagagcaggctgttgaagcggtactggcgaaagcgaaagtaaccgaaaaagagacctctttcaccgaactgatgaaccagcaggcgtaa

SEQ ID NO: 522810 - DNA, 561 bp, Stenotrophomonas maltophilia
  misc_feature (518)..(527): n is a, c, g, or t
atgcaagtttcagttgaaaccactcaaggccttggccgccgtgtaacgattactatcgctgctgacagcatcgaaactgctgtgaaaagcgagctggtcaacgtagcaaaaaaagtacgtattgacggcttccgcaagggcaaagtaccaatgaatgttgttgctcagcgttatggcgcttccgtgcgtcaggatgtgctgggtgaactgatgagccgcaactttatcgacgcgatcatcaaagaaaaaatcaatccagccggcgcgccaaactacgttccaggtgaatacaagcagggcgaagacttcacctattccgtagagttcgaagtgtacccggaagttgagctgaaaggtctggaatcaatcgaagttgaaaaaccgatcgtttccgtgactgacgaagacgttgacggcatgctggataccctgcgtaagcagcaggcgaactggaaagagaaagaaggcgctgttgacgcggaagaccgcgtaaccatcgacttcaccggttcagtagnnnnnnnnnngttcagtagacggcgaagagttcgaaggcggtaa

SEQ ID NO: 522811 - DNA, 315 bp, Stenotrophomonas maltophilia
atgatacgtgaacagatagaagaaaaattaagggcagcgttcaaccctgtgtttctcgaagttgtcgacgaaagctatcgtcataacgtgccggcaggttctgaaagccacttcaaagtggttctggtcagcgatcgcttcacgggagaacgtttcctgaaccgacaccgcttgatctacagcaccttgacggaagaactctccacaaccgtacatgcgctggcgctgcatacctacaccattaaggaatgggaagggctgcaggatacggtattcgcatcaccgccttgtcggggtgcaggcaccatcgcctga

SEQ ID NO: 522812 - DNA, 579 bp, Stenotrophomonas maltophilia
atgttaaaaaaaatcttctttccgttggtagcactctttatgctcgccggttgcgcaaccccgccgacgaccattgacgtttcaccaaaaattaccctgcctcagcaggatccaagcctgatgggcgtgacggtcagcattaatggcgccgatcagcgtcaggaccaggcgctggcgaaagtgactcgcgacaaccagcaggttacgctgaccgcttcccgcgacctgcgcttcctgttgcaggaagtactggaaaaacagatgacctcccgtggctacatgattggcccaagcggcgcggttgatctgcaaatcatcgtgaacaacctgtacgctgacgtctcccagggtaacgttcgctacaacattgcgaccaaagccgatatctccatcatcgctaccgcgaagaacggcaacaagatgaacaaaaactaccgtgcaagctattccgttgaaggcgcattccaggcctccaacaaaaatatcgctaacgcggttaacagcgtgctgactgacaccattgccgacatggcacaggacaccagcattcacgacttcatcaagcagaacgcacgttaa

SEQ ID NO: 522813 - DNA, 1476 bp, Stenotrophomonas maltophilia
atgtccagtcactacttacgcattttccagcaaccgaaatcagctattctgctgatcctgggtttcgcctccggtttaccccttgcgctcacctccggcacgttacaggcgtggatgacggttgagaacatcgatcttaaaaccattggtttcttctcgctcgtcggccaggcttacgtctttaagttcctgtggtcgccagtgatggatcgctataccccaccgttcctcgggcgccgtcgcggctggttagtgatgacgcaggtgctgctgttgctcgccattgccgcaatgggtttccttgaaccgtcaacgcagctgcgctggatggccgcgcttgcggtggtcatcgccttctgctccgcctcgcaggacattgtttttgacgcctggaaaacggacgtcctgtcagcagaagagcgtggcgccggtgcggcaatcagcgtgctcggctaccgcctgggtatgctggtttccggcggactcgcactgtggcttgctgaccgctatctcggctggcagggcatgtactggctgatggccgcactgctgatcccctgcattattgccaccctgttcgcgcctgaaccgagcgatgtgatcccggttccacgctcgctggagcaggccgtcgccgcaccgctgcgcgacttctttggtcgcaataatgcctggctgatcctgctgcttattgtcctttataagcttggcgacgctttcgccatgagtctgaccactaccttcctgatccgcggcgtcgggtttgatgcgggcgaggtcggcgtggtgaacaaaaccctggggctgtttgccacgattgtcggcgcgctgtacggcggcgtattgatgcagcgcctgacgctgttccgcgctctgctgatatttggcatccttcagggcgcttcgaatgccggttactggctgctgtcgatcaccgacaagaatatgatcagtatggggacggcggtattctttgagaacctgtgcggcggtatgggcactgcggcatttgtcgccctgctgatgacgctgtgcaataagtcattttccgctacccagtttgcgctgctctctgccctttccgccgtcgggcgcgtatacgttggccccgtcgcgggctggtttgttgaagcctacggttggccgaccttttatctcttctcggtggtggcggccgtgccggggattttattgctgctggtctgtcgccagacgctggaatatacccagcggacggaacacttcatgccgcgcacggaatatcacgctgcctatcggtttgccctgcgtctgctaatggcaggttgtcttgtcctggtagggtggctcacggtgctcatcatgaatgcgactaccgacttgtcacttccttttgaaacccttctgcttgatgcaggtgtgtttctcgctctggcggggatcctgacgggtgggatgctggatttcatgtcattacgaaaaacgcagatgacatga

SEQ ID NO: 522814 - DNA, 948 bp, Stenotrophomonas maltophilia
atgagactcaggaaatacaataaaagtttgggatggttgtcattattcgcaggcactgtattactcagtggctgcgattctgcactactagaccccaaaggacagattggactggaacaacgttcattgatactgacggcttttggcctgatgttgattgtggttattcctgccatcttgatggctgttggtttcgcctggaagtatcgtgcgagcaataaagatgcgaagtatagccctaactggtcacactccaataaagtggaagctgtggtctggacggtacctattctgatcatcctgttccttgctgtactgacctggaaaaccactcacgcacttgagccgagcaaaccgctggttcacgatgaaaaacccattactattgaagtggtctccatggactggaaatggttcttcatctatccagaacagggcattgctaccgtgaatgaaatcgccttcccggcgaacactccggttcagttcaaagtgacctccaactccgtaatgaactccttcttcatcccacgtctgggcagccagatttacgcgatggccggtatgcagactaacctgcatctgattgcgaatgaagcaggcacctacgacggtatctccgccagctatagtggcccgggcttctcgggtatgaagttcaaagctatcgctacgccagaccgcgcgactttcgaccagtgggttgcaaaagcgaagcagtctccaaacaccatgtctgacatggcggcgttcgaaaaagtggctgcacctagcgaatacaacaaggtggagtacttctctaacgtgaaaccgaatctgttcaaagatgttattggcaaatttatggatcacggcatgagcatggacatgacccagcctgaaggcgagcacaacacgcaccagggtatggaaggcatggacatgagccacgcggaaaccgctcactaa

SEQ ID NO: 522815 - DNA, 1992 bp, Stenotrophomonas maltophilia
atgttcggaaaattgacattggatgcggtgccgtaccatgaacccattatcatggttacgattgctgcaattatcattggtggcgcggccttagttggcctgatcacttacttcggtaagtggagctacctgtggaacgagtggctgacttcggttgaccacaaaaaactcggcatcatgtactgcatcgtcggtatcgtcatgttaattcgtggctttgcggatgcaatcatgatgcgtagccagcaggcgcttgcgtctgcgggcgaagccggattcctgccaccgcaccactacgatcagatctttaccgctcacggcgttatcatgatcttcttcgtggcgatgccgctggtaatcggtctgatgaacgttgtcgttccgctgcaaatcggcgcgcgcgacgttgcgttcccgttcctgaacaacctgagcttctggttcaccgttgtcggcgttatcctggttaacctgtcactgggtgtgggcgaatttgctcagaccggctggctggcctacccgccactttcgggaattgagtacagtccgggcgtgggcgttgactactggatttgggcgcttcagctctccggtgtcggtaccaccctgaccggtattaacttcttcgtgaccatcctgaagatgcgtgcaccaggtatgacgatgttcaagatgccagtatttacctgggcatctctgtgcgccaacgtcctgattatcgcgtcgttcccaattctgaccgtcaccatcgcgctgctgaccctggatcgctatctgggtacccatttcttcacgaatgatatgggtggcaacatgatgatgtacatcaacctgatttgggcctggggtcacccggaagtgtacattctggttctgccggtgttcggtgtgttctccgaaatcgcggcaaccttctcgcgtaaacgtctgtttggttacacctctctggtgtgggcaaccgtgtgtattaccgtcctgtcgttcatcgtctggctgcaccacttcttcaccatgggtgcgggcgccaacgtaaacgccttcttcggtattaccactatgattatcgcgatcccgaccggggttaagatcttcaactggctgttcaccatgtaccagggccgtatccagttccactcagcgatgctgtggaccatcggcttcatcgtgaccttctccgtaggtgggatgaccggcgtgctgctggcggttccgggcgctgactttgtcctgcacaacagtctgttcctgattgcgcacttccataacgttatcatcggcggcgtcgtcttcggctgcttcgcaggtgtgacctactggtggccaaaagcgttcggtttcaccctgaacgaaaaatggggcaaacgcgcgttctggttctggatcatcggcttcttcgtggcgtttatgccgctgtacgtgctgggcttcatggggatgacccgtcgtctgagccagcagatcgatccgcagttccatccgatgctgatgattgcagcgggcggcgccgcgctgattgcctgcggtatcctgtgccagctgattcagtactacgtgtctatccgtgaccgtaacctgaaccgcgacctgaccggtgacccgtggggtggccgtacgctggagtggtctacctcttctccacctccgttctataactttgccgtagtgccgcacattcatgagcgtgacgcattctgggaaatgaaagaaaaaggtgaagcgtacaagcaacctgaacattacgaagagatccatatgccgaaaaacagcggtgcgggcatcgtgattgccgccttcgcaacggtatttggtttcgcaatgatctggcacatctggtggttggcgattgttggcttcgctggcatcgtaatcagctggattgtgaagagctttgacgaggacgtggactactacgtaccagtccgtgaagttgaaaagctggaaaaccagcattttgacgagatttctaaagcggggctgaaaaatggcaactga

SEQ ID NO: 522816 - DNA, 516 bp, Stenotrophomonas maltophilia
atgagcgactgcatcctgttctgctgtctgttcgcaacctatgccgttctggtgaacggcacagcgggcggcccgaccggtaaggacatctttgagctgccgttcgttctggttgaaaccgcactgctgttattcagctccatcacctacggcatggcggctatcgccatgtacaaaaacaacaaaagccaggttgtttcctggctggcgttgacctggttgtttggtgctggctttatcgggatggaaatctatgaattccatcacctgattgcggaaggctttggtccggatcgcagtggcttcctgtcagcgttcttcgcgctggtcggcacccacggtctgcacgtgacctctggtctgatctggatggcagtgctgatgttccagatctcccgtcgcggcctgaccagtactaaccgtacccgtatcatgtgcctgagcctgttctggcacttcctggacgtggtatggatctgtgtgttctctgttgtctatctgatgggggcgatgtaa

SEQ ID NO: 522817 - DNA, 327 bp, Stenotrophomonas maltophilia
atgagtcattctaacgatcatggcgcttcccacggcagcgtaaaaacctacatgacaggtttcatcctgtcgatcatcctgacggtgatcccgttctggatggtgatgaacggttctgcatctaagccggttatcctgggcgcaatcctggtgaccgcggtgattcagattctggtgcatctggtttgcttcctgcacatgaacaccaagtccgatgaaggctggaacatgacggcctttatctttaccgtgattatcatcgctatcctggtagtcggttccatctggattatgtggaaccttaactacaacatgatggttcactaa

SEQ ID NO: 522818 - DNA, 888 bp, Stenotrophomonas maltophilia
atgtttaagcaatacctgcaagtcacgaaaccaggcatcatctttggcaacctgatctccgtaatcggagggttcctgctggcctctaaaggcagcattgattacaccctctttatttacacgctggtcggtgtgtcactggtggttgcgtccggttgtgtatttaacaactacatcgacatggatatcgacaagaagatggaaaggaccaaaaatcgggtgctggttaaaggcctgattgctccttccgtctcgctggtgtacgccaccttgctgggtattgctggctttatgctgctgtggtttggtgctaacccgctggcctgctggctgggggtgatggggttcgtggtgtatgtaggcgtctacagcctgtatatgaaacgccactccgtctacggcacgctgattggttctctctccggcgctgcgccgccggtgattggctactgcgccgtcacgaacgagttcgacagcggtgcgctgatcctgctggctatctttagcctgtggcagatgccgcactcctacgccatcgcgattttccgctttaaggattatcaggcagcgaacattccggttctgccggtcgtgaaaggcatctcagttgccaaaaaccacatcacgctgtacatcatcgcttttgccgtggcaacgctgatgctctctctgggcggttacgccggatataaatatctggtggtggccgctgcggtgagcgtctggtggctcggcatggctctgcgcggttacaaagtggaagatgacaaggtctgggcacgcaagctgtttgtgttctcgattgtcgccatcacctccctgtccgtgatgatgtccgtagacttcatggtgccagattcacaaagcctgctgacgtacgtctggtaa

SEQ ID NO: 522819 - DNA, 429 bp, Stenotrophomonas maltophilia
gtgcttaaaacgatatccccactgatttcacccgagctgctgaaaacgctggcagagatgggccatggtgacgagattatttttgcagacgctcactttcccgcgcacagcctggggccaaagacgatccgcgcagatggcctgctcatcagcgatttgctggccgcggtgataccgctgtttgaactcgacagctatgcgccaccgctggtgatgatggcccctgtcgacggggatacgctcgatatacaggtagaagcacgctatcgcaacgcactctttggtgaggcggaaggggaggggattatgcgaattgaccgttatgcgttttatgcgcgggcacagaaagcgtacgccattgtggtgacaggcgagacagcgaaatacggcaatatactgttaaagaaaggggttacgctgtaccaataa

SEQ ID NO: 522820 - DNA, 1404 bp, Stenotrophomonas maltophilia
atgaaaaaatgttttctggttctcgattgtggcgcgacgaacgtgcgcgccattgcgctggatcctgaagggaatattgtggcgcgagcctcggtggcgaacgagagcgaaagtgccgctgaaaatccggcctggcaccagtggtcgctcgatgccatcatgcaacgttttgccgtctgttgtcagaaaatcagcgcagtgctgagcaagcatcaactgtgcggaatgagtgtgacgacctttggcgtggatggcgcgctggtggatgagcggggagaactgctttacccgatcatcagctggaaatgtccacggaccgtgccggtgatggaagcggttgcccgtttatgctccccggctgaactacagcagatcaccggcgttgggcagtttagtttcaacacgttgtataagctaggctggcttcaggacaaccatcccgatctgttacagcgtgctcacgcctggctttttatctcctcgctaatcaaccatcgcctgaccggaaaaatgacgaccgatctcacgatggccggtaccagtcagatgttcgatctgcatcagcggtgcttcagcgaaacgatcttaagcaagatcggcgtgcctcattcccttttcccgccgctggtttcccccggagagatgatgggtgaactgcagcccgacgctgcatccagactcggattgccttgcggtgtgccggtgatctccgccgggcacgatacgcagtttgccctttttggcgccggtgcgggaattaatgagccggttctctcttcgggaacctgggagattttaatggcgcgcacctcgcaggttgataccgctttactggggcaatacccgggcgcgacctgcgaactggatagccggacggggctctataatccgggaatgcaatatctggcgtctggcgtactggagtggatccgcgcgctgttctggtcgcctgatgtcaactgggacactattctggctcaggcggcggcaattccgtacggggcggatggcgtcacgatgaatacccagttgctcgattctccgctcgctggctggcagggcgttacgctcaccaccacgccagcccatttttatcgcgcagccctggaaggactcacggtgcatctgcaagaaaaactccaggcgctggaggcgatcgcgcaatttaaggcgcgtgaactcctgctggtggggggaggtagccgcaatatgctgtggaatcagctcaagtccaatgcgcttgggatcccggtgaaggttcttgaagatgcagatacgaccgtgctgggggcgtctttgtacggatggtggggcgtcggagaaacggccagcgctgaggctgctcgcgatcgggtccactatcgttaccgttatttctatcctgaggaacaaagccgtgcttaa

SEQ ID NO: 522821 - DNA, 1779 bp, Stenotrophomonas maltophilia
atgaaaacgataaaagcgttaccccgtattggcattcgacctgttattgatggccgccgaatgggcgtacgcgagtctctggaagagcagaccatgaacatggcgaaagccacggcggcgctactcagtgaaaaattacgccacccctgcggtacgcccgttgagtgcgtgattgccgatagctgcattgccggaatggcggaggccgctgcttgcgaagagaagttcagcacgtgccacgttggtctgacgatcaccgtcaccccctgctggtgttacgggagtgaaaccattgatatggatccgctgcgtccgaaagcgatctggggctttaacggcaccgagcgtccgggggcagtatatctcgcggcggcactggcggcgcataaccagaaagggatcccggcgttttccatatatggccacgatgtacaggatgcgggcgacgagaccatcccggcagacgtcgaagaaaaattgttgcgcttcgcccgggcgggcctggcggtcgccagcatgaaggggaaaagttatttgtcggtgggcggcgtctcgatggggattgcgggctcgattgtcgatcacaacttctttgaatcctggctggggatgaaggtgcaggcggtggatatgaccgaactgcgtcgccgcatcgatcataagatttacgacgagcaagaacttgagctggccctggactgggcgcaagcacatttccgtttcggcgaggataaaaacgcggagcagtatcgtcgcaatgaacaggagaatgccgcgatcctgcgggagagtctgctgatggcgatgtgcatccgcgacatgatgcagggtaacccaaaactcgctgcgatgggccgcgtggaggaatctctgggctataacgccatcgcgtctgggttccagggacagcgccactggacggatcagtatccaaatggcgataccgcagaggcgctgctgaacagctcctttgactggaacggtattcgccagccgttggtggtggcgacggaaaatgacagcctgaacggggtagcaatgctgtttggacatctgatgaccggtacagcgcaaatctttgccgacgtgcgcacctactggtcgccagagtcggttgagcgtgttaccggtcagaaactcactggacgggctgagcagggcattattcatctgatcaactccggctcggcggcactggacggtacagcggagcagaaagatgccgaggggaaaccgaccctgaaaccacactgggacattactgagcaggaagccaacgcgtgcctggccgcaacccactggtgtccggcggtgcatgaatactttcgcgggggcggtttctcatcaaacttcctcacccgaggtggcgtgccatttaccatgacccgcgtaaacctcatcaagggggtgggcccggtattacagatagcggaaggctggagtgttgagctgccggaacaagtacatgacattctgaataagcgcaccgattcaacctggcccaccacctggtttgccccacgtctgaccggtaaaggcccgttcagtgacgtctattcagtgatggcgaactggggcgctaaccacggagtattaaccgtcgggcacgtcggtgctgatttcatcaccctggcgtccatgctgcgcattcccgtgtgcatgcataacgtaccggaggcgctgatttatcggccgacggcctggggcgctcacggtatggatccggaagggcaggattaccgcgcctgtaaaaattacggaccgttatacaaacaataa

SEQ ID NO: 522822 - DNA, 1500 bp, Stenotrophomonas maltophilia
atgtcagagactcttattcagatgacgtgcattaccaaacgctttcccggcgtgctggcgctgaatcaggttgatttcgatttacgctgcggcgaagttcatgccctcttaggtgaaaacggtgccggcaaatcgacgctgatgaaaattttatccggtgtttaccaacctgatgccggtgaaattcgctttgaagggcaatctgtatcattcagcgatccgctaagtgctcagcatgcaggtattacgattatccatcaggaatttaatctcttccccgatttaaccgtggaagagaatatctttattggccgtgaattctgcaaaaatagtcgctggcagttagataaacgcgcccagcgacaggcggttgagaaaatactgcacacgctgaatttaaaaatcgccccggacgcccgcgtcagtgaattaaccgtagcccagcagcagatggtggaaattgccaaagcgatttcggtcaatgccaaagtgctaatcatggatgaacccaccgccgcgctgaccgaaagtgaaatcgagagtttgtttgacgtcacgcggatgctcaaggctcagggcacggggattgtctacatctcgcaccgtctggaagagctggcgctgatcgccgatcgcgcgaccgtcatgcgcgacggacaatacatcgccaccgtagattatgaaacggttcagatcggcgagcttatcgccatgatggttggccgcaatctcgataacatctacccaaaacgcccgccgcatcagcgcagagaaaaagtgctggaggtgaacggcctgacgcgtaatggtgtactgcatgacatcaactttaccctctggcgcggtgagatcctcggtctcgctggcttaatgggcgcaggccgaactgaactgggccgggccctgtttggcgccgatgctatcgacgctggcaccctgacgctgaacggcacccccacacgtattaaagacgtggctgacgccattgagaaaggcatcagctatttaacagaagaccgcaaaaaagagggactcgccctcggcctttctgttgagatgaacattatgctcggcaattacccggactacgctggcgccgcaggtaatgttgatgaaaaacgctgccgggagtccagccagaaactggtggatacgctgcgaataaaaacgccacatctggaacaggcggcactgaatttaagcggcggtaatcaacagaagattattattgcccgctgggtctgcaaagacaccgatattttaatttttgatgagccaacccggggaattgacgttggcgccaagctggaaatctacgaattaatgaatcgccttgtcgctaaaggtaaatcgatcatcatgatttcatccgaactgccggaagtattaggaatgtgcgaccgcatactcgtgatgcgcagcggccgcattgccggcgaaatagcggctgagcacgccacccaggaaaaaatcatgcaatacgccacgctggaggattaa

SEQ ID NO: 522823 - DNA, 984 bp, Stenotrophomonas maltophilia
atgtccgttaccgttccatcgccgcaaagcggaagtcatacgatgaaaataaataaagcgctcctgatgcgtctggcgcctctttttagcctggtattgctggttctgtttttcagcttcagctcaccgttcttctttaatactgaaaatatcatgactatcgccctgcaaacggcggtgattggcatcatggccattggcgtgacctttgtgattattaccgccgggatcgacctgtcactcggatcggtggtggcgttctcaggggttgcggtgggcatcgccgccgggtttggtatgccgttgccggtctgtattctggcaggcgtgctcgcagggggactttgcggctatgtgaacgcgtttctggtcaccaaaatgaccataccaccgtttattgccaccctcggcttaatgatgtcggtacgcggcatcaatatggtgatgaccgatggccgcgcgatttatttttctgactacccgcagttcaagctgctagcacagggtcgcctgttcgacgttctgccttatccggtgttctacctggtcatcgtggcactgatcgccatgtggatcctgaagaaaacggtgatgggccgctatatctacgctgtcggcagcaatgaaacggcggcacacctttccgggatcaaagtccagcgagtgaaaattttcgtttacgccttctgcggcctgttaaccggcgtggccggggtgatcctcgcctctcgtctcaactcaggccagccaaccgtgggcgtgggttatgagctggaagccattgcggcggtagtgatcggcggtaccagtctgatgggcggcgtgggcacgattggcggcaccatcataggcgcgttcattatgagcgtgctgaaaaacggcctcaatctcatgggcgtgtcccagttctggcagatggtggcgatgggcgtggtcgtcgttgccgccgtctacctggacacgttacgtaaaagaatgcgttag

SEQ ID NO: 522824 - DNA, 951 bp, Stenotrophomonas maltophilia
atgaaaaccagccatatcctgagcgccctgtcgctcgtagccatcctgtccagcagcgcgctggcaaaagatttaaacctgccggtggtcagtaaaggttaccagcacgaattctggcagacggtcaaaatgggaacggaagctgccgcaaaagagttgggtgacaaaaccagctacgttggccctgccgatgaaacgcaaatcgccgaacagatccagttagtcgaaaacaccatggcacaaaagccaaacggcctgttgctggccgcacttgatgcaaacgcccttgccccgctggtcgaaaccgccaacagccgggggatcaaagtggtgaccttcgactcgggcgtgaactcggatatcccggccagctttgtcgccaccaataaccgtaaggcgggcgcacaggctgcggatgcgctggcggagcaggtaggccagaaggggaaagtgggtattatcgctcacgtagccgggacgacgtccgccattgagcgctctgaaggattcagcgagcgaatgaaagagaagtacccgaatattcaggtactgccggtgcaatacagcgatggcgacccgcaaaaagcgatggataaaaccattgatatggttcaggccaacccggatatcgccggtatttatgccaccaacgaaggctcaaccctgggcgttgcgaacgctatcgacagccagaatctgaagggcaaagtaaaagtcatcggttttgacagcaccgaagccatcattaacttccttaaaaacggtgtgattcagggcttcgtggtgcaggacgcctatcagattggttatcagggcataaaagcgctgaacgcggtgatttccggacagacggtggccaaagaaattgatattccagtgaaatatgtcaatgcgcagaatatcaacacgactgaaattgataaactgctgcatccgtttggtaaaaaataa

SEQ ID NO: 522825 - DNA, 1593 bp, Stenotrophomonas maltophilia
atgatgagtgacggctatttcctcggggtagatgtaggttcagccagcgttcgtgcagggctttactctgcgcaaggcgagcgtttgagcttcgcgacccgtccgatttcgcagtttcacgccagcaatgcgcgcgtggaacaatcctctgtggaaatctggcagcaggtttgtgcggtggtgcgggaagccgtcgactcctctgggatttcacctgacgccattcgttcgattggcttcgacgccacgtgctcgctggtcgcgctggatgctgacggtaacggcctgagcgtctccccggacagtccggcatcgcaggacatcattatgtggatggatcatcgtgctcacgaagaaaccgttcacatcaatgccacacgcgatccggccctgtgctacgtgggcggcgaggtcagcatcgagatggagttgccaaaactgctgtggttgcagcggcatcatcctgaaacctggaatcaggcctggcgcttttacgaccttgccgattttctggtctggaaagcgacgggccaggacgtcgccagcctgtgcaccctcacctgcaaatggaactaccttgcgcatgaggcgcagttcagcgaatcgctgctcagagcggtggggctggaaaacttactgacaaaaattcccggcactattctggacgtcgctgaatgcgtcggaaaactcagcccgcaggcagcgcaagctctgggtttgtccgaagaagtggttgtggcaagcggcatgatcgatgcccacgcgggtggcgtggcgctgacgggctcacacccggaaggcacgctggcgctcatcagcggaacctcgaactgccatatgcttgccagtcagacggagatccatacgcccggcgtctggggaccttactggagcgccatgctgccgggctactggctgacggaaggcgggcaaagtgctgccggggcgctggtcgactggacgttgcgcgagcacggagtcagcgcagagctgtttgcaaaagcagaagcggcgcaatgccatccggtggcattactcaacgactgggtagccgcgcttgaacaggaagaaaaatatcccacccgcaacctgcacattctggccgatcaccacggcaaccgctcgccgcgttcgcgtcctgatgcccggggcagcgttgtcggtctgacattagagaccggtgagcgcgcgctggcgaggctctatctggccacgctacaggccattgcctacggcacacgacacattatggatactctgaaacatcatgggcacaccttgtcgcgcattgtcatttgtggtggagctactcataaccggctctggctgcgggagtatgccgatgccacaggctgcgatattcaccttttagccgaagaagatgcggtcactctcggcgcggccatttgcggcgctgtggcgagcggtgcatgggcaacgcttaccgacgccacccgggaaatggtcaaagccggcgatatcatcccccgtcggccggaaaccgcggccttccaccggcaaaaatatgaggcgtacctgatgctgtggacccagcaacaggcgcttaatctcctgatgcagcaggaaatgtaa

SEQ ID NO: 522826 - DNA, 996 bp, Stenotrophomonas maltophilia
atggccaaaacagttgaacagatagcgaaggatctgaatttatccgtcaccaccgtgcggctggtactgagcgggaaagccgaacagtatcggatcagtgtgaaaacacagtcccgaattaatgaacacgtcgagcgcttcggctataccctcaaccattcggcgcgcagtctgaagttaaacaaaaccgagacgctggggctcatcgtgcccaacatctcaaacgtgttctttgcaacgctcgccgagaaactcgaactgcgctgccgccgttcgggttaccagctgatgatcagctgtacttacaacgatgtggattacgaaaacaagctggtaaaagctctgatggcgcgcaacgtggacggcttatttatcgttccctcgacgctggaaaatcagcagcatcatttgcggcagatccaaaagccactggtgctccttgaccgggattttggctttactgacaacgcgctggtagagagtcataacgaggctgggggggatgaactggcccgcaatatgctggaagagtgcaaaacgccgctctggttccttgtgggcgataccgcactgcccagcattacggaccgtctgaacggctatttgcaggccctgaaaacagccggtattcaccatcgcgagtgggtcatcgaagggccggacaatacgccggaggggggatatgccctgatggattcgcttatcgacagccagggtgttccgcaggcgtttatcgcctcatcgttacccgtcctggaaggggcaatcgaagccctgcggacgcgtaccggtaccgtgcctcaacacatcaatattggcaccttcgatgagcaccccatgctggggttcctgcctaacagcgtctggtccatgcagcaggatgaagatacctgggcggaaaaagcgtttgaactgatgcagcgagccatcgacggcgaagcggtcaacgagacggcgaaagtcgatatgaagctggtcaaacgttcccgccagtaa

SEQ ID NO: 522827 - DNA, 648 bp, Stenotrophomonas maltophilia
atggaacgagcccgattagccagagacattatcgacacctgccttgagatgacccgcatgggattaaatcagggcaccgccgggaatatcagcgttcgctatcgcgacggtatgctgattacgccgaccggaattccctacgagcatctgaccgaagagagtatcgtctatgtcgatgcacaggggcgacacgaagaggataaactgccctccagcgaatggcgttttcatcaggttgtgtatcagacccgcccggatgctaacgccgtcgtccataaccatgcggttaactgtaccgccgtctcgatactcaaccgccccattcctgctattcactatatgattgccgccgccgggggaaactccattccctgcgcgccttacgcgaccttcgggacgcgcgcgctgtcagagcatgtcgcggtcgcgttacgcgatcgcaaagcgacgctattacagcaccacggcctgatcacctgcgaagaaaatcttgagaaggcactgtggctggcgcaggaggtagaggtgctggcaaaactctacctggccacgctggcgatcgtggatcccgttccggtactcagtgacgatgaaattgccattgttcttgagaaatttaaaagctacgggttgcgcgtcgaggcgtaa

SEQ ID NO: 522828 - DNA, 1362 bp, Stenotrophomonas maltophilia
atgaacgattataaaatgacgccaggtgaactgcgtgcgacctggggtttagggactgttttctcgctgcggatgcttggcatgtttatggtcctgcccgttctgaccacatatggcatggcgttacagggtgccagcgaagcgctgattggtttggcgatcggtatctacggcctggcacaggcgatattccagatcccctttggcctgctctccgaccgcgtgggtcgcaaaccgctgatagtcggcgggctgctggtgtttgtacttggcagcatcatcgccgccctctcccactccatctggggaattattcttggccgcgccctgcaaggttccggggcgattgccgccgccgtgatggcgctgctgtcagatttaacccgcgagcaaaaccgcaccaaagccatggcgtttattggcgtcagcttcggcgttacgtttgccattgccatggtgctggggccgattattacccattcactcggcctgcacgccctgttctggatgatagccgtgctggcaaccatcgggatcgcactcacgctgtgggttgtgccggacagtaaaaaccatgtcctgaaccgtgaatccgggatggtcaaaggctgcttcagcaaagtcatcgccgagccgcgcctgcttaagctgaacttcggcattatgtgcctgcacattctgctgatgtccacctttgtcgccctgcccggtcaacttgccgcagcaggtttcccggcggcagagcactggaaaatttatctggtcacaatgctgatctcgtttgtctccgttgtgcccttcattatttacgccgaagtgaagcgcaaaatgaaacgcgtcttcgtgggctgcgtggcgttactgttgattgccgagattgtgctgtggggcgccggcccacatttctgggagctgatcgcaggcgtacagctgttcttcctggcgtttaatctgatggaagccctgctgccgtcgcttatcagcaaagagtctccggcaggatacaaaggcaccgcgatgggcatttactccaccagccagtttctcggcgtggcgatcggcgggtcactcggcggctgggtggacggtctttttgattctcagaccgtgttcctcgccggtgcgctactggcgatgctctggctgtttgttgccagcaccatgaaagagccgcgctatgtgagtagcctgcgggtagaaattcccgatgacgtggcaatcggtgacgcgttacaacagcgtctggaagcgacagagggcgtgagcgaagtgctgattgtcccggaagagcgcagtgcgtatgtcaaaattgacagcaaagtgactaaccgctttgaggtagagcaggcgctgaaggcgtga

SEQ ID NO: 522829 - DNA, 492 bp, Stenotrophomonas maltophilia
atgccatctttcgatattgtttctgaagttgatctgcaggaagcgcgtaacggcgtagataatgctattcgtgaagtggagtcacgtttcgattttcgtggcgttgaggcgaccattgaactgaacgacgcgaacaagacaatcaaagtcctgagtgagtctgatttccaggtcaaccaactgctggatatcctgcgcgccaagctgctcaagcgcggcattgaagggacctcacttgatgtaccggaagattttgttcacagcggcaaaacctggtttgtggaagcgaagctgaagcaggggattgaaagcgcggtacagaaaaaaatcgttaagcttatcaaagacagtaagctgaaagtgcaggcgcagatccagggggaagagatccgcgtgaccggaaaatcccgtgatgacctgcaatccgtgatggcgctggtgcgtggcggcgatctcggtcagccattccagtttaaaaacttccgcgattaa

SEQ ID NO: 522830 - DNA, 912 bp, Stenotrophomonas maltophilia
atgaaagtaacagtgcttggatgcggcgcccttggtcaactctggctcagcgcgctatgcaaacagggacacgacgttcagggctggctgcgaattccccaaccctattgcagtgtgaatgtgatgggtacagacggttcaatttttaacgagtctttgacggcaaacgatccggaatttctcgcgagcagcgatctgctgctggtcacgctgaaggcctggcaggtctccgatgcggtgaaaagcctggccgcccaattacctgaaagcacgccagtcctgctgattcacaacggtatgggtaccattgaagagctaaagtctgtccggcaaccgctgctgatgggaacaaccacccacgcggcacgccgcgacggtaacgtcattattcatgttgccagtggcatcacccatatcggcccggcgcgtgaacagcccggcgattacagctatcttgcggataccctgcaaagcacgctgcctgacgtcgcctggcacaataacattcgcgcagaactgtggcgcaaactggcggtcaactgcgcgatcaatccgctgactgccctgctggattgccctaacggtgatctgcgccagcatcccgatcggttagcgctgatttgccgggaagttgccgccgtcattgaacgcgaaggctaccacacctcagaaaccgatttacgttattatgtcgaccaggtcattgagagtacggcagaaaatatctcctcaatgctgcaggatatccgggctatgcggcataccgaaattgattacattaccggttatctgttaaaacgcgcccgggcacacggcattaccgttgcggaaaacagccgtctgtttgagttagttaaacgaaaggagagtgagtatgagcgcatcggcactggtatgcctcgcccctggtag

SEQ ID NO: 522831 - DNA, 591 bp, Stenotrophomonas maltophilia
atgagcgcatcggcactggtatgcctcgcccctggtagcgaagagacagaagcggtcaccaccattgatttgatggtacgtggtggtattaaggttaccaccgccagcgtcgccagcgacggaagtctggcgattacctgctcgcgtggggtcaagatcctggcagatgcaccgcttgtacaggtggcggacggtgattacgacattatcgtgctgccgggcggtctgaagggcgcggagtgtttccgcgacagcccgctgctggttgaaaccgttcgtcagtttcatctttccgggcgtatcgtcgcggcaatctgtgcggccgcaggtacggtactggttccgcacaacattttccccatcggcaatatgaccggcttcccaggcctgaaggatacgattccggaagaccagtgggtggataaacgcgtggtctgggatccgcgcgttaacctgctcaccagccaggggccgggtaccgccattgattttggcctgaagattattgacctgctggtcgggcgcgaaaaagcgtacgaagtggcgtcatcgctggtgatggcggcggggatttataactactacgagtaa

SEQ ID NO: 522832 - DNA, 1449 bp, Stenotrophomonas maltophilia
atgaagtttatcattaaattgttccctgaaatcaccatcaaaagccaatccgtgcgtttgcgctttattaaaattctcaccgggaacattcgtaacgtattaaaacactacgacgaaacgctcgccgtggtgcgtcactgggaccacgttgaagtccgcgcgaaagacgaaaacaaacgtcttgatattcgcgacgcgctgacccgtatcccgggtattcaccatattctggaagtggaagacgttcccttcaccgatatgcacgatatcttcgaaaaggcgctggtacagtaccgcgatcagatcgaaggcaaaacgttctgcgtacgcgtgaagcgccgtggtaagcatgagtttagctccattgacgttgagcgctatgtcggcggcggtctgaaccagcacgttgagacggcgcgcgtgcgtctgactaatccggacgttaccgttaatcttgagatcgaaaacgatcgcctgctgctggttaagggccgttatgaaggtattggcggcttcccgatcggcacgcaagaagatgtgctgtcgctgatctccggcgggttcgactccggcgtttccagctatatgctgatgcgtcgcggctgccgcgtgcactactgcttctttaacctgggcggcgcggcgcacgaaatcggcgtacgtcaggtggcgcattacctgtggaaccgcttcggcagctctcaccgcgtgcgttttgtggcgatcaactttgagccggtggtcggcgaaattcttgagaaagtggatgacggccagatgggcgtagtcctgaaacgtatgatggtgcgtgccgcgtccaaagtggctgagcgctacggcgtgcaagcgctggtcaccggtgaagcactggggcaggtctccagccagacgctgaccaacctgcgccttatcgacaacgtgtctgatacgctgatcctgcgtccgctgatctctcacgataaagagcacatcatcgatctggcgcgtaaaatcggtactgaagattttgcccgcaccatgccggaatattgcggcgtgatctcaaaaagtccaaccattaaagcggtgaaggcgaagatcgaagcggaagaagagaacttcgatttcagcatcctggaaaaagtggtggcggaagcgtcgaacatcgatatccgtgagatcgcccagcagaccgggcaggacgtggttgaggtggagacggtcagcggcttcggtgctaacgatacgattctggatatacgttctgttgatgagcaggatgacaagccgttgcaggtggaaggcgtggaggtggtttcgctgccgttctacaagctgagcacccagtttggcgatctcgaccagagcaaaacgtatctgctgtggtgtgagcgcggggtgatgagccgtttgcaggcgctgtacctgcgtgaacagggcttcgcgaacgtgaaggtgtatcgcccgtag

SEQ ID NO: 522833 - DNA, 243 bp, Stenotrophomonas maltophilia
atgccgaagaaaaacgacgcaccggccagtttcgaaactgcgctgagtgaactggagcagatcgttacccgtcttgagagcggcgatctcccgctggaagacgcgctcaacgaatttgaacgcggcgtgcagctcgcgcgccaggggcaggtaaaactccagcaggccgagcagcgtgtgcagatcctgctttccgacagcgaagacgctaaaaccacgccattcacaccggacgccgagtaa

SEQ ID NO: 522834 - DNA, 900 bp, Stenotrophomonas maltophilia
atggatttttccaacgcgcttcaggcgcgcgtcatccgcgccaacgacgcgctgcgccgtttcattgagccgcagccttttcagaacactcctctggttgaagccatgcactatggcgcactcttggggggtaaacgcctgcgtccgttcctggtgtatgccacgggcaatatgttcggtatcagcgataacacgctggacgccccggcagccgccgtggagtgtatccacgcctattcgctgatccatgatgatttgccggccatggacgacgacgatctgcgtcgcggtcagccgacctgccacattaagttcggcgaagcgaatgccattctggcgggtgatgcgctgcaaaccctggcgttctctattctgagcgatgcgccgatggttgaagtgagcgatcgcgatcgtctggcaatggtgtccgaactggcaatggccagcggcgtcgccgggatgtgcggcggccaggcgctggatttagaggctgaaggtcgtcaggtaactctggaacagctggagcgcatccaccgtcacaaaacgggcgccctgattcgggcagccgttcgtctgggcgcgctgagcgcgggtgaacgcgggcgtaaagccctgccgattctggacagatacgcagaaagtatcggtctggcattccaggttcaggatgacattctggatgtggtgggcgatactgcaacattgggaaaacgtcagggtgcggatcagcagcttggcaaaagtacctaccccgccctgttgggccttgagcatgcccaacgtaaagcccgggatctgatagacgatgcccgccggtcactgaatgagctggccgcgcaatcgctggatacctcggcactggaagcgctagcggactacataatccagcgtaataaataa

SEQ ID NO: 522835 - DNA, 474 bp, Stenotrophomonas maltophilia
  misc_feature (438)..(447): n is a, c, g, or t
atgagttttgatattgccaaatacccgacactggcgttagttgactccactcaggagttacgtctgttgccgaaagagagtctgccgaagctgtgtgacgagctgcgtcgctacctgctcgacagcgttagccgctccagcggccacttcgcctccggacttggcacggttgagctgaccgtggcgttgcattatgtctataacacgccgttcgatcagctgatctgggatgttggccaccaggcctatccgcacaaaattctgaccggacgtcgcgataagattggcaccattcgccagaaaggcggcctgcatccgttcccgtggcgcggcgagagcgagtttgacgtgttaagcgtcggccactcttccacctccatttccgcaggcatcgggattgccgttgccgctgaaaaagagaataaacaacgccgtacnnnnnnnnnnacgccgtaccgtctgcgtgattggtga

SEQ ID NO: 522836 - DNA, 1419 bp, Stenotrophomonas maltophilia
gtgattggtgacggggcgatcaccgccgggatggcttttgaggccatgaaccacgcgggcgatatcaaaccggacatgctggtgatcctcaacgataacgaaatgtcgatctccgagaacgtcggcgcgctgaataaccatctggcgcagctgctgtccggtaagctttactcctcactgcgcgaaggcgggaaaaaagtcttctccggcgtaccgccgatcaaagagctgcttaagcgtaccgaagaacatatcaaaggcatggtcgtgccgggtacgctgtttgaagagctgggctttaactatattggcccggtggacggccacgatgtgttaggtctggtgacgacgcttaaaaacatgcgcgacctgaaaggcccgcagttcctgcatatcatgactaaaaaagggcgtggttacgaaccggcggaaaaagatccgatcaccttccacgcggtgcccaagttcgaccataccagcggttgtctgccgaaaagcagcggcggaatgccgagctactcaaaaatctttggcgactggctgtgcgaaacggcggcgaaagacaacacgctgatggcggtgacgcctgccatgcgtgaaggctccggcatggtcgagttttccaaaaaatacccggaccagtatttcgacgtcgccattgccgagcagcacgcggtaaccttcgcagcgggcctggcgattggcggctacaagccggtggtagcgatttactctaccttcctgcaacgcgcctacgatcaggtgatccatgacgttgccatccagaagctgccggtgctgtttgctatcgaccgtgcgggcatcgtgggggctgacggccagacgcaccagggcgcatttgacctctccttcctgcgctgcatcccggacatggtgatcatgacgccaagcgacgaaaacgagtgtcgtcagatgctgtataccggttaccactatcaggacggtccctgtgcggtacgttatccacgcggcaatgcccttggcgttgaattacggccgctggaaaaactggacatcggtaaaggtctggtgaaacgtcgcggtgaaaaagtggcgatcctgaactttggtacgctgatgccggaagcggcaaaagtcgctgaaaccctgaatgcgacgctcgtcgatatgcgatttgtgaagccgctcgatgaatctctgattctgagcatggcggaaagccatgaggcgctggtcacgctggaagagaacgccatcatgggtggcgcgggtagcggtgtgaacgaagtgctgatggcgaaccgtaaagtcgttccggtgcttaatctcggcctgccggaccacttcatcccgcaaggcactcaggacgaggcgcgcgccgacattggcctggacgccgtcggtatcgaagctaaaatccgcacctggctggcctga

SEQ ID NO: 522837 - DNA, 975 bp, Stenotrophomonas maltophilia; identical to SEQ ID NO: 118782

SEQ ID NO: 522838 - DNA, 972 bp, Stenotrophomonas maltophilia
atggcatgcggcgaattctccctgattgcccgttatttcgaccgtgtcagaacctctcgtcttgatgttgaaaccggcattggcgatgactgcgcacttctcaatattcccgaaaaacagacgctggcaatcagcaccgacaccttagtatgtgggcgtcacttcctgcccgatatcgatcctgccgacctggcgtataaggcgctggcggtcaacgttagcgatttggcggcaatgggcgccgacccggcctggctgacgctggctctgaccctgccggaggtggatgaagcctggcttgaagccttcagcgatgccctgtttgaacagctgaattattacgatatgcagctgattggcggtgataccaccgccgggccgctgtcgatgaccctggcaatccacggctatgtgccagcggggcgcgcgctgaagcgttcgggcgcaaaaccgggcgactggatctacgtgaccggtacgccgggggatagcgcggccgggctggcgatccttcagaaccgtttagcagttgaagatgctgacgatgcggcgtacctggtgaagcgccacctgcggcccacgccgcgtattttgcacggtcaggcgctgcgcgagcgggccagttctgctatcgatctctctgacgggctgatctccgatctcggccatatcctgaaggccagtggcgtgggcgcacggatcgatctggatctgttcccactgtcagagccgttgcgtcgccatgccgatcctgaacaggcgctgcgctgggcactatccggtggggaagattatgagctgtgctttaccgttcccgagctgaatcgcgggacgctggatgtggcgttagcgcatctgggggcgaaatttacctgcatcgggcaggtgatgccggaaagtgaagggctgctgtttgtccgcgacggcgccccggttacgcttgactggaaagggtacgatcacttcgcgtaa

SEQ ID NO: 522839 - DNA, 420 bp, Stenotrophomonas maltophilia
gtgaaacctgctgctcgtcgccgcgcccgtgaatgtgccgtccaggcactttactcctggcagttgtcccagaacgacatcgctgatgttgaataccagttcctgtcagaacaggacgtgaaagacgttgacgttctgtacttccgtgaactgctgtcgggagtggcgactaatagcgcgtatctcgatggtctgatgaagccatacctgtcccgtctgctcgaagagctgggccaggtcgaaaaagcagtgttgcgtatcgcgctgtttgagctgtctaaacgtgatgatgtgccgtacaaagtggccatcaacgaagcgatcgaactggcaaaaaccttcggcgctgaagacagccacaagtttgtaaacggcgtgctggataaagccgcacctgcgatccgtccccacaaaaagtga

SEQ ID NO: 522840 - DNA, 471 bp, Stenotrophomonas maltophilia
atgaacattattgaagctgctgtagctaccccggacgctcgcgtcgccatcaccattgcgcgtttcaacaacttcatcaacgacagcctgctggaaggtgcggttgacgccctgaaacgtatcggccaggttaaagatgacaacattaccgtcgtttgggtaccaggtgcttacgaactgccactggcagcgggcgcgctggcgaaaaccggtaaatacgacgcggtgattgcactgggtactgttattcgtggcggcactgcgcacttcgaatacgttgcgggcggtgcaagcaatggtctggcgcacgttgcacaggatgctgaaattcctgtcgcgttcggcgtactgactaccgaaagtattgaacaagccatcgaacgtgctggcaccaaagccggtaacaaaggtgcagaagctgcactgaccgcgcttgaaatgatcaatgtattgaaagccatcaaggcctga

SEQ ID NO: 522841 - DNA, 1104 bp, Stenotrophomonas maltophilia
atgcaggacgagatgtacatggcgagagccatgaagctggcgcagcgcggtcggtttaccactcaccctaaccctaatgtcgggtgcgtcattgttaaagatggcgagatcgtgggtgaaggttttcactaccgcgcaggcgagccgcacgctgaagtgcatgccctgcgcatggcgggggagagggcgcgtggcgcgacggcctacgtgacgctggagccatgcagtcatcacgggcgcacgcctccgtgctgcgaagcactgattgcggcgggagtctcgcgcgttgtcgccgccatgcaggatcctaacccgcaggtggcgggccgcgggctgtaccgtctgcaacaggaagggatcgacgtcagtcacggcctgatgatgcaggatgccgaagccatcaacaaaggcttcctgaagcgtatgcgcaccggtttcccgtttatccagcttaagcttggcgcgtcactggatggccgcacggcgatggcgaacggcgagagccagtggatcacctcgccacaggcaaggcgcgatgtgcaacgtctgcgcgcacaaagccatgctattctcaccagcagtgaaacggtgctggctgacgatccggtcctgaccgtgcgctgggatgagctgaatgccgatacccaggcactctatccgcaggagaacctgcgtcagccgctgcgcattattattgatagccagaaccgcgtgacgccggaacaccgtatcgtgcagcaaccgggggaaacctggattgcccgcaccaaagaagatacgcgcgaatggccgcaaggcgtgcgcagcattatggtgccggaacacaacgggcatctcgatctggtggtgctgatgatgctgctgggtaaacagcaggtcaacagcatctgggtcgaagccggtccgacgctcgccggcgcgctgctccaggcagggctggtggatgagcttctggtctacgttgcgcctaaactgttaggtaacgacgcgcgcggcctgtttgtgctgcccggccttgaaaaactggccgatgcgccgcaactctcattcagcgagattcgtccggtaggcccggatgtctgcctccatttaacgacagcgtaa

SEQ ID NO: 522842 - DNA, 450 bp, Stenotrophomonas maltophilia
atgcattgcccattttgctccgctgtggataccaaagtcatcgactcacgtcttgtaggcgaagggtcttccgtgcgtcgtcgtcggcagtgcctggtgtgcaacgagcgttttaccaccttcgaggtggcagagctggtaatgccgcgcgtggtaaaaagtaacgatgtgcgcgaaccgttcaatgaagaaaaactgcgtagcgggatgctcaaggcgctggaaaaacggcccgtcagctccgatgacgtcgaaatggcgttaaatcatattaaatcttatctgcgggggctaggtgagcgcgaagtgccgagcaaaatgatcggtaacctggtgatggaacagctgaaaaagctcgataaagtcgcctatattcgcttcgcctccgtttaccgcagcttcgaagacattaaagagtttggcgaagagatcgcccgcttacaggattaa

SEQ ID NO: 522843 - DNA, 540 bp, Stenotrophomonas maltophilia; identical to SEQ ID NO: 118783

SEQ ID NO: 522844 - DNA, 891 bp, Stenotrophomonas maltophilia
atgattatgaaaaaaacattactcgcagctggcgccgtgctggcactgtcctcctctttcactgttaacgcagcggaaaacgacaaaccacaatatctctccgactggtggcaccagagcgttaacgtggtaggcagctaccacacccgtttcgggccgcagatccgcaacgatacctacctggaatacgaagcgtttgccaagaaagactggtttgatttctacggctacgtcgatctgccggtattcttcggcggtaactccgatgcgaaaggtatctggaacaatggctccccgctgttcatggaaatcgaaccgcgtttctctatcgacaaactgaccggcaccagcctggcgtttggtccgttcaaagagtggtacttcgcgaacaactacatctatgacatgggtcgcaacgattctcaggaacagagcacctggtatatgggtctgggtactgacatcgaaaccggcctgccaatgagcctgtcactgaacgtgtatgcgaaataccagtggcagaactatggcgcatcaaatgagaacgagtgggatggctaccgtttcaaagtgaaatactttgtgccaatcactcagctgtggggcggtaacctgagctatatcggcttcaccaactttgactggggttcagacctgggcgacgataacttctatgacaacaacgggaagcatgctcgtaccagtaactccatcgcctccagccacattctggcgctgaactacgatcactggcactactctgttgttgcgcgttactggcacaacggtggccagtggaacgacgacgccagcctgaacttcggcaacggcgacttcagcgttcgctctaccggttggggtggttacctggtcgtgggttacaacttctaa

SEQ ID NO: 522845 - DNA, 972 bp, Stenotrophomonas maltophilia
gtggcacaggaatatactgttgaacaattgaaccacggccgtaaagtctgggactttatgcgctgggactactgggccttcggcatttcaggttttctgctgatcttgtccatcgtcattatgggcgtgaaaggctttaactggggtctggatttcaccggtggtacggtgatcgaaattaccctggaaaaaccggtcgatatggaccagatgcgtgagtctctgcaaaaagcgggctttgaagagccgctgctacagaacttcggcagcagccgcgacatcatggtgcgtatgccgccggtacacgatgccaacggcagccaggagctgggcagcaaggtcgttcaggttattaacgaaacgaccagccaggatgcaacggttaagcgtattgagtttgtcggcccgagcgttggtgctgacctggcacagaccggtgcgatggcgctgctggtggcgctgatctcgattctgatttacgtcggtttccgctttgagtggcgactggcggcaggcgtggttatcgctctggcgcacgacgtggtgatcaccatgggcatactgtctcttttccacattgagattgacctgacgattgtggcatccctgatgtccgttatcggttactcactgaacgacagtatcgtggtatctgaccgtattcgtgaaaacttccgtaagatccgtcgcggcacgccgtacgaaatctttaacgtgtcgttgacccagacgctgcaccgtacgttgatcacctccggcaccaccctgatggtgatcctgatgctgttcctgttcggtggcccggtgctggaaggcttctcgctgaccatgctgatcggtgtgtcaatcggtacggcctcgtctatctacgtcgcgtccgcgctggcgctgaagctgggcatgaagcgcgagcatctgatccagcagaaagtcgagaaagaaggggcggatcagccgtccattctgccgtaa

SEQ ID NO: 522846 - DNA, 1815 bp, Stenotrophomonas maltophilia
atgctggtcgtcgtgattatcgtcggcctgctgtacgcgcttcccaacctgtatggtgaggatccggccgttcaaatcactggcgcgcgcggtgtcgccgccagtgagcaaacgctgatccaggtccagaaaacgttacaagaagaaaaaattaccgctaagtctgtggcactggaagagggcgcaattcttgctcgcttcgacaccaccgacacgcagctccgcgcacgtgaagcgctgatgggcgtgctgggtgataaatatgtcgtggcgcttaaccttgctcctgcaaccccacgctggctggctgcgctgaacgcagagccaatgaaactgggtcttgacctgcgtggcggcgttcacttcctgatggaagtggatatggataccgcgctcggcaagctacaggaacagaatatcgacagcctgcgcagcgatctgcgcgataaaggcattccgtacaccaccgtacgtaaagaagataactacggcatgagcatcacgttccgcgacagcgcggcacgcgatcaggctgtgacctatctgtctcagcgtcaccgcgatctggtgatcacttctcagggcagcaaccagctgcgtgcggtaatgaccgacgcgcgtctgagtgaagcacgtgagtacgccgttcagcagaacattaacattctgcgtaaccgtgtaaaccagctgggcgtggctgagccactggtacagcgtcagggtgctgaccgtatcgtggtcgaactgccaggtatccaggataccgcccgtgcgaaagagattctgggcgcgacggcgactctggagttccgtctggttaacgccaacgttgaccaggctgctgcggcttcaggccgtgtgccgggcgattccgaagtgaaacagacccgcgaaggccagccggttgtgctgtacaaacgcgtgatcctgaccggtgaccatatcaccgactccacttcaagccaggatgagtacaaccagccgcaggttaacatctcgctggatagcgcaggtggcaacatcatgtctaacttcaccaaggacaacatcggcaagccgatggcgaccctgttcgtggagtacaaagacagcggtaagaaagacgccaatggccgtgccgtgctggtgaaagaggaagaggtgattaacatcgccaacatccagtctcgtctgggtaacagcttccgtattaccggtatcagcaacccgaacgaagcgcgtcagctctctctgctgctgcgtgccggtgcgctgattgcgccaattcagattgttgaagagcgtaccatcggtccaaccctgggtatgcagaacatcaagcagggtctggaagcgtgtctggccggtctggcggtgtccatcatcttcatgatcttcttctataagaagttcggcctgattgcgacctccgcgctgattgccaacctggtgctgatcatcggtatcatgtccctgctgccgggggcgacgctaaccatgccgggtatcgcgggtatcgttctaacccttgcggtggcggtcgacgccaacgtactgataaacgaacgtattaaagaagagctgagcaacggtcgttctgtacagcaggcgattgaagaaggctacaaaggggcgttcagctccatcttcgatgcgaacgtaacaacactgattaaggttcttatcctgtatgcagtgggtactggcgcgatcaaaggctttgcgattactaccggtatcggtgtcgcaacgtcgatgtttaccgctattgtcggcacccgtgccatcgtgaacctgctgtacggcggcaagcgcgtcaaaaagctgtctatctga

SEQ ID NO: 522847 - DNA, 333 bp, Stenotrophomonas maltophilia
atgagcttttttatttctgatgcggtagcagcaacgggtgcaccagcgcagggcagcccgatgtctctgattctgatgctggttgtgttcggtctgatcttctacttcatgatcctgcgtccacagcagaagcgtactaaagagcacaaaaacctgatgaactccatcgcgaagggcgatgaagtcctgaccaatggtggcctggtgggtcgcgtaaccaaagtagcggaaaacggctacattgctatcgccctgaacgacaccactgaagtggttatcaaacgtgacttcgtagctgccgttctgccgaaaggcaccatgaaggcgctgtaa

SEQ ID NO: 522848 - DNA, 1128 bp, Stenotrophomonas maltophilia
atgaaatttgaactcgataccaccgatggccgcgcgcgtcgcggtcgcctggtgtttgatcgcggcgtggtagaaacccccgcgtttatgcctgtgggcacgtacggcaccgtaaaaggaatgacgccggaagaagttgaagccactggcgcacagattattctcggcaacaccttccacctgtggctgcgtccaggccaggagatcatgaagctccacggcgacctgcacgacttcatgcagtggaaaggccccatcctcaccgactccggcggtttccaggtcttcagcctgggcgatatccgtaagatcaccgagcagggcgtacacttccgtaacccgatcaacggcgatccaatcttcctcgatccggaaaagtctatggagattcagtacgatctcggctccgatatcgtgatgatcttcgacgaatgtacgccatacccggcggactgggactatgccaaacgttccatggagatgtccctgcgttgggcgaagcgtagccgcgaccgttttgactccctgcaaaacaaaaatgcgctgttcggcattatccagggcagcgtttacgaagatttacgcgatatctcggttaaaggtctggtagagataggctttgatggctacgctgtcggcggtttggctgtgggtgagccgaaggaagatatgcaccgtattctggagcatgtctgcccgcaaatcccggcggataaaccacgatacctgatgggtgtgggtaaaccagaagatctggtggaaggcgtacgtcgcggcattgatatgttcgactgcgttatgccaacccgaaacgcacgtaacggtcatctgttcgttaccgatggcgtggtgaaaatccgtaacgcgaagcataagagtgacaccagcccgctcgattccgagtgcgattgctatacctgtcgcaattattctcgcgcgtatctgcatcatctcgatcgttgcaacgagattttgggggcgcgtctcaataccattcataatcttcgttattatcagcgcttaatggctggtttacgtaaggctatcgaagagggtaaattagagagcttcgtgaccgatttctaccaacgtcaggggcgggatgttccaccgttgaacgttgattaa

SEQ ID NO: 522849 - DNA, 1071 bp, Stenotrophomonas maltophilia
atgcgcgtcgccgatttctcctttgaactacctgaatccctgattgctcactaccccatgcctgagcgtagcagctgtcgcttgctgtcactggacgggccaacgggcgcgctgacgcacggtactttcaccgatctgctcgacaagctcaaccctggcgatctgctggtctttaacaatacccgcgtgatcccagcgcgtctgtttggccgtaaagccagcggcggcaagattgaggtgctggtcgaacgtatgctcgatgataaacgtattctggcacatattcgcgcatccaaagcgccgaagccgggcgctgaactgctgctgggtgatgacgagagcatcaaagcgaccatgaccgcgcgtcacgacgcgctgttcgaggtggagttcaacgacgagcgcacggtgcttgatatcctcaacgccatcggccacatgccgctgccgccgtacattgaacgcccggatgaagaagccgaccgcgagctgtatcagaccgtctacagccagaagcctggcgcagtggcggcgccaacggcgggcctgcactttgatgaaccgctgctggaaaagttgcgcgccaagggtattgagatggccttcgtgacgctgcacgtcggcgcggggacgttccagccggtgcgcgtggacagcatcgaagaccacatcatgcactctgagtatgccgaagtgccgcaggaggttgtggatgcggtgctggcggcgaaagcgcgcggtagccgcgtcgtggccgtcggtacaacgtcggtacgttcccttgagagcgctgcgcaggccgcgaaaaaagagctgattgagcccttctttggcgatacgcagatctttatctacccgggctatcagtacaaagtcattgatgcgctggtaaccaacttccatctgcctgaatcgacgctgattatgctggtctccgcgtttgcggggtatcagcatacgatgaacgcctacaagtctgcggtagaacaaaaatatcgcttttttagctacggtgacgcgatgtttatcacgtacaatccgcaggctttgaatgagcgtgtcggggaataa

SEQ ID NO: 522850 - DNA, 582 bp, Stenotrophomonas maltophilia
atgaattttctcgctcacctgcatctcgctcacctcgcggacagctccctctccggcaatttgctggccgatttcgtacgcggcaaccccgcggaagattattcccccgaggttatcgacgggatttttatgcaccgccgcatcgacgtgctgaccgataacctgccggaagtgacggaagccaaagcctggttccgccccgaaacgcgacgcgtggcgccgatcacgctcgacgtcatgtgggatcatttcctgtcgcgccactggtcccagctgtcgcctgatatgtcgctgcctgagtttgtgcgctacgcccacgcgcaggtgtcgatcattttgccggactccccaccgcgctttgtgaatctgaataactatctgtggtctgaacgctggctggagcgttaccgcgagatggatttcattcagaacgtgctcaacggcatggccagccgtcgaccgcgtctggacgcgctgcgcgactcctggcacgacctggacaaacattatgacgcgctggaaacgcgcttctggcagttctacccgcgcatgatggcgcaggcgaaaaataaagaactgtga

SEQ ID NO: 522851 - DNA, 603 bp, Stenotrophomonas maltophilia
atggttctggtaactcgtccggctccggattttacagctgccgccgttctgggcaacggtgaaatcgttgaaaacttcaacttcaaacagcacaccaacggtaaagcgaccgttctgttcttctggccaatggacttcactttcgtttgcccgtctgagctgatcgcgttcgacaaacgttacgaagaattccagaagcgtggcgtggaagtggttggcgtctccttcgactctgaatttgtacacaacgcatggcgtaacacccctgtcgaaaacggcggcatcggtgcggtgaaatacgcgatggttgcggacatcaaacgcgaaatccagcaggcttacggtatcgaacatccggacgctggcgttgcgctgcgtggttctttcctgatcgacgcgaacggcatcgttcgtcaccaggttgtgaacgatctgccgctgggtcgtaacatcgacgaaatgctgcgcatggttgacgcgctccagttccacgaagagcacggtgaagtgtgcccggctcagtgggaaaaaggtaaagaaggtatggcggcttccccagacggcgtagctaaatacctgtctgagaacgtatccagcctgtaa

SEQ ID NO: 522852 - DNA, 1380 bp, Stenotrophomonas maltophilia
atgaaatggatgaaatcggttgtttgtgcggcactgctggccgtcgccggtccggcattcagcgagggcgcgccggtggaatccccgcgggattatgcctatggcctgtcccttgatacctctgcctcttcgccgtggtatcgggtcatgctgccgctggcggtttatcagcagagcacatcgcccgatctgcgcgacgtgcgcgtgtttaatcagtcgggcgagccggtaccgttcagtctggttaccacgacgcgtccgcagccggcaccgaccaccacggcgctgcgcctctttgcgcttaacgcctcgccgggtggggaagagggtagcggtgataaaattatgttacgtgccagaaacggcgtggagattgtgctggaagagcaacacgcggcggctgccggacagcactatctgctgaccctgccggaaaacgcgacggaggttccgctctctcagctccagcttttctgggacacgccgcagggctcgtggcaggggacggcatcggtctattacagcgaggatctgaaaaactggtataccctgcgcgaagagatgcccctgctggacgtgatgagtggacaggatcgcctgaagctcgaccgcatcgataccgatctggtgttatctcctgaggcgaatcgctatctgctgctggtgctgaacacggggcgttcagccctgacgttaaccggcgtcaacgcgattaacgctcctgtgcagccggaatcagagcacattagcctggcgggagagggggagcggctatccgaaagcgaagccgtgtggcgctggacgcatccgcagcctctgagtgcgatcgccttcatgctgaatggtgacggcgttctcccggcagaaatagcctggcggggggcggacaaggatcggtggcatacgctgaaaaaagaggtgatctaccagctcggcggcaaaacgtctgaacctgttccgctcccgggcgggctggtcgaggtggtaaaaatcaagacctacaatgcccgtttgccagagaacctgccgggcgtgatcgggcaacgcgtgcgctatgatctggtgttcaacgcgcaggggaaggggccgtatctgcttgcgtgggggaacggggctgcgaaaccggcaagcgtggagacggatatgctgatcccgaccgaactgcgtaaaacctacgctctggcagccctgccgatggcggatacgctggaacctgtcccgctgggcggcgaggcgcgtttaaccgcgacgtctgcggctgagcaggaaagcagaatgaaaacgctgatggtctggggcgtactgatcgtcggggtgatggtgcttgcgggtatggcatggcgcatctggcgcgaggtaaaaaaagacggcgcagcataa

SEQ ID NO: 522853 - DNA, 2610 bp, Stenotrophomonas maltophilia
atggacgagctttacatccttggctgtttgttcctggtttttgcgctggtcgtggcccccgtgcttgcggtgataggctttaatcgaagcacggcggcgcggcaggagatcgcccggcttcgccagcgcattgaggcgcttgagcagcacggtgtagctgagaaagcgccggagccggtgcagaccgccgcgccagtggagacaccagcgccggtgccagaggccgttaacgcacctgtcgatccctggcgtcccgaaccgcccgtcactgaagcagaacctgcgcctgtcccggcggcaaaacggccttccgcctttggcggcatcctgtcctcgctgacgcgctggtttatgcagggcaatccgctggcaaaactggggattgtactgctcttcctcggcctctctttcctgctgcgctataccgttgaacattcactgtttccgcttgagctgcgtcttgccgccacggcgctgtttgccatggttctgctggccgttggatggcggctgcggcacaggcagcggatctacgcgctgatcctccagggcggggcgaccggcgtgctttacctgaccgtctttggcgcattccggctgtggcagatgctgccgatgacgctggcgtttgcgctgctggtggtgatttgcgcggcgagcgtcgggctggccgtgctgcaaaaggcgctgagtcttgccatgctggcgagcctcggcggatatcttgcgccgctgctcctgtctaccgggggcggtagctttgtggagctgttctccttctatcttctgctctccatcggcattctcgtcattagcatctggcagcactggcgcgagctcaacctgctcgggctgctcttcacgtttggcgttggcggagtgtgggggctgagcgactaccagcctgaaaactatgttatctgtcagctgttcctgattgccaatacgcttatttttggcgtgtttagcgtagcgctgtcgctgcgggcgcaggaaaagggcaaacagattattgacggcgtactgctgtttgccccgccgctgattggttttgggatgcagtacggcatgacgtcgcactggacgtacggcccggcactcagcgcgctgggttatggtgcgttttatctctcactggcgttcctcgcgctgcgacgttacccctccattgggcgaccactgattatggcggcgctggcgattggcggcgggtttgccacgcttgccattccgctggcgctttcggcgcgctggacggcgatggcctgggcgctggaggggctgggtatcctctggctgggcgtgcaacagcagcagcggcgtatgagctatagcgggacggcgctgctggtgctggcgctcggcagcgcgatatgggcgcagatggacggcgtcacctccctgagcctgctgcttattttcgcagtgctcagtctttgctgggtggctgcggcctggctgtggcgaaaaatctctctgccgggtagttgggcgctgctggtcggtgggctgctgttctggttagtggcgcaactgggtgcgtcgcaactgatcctcaagacagaattatcggttctggcgggcgtgctggcgctgacggcggcgtcggcctggggatggcggcaggctgctgctcgtctggcatggcgggagctggatgccagcaaatggctgctgtggccggtgatgctgctgatggtgctgtatcaggtctggcaacagcagatcctggcagccggctgggcaaatctggcctgggctattgcgctgcctgccgccctgatgctgttgcggcgcgacgaagataaacttcttccgcgcatcgcaatggggctgcatctgtcgctgttgtggatgattttactcgccatggccgccgagctttactggtttgcccgctccctgccatggggcatggcggcctggggaagcggcattgcgatggctgtcggcggtggggtgattatggcgctctccgcggccgtacggcgtcgcgggtggccgttccgggtatggcctgcgctctacgcctgccttgccgtgatccctgtggttgtggcgctggtggtattgctggtcgtgactaatttccaggacggggtagtctatcgacagacctggctgccgctggtgaacccgcttgaggaaggggcgtcgttcgcgctgctggggctggtggtgttttatcgggcagtggatcgccactatccggcatcgcttgcgcagtcccgaccgtggtccgccgttgtgctgatggcgcttggcttctggtggctaaacggcgcgctgctgcgcgcgctggcgtggtacggcgaggtggcctggaatatggagtcgttgtggcattcgcggcttatccagaccacctttgccctgttctggatgttctgcgcgctggtggtcatgatccgcgccacccgtcaggcctcccgtcagcagtggcttgccggtgcggtgctgctgggggtggtcatgctcaaactgatgctggtggacagcgcgggcggtggcggcctggcgcgtgctgtcgcgtttattggcgtggcgatcctggtcctgattgtgggctatttctcgccgctaccgcctaaagcaggagaagaaaaatga

SEQ ID NO: 522854 - DNA, 1818 bp, Stenotrophomonas maltophilia
atgttaaacgcctggcaccttccggttgccccatttgttaagcaaaacaaagacaaccttgtgattacgctctggctggcaggggaaaatcagcctgaacgtgtgaccctgcgcgccgaagtggataacgaagagacatcgctgaaaatgcacaaggtgcgcagccagcctcagccgggtattacggcgtggcgggcgaatatcgatttgcgcagcggacagccgcgtcgccgctacggcttcaagctgctgtggaacaaccgccagctgtggtttaccccgcagggcttcagccgtttccctccggccaggctggagcagtttgccgtggatcacccggataacggcccgcagtgggttaacgatcaggtcttttaccagattttcccggaccgctttgcgcgcagtgaaaagcgcaccgccgatcaggacaaggtttattaccatcatgcggtcggtcacgacatcattctgaaaaaatgggacgagccgctgaccgcccaggcggggggatcgaccttttacggcggcgatctcgacggtatcagcgaaaaactgccgtacctgaaaaagctcggcgtgacggcgctgtacctgaacccggtgtttaaagcgccaagcgttcacaaatacgatacgcaggactaccgccacgttgacgagcagtttggcggtgacgaggcgctgctgcgactgcgccacaacacgcaaaaaggaggtatgcgcctgatccttgatggcgtgttcaatcacagcggtgattctcatgcgtggttcgaccgccacaatcagtcgatgggcggcgcatgccataatccggattccccccaacgtgactggtacagttttgacgagaatggacgcgccctggactggctgggctacccgagtctgccgaagctcgatttccagtcgtcaacgcttgtgaatgaaatctacggcggcgaagacagcatcgtgcgccactggctgaaagcgccgtggaatatggacggctggcggctggacgtggtgcatatgctgggtgaagcaggcggggcgcggaataaccttcagcatgtcgccgccattacccggtcggcaaaagcggcccggtcggaagcattcgtcttcggggagcactttggcgacgcgcgtcagtggttgcaggcagatgcagaagacgcgtcgatgaattatcgcggcttcaccttcccgctgtggggcttcctcgctaacaccgatatctcttatgatccgcagaatattgacgctgaaacctgcatggcgtggatggagaactatcgcgctggcctgtctcatcagcagcagcttcggatgtttaaccagctcgacagccacgataccgcgcgctttaaatcgctgctgggtaaagatgtggcgcgtctgccgctggcggtgacctggcttttcacctggccgggcgtgccgtgcatctattacggagatgaagtggggctggacggtaacaacgatccgttctgccgcaaaaccttcccatgggagcctgaaaagcaggatcaggatctgttcagcctgtaccagcgtatggcgacactacgcaagcagagccaggccctgcgctacgggggctgtcaggtgatgtacgcccaagataatgtggtggtgtttgtccgcgtctacaaccagcagcgcgtgctggtggcgatcaaccggggtgaggcgtgtgaagtggtgctggaagattcaccgctgctggccggtaaaacgtggaagagcaaagaggggaaagcgacgttacaggagagcgtgctcacgctgccggcgatctccgctacggtctggttcggcagctaa

SEQ ID NO: 522855 - DNA, 1374 bp, Stenotrophomonas maltophilia
atggaaagcactaacaaacttaaacgtggattgagcacccgccacatccgctttatggcgctgggctcggctatcggtaccggtcttttttatggctcggcagatgccatcaaaatggccggtccaagcgttctgctggcctacatcatcggcggcgtggcggcgtatatcatcatgcgcgcccttggcgaaatgtcggttcacaacccctctgccagttccttctcccgctacgcgcaggaaaatttaggcccgctggccgggtttatcaccggctggacctactgcttcgaaatcctgattgttgccattgccgatgtgacggcgtttggtatctatatgggtgtctggttccccgccgtgccgcactggatctgggtgctgagcgtggtgctgattatctgcgccgttaacctgatgagcgtgaaggtgtttggcgagctggagttctggttctccttcttcaaggtcgcgaccattatcatcatgatcctcgccggtttcggcattatcatctggggtatcggcaacggtggacagccaaccggcattcacaacctgtggagcaacggcggcttctttagcaacggctggctcgggatggtcatgtcgctgcagatggtcatgttcgcctatggcggaatcgagattatcggcatcaccgccggggaagcgaaagatccggagaagtctattccgcgcgccatcaactcggtgccgatgcgcatcctggtgttctacgtgggcacgctgtttgtgattatgtccatctacccgtggaaccaggtgggcaccaacggcagcccgtttgtcctgactttccagcatatgggcattgcgtttgccgccagcattctcaactttgtggtgctgaccgcctcgctgtcggccatcaacagtgacgtgttcggcgtgggccgtatgctgcacggcatggcggagcagggcagtgcgccgaaggtgtttgccaaaacgtcgcgtcgcggtaccccgtgggtaacggtgctggtcatgaccgtggcgctgctgttctcggtctacctgaactacattatgccggagaacgtcttcctggtgattgcgtcgctggcgacctttgcgacggtgtgggtgtggatcatgatcctgctgtcgcagattgcgttccgtcgccgcctgtcaccagaagaggccaaagcgctgaagtttaaagtgccgggcggcgtgccaacgaccattgtcggtctcatcttcctggtcttcatcattggcctgattggttatcacccggatacccgtatttccctgtacgtgggcttcgcgtggatcgtcctgctgctggtgggctggatgtttaaatgtcgccgcgatcgtcagctggcggaagcacagtaa

SEQ ID NO: 522856 - DNA, 1320 bp, Stenotrophomonas maltophilia
atgacccatcacttgaaatcgcgtgacattatcgcgctgggctttatgacatttgcgctgttcgttggcgcaggtaacatcatttttcctccaatggttggcttacaggcgggtgaacacgtctggacggctgcgtttggcttcctgcttactgccgtgggcctgccggtactgaccgttatcgcgctggcgaaagtcggtggcggtgtggacagcctcagcaccccgattggcaaagtggctggcgttctgctggcaaccgtctgctatctggctgttggcccgctgttcgcgaccccgcgtacggcgaccgtctcctttgaagtgggtattgccccgctgaccggtgacggcgcgatgccgctgtttatttacagcctcatttacttcgccatcgtgattctggtttctctctatccgggcaaactgctggatactgtgggtaacttcctggcaccgctgaaaattgtggcgctgattgtgctggcggttgcggccatcgtctggcctgcggggcccatcagctccgcgatggacgcctaccagaacgcggcgttctcaaacggttttgtgaacggctatctgacgatggatacgcttggcgcgatggtgtttggtatcgttatcgttaacgccgcgcgttcccgcggggtgaccgaagcgcgtctgctgactcgctacaccatctgggctggcctgatggccggtgtcggcctgacgctgctgtatctggcgctgttccgcctgggttcagatagcgcaacgctggtcgatcagagcgcaaacggcgcggcgatcctgcatgcttacgtgcagcacacctttggtggtgcaggcagcatgctgctggcggcgctgattttcctggcctgtctggtgacggcggtgggtctgacctgcgcctgcgcggagttcttcgctcagtatctgccgctttcttaccgcacgctggtgtttatcctcggcatcttctccatggcggtgtcaaacctcggtctgagccacctgattcaggtctcaattccggtgctgacggcgatctatccgccatgtatcgtgctggtagtgctgagcttcacccgtccgtggtggcataactccacgcgaattattgcgccagccatgtttatcagcctgatttttggtatccttgacgggatcaaagcatcagcatttgcagaaatcctgccagcctggacacagcgtctgccgctgtccgagcagggcctggcctggctgatgccttccgttgtagcgctggttctggcgattatctgggaccgtgcggcagggcgtcaggtgacatccaacgcccattaa

SEQ ID NO: 522857 - DNA, 1296 bp, Stenotrophomonas maltophilia
gtgctggaacgtctgtcatggaaaaggctcgtctttgaactgatcttatgctgtattccggccctcattctgggggctatttttggctatctgccgtggtttttactggtggccgtgacggggttgctcgtctggcatttctggaatttactgcgtctttcctggtggctgtgggtcgacagaagtatgacacccccgccgggaagcgggagctgggaaccgctactctacggcctgcaccagatgcagatgcgtaataaaaagcgccgtcgtgagctgggaagcctgataaaacgctttcgcagcggcgcggagtcgctgccggacgcagtgatcctgacgacggaagaagggaccatcttctggtgcaatggcctcgcacagcagctgttgggcctgcgctggccggatgataacggtcagaacatcctcaaccttctgcgctatcccgagttcacgctgtatctgaaaacgcgtgattttagtcgtccgcacaatctgaagctcaataacggtcgccatcttgaaattcgcgtgatgccctacagcgatcggcagtggctgatggtggcgcgggatgtcacccagatgcatcagcttgagggcgcaagacgtaacttctttgccaacgtcagccacgagctgcgtacgccgttgacggtgcttcagggctatctggagatgatgcaggagcaaacgcttgagggggcgccgcgtgagaaagcgctgcataccatgcgggaacagacgttccgcatggaagggctggtcaaacagctactaacgctttcaaaaattgaggctgccccgtcgctggcgctaaacgacatcattgatgtgccgatgatgctgcgagtggtggagcgcgaagcccaaacgctgagccataatcaacacaccctgagttttgatgttgataacacgctgaaagtgctcggcagtgaagatgagctgcgaagcgctatctcaaacctggtctataacgccgtgaatcataccccgacagggacgcatatcgcggtgcggtggcagcatactccggcaggggctgagtttagcgtcgaggacaacgggccggggattgggcctgaacacctcccgcgtctcaccgaacggttctaccgggtggataaggcgcgctcgcggcagaccggcgggagcggactggggctggcaattgtgaagcatgccgtcagccaccacgaaagccggctcaatatcgaaagcaccctgggtaagggcacgcgctttagcttcgtgatcccggaacgattaattgccaaaaaaagtgcctga

SEQ ID NO: 522858 - DNA, 690 bp, Stenotrophomonas maltophilia
atggcgagacgtattctggtcgtagaagatgaagctccgatccgtgaaatggtgtgcttcgtgcttgaacaaaatggcttccagccggttgaagcggaagattatgacagcgcggtgaaccagctgaatgaaccctggcccgatctgatcctgctggactggatgctgcctggcggttccggattgcagtttatcaagcatatcaaacgcgaggcgatgacccgcgatatcccggtggtgatgctgacggcgcgcggtgaggaagaggatcgcgtgcgcggtctggaaaccggcgcggacgattacatcaccaagccattctctccaaaagagctggtggcgcgtatcaaagccgtgatgcgccgtatttcaccgatggcggtggaagaggtgattgagatgcagggtctgagcctggatcctacctcacaccgggtcatgaccggtgaaaatccccttgatatgggccccaccgaatttaaactcctgcacttctttatgacacacccggagcgcgtttacagccgcgaacagttgctgaataacgtctggggaactaacgtctatgtcgaagaccgaacggttgacgtccatattcgccgcctgcgtaaagcactggaactgagcggccacgatcgcatggtacagacggtccgcggcacgggttatcgcttctcgacccgtttctga

SEQ ID NO: 522859 - DNA, 1206 bp, Stenotrophomonas maltophilia
atgcgcatacttcacacctcagactggcacctgggtcaaaatttttacagcaaaagccgcgccgcggaacatgaagcgttcctgaactggctgctggagacggctcaggctcacgaggtggacgcaattattgtggcgggcgacatttttgataccggatcgccgccgagctatgcgcgtgagctgtacaaccgttttgtggtcaacctccagcaaaccggttgtcacctggtgattgtcgccggaaaccatgactcggtggcgacgctgaatgaatcccgcgatattctggcgttcctcaataccaccgtggtggccagcgccggacacgcgccgcagatcctgaaaaaacgtgatggcacgccgggcgcggtgctatgcccaattccgtttttacgcccgcgcgatatcgtgcaaagccaggcaggcctgtccgggagcgaaaaacagcagcatctgttgcaggccatcacccgctattatcaccagcagcatacggaagcctgcgccctgcgcggcgaacaggccattcctatcgttgccaccgggcacctcaccaccgtcggggccagtaagagtgacgcggtgcgcgagatttatatcggtacgctggacgcgtttccagcgcaaaactttcctcccgccgactacattgccctcgggcatattcaccgggcccagatcgtcgggggatgcgagcatattcgctactgcggctcgcccatttccctcagttttgacgaaacgggcaaagccaaatccgtgcatctggtgagcttcaccgaaggcaaacttagcgccgttgagacgcttgaggtgccggtcacccagccgctggcagtgctgaaaggcgatctggccgccattaccgctcagcttgagcagtggcgcggcgcagtgcttaatccccccgtctggctcgatatcgaaatcgccaccgatgactacctgtacgatatgcagcgtaaaattcagacgctgacggaagaccttcacgtagaggtgctgctggtacgtcgcagccgcgagcagcgcgagaaaattctgctgaacgcccagcgtgaaacgcttagcgaacttcgggttgaagaggtgttcgcgcggcggcttgcgcatgaagaagtggacgaggccaggcgcaccaggcttaacgagctgtttgcccataccctgcattccctcaatgacgaggacgaaaacgcatga

SEQ ID NO: 522860 - DNA, 3132 bp, Stenotrophomonas maltophilia
atgaaaattctgagcctgcgtctgaaaaatctgaattcgctaaagggtgagtggaaaatcgatttcaccgcggagcctttcgccagcaatgggctgtttgccatcaccggcgcaaccggcgcgggtaaaaccacgctgctggatgccatctgcctggcgctttaccacgaaacaccgcgtcttaataaggtctctcaggcacaaaacgacctgatgacgcgcgataccgccgaatgcctggctgaagtggaatttgaggtcaaaggcgttgcttatcgcgctttctggagccagaaccgcgcccgcaaccagccagacgggaacttacaggcaccgcgcgttgagctggcccgctgcgaagacggcaaaattctggccgataaagtcacggataagctggaacaaaccgccgcactcaccgggctggactatggtcgctttacccgctcgatgttgctctctcaggggcagtttgccgccttcctgaatgctaaaccgagcgatcgggcagagctgctggaggaactgaccggcacggaaatttacggccagatttccgccatggtttttgaaaaacacaaagcggcacgcaacgcgctggagatgtgcgaagcgcaggccgcaggcgttgtgctgctgagcgaggaacagcagcagcacttgcagcaaagtttgcaggcacttactgacgaagaaaaaatcctgctggcacagcagcagagccaacagaaagattttcagtggcttacgcgtaacgacgagctgatacgtgagcagcagcgcgtagccgcttcgcagcagcaggcgcaacaggctctgacggacgccgcgccgcaactggcgaagctccagctggcacagcccgccgcccagctacgtccgctgtgggagtatcagcaggagcagaccacccgcctggcgcagacaacagcgcgaattgttgaagtaaatactcgcttactcgacagagcggcgcagcgctcgcgtattcgcaacggtgcgctgcgcaaccgtgaacagttgcagacagagcacagggtactgacgcagtggctaacagaacacaatcgtttccgtcagtgggggcaggaaattgccggctggcgggcgcattttacgcaactgagtcgcgataaaaatcagcttgtggcccagtcagcgcgtatggctgagcttcgtcagaaactggctgagatgccggagagtacgttgacgctgacggctgaggatctcgcgaaggcaatggagcaacaggcacaatcgcgggcgctccgccagcgtctgactgcgcttcacgctcgctatcagccgctgcaaaaacggctgcgccataatgcggaaagcgtgcagaaagcgcaggctgagcaggctaagctcaatgaaacgctgatcctacggcgtcagcagttcaaagagaaaaatcagcactatgccgacctgaaagcgctctgtgagcgtgaggcaacaatcaaggatcttgagaactatcgtgcacagctcgaagcgggtaaaccttgcccgctctgcggttcaagcgaacacccggcagttgtgcagtatcaggcgcttgaactgaccgacaatcagcgccgccgcgacgcgctggagaaagaggttgccgcgctaaaagaggaaggattgctggtgctcgggcaggtgaatgcgctcacccaacagatccagcgcgagacagaggaagtaaaggccctctctcaggaagagcaagcactcactaaagagtggctggaggtctgcgcctccctgaacatagcgctgaatattcaggatgatattgccccctggatgagcgaacaggagcagtatgaacgccatctgtatcagcttagccagcgtctgacgctgcaaaaccagctcaatgaacaggaagatcaggcgcgccagtaccagcagcagctgacggcgacgcgtcaggcgctggcagcctcgctagagtcgctgtcgcttagcgtgcccgatgaaggggccgaaagcgcctggctgagcgcacgcgaagctgaatatacccgctggcaggaaaaacaggcccagcacggtacgattcaggaacgtattaatgccctgatgcccatcctggagacgctgccggattctgatgacgcagaagccgacgcggttatccctgagaactggcgcggcatccatgacgaatgcgtgtcgctacaaagccagctcgccaccctacagcagcaggagacgcttgagcgtgaacggcttcagcagtcgcaggctcagttcagcgccgcgctgaccgcgagctgctttgccagtcaggaggcatttctctccgccctgctggatgaagcgtcgatccgccagcttgaacaacaaaagcagacgctggagaaccagctccagcaggccacggcgctctccgtacaggcaaaccagcagcttcaggcgcaccaggcacaacgcccggaggggctggaaaccgacgccgcaacccttcaggcgcagttacaccagctggcgcaacagcttcgtgaaaacaccacgcgtcagggggagatccgccagcagctcaaacaggacgccgataaccgtctgcaccagcaggcgcttatgcagcagattgaggaggcggcgcgtcaggctgacgactggggctatctcaatgcgctgataggctccagcaccggcgataaattccgtaaattcgcccaggggctgacgctggataatctggtgtggcttgccaaccagcagctcaaccgtctgcatggccgctatctgcttcagcgtaaagccagcgacgcgctggagctggaggtggttgatacctggcaggccgatgcggtacgcgatacccgtaccctatccggcggggaaagtttcctcgtcagtctggcgctggctttagcgctttccgatctggtcagtcacaaaacgcgcattgactcgcttttcctggatgaagggttcggcacactcgacagcgaaacgctggacaccgcgctggatgcgctcgacgcgctgaacgccaccgggaaaaccattggcgtgatcagccacgtagaggcaatgaaagaacgtattccggtgcagatcaaggtgaagaagatcaacgggctggggtatagcaggctggacagggagtttgcggtgcagtaa

SEQ ID NO: 522861 - DNA, 906 bp, Stenotrophomonas maltophilia; identical to SEQ ID NO: 119458

SEQ ID NO: 522862 - DNA, 915 bp, Stenotrophomonas maltophilia
atgctgtggttcaaaaatttgatggtttaccgtctcagccgcgacgtttcgctgcgtgcagaagagatggaaaaacagttagccgcttactcctttaccccttgcggtagccaggatatggcaaaaaccggctgggttccgccaatgggttctcaaagcgatgcgctgacccacgccagcagcacggggcaaatcatcgtttgcgcccgcaaagaagagaagatcctgccgacgcctgtggtgaagcaggcgctcgaagcgaagatcttcaagctggaagctgaacagggccgtaagcttaaaaaaaccgaaaaagattcactgaaggatgaagtgctgcactcgctgctgccgcgcgcctttagccgctttagccagaccatgatgtggatcgacaccgtgaacgggctgatcatggtcgactgcgccagcgccaaaaaagcggaagatacgctggcgctgctgcgtaagagccttggctcattaccggtggtaccgctggcactggagacgccgattgagctgaccctgactgagtgggtgcgcagcgggactgccgcgcagggcttccagatccttgatgaagcagagctgaaagcgctgctggaagatggcggcgtgatccgcgcgaagaaacaggatctggtgagcgacgagatcgccgtgcacattgaagcgggcaaagtggtgactaaactggcactcgactggcagcagcgcattcagtttgtgatgtgtgatgacggctccgtgaagcgccttaaattctgcgatgaactgcgcgatcagaacgaagatatcgaccgcgaagattatgctcagcgctttgacgcagactttatcctgatgaccggcgagctggcggcgctgatccagaacctggtggaaggtctcggcggcgaagcgcagcgttga

SEQ ID NO: 522863 - DNA, 288 bp, Stenotrophomonas maltophilia
atgcttcaaagtaacgaatacttttccggtaaagtgaaatccattggttttaccagcagcagcactggccgcgccagtgtcggcgtcatggcggaaggggaatacacctttggcaccgcagaagcggaagagatgacggtggtcagtggtgcgctgaacgtcctgctgccgggtgaaacggagtggaaagtctatagtgccgggcaggtgttcaacgtgccgggccacagcgagttccatttgcaggttgcagagccaacctcttatctgtgccgctatctgaaataa

SEQ ID NO: 522864 - DNA, 678 bp, Stenotrophomonas maltophilia
atgaaggcgacgttggcgatcctcacgattggtgtggtgcctgtaagcgaagtattaccgctcttaaccgagcatgtctctgaacaacaaattacgcatctcagtctgttagggaagctgagtcgggaagaggtcatggaagactacgcagtcggggagggggaagatcccctggcaacgttactcagtgacggtaaactggcgcacgtgtcacgccagaaaattgagcgcgcgctacagggtgtgatcgaagtgctcgacaatcaggactatgacgtcattttgctgatgagcacagcacccgttaaaggactcagcgcgcgtaatgccattctgctcgaaccgatgcggattatccccccgctggtggcgtcaattgttgatggtcatcaggtgggcgtgatcgttcccgtagaagaactgctggataaccagacggtgaagtgggccgcgctggagcacaccccgttgtacgcgctggcaaacccgttctgggacagcgaagcgaagctgattgcggccgggcaggagttgattgacagaggggcggatgtcctgatgctggactgcctgggcttccatcaacggcatcgtgatttactgcaaaaggcgctggatgttccggtgctgctctctaacgtcctgatggcgcgtctggcgtcagaattactggtgtaa

SEQ ID NO: 522865 - DNA, 192 bp, Stenotrophomonas maltophilia
atgccaaccagacctccctatccacgtgaagcccgcatcgttaccgttgaaaaaggtaatagcgatcagaccgtaacctggtaccagctgcgtgccgatcaccctaaacctgattcgctgatcagcgaacatgaaaccgaacaagaagcgctggatgcgaaacggcgctatgaggatcctgagaagtcctga

SEQ ID NO: 522866 - DNA, 525 bp, Stenotrophomonas maltophilia
atgaacccacccatctttttagttggccctcgcggctgtgggaaaaccaccgttggtctggagctggcgcgtctgtgccagagtcagtttgtcgatactgaccactggctccaggagaatgccggtaagaccatcgccgatatcgtggagaatgaggggtgggagagctttcgtgcgcgcgaaacggccacgctggaagcggtgaccgcgccgtcaaccgtgattgcgaccggtggaggcattattctggcgccgtataaccgccagtttatgcgcgaaaagggtgtcgtaatctacctctgtgccccggtttctacgctggtggggcggctggaggcgtttccggaagaagggcagcgcccggcgctgaccgcgaaaccgctgagtgaagaggtcagcgaggtcctcgccgaacgcgatgcactgtaccgcgaggcggcacaccacgttgtggatgcgtcagcgtcacccgagaaagttgcgattcagattattaccgccctgcgtttggcttgcgccagctga

SEQ ID NO: 522867 - DNA, 459 bp, Stenotrophomonas maltophilia
atggcgatttgggttgatgcggacgcgtgtccgaatgtgattaaagagattttattccgcgccgccgagcgggtgcagatgccgatgacgctggtggcgaaccagaatatccgcgtgccgccctccaggtttattcgttctctgcgcgtgccggccgggttcgacgtggcagataatgagatagtacgcctgtgtgacgcaggagatctggtgatcacggcggatatcccgctggctgccgacgtgctggcgaagggggccgcggcgcttaacccgcgcggcgagcgctactctccggcaacgatccgggagaagctcaccatgcgtgattttatggataccctgcgttccagcggcgtgcaaaccggtgggccggacagcctgtcgcagcgcgatcgccagcagtttgccgccgagctggataaatggctgctggaagtgaagcgccgcccggcgtag

SEQ ID NO: 522868 - DNA, 810 bp, Stenotrophomonas maltophilia
atggataagaaaatcgggtttatcggctgcggaaacatgggtaaagctatcctcggtggactgatagccagcggccaggtgctgccggggcagatttgggtcttcaccccatccccggataaagtcgcggcgctgcgtgatgagtatggtatcaacgccgccgaaagcgcgcaggaagtggctcaggtggcggacattgtctttggcgccgttaagccgaatatcatgattaaagtcctgagcgagatcacctccagcctgaacaaagagagcctggtggtgtcgattgccgcaggcgtgaccctcgatcagctcgcccgcgcgctggggcacgaccgtaagattgttcgcgccatgccaaacaccccgtcgctggtaaatgccggtatgacctccgttaccccgaacgcgctggttacttctgaagaggtggcggatgtattgaacattttccgctgcttcggcgaagcggaagtgattgccgaaccgatgatccacccggttgtcggcgtgagcggttctgccccggcgtatgtctttatgtttatcgaagccatggccgatgccgccgtacttggcggtatgccgcgcgcgcaggcctacaaatttgcggcgcaggcggtgatgggctcggccaaaatggtgctggaaacgggtaaacatccgggcgaactgaaagatatggtgtgctcgccgggtggcacaaccattgaagccgtgcgcgtgctggaagagcgcgggttccgctccgccgtgatcgaggcgatggaaaaatgcatggaaaaatcagagaagctgagtaagtcctga

SEQ ID NO: 522869 - DNA, 1104 bp, Stenotrophomonas maltophilia
atgatgaatgatgagttttatgacaatcacgagaacattcgggaagcgtggtatcagcagctttctcaggatgactcataccgttccggtctgcgatttgcccggcgaatacggctggcacgcatcgttggtctggcggcgctgtttgttccgcttgccagcgttctggtgagtcagcttctttctggcgtctggtggttgttattggtgggctgggtctttgtctggccccatctggcctggcagctggcttttcgttcgacctgcccccacagcggtgaaatcgttaatctgaaaatcgatgccatcattgctggcgtctggatgggattaatagggttcaatgcgctgccaacggcggcgctgatcgtgatgatcggcatgaacatgatgggatcggggggatgccgcttatttctgacaggacttgcgctgcttgctctgtctgccctgctcaccgtgcaatccacgggtactcctgtgctattgacctctgaaccgctggcgttgtggctgacgctccccgtgctggtggtctaccccatgctgtttgcctggctcagccaccgcacggcgatccggctggcagagcataagcgtcggcttgagctgatgagtacccgcgacggaatgaccggcgtgttcaatcgccgccactgggaaacgctgctgcggaacgaatttgaggcctgccgtcgcagccatcgacaggcgacgatactgctcatcgatatcgatcacttcaagacgatcaacgacacctgggggcatgacgtgggggatgaagcgattgttgccatcacgcgccagcttcagctgaccctgcgcgcaggcgattatattggccgcttcgggggagatgaatttgcggtgatcatgtccggcacgcctgccgacaacgcgattgcggcgatggcgcgcgtccatgaaaggctggtcaacatgccgctgcacggagcacctatggcgaggttgtgtatcagcgttggggttgccccctggggggcgcagttcacgcactatcgtgaatggctaaaggccgcggacgtggccctctataaagccaaaaatgccggacggggtcgcaccgaagtggccgcctga

SEQ ID NO: 522870 - DNA, 321 bp, Stenotrophomonas maltophilia
atgaaaacgacaatactggttaccctgctctctggcctgtgtctgatcgcctcagcacatgcggaagagaaaacgttaacgccccagcagcagcgcatgacgacctgtaaccaacaggcgacctcgcaaagtctgaaaggggatgcccgtaaaacgtatatgagcgactgccttaaaaatggtacgaccaaaccgggtgaaaaaagcctgaccccgcagcagcaaaaaatgcgcgagtgcaatgcccaggcgacacagcagatgcttaaaggcgacgatcgcagcaagtttatgagcgcgtgcctgaaaaaacaggcgtag

SEQ ID NO: 522871 - DNA, 261 bp, Stenotrophomonas maltophilia
atgaaaaatctcattgctgagttgttggttaagcttgcccaaaaggaagaagagtcgaaagagctggttgcccaggtcgaggcgctggagatcgttgtgacggcgctgctgcgacagatggcaaaaccagagcaggaggcgttgatcgacaacgttgaaggcgcgctggaaaaagctcgccctgattcacaggtgcctgcagaggacgcggagctgcttcagcaatacgtaaagaagcttttaaggcatcctcgcagttaa

SEQ ID NO: 522872 - DNA, 1224 bp, Stenotrophomonas maltophilia
atggaatcctggaaagttaacctcatttcagtctggttcggctgcttcttcaccggactggctatcagccagatattgcccttcctgccgctttacgtgtcgcagctgggggtcacttcccatgaagcgctctctatgtggtccggcctgacgttcagcgtgacgtttctggtgtccgccattgtgtcaccgatgtggggcagccttgcggatcgcaaggggcgcaagttgatgctgctccgcgcctcgctggggatggcgatagccattttgctccaggccttcgccaccaacgtctggcagctgtttattctgcgggcgataatggggctgacctccgggtacattccgaatgccatggcgctggtggcctcacaggtaccgcgcgagcggagcggctgggcactcagcacgctttccacggcccagattagcggtgtaattggcggccccctgctcggcggcttcctggctgaccatgttgggctgcgcgcggtctttatcattaccgccatcctgctaacggtcagctttctggtcaccctttttctgattaaagagggcggtcggcctgtcgtcagcaaatcagaacgcctgagcggaaaggcggttttcgcctcgctaccttatcctggcctgatgattagcctttttgtgacaacgatggtgatccagctctgtaacggctcggtgggaccgattctggcgctgtttatcaagtcgatggcaccggacagcagcaacattgcttttttgagcgggatgattgccgccgtgccgggcgtgtcggcgctgatgtccgctccgcgtctggggaaactgggcgacaggatcggtacggcacgcattctgatggcaacgctcatcattgcggtgctccttttctttgccatgtcgttcgtcacgacaccgcttcagctcggggtgttgcgcttcctgcttggcttcgcggatggtgctatgctgcccgctgtacagacgctgctggtgaaatattccagtgaccaggtaaccggccgcatttttggctacaaccagtcgttcatgtatttaggcaacgtagcgggcccgcttattggcgcctcggtctcggcgatggcgggtttccgctgggtatttgccgcgacggcggtggtggtgcttctcaatattattcaactggcctttgccttgcgccgtcgccggcgaatcgctgaggcaaagtcagcccggcaaacacgataa

SEQ ID NO: 522873 - DNA, 684 bp, Stenotrophomonas maltophilia
gtgaaaggaaaaggtctgcttattcttattgttattgccgggatcgccacggtgggctaccgctggttgccgccgcattacaaccctttcgtgccgcttacgcttgacgatccgccaggaaaaataacccagtttaaactccggcgcttaacgccgcaggcgtgcgaaaacctgttagcgcaggcgaatcaacgccagcttatccgtacccaggcggtcgctgacagcgccggggaatgtccgctgagtaacgtggtgcgcgtgcgcgattttggcccagtgagcctgaacagcagcttccttgccagttgcccgctggcgttaagctcggcgctgtttgtcagccagcaggcccggccgctcaccaaaacctggaccggcagcgagcttacgcgtattgaacatctgggcagcttcgcctgccgcaatatctacagccgcccggatgcgcggcgcagcgaacatgccacggcggatgcgctggatatcagcgctttcaggctggcaaacggacagcgtgttaccgtcctcaacggctggaaagcggaaaagacgcagccctggctacaggccctgctgtcggcaagctgcggctattacggtaacggtctggggccggactacaatgccgcccatgccaaccatttccatctgggaatgcgcggctatggcttatgtcgatga

SEQ ID NO: 522874 - DNA, 1098 bp, Stenotrophomonas maltophilia
atggcaaagcagcgcgtaggtattgtctttgggggaaaatcatcagagcacgaggtgtcattgcaatcggctaaaaatatcgttgatgcgattgataaaagccgttttgacgtggtgctgctgggcattgataaacagggccaatggcatgttaacgatgccagccagtatctgttacacgctgatgatccggcgcgcatcgcccttaatccttctgatatcagcgtcgcaacggttccaggcgtggcacagggacagcttatcgatgccgggaacgcgcaggcgctggcacagattgacgtggtgttccctatcgttcacggcacgctgggcgaagacggctccctgcaaggcatgttgcggatggcgaacctgccgtttgtcggctccgatgtgctgggttctgccgcctgcatggataaagacgtcacaaaacgtctgctgcgcgacgccggtctgaatattgcaccgttcgtcacgctcactcgcgccaaccgcgataaacacagcttcgcgcagatccaggcgcaactcggcctgccgctgttcgtgaaaccggcgaatcagggctcgtccgtcggcgtcagcaaagtcaccagcgaagcacagtttaacgatgccgttcgtctggcctttgagtttgaccacaaggtggtggttgagcagggaattaacgggcgcgaaattgagtgcgccgtactgggtaacgacttcccgcaggcgagtacctgtggtgaagtggtgctgaatagcgacttctactcctacgacaccaaatatattgacgacaaaggtgcccaggttgtggttcccgccgcgctcgatcctgacgttaacgacaagatccgggcgatcgccgttgaagcctatcaggcgctgggatgcagtgggatggcgcgcgtcgatgtgtttctgacggcggataacgaggtggtgattaacgaaatcaacaccctgccgggctttaccaatatcagcatgtacccgaaattgtggcaggccagcggaataagctatccggaactgatcacccgcctgattgaactggcgctggagcgtcacgccgctgacagcgccctgaaaagctctgttaactga

SEQ ID NO: 522875 - DNA, 219 bp, Stenotrophomonas maltophilia
atgaagctcacttccaaactacgccgtgactggcattactacgcctttgcgatcgggctgatctttatactcaacggtgttgtcgggctgctgggatttgaagcgaagggctggcaaacctatgcggttgggctggtgacctgggtaatcagtttctggctggcgggattcattatccgccgtcgtcccgatgagacgacggcagagaaagccgactaa

SEQ ID NO: 522876 - DNA, 303 bp, Stenotrophomonas maltophilia
atggcagactttacattgtcgaaaccgatttttggcggaaaacaaccaaaaacctccacggcggggaatattgcctatgccctgtttgttctgttttgtttctgggcaggaacccaactgctgaacatgctggtgcatgcccctggcgtgtatgagcatctgatgcaggtgcaggataccggccgcccgcgcgttgaaatcggtttaggcgtgagcaccgtattcgggctcattcccttcctcgcgggcagcatggttctgggcgtgattgcgctcgtgctgcgctggcgcaaccgccactga

SEQ ID NO: 522877 - DNA, 1098 bp, Stenotrophomonas maltophilia
atgccatttgccgtaccacgtgcattaccgctgacgttactcgccgccgtcgtgctggcgcgctgtgccgagaaaggggccgccccgctcaaagaaggggagaagcccgttgatgtggcgagcgtggtgcggcaaaaaatgcccgccagcgtgaaggatcgcagtgagtgggctgatgcgctggcaacgacctttaaaagtcagaagatcgcgcctaccgaggagaacatctgctctgtactggcggtggcgcagcaggaatcgatgtatcagtcagatcctgttgtgcctggcctgaacaaaatcgcctggaaggagatcgaccgccgggccgaatcgatgcatatcccggttttcctggtacataccgcacttaaaatcacctcgccaaacgggaaaagctacagcgaacggctggatacggtgaaaaccgagaggcagctcagcgccattttcgatgatttcatcaatatggtgccgatggggcagaagctgtttggctcgctgaatccggtacataccggcggtccgatgcaggtaagcatcgcatttgcggaaaagcataccgacggctatccgtgggatatcgacggtacggtgcgtcaggaagtcttctccctgcgcggtgggctgtggtttgggacgtatcacctgctgaattatccggccaactacgataaaccgctgtatcgttttgccgactttaacgcgggctggtatgccagccgaaatgcagccttccagaatgcggtaagccgcgccagcggtgtgaagctcgctttggatggcgatctcattgcttacggcagcagcgaggcagggtccaccgaacgggcagtgcgaaaactttcgacgaagctggagatgagcaacagtgacattcgccgacagctggagaagggtgacagcctggcgtttgagaaaacggatctgtataagcaggttttcgcgcttgcagagaagaaaagtggaaaggcactacccagagccattctgccaggcattcagcttgaaagcccgaagatcacgcgtaacctgacgaccgcatggttcgcaaaacgcgtggacgatcgtcgggctcgctgtatgggactgtaa

SEQ ID NO: 522878 - DNA, 1221 bp, Stenotrophomonas maltophilia
atgtttaagtcttttttcccaaagccggggccctttttcctgtcggcatttatttgggcactgctggctgtcattttctggcaggccggtggcggcgcgtggctgacccgtcttacgggggcaacgggcgacattcccattagcgctgcgcgcttctggtccatgagctatctgcttttctacgcctattacatgctctgcgtggggctttttgccatgttctggtttatctattcgcctcaccgctggcaatactggtcgattctcggcacgtcgttaatcatctttgtcacctggttcctggtggaagttggcgtggcggtcaacgcctggtatgcgccgttttacgatctgatccagacggcgctgagttcgccgcataaagtgaccattaaccagttctaccatgaggtggggatcttcctcggcatcgccctcatcgccgtggtgatcggcgtgatgaataactttttcgtcagtcactatgtgttccgctggcgtaccgcgatgaacgaacactatatggcgcactggcagcacctgcgtcatatcgaaggtgccgcacagcgtgtgcaggaagacaccatgcgttttgcctctacactcgaagatatgggcgtgagctttattaatgccatcatgacgctgatcgccttcctgccggtgctggtgacgctctcatcccacgttccggaactgccgattgtcggccatctgccgtacggcctggtcattgccgcgattgtctggtcgctgatgggaacgggactgctggcagtggtggggatcaagctgccggggctggaatttaaaaaccagcgcgtggaagcggcctaccgtaaagagctggtgtatggtgaagacgatgccaaccgtgcgtcaccgcctaccgtgcgtgagctgtttggcgccgtacgtcgtaattacttccgcctctatttccattacatgtatttcaatatcgcgcgcatcctttatcttcaggttgataacgttttcgggttgttcctgctgttcccgtccatcgttgcgggtacgattacgctcggtctgatgacccagatcaccaacgtttttggtcaggttcgcggttcgttccagtacctgattagctcctggactacgctggtggagctgatgtccatctacaaacgtttacgcagtttcgagcgtgagctggacgataaggatttgcaggaagtcacccatacattaggttaa

SEQ ID NO: 522879 - DNA, 534 bp, Stenotrophomonas maltophilia
atgtctgaaaagcgtgtggttttggtggttgatatgcagaatggggtgtttaagacgccgcgccatcagagtgagaaatgtgtctcactgatcaatcagcttacccaggctgctgaggccgttattttcatacagcatactgaagctggcgggctagaggaggggagcgaagggtttgcattgctgcccgatctcaaccagccggcaggggcgttttacgtcacgaagaccgcttgcgatgccttctataacacttcgctcgaggcactgttgcgcgaacaggagatcgatgaatttattatctgcggctgcgcgacggattattgtgtcgatgccacctttaaaaacggtgtcagccggggctaccacatcacggttgcggaggatgcccacaccacggccaatcgtccagcggccgatgcccaggttctgatcgcgcactataacgatgtctggcgtaacttcatcgcccctgccaacccgccttcggtgaaacgcaccgaaacaattcttgaaaactggaaagcgaactaa

SEQ ID NO: 522880 - DNA, 1161 bp, Stenotrophomonas maltophilia
ttgaaacgttgtctgctctctttcgccgcgctgtgtgcggtgagcctgtccaccgcccaggcagcacagcctctgacggcaccggttctggcctctgacattgccgatcgctatgcgaaccttatttattacggcagtggtgcgacgggaatggcgctggtcgtgatcgacggtaaccagcgggtgtttcgcagcttcggtgaaacacgaccgggaaataacgttcgcccgcagctggattccgttatccgtgtcgcgtcgataaccaagctgatgaccagcgaaatgctggtgaaattgctcgatcagggcgtggtaaaactcgacgatccactcagcaaatatgcgccacccggcgctcgcgttccgacgtatcagggaacgccgatcaggctggtgaacctggcgacccataccagcgccctgccgcgagaacagcccggtggcgctgcgcatcgccctgtctttgtctggccaactcgcgaacaacgctggaattacctgagcaccgcaacgctgaaatcggctccgggttctcaggctggctattctaacctggcgtttgatctgctggccgacgcgttagcaacggcatcaggtaagccttaccctcagctgtttgaagagcaaatcacgcgtccgctcgggatgaaagatactacttacaccccctccccggaccagtgcaagcgtctgatggtggcggaaaaaggggccagcccgtgtaataacacgctggcagccattggcagcggtggggtttactctacgcctggcgacatgatgcgctggatgcaacagttcctctcatcggatttttacgcgcgcagtaatcaggccgaccgaatgcagacgctcatctaccagcgtgctcagttacgtcgcgtcattggtatggatgttcccggtaaagccgatgccctcggcatgggctgggtatatatggcgccaaaagatggtcgcccgggtattattcaaaaaaccggtgggggtggcggattcatcacctacatggcgatgattccgcaatcaaacgtgggcgcttttgtggtggtcacccggtcaccgaacacccgcttcgtgaatatgagtgatggcgtaaataaccttgtagccgagctgagcgccaataaagcgcaggtacttacggccgctaactga

SEQ ID NO: 522881 - DNA, 627 bp, Stenotrophomonas maltophilia
atgaacgttaatgcgaaaccactttctgaattaagccggctcataaagtgtctggaagtcgccggtaccccatttaaaacggaaccacaacaatttataactaccggcaataatgatgatgaaccattgacatttgtaatacaatccggcctgacagtcgttcaccgtaaatcagatgaattactcgtgggtattgcacgggcaccctatattcatggattaagtgcatggattaatgacagctatcttgaatattctctgatggcacaaacaccttgtaccggattttatttgccagcctctactgcatgcgaaattattcaagaagcgcaactctggcaagaagcattctgctggctttcatggctaaatcatttactgggaaaacgtgatatccagctggtcggaaataattcgtatagccaaattcgggcgatgctaatcaatatggccgagtgggatgacacgctacgctcaaaaattggtgtgatgaatcatattcagcgtagcacgcgtatatcacgttcggtggttgcggaggttctggcggcgctgcgtcaggggaactacatcaatatgagccggggcaaactgatcagtatcaaccgtttgcccacggactattaa

SEQ ID NO: 522882 - DNA, 2775 bp, Stenotrophomonas maltophilia
atgcaaacatggaaaaagaaactggttgtatcacaacttgcattagcctgcacactggctatcgcttctcaggccaatgcgaaagatatatccggcacgacatataatacttttggatatgacaatactgcgtccacgccctggtattatggttatgctgactgggattattcagatgccacacatgatggtgacatttatccagtcatcaataaatcaaccgtaaacggagttatttcgacatactatctggatgatggtgtcaatggccgtgcgaacgcgttgagtatttctaacagcaccattaacggcatgatcacgtcagaatgtatgaccacgacgtgtgcagaaggcgtagatactgacggcactacgcatacccagtacgatcgttttagcctgactgttgataactccaccatcaacgatacctacgagcattatgcgtatgatgtcgttaatggcgataccactgaaacgcattatctggacacctatggtctgggtaacgccatcaccctggatgttgagtctgatatcgttattcagaacaattcccacatcgcgggcatcacgctgacgcagggttatcaggagcttgataacacgccatacgacggtgttgaaggcgttgctaacagcagcaatatctttaccgatacgctggtggtgaaagactctgtgctgacctctggcgcatacagcgatctgggtaccagcggcttctacggtcaaacggcgaagccaagcgactacggtgaaaccaacgccacggctgcggatgatgcggcgctgatcgttgctgccagtgcgtctgataacgccatgcagaccaccgctaccttcgatcactctaccgttacgggtgacattcttttctccagcacctttgataacaacttctacgagaatggcgatccggcaacggataccacagaagatggcgtctataacccaaccaccaacggctgggatggtaccgataaactggatgtcacgctgaccaacggcagtaagtgggtgggtgcagcgcagtccagcgttgaagctatcggcactgcgcagatgtatggccagggctacagcaacgtagactggcacgcattgtccccgaatagcatctggcctgattctacctttgacagcaacggtcacgttgccggtgaagaggtgtatcagagcggcctgttcaacgtggcgctggataacggttccgagtgggatacccgcaagatctccaacatcgatgcactgacggtgaacaaccagtctcaggtcaatgttgaaaactccggcctgctggcagattccatcaccctgaccaatgcttcaaccttgaatattggcgacagcggtgccgtggcaaccgacagtctgtatctggatagctacagccgtgcggcactgactgaagagacggcagaactgtatgccaacaccattactgtagacaacggtgcagagctggcgctgggtctgggtcaggttgatacgcacaatatggtgctgactgatggcggtgtgctcaacgttgccagccgcgattatgtgctgaacagcgacctgaacaacgcacgctatatcaccaacgatagccataaagcggactacgactatggtgttgtcgcgctgaactctgacggccatctggcggtgaacggtgacgttgccggtaactataaagtgcgcatcgacgatgcgaccggtgcaggctccgtagctgactacaaaaacaaagagatcattcgcgtctatgacaataacgcggataccgctgccagctttactgcggcaaacaaagctgatttaggtgcatacacctatcaggcgcagcagaagggtgacaccgttgttctccagcaggaagagctgactgactacgccaacatggcgctgagcattccttctgctaataccaacatctggaatctgcaacaggataccgtgggtacccgtctgaccaacagccgtcatggcctggcagataacggcggcgcatgggtgagctattttggcggcaactttgacgcggataatggcaccgttagctacgatcaggacgtaagcggcattatggtgggtctggatactcagatcgacggtaataacgcgaagtggattgtcggtggtgcggctggtttcgcgaagggtgatatcagcgatcgtactggtcaggtcgatcaggacagccagactgcgatgatctacgcgtcggcgaagttcatgaacgacatcttcctcgacagctccatgagctacacccgcttcaacaacgacctctctgctaccatgagcaacggtcagtatgttgacggtaataccacgactgacgccgttggtttcgggatgaaactgggctatgactggaaaccaaacctgtctggctacgtcacgccttacgcggcgatctctggcctgttccagtccggtgatgactatcagttaagcaacgacatgcgtatcgatggccagtcttacgacagtatgcgttatgagctcggcgtggatgcaggttataccttcaactacggtggcgagcaggcattaaccccttacttcaagctggcttacgtgtatgacgatgccgacaacaatgctgatatcaacaatgacagcattgacaacggcgtggaaggctctgcggttcgcgtgggactgggcactcagttcagcttcacgaaaaacttcagtgcttacactgatgcgacttatctgggcggcggcgacgttgaccagaactggggagcaaacctgggtgtgaaatatacctggtaa

SEQ ID NO: 522883 - DNA, 975 bp, Stenotrophomonas maltophilia
atgaccgatttaattgctcgtccccgtcgcctgcgcaagtcacccgcactgcgcgccatgtttgaagagacaacactgaccttaaacgatctggtgttgccgatttttgttgaagaagagatcgatgactacaaagccatcgacgcgatgccgggcgtgatgcgcattcctgaaaagcatctggcccgcgagatcgaacgcattgcgaatgcgggcatccgctcggtgatgacgttcggtatctcccaccacactgacgcaaccggcagtgatgcatggaaagaagacggcctcgtggcacgcatgtcgcgcatctgcaaagagagtgtgccggagatgatcgtcatgtccgatacctgcttctgcgaatacacctctcatggccactgcggtgtgctgtgcgatcacggcgtggacaacgatgcgaccctgctgaatctgggcaagcaggcggtggttgccgccgccgcgggtgcggatttcattgcaccttctgcggcaatggatggtcaggttcaggctattcgtcatgcgctggatgcggcaggctttaccgacaccgccatcatgtcctactccaccaaattcgcctcctccttctacggcccgttccgtgaagcggcgggcacggcgctgaagggcgatcgtaaaacctatcagatgaacccgctgaaccgccgcgaagcgattcgtgaatctctgctcgatgaagcacagggcgcagactgtctgatggtgaaaccggccggcgcgtatctggatatcctgcgcgacattcgcgaacgcaccgaactgccgctgggcgcataccaggtgagcggcgagtacgcgatgatcaaattcgccgcgcaggcgggtgccatcgacgaagagaaagtgatcctcgaaagcctgggggcgatcaaacgcgcgggcgcggatctgatcttcagctacttcgcgctggatctggctgagaagaaaattctgcgttaa

SEQ ID NO: 522884 - DNA, 1725 bp, Stenotrophomonas maltophilia
atgtttagtctcgacagcgttcttgatgacctttggcctcaggcgaggcccgcaccctggcaaaaaagtctgttaaaaagactgctccacgaagacgaatttcagcagtttgccgccagccaccgtcacctgaaagggctggatatggtagagcaggttctggaacaccttgatattctctgcaccatttccgcccgagacctcgaacaaatccccgaacacggcccactcattgtgatagcgaaccacccgacgggcaccctggatgggctggcgctactgtatgccgtttcgcgcgtgcgccgggacgtcaaggttgtcaccaaccggatgctgtctcaccttgagcccctcagctcgttgtttatccccgtggacaatatgggcggcagaaccgcaaaagcatctctggtgcagatggagcagcacctgcaaaacgccggcgtgctgatcttcttcccggcgggcgaagtctcccgcccaacgcgtaaaggcatccgcgataaaaagtggcatccgggctttatcaagctggccagcaaactacgggtaccgctgctaccggtacatattcaggcccacaacagcctgctgttttatgccagcaccctggtatcgccgacggtatccctgctgctgctgatgcaacagatgtttcgccgccgtcacagccagctgccgattaaaatcggccagcagattgcctggaatgatcggtttagctctaccctttcatcgcgtgagatggccgagcagtgccgtcagcacgtgatacgacttggcaagggattgcctggcgtctttaaaacccagtgcgccattgcccgcccggaagacagggccacgctgaagcgggagctggcgcaggccgaatgtctgggcaaaaccagcgatggtaaaaccatctatttgtggcagcgcaacgggcaggaagaggcgcctctgctgcgcgagctggggcgactgcgcgagattgcctttcgcgccgtggaggaaggcagcggaaagcgccgggataccgacagctacgatgatgactatctgcaccttattctgtgggatgatgatgacctcgagattgtcggcgcgtaccgctttatgccaacggccatgcaggtggaaaagtgcggcgtcgagggattgtacagttacagcctgttccactacgacgaaaaaatgcaggacatactggagcacggcattgagctggggcgcagctttatacagccgcgctactggggacgtcgcggtctggactacctgtggtcaggcattggcgcctatctggcgcgctatccacattaccgttacctgtttggtccggtgtccatctccggcggcttaccgcctgccgcccgggatctgctggtcgcgttttatcgtctctggtttccggccagccacgcgttagccgcctcgcgtcaaccctacccggcgtcactcccggacgtgctggcgcaatttagcggggtggattacgtggatgacctgacaaagctcaaatccctgctcggcaatctgggctgcggtattccgccgctttataaacaatattccgagctatgcgagccaggcggcgtgcagtttatcgatttcggcagcgatccggcgttcaataactgtatcgacgggctggtgctggtggatctgtgttatctgaaggcgaaccgctatcagcggtatatagaggcgcacttaataccctcacccctgccctctccctaa

SEQ ID NO: 522885 - DNA, 852 bp, Stenotrophomonas maltophilia
atgagtgaacgtctgacgattatcccgttggggccgtacattggcgcgcaggtgtcgggcctggacgtaacccgtccgctgagcgataaccagtttgagcagctgtaccacgcggtgctgcgccatcaggtggtgttcctgcgcgagcaggccatcaccccgcaacagcagcgcgcgctggccctgcgttttggcgacctgcatatccacccggtctacccgcatgcggaaggggtggaggaaattatcgtgctggacactcataacgataacccgcccgataatgacaactggcacacggacgttacctttatcgacacaccgccagccggggcgattctggcagcaaaactactgccagagaccggcggcgatacgctgtgggcgagcggcattgcggcgtttgaggcgctctccgcgccgttccagaccttgctaagtggcctgcgggcggagcatgattttaaaaaatcgttccaggagtataagtaccgtaaaacggaagaggagcaccagcgctggctggatgcggtcgcaaaacatccgccgctgttgcacccggtggtgcgtacccatccggtgaccggcaagcaggcgctgtttgtgaacgaagggtttacctcgcgcattgtggacgtaacggaaaaagagagcgaggcgttgctcagtttcctgtttgcgcatatcacgaagccggagtttcaggtgcgctggcgctggcaggagaacgatctggcgatctgggataaccgcgtcacgcagcattacgccaatgcggattacctgccgcagcgaaggattatgcagcgggcgacgattttgggggataagccgttctaccgtgcggtttga

SEQ ID NO: 522886 - DNA, 828 bp, Stenotrophomonas maltophilia
atgagcattgtcttcagtgaaaaaacgcggcggacgcgccgtgccttacgctggccgttctctcgccagctcaccttaagcgtcagcacgctggtggtgttgctggcggtatggtgggcggttgccgcgcagcagtggatcagcccgctgtttctgcccccgccaggccaggttctggaaaaactgatcgccatcgccggaccgcagggctttatggatgccaccctctggcatcatttaggcgccagtctgacgcgtattctggtggcgctgctggcggcggtcattattggcgttccggtggggattgcgatgggactgagcccgacagtgcgcggcattctcgacccgctgatagagctttaccgtcccgtaccgccgctggcttatctgcccctgatggtgatctggtttggcatcggcgagacgtcaaagatcttactgatatatctggctatttttgcgccggtagcaatgtcggccctggctggcgtaaagagtgcgcagcaggtacgcatacgtgcggcgcagtcgctcggcgccagccgcgcgcaggtactgctgttcgtcattttaccaggtgcgctgccggagatattgaccgggttgcgcatcggccttggggtgggctggtcaacgctggtggcggcagagctgattgccgccacgcgcggccttgggtttatggtgcagtcggcgggagagttcctggcgactgacgtggtactggcagggatcgcggtcatcgccgcgatcgcctttggattagaactgggactgcgcacgctacagcgtcgcctgacgccctggcatggagaaatacaatga

SEQ ID NO: 522887 - DNA, 768 bp, Stenotrophomonas maltophilia
atgctgaacattacaaacctgtctgccgattacggcggcaaacccgccctgaaagagatcaacctgacgctggacagcggtgaactgctggtcgtactggggccgtccggctgcgggaaaacgacgctgctgaacctgatcgccgggtttgtaccgtatcagcacggcacgatccaactcgaaggaaaacgggtaacggggccgggcgcagagcgcggcgtggtcttccagaacgaagggctacttccgtggcgaaacgtgcaggaaaacgttgcgtttggtctgcaactggccggcgtagcgcgtgaacagcgtctgaatacggcgcgcgacatgttgaaaaaggtcgcgctggagggggctgaaaaacgctttatctggcagctttcaggcgggcagcgtcagcgcgtcgggatcgcccgcgcgctggcggctaaccctcagctgctgttgctggacgaacctttcggggcgctggatgcctttacccgtgagcagatgcaaaccctgctgctgcgcctgtggcacgaaaccggcaagcaggtgctgttaatcacccacgatatcgaagaggccgtgtttatggcgacggagctggtgctgctctcaccgggaccgggacgcgtgctggagcgtctgccgcttgagtttgcccggcgctatgtggcgggagagccagtacgcagcattaaatcagacccgctatttatcgaaaaacgggaatacatcctgagccgtgtgtttgaacagcgggaggcgttctcatga

SEQ ID NO: 522888 - DNA, 963 bp, Stenotrophomonas maltophilia
atggcaatttcatcgcgaatcacgttatttggtgcactggcgctgtgggcatttcaggcgcaggcggtggacgtcaccgtggcgtatcagacttctgcggaaccggcgaaagtcgcgcaggcggataacaccttcgccaaagcgagcggggcgaacgtcgactggcgcaagttcgacagcggcgcggcaattgtgcgggcgttagcctcgggcgacgtgcagattggcaacctgggttccagcccgctggccgttgccgccagccagcaggtgccgattgaagtcttcctgctggcatcgcagctcggaaattccgaagcgctggtggtgaagaaaagcatcacgaaacccgaagatttgattggcaaacgcatcgcggtgccgtttatctccaccacgcattacagcctgctggcagcgctgaaacactggggcattaagccgggccaggtgcagatcatcaacctgcaacctccagcgattattgccgcctggcagcgtggcgacattgacggagcatacgtctgggcgcccgccgtcaacgagctggaaaaagacggcaccgtgctgaccgactccgaaaaagtggggcaatggggggcgccaacacttgatgtctgggtcgttcgtaaggactttgccgaaaaacaccctgaagtggtgaaagccttcgccaaaagcgccatcgaggcccagcagccttacatcagcaacccggatgaatggctgaaacagcccgccaacctggagaaactctcacgtctgagcggcgtgccggaagctgacgtgccggggctggtgaaaggcaacacctatctgacacctgcgcagcaggtccagcagctgaacgggccggtgagcaaagcgattgtcgacactgcgacgttcctgaaagagcagggcaaagtgcctgcggtggcagcggattacagccggttcgtgaccgaccgctttgtgaaataa

SEQ ID NO: 522889 - DNA, 933 bp, Stenotrophomonas maltophilia
atgtcgcagaataatccgcttaccgccctccttgaaaaacagccgtttgtcgtgctggatggggcgatggcaacggagctggaagcgcgcggttgtaaccttgccgacagtctctggtcggccaaagtgctgatggaaaatccggagctgatccgcgacgtacacctcgactactaccgcgcgggtgcacaggtggcgatcaccgccagctatcaggcgacacccgcaggctttgccgctcgcggactggacgagtcgcaatcccggacgctgatcggcaaaagcgtagaactggcacgcaaagcgcgcgaagcgtacctggcagagaatgcgcaggcgggcacgctgctggtggcgggatctgtgggcccttacggcgcgtatctggccgatggttccgagtatcgcggcgattatgtgcgtagcgctgaagaatttaccgccttccaccgcccgcgtgtagaggcgctgttggatgcgggcgcggacctcctggcctgtgaaacgctgccttcgttcactgagattaaggcgctggcggcgttgctgacggcgtatccgcgcgcccgggcatggttctcatttaccctgcgtgacagcgagcacctgagcgacggaacgccgctgcgggatgttgtttctgcgctggaaagctacccgcaggttgtcgcgctggggattaactgtatcgcgctggaaaacaccacggcggcgctgacgcatctgcacagcctgacgtcgctgcccctggtggtctatccgaactccggcgagcattacgatgcggtgagtaaaacctggcatcaccacggtgaaacgtgcgtgacgctggcggggtatttaccgcagtggctggaagcaggcgcgaagctgattggcggctgctgtcggaccacgccgcaggatattgctgcgctgacggttcagcgctga

SEQ ID NO: 522890 - DNA, 1401 bp, Stenotrophomonas maltophilia
atgcaaacacaacaagaaaacgggcaacttaagcgcaccatgaaaacccgccacctgattatgctctcgctgggtggcgttatcggcacagggttattcttcaataccggatatatcatctcgacaaccggcgcggcgggcacgctgctggcatatcttatcggtgcgctggtggtctggctggtcatgcaatgtctgggcgaactttccgtggcgatgccggaaaccggcgcgtttcacgtctatgccgcccgctatctcggcccggcgacggggtataccgtggcgtggctctactggcttacgtggacagtggcgctgggatcgagctttaccgcggccgggttctgcatgcagtactggttcccacaggttcccgtctggacgtggtgcgttgtcttttgcgctgtgatttttggtcttaacgtgatttccacgcgctttttcgcggaaggggaattctggttctcgctggtcaaggttatcaccatcgtcgcctttattattctcggcggcgcggccatctttggctttatcccgatggcggacggctctgccgcgccgggactaagcaacattaccgccgaaggctggttcccgcacggtggcctgccgatcctgatgaccatggtggcggtcaactttgccttctcaggaacggagcttatcggcatcgcggcaggggaaacggaaaacccacacaaggttattccggttgctattcgcaccaccatcgcccggctcatcatcttctttattggcaccgtgtttgtgctggcggcgttgatcccgatgcagcaggctggcgtggagaaaagtccgttcgtgctggtgtttgaaaaggtcggcattccgtatgcggcggatatctttaacttcgtgaccctgacggcgatcctctcggcggcgaactcgggtctgtacgcctctggccgtatgctttggtctctgtctaacgagaaaacgctgccgcgctgctttgcccgcgtcaacaaaaacggcgtgccgctgacggcgctttctgtttccatgctgggcggcgtgctggcgttgttctccagcgtggtcgcgccggatacggtgtttgtggccctgtcagccatttccggttttgcggtggtggcggtgtggattagcatttgcgcgtcgcacttcgtgtttcgtcgccgtcacgtgcagtccggccagccgctatccgcgttgcagtatcgcgcgccatggtatccgctggtgcccgtgcttggctttatcctctgtctggtggcctgcgtcggcctgtggtttgaccccagccagcgtattgccctttattgcgggcttccgtttgtcgccctgtgttatggtgcgtactacctgacccgaaatctgaccacgcaggagcctgaacatgtcgcagaataa

SEQ ID NO: 522891 - DNA, 1110 bp, Stenotrophomonas maltophilia
atgcgatttaacggactgaccaaaggtttctttattctcatcctggcccttgtaacctgggccttctttgacgtgctgtctccctatttctcggcgattctgtgggccgcgatcctgaccatcattttcaacccggtgaaaaacaaactgcgtaccgcgctgggcgatcgcaacgggctggcttcactcctcacactcggcattatctgcctgatcgtgtttattccgttgatggtgatcctttcctcgctcgcggtggaactgaacatggtttacaccaggctgcaacagaacaacacgcagttcccggaagtgatcgctggtatcttcaaccgcctgccggactgggccagcggcttcctggcggatcacaacctgaccaacgccgcgcagatccagaaaaaactctccgatgtcgcgttacagggcgggcagtatctggcgggcagcgcgttcctgattgggaaagggacgttcggctttgccatcagctttggcattatgctgtatctgctgtttttcttgctgaaagacgggccgtacctggtgcgccagatcctcgactcgctgccgctgtctgacttcgtcaaacagcacctgttcgctaagtttgtcggcgtgtcgcgcgccacggtaaaaggcacggcggtcgtggcggtggttcagggcacgctcggtggtatcgcctttgctattgtcggtattgacggcagcgtattgtggggcgcactgatggcatttctctccctggtgcctgccgttgggtcggccatcgtctgggttcccgccgccatcttcctgtttgccactcaccagctgtggcagggtctgttcattgtgggcttcttcgtcattatcgtcgggctggtggacaacctgttgcgtccgctgctggtgggcaaagacaccaaaatgccggactacctgatactgattaccacgctcggcggtatggagctgtatggcattaacggctttgtgattgggccgctgattgccgctctgtttatcgcctgctggaacctcttctccggccgcgaccacgcaggcaacgccgaggagctggacgcagactttatcgaagaggggagaaattctccggatctataa

SEQ ID NO: 522892 - DNA, 954 bp, Stenotrophomonas maltophilia
gtgcgaatcgccacgatcacgaactgggcttatggtgtcacggtgtgcctgaccattgcctccggcatcgtcatgctgatggcttcccacgccgataacatcgaacgtgaagccgttaaacaacgccaggtcttcgatcagctgacggaggagatcgagacagacacctggatgctctccgatctggcgcggctttacgtcatccaaaaagagcccgaggtgcttgagaaatatcaggcgaaagaagccgagctgaagaatatcgaacacacgctgcgacagctcaaaaatacgggggcatcgggcgaagagctggcgctgctgtacgacggactgaaaattgtagacgatctccaggatgaacagcaggcagccattgacggcatcacccgtggcgaggaacagcaggccgtttcgctgctgtttggtaaaagctatgagctggaactcgaacgggcacacaacactatcgaacgctttcgcatgctgctggacaagcgcattattgccgacgtgcaggccgcaaccaaaacgtccaaaacgcttcgaacggcctctgaggtgatggtcggcctgaccgccctgctcttcctgtttgtgatggttttcatcctcaagcgccgcgtactccgtccggtggtgcgtctgagtgacgtagttcatcgtcttgcatcgcaggattacgccgtcgaaacgccgaactttacccaggttgatgaaatcggtgatatggcgcaggccatccgcatcttccgtgagaacgggctggcaaggcagcggctggaaaaagagcgcgatgctgactgggccatccgcgaactgctggcgcgaatgacccagcggttgcagggctgtgaaaactttgccgacgtgggtaatgactccaacttattgatagtgttttatgttcagataatgcccgatgactttgtcatgcagctccaccgattttga

SEQ ID NO: 522893 - DNA, 210 bp, Stenotrophomonas maltophilia; identical to SEQ ID NO: 491571

SEQ ID NO: 522894 - DNA, 426 bp, Stenotrophomonas maltophilia
gtgaaacatatacttgtgatcgcgaccagtttgctggcagtttctactctcgcaagcgctgacgctggaaattacaaataccctcaagcggaagcattgcctcaggatgacacatcgaacttccaacgcgatccgacgctgttaacagggtacgatttaaatctgagtgcagagcgttttgctaaagcctggctgtcgaaaacgaatgaacgtgaacgcattaaggcaaatatgtatcttctcggcgtagtcgacgcgtctgagggcactgcatggtgcaagggcaggccttttttgccaaatacaatacatgagtttctctattctcgttttgcgaacttatcgaaacagcaaggcgaggagcgcgcttcaaaaatcatcattgacggcatgaaagaattacgcccgtgcaaaaaaggagagtga

SEQ ID NO: 522895 - DNA, 1500 bp, Stenotrophomonas maltophilia
atgagcaaccagactcaacaacacgatcagcaggcgggccaggccttcagccaggacgagttcagcgcgctgctgaataaagagttccgcccgaaaaccgatcaggcgcgctctgccgtagaaagcgcggtaaaaaccctggcgcagcaggcgctggaaaacaccgtgaccttctcaaacgatacctaccgcaccattcagaacctgattgccggtattgacgagcagctttcacagcaggtgaaccagatcattcaccacgaggagttccagaagctggagagcgcctggcgcgggctgagctatctggtgaacaacaccgaaaccgacgagatgctgaagatccgctttatgagcatctccaagcaggagctgggccgcaccctgaagcgctacaagggcgtgggctgggaccagagcccgatcttcaagaaaatctacgagcaggagtacggccagttcggtggcgagccgtttggctgcatcgtaggcgactactacttcgaccacagcccgcaggacgttgagctgctgggcgagatggcgcgcatcggctctgcggcccactgtccgttcattaccggcaccgcgccgggcgtgatgcagatggagtcctggcaggagctggctaacccgcgcgacctgacaaaaatctttcagaacaccgaatacgccgcctggcgttcactgcgtgaatcggaagatgcccgttatctgggcctggtcatgccgcgcttcctgtcgcgtctgccgtacggcattcgcaccaatccggtcgacagctttgactttgaagagcagaccgacggcgcgaaccacaacagctactcctgggcgaacgcggcttacgcgatggccgccaacatcaaccgttccttcaaagagtacggctggtgcacctcgattcgcggcgtggagtccggcggggcggtggaaaacctgccgtgccacaccttcccgagcgatgacggcggcgtggacatgaagtgcccgaccgagatcgccatcagcgatcgccgtgaagcggaactggcgaaaaacggctttatgccgctggttcaccgcaaaaactccgacttcgccgccttcatcggcgcgcagtccctgcaaaaaccggccgagtaccacgacccggatgccaccgctaacgcgcgcctggcctcccgtctgccttacctgttcgcctgctgtcgttttgctcactacctgaagtgcatcgtgcgcgacaaaatcggctccttccgcgagcgcgaagagatggaacgctggctgaacgactgggtgatgaactacgtggatggcgacccggcgaactcctcccaggaaaccaagtcccgtaaaccgctggcggcggcggaagtgcaggtgcaggaaattgaagacaaccctggctactacgccgcgaagttcttcctgcgtccacactaccagctggaaggtctgaccgtttccctgcgtctggtatctaaactgccgtcgctgaagacgaaggacgcgtaa

SEQ ID NO: 522896 - DNA, 525 bp, Stenotrophomonas maltophilia
atggcaatgagtaacagtggacagaaattcatcgcacgcaaccgtgctccccgcgtgcagatcgagtacgacgtagagatctacggcgcagaacgcaaaattcagctgccgtttgtgatgggcgttatggccgatctggttggcaagccggtggaaaacctgccagccgtcgacgagcgtaagttccttgaaatcgacatcgacaacttcgacgaacgcatgaaggcgctgaagccgcgcgtggcgttccaggtggataacaccctgaccggcgaaggtaagctcaacgtcgatctgacctttgacagtatggacgacttcctgccggacgcggtggcccgcaaggttgagccgctgaacaagctgctggaagcgcgcacccagctctctaacctgctgacctacatggatggcaaaaacggcgcggaagagctgattgcaaaaatccttcaggatccgacgctgctcaaatccctgagccagatgccaaaaaatgacgaaagtgcaaaaggtagcgaggaataa

SEQ ID NO: 522897 - DNA, 1017 bp, Stenotrophomonas maltophilia
atgaatatcgatgaatttctcgcgccgataagccccgataacccctgcggtgaaaacctagagtacgacgctgatttccaggccatggggcaggccagtcagggcaaagccgaacagcagtttggcgacaccatcattccggcagagcctgccgactggaacacggtggaaagactcgccaccagcctgctgggccgcaccaaagatcttcgcgtcatgctggcgttaacccatgcctggacgcgtcgtcgcgggctggcaggttacgccgacgggctactgctggtgcaggaagccctgtcccgttactgggagcaactttacccgctgctggaagagtatggcgaaaccgatccgttctaccgcattaacgccctcgccgggctgagcgataaatctgacctgacggtcgcggtgcgtaacgcctcactgctccgctctaacggcgatgagatttcgctccgtgacgcccaggcgctgcttgatggcagtaaaacagagtgtccggattatccgggcggtcgtccacgactgatcgatgagctggcccggggcgatcagccaggcaccgaagcggtaatcgtgatcaacgaacgcctgctcgccatccgcgaactgcttaccggctatctcggggaaagtggcgtaccggagatggaacagctgctgaaaaccgtcgggcaagtttcgagcgcctgtcaggtgaccgatatcagcaagttgctgccgaaccgtgacgcgcaggctgagcagcacgccgagccgcagccggtgaccgcgtcgcccgttcagcaggtgacggactggcgcagcgtgcaggtgaccagccgcgccgacgcgcagctgatgttggaaaaagcgaaacagtattttgcgcagtacgaacccagccaccccgcaccgctgatgattgaacgggtgcagcggctgtctgaactcaactttatggacattattcgcgacctggcgccagacggcgttaaccaactggaaaacatctttggacgccgcgaatga

SEQ ID NO: 522898 - DNA, 717 bp, Stenotrophomonas maltophilia
atgacgaatacccctgcgatgaaccgttatagctggtatggcaaattacccagcgccggagattttttgcaacgtcgctttccggataccctgcaacgccagtggtcgcactggtttcaggtcggcctgctggcctggcaacaggaagagcagcgcagcggcgagcgcccgttttctaaagccccggtgtggaactttgtcgtcccgccgatgcttggtagccagatgattcagatgggctgcctgctaccgggccgtgacagcgtaggccgtcactatccggtatgcctgcaactgagcttcaccccggccgagtggtcatcccgtctgctcgggcaggctgaaagctggtaccagcagcttggccgtctggggctgcacgcggtgcgtaacagctattctgcctcccagctggatgaaatgctgatgaccatcccggcgccccagccggttgagccgcaaaagcgttccgacattctcgacgtgattggctatgacgacgagggtcagagcacgctgggctggccgcaggcggcggagtgttttgatccgctgcgccagaccagctactggtggacaaaccgctgcgacggctatccgctttacacccacgtccacagcggaaacttcaccgggcagctctttacgctgctgttcgatccggcaggcggcgcccgtccgggccgccacggtctttacccgcctatgtttgaataa

SEQ ID NO: 522899 - DNA, 3621 bp, Stenotrophomonas maltophilia
atgctgactactctactttctatactgaccaatcgcattctgtggagcttcctgggcgtaacggcgctcgcggcggtcatctggatgattggcccgctgttgtccatcgtggacacccggccccttgaatcagagcagaaccgcgtcatcagcattgcggtggtctacctgatttgggcccagagccacattctgccgcggctgtataacgcctggctgaaccgtaagctgatggacaagcttaacgaaaataccaccagcccggaggcggccgatccgcagaaacgtctgaacagcgaggagcagatccttgccgggcgtttcgatgaagccgcccagatgctgaaaaaagcccacttcagcaaagcgggacatggcgcgcagtggacgcagcgcttcagcacgcagtacctttatcagcttccgtggtacgtcattattggcgcgccgggttcaggtaaaaccaccgcgctggccaactccgggctgcaattcccgctggcggaccgcttcggtaaaaccgcgctgcgcggcattggcggcacgcgcaactgtgactggtggtttaccaacgaggcggttctgctggataccgcggggcgctacaccactcaggagagcgagcaggttcaggacgccggggaatggctggaatttatcaacctgctgcgtaaataccgccgtcgccagcccatcaacggcgtgattatcaccatcagcatctccgacctgctttcgcagtccgctgaggcctcccgccagcaggcggtcaacctgcgccagcgtctctccgagctgcatgaacagctgggtattcgcttcccggtgtatgtgatggtgaccaaagcggatctgcttaaaggcttccgcgcctggtttgcggattacgacaaagcccagcgcgatcagatctggggctttacgctgccgtgggagcagaccaaacacgccgattacgacctgatgggcaacttccagcaggaattttccctgctgcaacagcgtctggatgctggcctgccggaaaccatgcttaaagagcatgacgccaaaacccgtgcggaagcctatctcttcccgcaggagttcgccgcgctgcgtccgctgctggcagactacctgagcacggtctttgcccgctcaaacttcgaaaccgaattttcgccgcgcggcatctactttgccagcggcacccaggaagggatgccgtttgaccgcgtgatgggcgagctgaaccgcgcgctctccttacctgaaggggaggaaagcacgcgctgggattcggtaagcaaagaggcgccgatcccgggcgcgaagggccaaagcttcttcattaaaaatctgctgcaaaacgtgattttccaggaagcgggcatcgccggggaaaaccgctggtgggagctgcgcaaccgcgccgtgatgtggtccggctacgcggcgctgctggccctgctggtgatcctgggtggtctgtggctgaccagctacgccaaaaataaagcttatctggaagaggtagatgcaaaagtgccgatgctggagcagcagagcaaggcgctgcaaaaccagccccagcgagatctgtttgcgcttctgccgctgcttaacagcctggtggatctgccgaaaagcgatgccttcgacgttaacaacccgccggtttcccgccgcatggggctttatcgcggggatgacgtcagcgatgcctcgcagtctctgtatcagaaggcgctggatcagatgctgctccccgccgtggcgatgcacattaccacctggctgcgcaacgacaacggcagcgacgtggagtacagctatgaggcgctgaaagcctatcagatgctctaccagcctaagcattatgacggtaaattcctgcactcgtgggtgatgctcaacctgcaacgcaacctgccgcagaacgtgacgcaggcgcagcttcaggagctggaatggcacctgacgcagctgctggagccaaaaattcaggcttcaccgtatgcgcaggatgaggatctggtggcccgcgagagggcgctgatcaaccagcagccgctctcaacacgcgtatatgggcgcctgaaacgtctgctggagcatgatgagaacctgaagccggtttcgctttctgatctcggcggcccgcagagcgagctggtgttttcgcgtaaaagcggcaagccggtgagtgagggcgtaccgggcctctatacgccggacggctactggaaaagcttcaacgaccagatcgacagcgtgaccaccgccctgcacgaggacgatgcctgggtactgggagcgaccactgcccaggaagataaacagcagatcgacaacgccgtgcgtcagctctacatgcgcgactttatcgttaactgggatcgctttctcgctgacattcagctcaacaacagcgccgatctttcccagcgtatcaacaccgcgcgcctgctttcaggcaccaattcgccgctgcgccgtctggtacttaacctgagcaaggtgctgaccctgtcgcgcactgcgcctgcgccggaagatgcgcagaaagcggaagaccaaagcaaccgcgccacccgcacgctggaagcactgttcagcaacggtgacaatgccccgacgcagggcgcggttgtgacgcaggcgcctgagcaactggtgaccgaccactatgcgccgatgattgagctggcgcagccgctggagaagggcggcaagaccatcgtctttgatgattttcttaagcaggttgacgagctttatcgctacctgaccgccgttcaggatgcagccaacagcggtatgcctgcgccgggcggcgatgcaatcagccgcctgcaagccagcgcgggacgtctgccgggcgggctgcaaaccatgttcagcaatatggccgtcggcgccagcagcgacactcagcgtcgcgatctggagaacgtgcgtaagcgcattaacgtggaagtgggtgggttctgccgtcaggcgattgccgggcgttatccgctggtgcgcagcgccagcactgaggtgacgccggacgatctcgcccgcatgttcgcgccgggcaccggactgatggacacctttttccgcgacaacctgaccaacaaggtggacaccacccaggcgaactggcgctttatgccgggcatcgacggtaaaacgctgccgggcagtgaagggctgctgcgtccgttccagcaggcgcagtctgtccgcgatgccttcttcgcaaacggcgcgaccacgccatccttcaaggtgacggtgcgcaccgtgcgtatggacaataccattctgaacctgacgctggacgtggacggccaactgctgcgctacagccacggtccgcaggcggtgcagatcatgacctggccggggccgggcgggacgaaccaggtgcgtatgcagctcggtctggccaatggcagcaccgcaacgctggtgactaacggttcctgggcgctgaaccgctttttcgacaaggcgcgcaccagccctggcgcgggtagcctgagccgtcaggccaccttcaacgtcgacggacaccaggtcacgctggagtttgccccgaacagcatccgtaacccgttccagcttccccgtttctcatgcccataa

SEQ ID NO: 522900 - DNA, 1239 bp, Stenotrophomonas maltophilia
atgcaggaacgacaggataccggcagtgatgccctgtttaccggagccagtgggaacaatcagctggtggcggccgccaatccgctgctcaatgcgattccgcaaatccgtcattcggtttcccacgacgatcaggtcgggctgcgccagcgcctgattgacgaaattcgccgtttcgaggtgcgatgccagcaggcgggcttaccgtatgaagtgattgtcggcgcgcgctactgcctctgcacggcgctggacgaagccgccgctctgaccccttggggaagcagcggcgtctggtcaagcaatggtctgctggtgacgtttcataacgaaacctggggcggcgagaagtttttccagctgctggcacgtctgtctcagaatccgcgcgaacacattctgctgctggagatgatcaactactgtttgctgctcggctttgaaggccgctaccgcgtgctggacaatggccggacccagcttgaaaccatcaaacagcgcctgtggcagatgatccgtggcgtgcgaggcagctacccgccgccgctctcgccgcacccggaagatcgccccgttctgcgcaagctctggcggccgatgattccactctgggcgtgcgtggcgctggtcggctttatcgcctgcctgttctatatcgtgctgaactggcgtctgggtgataacaccagcccggtgctggcgaaaatttaccagtcccaactgccggaaacgacgatccagcaacctgcacgtcagctaccggcggtactgaacctgcgcggcttcctgaaaccggaaattgatgccggtctggtggccgttaaggatgaggcggatcgcagcgtggtgatcctgaaaggggacggactctttgcctcggcctcaacggtggtgcgcgatcgctatgagccggtcatcgaccgcatcgcccaggcgatgaataacgtcagcggcaaaattctggtggtggggtacagcgacaacgtgccgatccgcagcgcacgcttcgcctccaactatgaactctcgcttgagcgcgcccgttcggtgcaaaaacagctccagggtagcctctcgcagcctgagcgcgtcaaagccgaagggcggggcgagatcaacccggtagcgcctaacacgacgcctgaaaatcgcgcccgtaaccgccgcgtggagattacgctgctggtatcgcctgacaatacccaggccgagctgaacggattgccgcaaggaaactaa

SEQ ID NO: 522901 - DNA, 1344 bp, Stenotrophomonas maltophilia
atgacgaaagcagaaaaggtcgtctggaccgagggcatgttcctgcgtccccaccattttcagcggacagaaagttacctcctcaaccacgttcgtgagtggggggccttgcagcgttcgtatctctggggctttctcgaccttgagctggatgaagcgatgcttcgccagggctgtattgccctgagctactgtagcggtttgctccctgacggcacctttttccaggtgcgcagcgaccgcaacggtccggccccgctaaaaatccccgataatcttaccaatgaaaaggtggtgcttgcgctgccggttcgtcgcggtggacgtgaagaggtgattttcagcgaggagcactcttctctggcgcgttttattacgtttgaacaagaggtagaagacgacaacgccatgtcggtcggggaagcgacggttcagtttggccgcctgcgtctgaccctgatgctggagaaagatctgacggcagaatggaccgccatcggcgtggcgtgcgtcgctgaaaagcgcaacgacaaccacgtgcggctggataacagctacatcccgccaatgctgaacgccaataacagcccgcagctgtacggcatgatcaatgacctgcacggcttgctgatgcagcgtagccagcagatcggcggccgcctgcgccagccggggcgtttcaatacgtccgagatggttgagttcacgcttctttcgctgatcaatcgccaccttggcgacatctcacatttaaaaacgctgccgctgcttcaccctgaagcgctctggcgaagctggctgccgtttgccacggaactcgccacctggacgccgcagcgtaccgcagagagcgtactgccggtatacgaccatgacgatctcgccctttgcttcggcaaactgatgctgatgctgcgtcaggggctgtcgctggtcatggaagatcatgccatccagctgccgctgcacgaacgctctcacggtcttaacatcgccaccgtgccggagaccagcatggtccgcgaatttggcttcgtgctggcggtaaaagccaatgtccccggcgaacacctgcaaacccatttccctgcccagatgaaggttgcgccagtctcgaaaattcgcgatctggttcagctccagctgccgggcatcatgcttcgggcaatgcccgtcgcgccgccgcagatcccgtggcatgcaggctacagctatttcgagctcgagaggggcagcgaactgtggcacgagatggacaagtctggggcattcgcgctgcatctcgcaggggaattcccgggtctcgatatggagttctgggccatccgtagcccgacagaataa

SEQ ID NO: 522902 - DNA, 504 bp, Stenotrophomonas maltophilia
atgaataataaaaatttccatcggatgtggttccctttttttgcgttgattctcgcgctgatcggtggttgtacgtcgtcttcacacagcgacccctcccgctacaatcttcagtttcaggctcatcctcaaatcaatgattctgcaccgcttaaggtcagagtattgctgctgaaatccgatgcggatttcatgtccagcgacttctactccttacagaacaacgcgtcagccacgcttggcgcgaatctgctgaacagcgatgtgttcttcctgatgccgggccagctttcgaaaaccctgagcggtcaaagctcaccggaagcgcgctatatcggcgtaatggcggaataccaggcactggacggcaaaaaatggcgcgtctcacttcctttgcctgttccaggcgaaaacgcgatttaccagttctggaaatggtccgcagatgaactccaggccagcgtcttccttgacgtaaatggtatccgggtcatcaaccagtaa

SEQ ID NO: 522903 - DNA, 495 bp, Stenotrophomonas maltophilia
atgaaactgcgtgtattgttatcacttctgtttgttatggcggtggcgggctgtaaggcgccgcaaaaaccagcgatcaccgatgatacgattgtgaccagccaggttaatggcatcacgctgacgcaccgtcacgctgttacccctccggcggagttcactcaggtgaatgaaccgtatcgtgctatgtacccggcatccctgatgagccgtcctgactacggtggaaaagtgatccgtacgcttgagaccggaaaaacttacgtcgtgctggggcaggttgaacatttctggatggcgctggccgatgaagggagtgaacagctgattggttacgtgccgatgcgtgccgtgatcaaggccgaccagtacgaagccaccgtgcgtaaacaggcactgcgccctaaagcgcgcaagaaaaccacctgtgttgatgtcgatggcaacagcaaagcctgcaaagacagcgcgaacggtacctggatcctgaactaa

SEQ ID NO: 522904 - DNA, 981 bp, Stenotrophomonas maltophilia
atgaagaagatcctgataattgttcctgatggtggcatgttgtttgaagccgccggtatagccgacattctgatgcaggccaaccgtctgcacccggacggtctggcgcagccccgctaccgcatcattattgccactacccagcctcacctggtgatccatggccagtccggcttaaatctgctggcggactatcgcctgccggagctggatccgcgcgagccgctggacacgattatcatcaccggccgtggcatgaatgagcaggaaagcactgcggtggtggactggctgcacctggccgcgccgcatgcgggacgcgtcgcctctgtctgcggcggggccctgctgctggcacaggccggactgctcgatgggcgccgggcaacgacccactggcggcttctggaaacgttgaaaacccgctatcctgcggtcaacgttgagggcggcccgctctatgttcaggatggtcccgtctggacgtccggcggcgtcagttccgggtttgatctgacactggcgctggtagaggatgattacggcttcaccctcgcccgcaacgtggcgcaggatatggtgatgtacctgcgtcggcctggcggccagctacagttcagccgctataatctggagcagtccggcgcgaccggaccggttagcgaactgcaaagctggatcctgcaaaacctcaccgcagatttgtgcgtcgaaaggctggccgaacgggtcgccatgagtccgcgcaatttcacccgcgtgttcacgcgtgacgtcggtgtacctccggcccgttatgtcaccgaagcgcgcctggccgccgcacgacagcttctggagcagaccccgtatccgcttgaggtcattgccgaaaaaagcgggtttgggaccagcatcaacctgcgccgcgtttttgaaaagcagcttcatctcacgccgggcgaatatcgccagcgcttccactgccgcagaatggcgtaa

SEQ ID NO: 522905 - DNA, 1011 bp, Stenotrophomonas maltophilia
atggttaaggtcggtattaacggtttcggccgtatcggacgtaatgtcctgcgcgcggcgctgggcaatccggatctccagattgtggccattaacgatctgacggacagtaaaaccctcgcccatctgctgaaatatgactctctgcttggcacgctaccggtacctgtggaagcggcggacggcgcgctacaggttgacgggcaacgcatcaccgtattcagtgaacgcgacccggcaaacattccgtggaaagacgctgacgttgaggtggtaatcgaagccaccggtttcttcaccgaacgtgataaagcggcggtgcatatcacgagcggcggcgcaaaacgcgtcattatttccgccccggctaaaaatgatgatcttacggtggtaatgggcgtgaaccacacgctgtacgatccggcccagcattttgtggtcagtaacgggagttgcaccactaacggtctggcgccagcggcgcaggtgctgcaccagcagtttggcattgaacacgggctgatgaacaccacgcatgcctacaccaacagccaggcgctgcatgaccagccagaaaaagatctgcgcggcgcgcgtgcggcagcattatcgattgtgccttattccagcggcgcggcaaaagcgctcgggaaagtaatccccgaactggacggtaaactcaccgggtattccctgcgcgtgccggtgccagtggtgtcgattgtcgatctaacggtgacgctgagccgcaacgtgaccgccgaagaggtgaatgacgcgttccgtcaggctgccggtagcgggccgctgaaaggcatcctgggctacagcgatgaaccgcttgtctccagtgattatcagggcgacccgcgctcatccattatcgacgggctttcaacgctggtgattggcgggaatatggtgaagatcctgtcgtggtatgacaacgagtggggcttctcaaaccgtctggtggatttggcggtgctgatggataaaaaagggttgtag

SEQ ID NO: 522906 - DNA, 1683 bp, Stenotrophomonas maltophilia
atgataagacctcgcgcacgacgccccgcttttttaccccttgcgttggcaggcgcactactcggtgttaccgcatttggttatgctgaagaccagccaacgagccagcaaagctcacctgatattcttcttggccccctctttaatgacgttcagagcgccaaactgttcccggatcagaaaactttcgcggatgccgttcccaaaagcgacccgcggatgatcctggcggattaccggatgcagcatacccagtccggttttgacctgcgtcacttcgtggagatgaactttatcctgccgaaggagggtgagaaatatgttccccctgagggccagagcctgcgcgaacacatagacgatctgtggcctgtgctgacccgcaccaccgacaaagcgaacaaatgggactccctcctgcctttgccaaaaccctatgtcgtgccgggaggacgcttccgcgaagtctattactgggacagctatttcaccatgctggggctggccgagagcggccactgggataagatcggcgacatggtggacaacttcgcatacgagcttgatacctggggccatatccctaacggtaaccgcagttactacctgagccgctctcagccgccgttcttttctttgatggtggaactgttggccacgcatgacagcgacgcgttgaagaaataccgtccgcagatggagaaggagtatgcctactggatggagggggctgatgggctccagcctggtcaggcaaacaaacgcgtagtgaagctggatgacggctccctcctcaaccgctactgggacgatctggacacgccacgccctgagtcgtggctggatgacgtgaccaccgccaaaaataaccctaaccgtccggccaccgagatttaccgtgatctgcgctctgccgcggcctcgggctgggatttcagctcccgctggatggacgatccccagaagctgggtaccatccgcaccaccagcatcgtgccggtggatctgaatgcgctgatgtttaagatggaaaaactgctggcccgtgccagccaggaagacggggataccgcaagcgcaagtaaatatgacgcgctggcctccgcacgtcagaaagccatggagagccacctgtggaacgataaagagggctggtatgcggattacgatctgaaaaccaggaaggtgcgtaatcagctgactgccgcggccctcttcccgctgtatgtgaaggccgcatcacaggatcgcgccaataaagtggccgcagccgcatcgtcgcgcctgctgaaaccgggcggtatttctaccaccaccatcaacagcgggcagcagtgggatgcgccgaacggctgggcgccgttgcagtgggtagcggtggaagggttgcagaactatggtcagcagaaagtggcgatggacgtgacctggcgtttcctgaaaaacgttcagcatacttacgatcgcgagaagaaactggttgagaagtacgatgtctcttcgaccggtaccggcggtggcggcggtgagtatccgttgcaggacggtttcggctggagtaacggtgtgacgctcaggatgctggacatggtctgcccgaaagagaagccgtgcgacagcgtaccggagaatcagtctgcggcaaacgatgatgttgcacctgctaaacaggcggcgcagtag

SEQ ID NO: 522907 - DNA, 2118 bp, Stenotrophomonas maltophilia
  misc_feature (939)..(948): n is a, c, g, or t
atgagcacctcacgttttgcgttatgcgcgttggcaggcgccgttacgctggcattgcagacacaggctttcgcagaagaacccaccatcgtggtaaccggtacagagcagggcagcgcgctccctgcctggaccaatagcgccacgaaatcagccgtcgcggaaagtaaaacgccgcaggtgatcaacaccatcgccgctaaagagattgagcagcggcacgccagttcggtaaacgagatcctgcgctatgcgccgggcgtttccacggaggtgcgcgggagcacctcttacatgagcgagtacaaaatccgcgggttcaacgttgatcaggagttctacaacggcctgcaacttccctataacgtcaccgggaacaccaaagcgcgaatcgatccgctgctgattgagagcgtcgatatcctgaaggggccgtcatccgtgctgtatggcggcggctccccgggcgggctggtcaatattcagagtaaaaagccgcagaaagaggcgaaaacggaactgggctttaataccggaaaccgcaatctgaaagaggggtacctggattccacggggcagatcgcgaacagcgactggaactatcgtctgctgggcaaagcgacggaaagtgacgaacaggcgcacaccacgcggtatgaaaactatctggtggccccctccgtgacctggcagccggatgacaaaacgcgcctgaccattgacgcgctggcgcaaaatacgccgagcctgacgccgtctgatccgatgccgctaagctatctgcggtctaaatacgccgatcgtcgtgactatgccggggatgagtggagcggcttcaaacagcgccagtggatgatgggctacagctttgagcatgagtttgacagtggctggggctttaaccagaaagcgcgctactttgacgtggatacccaccannnnnnnnnncaccagcgcagcgcctattccaccgggacgggcagcgaggtctaccagcttaaccgcttcgcctataccacggatgaagatttgcagagcttcaacattgataaccaggttacccgaaccgtcgcgctgggggactggcaacatcatctgctggcgggctttgactaccagaagctgaactctcacttccattatcgttacgcctcgtccacaccgggtatcgatatgcgcaatccggatcactcgcagatcgataacgatgcgctggggcttgaaacagcgcagaaaaaccgtctcggctatcagcagaatggctattaccttcaggatcagattgcgtttggcgggcttaacgtgctggccagcctgcgctttgacgactaccgttccgtcaccaccaactatctgcaaaacggtgacaaagcctgggtatcgcaagatcgcctcaccaaacgactgggggcgctttatgccttcgaaaatggtctctcgccgtttatcagctattcggaaggcttcgcaccggtatcgccgcagggtacgctgaccgcgaaagacgttaagcccaccaccagtaagcaggtggagggtggggtgaaatatctgctggcggaatatgcaactaccttcaccgcctcggtgtttaacattcgtcagaaaaatgtggtgaccagcgatccgggcttcctcaactaccgccagaccggggaagtggaatcgaaaggcgcggagctttccgctattagtcgtccaacggataacctgacgctgattgctaattatgcctacacccacgccatcaataccgaagatgacaagtaccagggcaaacgaccgacgcaggtccctgagaacgcctttaatctgtggggagattacacctttgacagcacgccgctgagagggttaacgctgggggctggtgcacgctacaccgggccgatggagatctcgccagccaatgatgcaggcaagctgggcggtacgacgcagtacgatctggcggcatcttaccgcatgggcgaactggcgccatcgctggaggggctgacgctgaaagcgagcgcgcagaacgtcaccaacaaagagacgctcacctgctatgacgcgaccaactgctggataggccgcgaccgcaccttccaggtcggggcgagctacagcttctga

SEQ ID NO: 522908 - DNA, 732 bp, Stenotrophomonas maltophilia
gtgagtagctacagtgagcagttcctgaaacaaaatccgctggctgtattaggggtgttacgcgacctgaaaaagggcgaggtgccgctgcgcatcaactggtcaaccagccagtttatcagcaagatcctggacgtgacggcagaacacctgatcgtggatctgggtagccagagcgatgaaaactgtgccgcgctacaggcagaaaacctctcggtgatggccgaaacgcagggggctaaagtcgagtttatactgcctcgcctgaccacgatcgtgtaccagggtttgcctgcgtttatcacccccctgcccgctaatctctggttcgtgcagcgccgcgagtattttcgcatcagcgccccgcttcacccggcctacttctgtaaggcaaaaatgccggacaaaaaagagatccgctttcgtctctttgacctgtcgctgggcggcatgggagcgttgatggatatgccgaagccggaagggctggtggaaggtatgcgttttagtcagatcgagctggatatgggcggatggggacgcttctggtttgacgcccagctgattgccatcagcgagcgcaaggtggtggacggcaaaaacgaaaccattaccacgccgcgactgagttttcgctttctgaatgtcgggccaggcgccgagcgcgaactacagcgcatcattttttcactggagcgtgaagcgcgggaacgcgcgaataaagtgcgctga

SEQ ID NO: 522909 - DNA, 504 bp, Stenotrophomonas maltophilia
atgcagtggatgccgatcagcgaacaagccgggaaggcctggggcgtgagcccgcgcctgatcaccgcgatcatcgccgtggagtccggcggtaacccgacgctggtgagtaaatcgaatgcggtggggctgatgcagttaaaagcctctacggcgggaagagaggtctatcgctacatgggctggaagggacagccatccaccagcgagctgaaaaacccggaacgtaatatctctatgggaaccgcttacctgagcattctggagcatggcattctgaaggggattgacgatccggaagtgatgcaatatgcgctggtggtgtcgtacgttaacggagctggcgcgctgctccgaaccttctcatccgatcgcaaagaggcgatagaagagattaacgatatggataaagatgaattcttcgaacacgttgtgaagaatcatccatcagcacaggctccacgttatatctggaaagtacagaaagcaatggacgccatgtaa

SEQ ID NO: 522910 - DNA, 915 bp, Stenotrophomonas maltophilia
atgcctcagtttcatctcatcgcaccgtcgggctactgcatcaaccaggaggcggcacagcggggcgttcagcgcctgctggaaatgggccatcaggtagaaaatcagacaattatcccccgccgcatgcagcgttttgccggtacggaggcgcagagactgagcgatatcaacagcctggcgacgctggaaggtgaaaatactattgtgctggccgtgcgcggcggctatggcgcaagccgactgctggagagcatcgactgggccgggctggccgcacgccagcagcaggatccgctgttaatctgcggacacagcgatttcacggcgatccagctcggcctgctggcgttgcataacgtcattacctttagcggcccgatgctggccggcaactttggtgcgccggagctggatgcgtttacgcaggaccatttctggcgcgccctgcaaaacccgacgtttaccgtcgcgtggcaaggcaacggaccgcactgggaatgtgaagggcagctgtggggcggaaacctcgcgatgctggtatcgctgattgggacaccgtggctgccgcagatcgaggacggcattctggtgctggaagatatcaacgaacacccgttccgcgtcgaacgcatgctgttacagctttatcacgccgggatcctggatcggcagtcggccattgtgctgggcagtttcagcgggtcagcccccaacgattacgacgcgggctacacgctggagacgatggtcgatttcattcgttcccggctggatattccggtgatcgccggtctgaatttcggccatgagcagcaaaccgttaccttgccactgggtgcccaggcgcaccttgcacacggtaattcaggcagtcggttaacaatcagcggtcatccggtcttaaaggcataa

SEQ ID NO: 522911 - DNA, 1734 bp, Stenotrophomonas maltophilia
ttgagtgccacagcgataatcagtcttttcattctgggttccatcctggtaaccttcagcattttattaagttcattttcatcgcgccttggcatacctattcttgtcattttcctggctatcggcatgctggcgggggttgacggaatcggcggtatccccttcgataattaccctttcgcctatatggtaagtaacctcgcgctggcggtgatcttgctggacggcggcatgcgcacccaggcaagttcgtttcgcgttgccttaggtccggcgctgtctctggctaccgtcggcgtgctaatcacctccggcctgaccggtatgatggcagcctggctgtttaacctcgatatgatggaaggcctgcttattggcgcgattgtcggctctaccgatgcggcggcggtgttctcgctgctcggcggcaaggggctgaacgagcgcgttggctccacgcttgagattgaatccggcagcaacgatccgatggcggtgttcctgaccatcaccctgattgagatgatccagcagcacgaaactggcctgagctggatgttcgcctggcacatcctccagcagtttggcctcgggattatcattggtctcggcggcggttacctgttacagcagacaatcaaccgtattacgctgccttccggcctttacccgctgctggccctgagcggcgggatcctgatctttgccgtcaccaccgcgctggacggcagcggtattctggcggtttacctctgtggattcctgctgggcaaccgaccgattcgtaaccgttatgcgatactgcaaaactttgacgggctggcctggctggcacagatcgccatgttcctggtgctgggcctgctggtgacgccttccgacctgctgcctatcgtcgtgccagcgctgcttttgtcggcctggatgatcttcatcgcccgtccgctgtcggtgtttgccgggctgctgccgttccgcgggtttaacctgcgtgagcggatatttatcagttgggtggggctgcgcggcgcggtgccgattatcctggcggttttcccgatgatggccgggctggacaacgctcgtctgttcttcaacgtcgccttcttcgtggtgctggtatcgctgctgttccaggggacgtcgctgggctgggcggcgaaaaaagccaaagtggtggtaccgcccgttggctggccggtctcccgcgtggggctggatattcatccagacaacccgtgggaacagtttgtctatcagctaagcgccgataagtggtgcgtgggtgcttcgctacgcgatctgcatatgcccgctgaaacgcgcattgccgccctgttccgggataacgccctgcttcacccgaccggcagcacgcggctgcgagagaacgatatcctctgcgtgattggccgcgagcgcgacctgcctgcccttggcaagctgttcagccagtcgcccccggtggcgctggatcagcgtttcttcggcgattttatcctcgaagccagcgcccgctttgcggatgtggcgctgatttatgggctggagggaggaatggagaatcgcgataaccagcaaacactgggcgagattattcagcaattattaggggctgcaccggtcgtcggtgaccaggtggagtttgccgggatggtctggacggtggccgagaaagaggataacgcggtgcgcaaagtcggcgtaaggccgatggaggaggaggcggagtag

SEQ ID NO: 522912 - DNA, 1071 bp, Stenotrophomonas maltophilia
atgtcccgtcccattctggcccagctggatttgcaggcgctgaaggataacctgcaaattgttcgtcgtgctgcgccgggttctcgtgtctggtcggtggtgaaagccaacgcctacggtcatggtatcgaccgtatctggagtgcgctcggcgccaccgacggttttgccttactgaatctggaagaggccatcctgctgcgtgagcgcggctggaaaggaccgatcctgctgctggaaggattcttccatgcgcaagatctgcctctgctggataagtaccgcctgacgaccagcgttcacagtaactggcagatcaaggccattcaggacgcgaagctgcatgccccgctggatatctatctcaaagtgaacagcggtatgaatcgtctgggcttccagcctgaacgcgtgcacacggtctggcagcagcttcgtgcgctgaaaaacgtcggtgagatgacgctgatggcgcattttgccgatgcggaaaagccggacggcattgccgatgccatggtccgcattgagcaggcggcagaagggctggactgtccgcgctcgctgtcgaactcagcggcaacgctctggcatcccgaggcgcattacaactgggtgcgcccggggatcgtgctgtacggcgcgtcaccctcaggtcagtggcaggatatcgccaacagcggcctgaagccggtgatgacgttacgaagcgaaattatcggcgtgcaaaccctgaaagcgggcgatacggtgggctatggcagccgctatcgggcagcgggcgaacagcgtatcggtatcgtggcggggggctatgcagatggttatccgcgcatcgccccgagcggcacgccggtgtgggtcgatggcgtgcgtacgggcacggtaggcaccgtctcaatggacatgttggctattgatttgacgccatgtcctcaggcggggatcggctcaccggttgagctgtggggcaacgaggttaaaattgatgatgtggccgctgcggcgggcactgtcgggtatgaactgatgtgcgcgctggcgtcaagagtgcctgttgtgacggtgtaa

SEQ ID NO: 522913 - DNA, 1299 bp, Stenotrophomonas maltophilia
atgcgtgttgtcatactgggaagtggtgtcgttggcgtaaccagcgcctggtatttaagtcaggcgggacatgaagttaccgttatcgatcgcgaatccggtccggcgctggaaaccagtgcggcgaatgcggggcagatctccccgggctacgctgcgccgtgggcggccccgggcgttccgctgaaggcgatcaaatggatgtttcagcgacatgcgccgctggcgataagccttgacggcacgcagttccagcttaagtggatgtggcagatgctgcgcaactgcgatacccgccactacatggagaacaaagggcgcatggtgcgcctcgcagaatacagccgcgattgcctgaaagcgctgcgttcctcaacggggatcgaatatgaagggcgccagggcggcacacttcagctgttccgtaccgcgcaacagtatgaaaacgcgacccgcgatatcgccgtgcttgaagatgcgggcgtaccctatcagctgctggaagccagccaacttgcccaggtggagccagcacttgccgaggtcgcgcacaagctgacgggcggtctgcgtttaccgaacgatgaaaccggcgactgccagcttttcacccagcgtctggcgcgcatgtgtgagcaggccggggtgaaattccgcttcaatacttctgtcgacaagctgctgtcggaaggggagaagatttacggcgtgaagtgtggagaagaggtgatcaaagccgatgcttacgtgatggcgttcggatcctattctaccgcgatgctgaaagggatcctggatatcccggtctatccgctgaaaggctactccctgaccattcccgtgaaagaggacagcggcgcgccagtatcaaccattcttgatgaaacctacaaaatcgccatcacccgtttcgataaccggatccgcgtcggcggcatggcggaaatcgtgggcttcaataccgaactgctcaaaccacgtcgtgaaacgctggagatggtcgtcggcgatctcttcccgcgcggcggtttcattgagcaggcgacgttctggaccggcctgcgtccaatgaccccggacggcacgccgattgtgggccgtacgccttacaaaaatctgtggacaaataccggccacggtacgcttggctggaccatggcctgcggttcgggccagctgcttagcgacctgatttccgggcggacgccggcaattccgtttgacgatttaagcgccgcacgctatcaatcagggtttaccccctcgcgtccacaacacctccacggcgcgcataattaa

SEQ ID NO: 522914 - DNA, 1551 bp, Stenotrophomonas maltophilia
  misc_feature (1120)..(1129): n is a, c, g, or t
atggctacactagattccatgtcaagggacagaacacgtctgagcgatggacccgactggaccttcgaattgctggatgtctacctggcggagatcgaccgggtggccaaactctatcgtctggacacctatccccatcagattgaagtcatcacctcggaacagatgatggacgcttactccagcgtcgggatgccgattaactatccgcactggtcgtttggtaaaaaattcattgaaacggagcgactgtataagcacggacagcaggggctggcgtatgaaatcgttattaactctaacccgtgtattgcctatctgatggaggagaacaccattaccatgcaggcgctggtgatggcgcacgcctgctatggacataactcgttcttcaaaaataactatctgttccgcagctggacggacgccagctccatcgtcgattaccttatcttcgcccgcaaatacattaccgactgcgaagagcgctacggcgtggacgaggtagagaagctactggactcctgccacgcgctgatgaattacggcgttgaccgctataagcgtccgcagaagatctcattgcaggaagagaaagcccggcagaagagccgcgaggagtatctgcaaagccaggtgaatatgctgtggcgcaccctgccgaaacgtgaggaggagaaaaccgtcgccgaggcgcgtcgttacccttccgagccgcaggaaaacctgctctactttatggagaagaacgccccactgctggagccgtggcagcgtgagatcttgcgcatcgtgcgcaaggtgagccagtatttctatcctcagaagcagacccaggtgatgaacgaaggctgggcgaccttctggcactacaccattcttaaccacctgtatgacgaaggaaaagtcaccgagcggtttatgatggagtttctgcacagccacaccaacgtggtattccagccagcgtataacagcccgtggtacagcggcattaacccgtacgcactcggctttgccatgttccaggatatcaagcgtatctgccagtcgcccaccgaagaggacaaatactggttcccggatattgccggttctgactggctggaaacgctgcacnnnnnnnnnncgctgcacttcgcgatgcgtgattttaaggatgagagctttatcagccagttcatgtcgccgaagatcatgcgtgatttccgcttcttcaccgtactggatgatgaccgcaacaactacctggagatctctgcgatccacaacgaagagggctatcgtgagatccgctcgcgcctgtcgtctcaatacaacctgagcaatcttgaaccgaacattcaggtctggaatgtggatctgcgcggtgaccgctctttgacgctgcgctatatccctcacaaccgcgcgccgctggataaggggcgtaaggaagtgctgaagcatgtgcatcgcctgtggggatttgacgtgtcgctggagcagcagaatgaagatggcagcgtggagctgctggagcggtgtccggcgcggttgaatacgttgtag

SEQ ID NO: 522915 - DNA, 720 bp, Stenotrophomonas maltophilia
atggtcattaaggcgcagagcccggcgggtttcgcggaagagtacatcattgaaagcatctggaataatcgtttccctgcgggatcaattctacctgctgaacgcgaactctctgaactgattggcgtcacccgtaccacgctgcgagaagtgctccagcgtctggcgcgcgatggctggttgacgatacagcatggcaaacccactaaggtgaataacttctgggaaacgtccgggctgaatattctggaaacgctggcgcgtctcgatcacgaaagcgtaccgcagctgattgacaatctgctttcggtgcgcaccaacatcgctaccattttcatccgcaccgcgtttcgtcagcatcctgaagatgcgctgaaggtgcttgccaccgccaatgaggtggaagaccacgcggacgcctttgcgaccctcgactacaacgtgttccgcggtctggcgtttgcttccggcaatccggtttacggtctgatcctgaatggaatgaaagggttatatacacgcattggtcgtcactactttgccaaccctgaagcccgcagcctggcgctcggcttctaccataaactgagcaagctctgcaccgaagggctgcacgatcaggtctatgaaacggtgcgtcgttatggccacgactccggtgaaatctggcaccgaatgcagaaaaccctgccgggtgatttagcgattcagagtcgctga

SEQ ID NO: 522916 - DNA, 1539 bp, Stenotrophomonas maltophilia
gtggaaatttcatttgggcgcgcgctgtggcgcaactttttaggtcagtcacctgactggtacaaactcactctactggtattcctggtcgttaatcccgttatctttttgctggatcccttcgttgccgggtggatgttggtcgccgagtttatctttaccctggcgatggcattgaagtgctatccgctgttgcccggcgggctgctggcgctggaagccgtgatcattggaatgaccagcgcggagcatgttaaaaacgagattgcgtcgaatcttgaagtcctgctactgctgatcttcatggtggcggggatctactttatgaagcagcttctgctgtttatcttcacccgtctgctgctgagcattccgtcgaaaacgctgctctcgctggcgttttgcctcgccgcggctttcctctctgccttcctggatgcgctgacggttgtggcggtggtgatcagcgtcgccgtcggcttttacggtatttaccaccgggtcgcctcgtctcgtcctggcgataacttacaggacgacagccacgttgaggcgcacaaccgcgatgtgctcgagcagttccgcgcgtttctgcgcagcctgatgatgcatgcgggcgtggggacggcgctgggcggcgtgatgacaatggttggagagccgcaaaacctgattatcgccaaagcggctgagtggcattttggcgaatttttcctgcgcatggcgccggtcagcgtgcccgttttgatctgcggcttagcgacctgcgtgctggtcgaaaaattcaacctttttgggtatggcgcgaagttgcccgatcaggtccgtcaggagctgcataagtttgacgagcagagccgcaaacaacgcacgcgccaggagacgctgcgcctgattgcacagggcatcatcggcgtgtggcttatcgctgcgctggccttccaccttgccgaggtggggctgattggtctgtcggtaattattctggcaaccagcctgagcggcgtcacggacgaacatgctatcggaaaagcctttaccgaagcgctgccgtttaccgccctgctggcggtgtttttcgccgtcgtggcggtgattattgaccaacatctgttcgcgccaatcatcgcgtttgtgcttcaggccacgccagattcgcagctaacgctgttctatttgtttaacggtctgttgtcttctatatccgataacgtctttgtcgggacggtatacatcaatgaggctaaagccgcgatggagcaagggattgtcagcagtgaacagttcgagctgctggcggtggcgatcaacactggaaccaacctcccctccgtggcaaccccgaacggtcaggcggccttcctcttcctgctgacctcggcgctggcgccactcatacgactttcttatggaagaatggtctggatggcgctgccgtacacgctggtgcttacccttgttggtttgctgtgcatcaaaattactctcgttccctgtacgcaatggttgttgcaagcaggtatacttgcggcgcattaa

SEQ ID NO: 522917 - DNA, 480 bp, Stenotrophomonas maltophilia
atggccctgaccgcctttgcgctggaaatggtcgcgctgtggtttcagcatgtgatggggctgaaaccttgcgtcctgtgtatttatgagcgttgtgcgctgttcggcattatgggcgcaggtctggtaggtgcgattgcacctaaaacaccgttacgctatgccgcaattgccatctggctgtacagcgccgggaaagggattgcgcttgcctgggagcacacccagatgcagcttcacccgtcgccgtttatgacctgcgactttgcggcccgcttcccgagctggctgccgctggataaatggctgccgcaggtgtttgtggcctccggtgactgctctgtacgccagtgggagtttctgacgctggagatgccgcagtggctggtgggcatttttgtcgcctacttcgtggtagcgctgctggtgctgattgcccagccgttcaagccaaagaaacgcgatctttttggaaggtaa

SEQ ID NO: 522918 - DNA, 441 bp, Stenotrophomonas maltophilia
atgaacgacattcctttctggcaaagcaaaactctcgacgacatgaccgacgcggagtgggaatcgttgtgtgacggctgtgggcagtgctgcctgcataagctgatggatgaagattcggatgagatctatttcaccaacgtagcctgcaagcagttaaacatcaaaacctgccagtgccgcaactacgagcgccgtttcgactatgagccggactgcatcaagttaactcgtgaaaatctgccgacctttgagtggctgccgcatacctgcgcgtatcgcctgctggcagaaggtaaagatctgcccacatggcatccgctgttgacggggtcgaaggcggcgatgcacggcgaacgtatttccgtgcgccacattgcggtgaaagagtccgaggtgcaggactgggaagaccacattatgaatcaccctaatcggtga

SEQ ID NO: 522919 - DNA, 660 bp, Stenotrophomonas maltophilia
atgtatcaacatcataactggcaaggtgcattactggattatcccgtcagcaaagtgatctgcgtgggcagcaactatgcaaaacatattcaggagatgggcagcgccgtgccggatgagccggttctgtttattaagccagaaactgcactgtgcgatattcgccagccgctggttctgccgcaggggctgggctcggtgcatcatgaagtggagctggcggtgctgatcggcgcgacgctgcgccaggcgaccgaagagcatgtagagaaagcgattgcgggttacggtgtcgcgctcgacctgaccctgcgcgacgtccagagcaaaatgaagaaagcggggcagccgtgggaaaaagccaagggctttgacaattcatgcccgatttccggtttcgttccggtgagtgaatttaccgacgatccgcagaatacgcccctcagcctgaaggtcaacggcgagatccgccagcaggggacgaccgctgacatgatccataagatcgttccgctgattgcctacatgagccgcttcttcaccctgaaacccggcgacgtgatccttaccggcactccggaaggtgtggggccgctgcacagtggcgacgagctggacgtcagttttaacggcctgtcgctgaaaactcgcgtgctgtaa

SEQ ID NO: 522920 - DNA, 276 bp, Stenotrophomonas maltophilia
atgttttgtgtgatctacagaagtaccagccgcgaccagacctacctttatgtcgaaaagaaagacgatttttcccgcgtgcctgaggaattaatgaaaagctttggccgaccgcaactggcgatgctgctgccgctggacggccgtaagaagctggtgaacgccgatctggagaaagtcaaaaaggcgttaaccgagcagggctattatttacagcttccgccgccaccggagaatttattaaaacagcatcttgaggtgagcggaaagaaataa

SEQ ID NO: 522921 - DNA, 813 bp, Stenotrophomonas maltophilia
atggcacgcattattgttgtgacttcgggtaaaggaggcgttggcaagaccacctccagcgcggccatcgctactggtttggcccagaagggaaagaaaaccgtcgtaatcgacttcgatatcggtctgcgtaacctggacctgatcatgggttgcgagcgtcgcgtggtgtatgacttcgtgaacgtcattcagggcgatgccacgcttaaccaggcgctaattaaagataagcgtaccgagaacctctacattctcccggcgtcccagacccgtgataaagacgcgctgacccgtgaaggcgtggaaaaggtgctcgacgatctgaaaaagatggagttcgacttcgtggtctgcgactccccggccggtatcgaaaccggcgcgctgatggcgctctacttcgcggatgaagccatcatcactactaacccggaagtctcgtcagtacgtgactccgaccgtattctcggcattctggcctcgaaatctcgtcgcgcggaaaatggccaggagccgatcaaagagcaccttctgctgacccgctacaacccgggtcgggtgaacaaaggtgacatgctgagcatggaagacgtgctggagatcctgcgcatcaaactggttggcgtgatcccggaagatcagtccgtgttgcgcgcctctaaccagggcgagcccgtgatcctggatacacaggcagacgcgggtaaagcgtatgcggataccgttgaccgtctgctgggagaagaacgtcctttccgcttcattgaagaagagaagaaaggtttcctcaaacgcctgttcggaggataa

SEQ ID NO: 522922 - DNA, 267 bp, Stenotrophomonas maltophilia; identical to SEQ ID NO: 114419

SEQ ID NO: 522923 - DNA, 1155 bp, Stenotrophomonas maltophilia
atgggcgcaaacaaaagagagtccgatttgaattaccagatgatcactaccaacgacgagctggcttcgctgtgcgaggtgacgcgtgatttccccgctatcgccctggatacggaatttgtccgtacccgcacgtactacccgcaactgggcctgatccagatgtatgacggcaaacacgtgtcgttgattgaccccctcggcattaccgactgggcgccaatgcgcgagctgttgcttgataccgccgtgaccaaatatctgcacgccggcagtgaagatctggaagtctttctcaacacctttggcatcatgccgcagccgctgattgatacccagatcctcgcggcgttcagcggtcgtccgctctcctggggcttcgcggcgatggtggaagagtacaccggtctgacgctggataagagcgaatcgcgtaccgactggctcgcgcgcccgctgacggcgcgtcagcttgaatacgccgcggcagatgtattctacctgctgccgattgctggccagcttatgaaagaggctgaggcgtccggttggctgtctgccgccctggacgagtgccgcatgacgcagcagcgtcgtcaggaagtggttgatccgaaagaggcctggcgtgacatcactaacgcctggcagctgcgcacccgtcaactggcctgtctgcaactgctggctgactggcggctgcgtaaagcacgtgagcgcgatctggcggttaacttcgtggtgcgtgaagaacacctgtgggcggtagcgcgctatatgccgggtagccttggcgaactggacagcattggcctttccgggagtgagatccgtttccacggtaaaacgctgctcgcgctggtagagaaagctcagcagctgccggaggacgcactgccagaaccactgcttaacctgatggatatgccgggctaccgcaaggcgttcaaagatatcaaagcgctggtgcagacggtggcgggggaaagcaaactgagtgccgaactgctggcttcacgtcgtcagattaaccagctgctgaactggcactggaagctgaaaccgcaaaatggtttacctgaactggtcgccggatggcggggggaactgatggctgaacgcctgaataccctgctggaagggtatccgcgctaa

SEQ ID NO: 522924 - DNA, 1728 bp, Stenotrophomonas maltophilia
  misc_feature (675)..(684): n is a, c, g, or t
atgacgacgaacactcatttcagaggtgatgcattgaaaaaggtttggcttaaccgttatcccgcggatgtccctgcggagatcaatcctgaccgttatcaatccctgattgaattatttgaacactcggtacggcgctacgctgaccagcccgcatttgtgaatatgggcgaagtgatgactttccgtaagctggaagagcgcagccgggcgtttgcggcctatttacaggaagggttgggcttgcagaaaggggaccgcgtcgcgctgatgatgccaaacctgctgcaatacccggtggcgctgttcgggatcctcagggcggggatgatcgtggttaacgttaacccgctctataccccgcgcgagctggaacatcagttgaatgacagcggtgcggcggcgattgtgattgtctccaactttgcccacacgctggaaaaagtcgctgaaagaacccaggttaagcacgtcatcctgacgcgcatgggcgaccagctctctaccgcgaaaggtacgctggtcaactttgtcgtgaaatacgttaagcggctggtgccgaaataccacctgccggatgccatctccttccgccgcgcgctgcatgcgggctaccggatgcagtacgttaagccggagatcgtgtcagaagatctggcgttcctgcaatacacnnnnnnnnnnggcggtaccaccggcgtggctaaaggggcgatgctgacccatcgtaatatgctggcgaaccttgaacaggtgaacgccacctacgggccactgctgcacccgggcaaggagcttgtgatcaccgcgcttccgctgtatcacatttttgcgctgaccatgaactgcctgctgtttatcgagcttggcggtcaaaacgtattgatcaccaacccgcgcgacattccggggctggttaaagagctggcgaaatacccgttcaccgccatgaccggcgtgaacaccctgtttaacgcgctgcttaacaataaagagttccagcagctcgatttctccacgctgcatctttctgcgggcggcgggatgccggttcagcaggcggttgccgagcgctgggtaaaactcaccggacagtatctgctggaaggctatggtctgacggagtgcgccccgctggtcagcgtcaacccgcatgacatcgactaccacagcggcagtatcggtctgccggtcccgtcgacggaagctaaactggtggacgatgagggtaacgaagtgcctcacggcgaaccgggcgagctgtgcgtcagagggccgcaggtgatgctgggctactggcagcgcccagatgccacggatgagatcatcaaagacggctggctgtacaccggcgacatcgcggtgatggatgacgaaggttttctgcgtatcgtcgatcgcaagaaagacatgatcctcgtttccggtttcaacgtctatccgaacgaaatcgaagacgtggtgatgcagcacagcggcgtgctggaggtggcagcggtgggggttccttccggcagcagtggtgaagcggtgaagatatttgtggtcaagaaagatccttctcttaccgaggaagcgctgataacgttttgtcgccggcagctgacgggctataaagtgccgaagctggtggaattccgcgatgagctgccgaaatccaacgtcgggaagatattacgacgagaattacgtgacgaagcccgtgccaaagtggacaataaggcctga

SEQ ID NO: 522925 - DNA, 582 bp, Stenotrophomonas maltophilia
atggcggttcagactaaagttgtacgcttttttatggcaggcgcggttgccatagcactgagcgggtgcgtcaccgttcctgatgcgatcaagggcaccagcccgacgccacagcaggatctggtacgcgtgatgaatgctccggagctgtatgtcgggcaggaagcgcgctttggcggcaaggtggttgaagtgctaaaccagcaggggaaaacccggctggagattgccaccgttccactggacagcggcgcacggcctgttctgggtgaagcctcgcgcgggcggatctacgctgacgtcagcggcttcctcgatccggtagatttccgcgggcagctggtgaccgtcgtcggtccgattaccggttcagtggcggggaaaatcggcaatacaccatacaaatttatgaccatgcaggtgaacggttacaaacgctggcgtatcacccagcaggtggtgatgccgccacagccaatcgatccgtggatgtggggtccacatccgtatcgttacggctacggtggctggggttggtacaatccaggccctgcacaggttcaaacaatcgtaactgaataa

SEQ ID NO: 522926 - DNA, 696 bp, Stenotrophomonas maltophilia
atgcgaattctggctattgataccgcgacagaggcctgttccgttgccctgtggaacgacggtacgacttttgctcatttcgaagagtgcccacgggaacacacccaacgtattctgcccctggtaaaaaccattttaaccgagggcaacaccgccctgactgacctcgacgcgctggcctacggccgtggtccgggcagctttacgggcgtacgtatcgggattggcattgcgcaggggctggcgctgggcgctgacctgccgatgatcggcgtttcaacgcttgcgactatggctcagggtgcctggcgcatgaccggtgccagccgcgtgctggccgcgattgatgcccgcatgggtgaagtctactgggcggagtacacccgtgacgaaaacggcgtctggcacggcgaagagtcggaagccgtgcttaaacctgaagccgtcaccgagcgcctgaaacagctcaccggtgagtgggcgacggtcggaaccggctggccggcatggcctgagatggcgaaggacaccggccttacgctggtggatggtaacatgctcctgcctgccgccgaagatatgttgcctgttgcctgtcagcagcttgccgcaggaaaaaccgtggccgttgaacacgccgagccggtttatttacgaaacaccgtcgcatggaagaaacttcctggccgcgagtga

SEQ ID NO: 522927 - DNA, 1911 bp, Stenotrophomonas maltophilia
gtggcagacgatttttcccctgaaggtcagttagcacaggcaattcccggttttaaaccgcgcgaacctcaacgtcagatggcgcatgccgtcgcgcacgccatcgacaaggcgcagccgctggttgtggaggccggcaccggtacggggaaaacctacgcttacctcgctcctgcgctgcgggcgaaaaaaaaggtgatcatctctacgggatcaaaagcgctccaggatcagctctacagccgcgatttacccacggtggcgaaagcgctgaaatacaaagggcgtctggccttgctgaaagggcgttctaactatctgtgtctggagcgtctcgaacagcaggcactggcgggcggtgacctgccggtacaaacactcagcgatgtgatcgtcctgcgcgcctgggccaaccagacggaggagggggacatcagcacctgcgcgagcgtgccggaagactccccggcctggccgctggtgaccagcaccaacgacaactgcctcggcagcgactgcccgctgtataaagactgctttgtggtgaaagcgcgtaaaacggcgatggacgccgacgtggtggtggtgaaccatcacctgtttcttgcggatatggtggtcaaggacagtggtttcggcgagctaatcccggaggcggaggtgatgatcttcgatgaagcccatcagctaccggacatcgccagccagtattttggccagtcgctctccagccgtcagcttcaggatctggcgaaagatattaccattgcctatcgcaccgagctcaaagatacccagcagttgcagaagtgcgcggaccgcctggcgcaatgcgcacaggatttccgcttacagcttggcgagccgggctatcgcggcaacctgcgcgaactgctcgcggacaaaaatatccagcgcgcgctgctgctgctcgatgatgcccttgaactctgttacgacgtggcgaagctatccctcggacgttcagcgctgctggacgccgccttcgagcgggccacgctctaccgtgggcggctgaagcggctgaaagagatcaaccagccgggctacagctactggtatgaatgtacctcgcgccacttcaccctggcgctcacgccgctgaccgttgccgataaattcaaagaggtgatggcgcaaaagcccggcacctgggtctttacctcggccacgctgtcggtcaacgacgatctgcaccactttaccgagcgtctcggcattgagcaggctgaatccttactcctcccaagcccgttcgactatgagaaacaggcgctgctgtgcgtgccacgcaatctgccgctgcctaaccagccaggggcggcgcgccatctggcggccatgctaaagccgatgattgaggccaacaacggacgctgctttatgctctgcacctctcacgccatgatgcgcgatctggccgagcagttccgcgcgaccatgacgttgccggtgctgttgcagggggaaaccagcaaaggccagctgctccagcagtttgtcagcgccggtaatgccctgttggtggcgaccagcagcttctgggaaggggtggacgtgcgcggcgatacgctctcgctggtgattatcgataagctgccattcacatcgccggacgatccgctcctgaaagcacgcatggaggactgccgtctgcgcgggggcgatccgttcgacgacgtccagttgccggacgcggttatcacgcttaaacagggggtagggcgactgatacgcgacgtcaccgaccgcggagtgctggtgatctgcgacaatcgcctggtgatgcgtccctacggcgccaccttcctcgccagcctgccgcctgcgccgcgcacacgggatattaaacgcgcggtccgcttcctggcgaacccgacggcggagtaa

SEQ ID NO: 522928 - DNA, 345 bp, Stenotrophomonas maltophilia
atgacaattacgcgcattgatgccgaagcccgctggtctgatgtggtgatccacaaccagacgctgtactacaccggtgtccctgccaatctggacgccgacgccttcgagcaaaccgctaacaccctggcgcagatcgacgccgtactggaaaaacagggcagcgataaatcccgcatactggacgcgacgattttcctggcgaataaagacgacttcgcggagatgaataaagcctgggatgcgtgggtagtggcgggtcacgcgcctgtacgctgcaccgtacaggccacgctgatgaaaccggagtataaggtggagattaagattatcgcggcagtttaa

SEQ ID NO: 522929 - DNA, 180 bp, Stenotrophomonas maltophilia
atgtttgcaggtttaccttctctcagccatgaccaacagcagaaagcggtagagcggattcaggaactgatgggccagggtatgagcagcggagaagcgatcaccgtcgtcgctcaggaaattcgcgccagtcataccggcgaacggattgtggcgcgatttgaagatgaagatgaataa

SEQ ID NO: 522930 - DNA, 1362 bp, Stenotrophomonas maltophilia
  misc_feature (1200)..(1209): n is a, c, g, or t
atgccatacatgaacatgcgcttccccactgttatgaccttaccctggcgtgcagacgccgccgagttctggtttgcccgtctgagccaccttccttttgccatgctgctgcactccgggcatgcggttcacccctacagccgctttgatattctggtggccgacccggttaaaacgctgactaccgatgcgctgtcacccacggacgatccgctgatgcggcttcagaacgagatccatgctctgggcttatctgccacaccggatccggatctgcctttccaggggggcgcgctgggcctgtttggttacgatctgggtcgccgtttcgaaaagctgcccgagcatgcacaggcggatatttccctgccggatatggcggtggggctgtatgactgggcgctaatcgtggatcaccgtaagcagacggtttccctgcttagccaccgagacgtgcaggcgcgtctggcctggcttgaggcgcaacggcccgccacagcggaacactttatgctgacctccggctggcactcgaacatgagcgcggcggaatatgcggaaaaattctctcgcgtgcaggcgtatcttcacagcggcgactgttatcaggtcaaccttgcccagcgtttccaggcggcgtaccggggagacgaatggcaggcatttacccgcctcaatgccagcaataaggccccgtttagcgcatttttacgccttgaacacggcgccatcctcagcctttcgcctgagcgttttattcatctggctgacggtattattcagacccgcccgatcaagggcaccctgccgcgccttgccgatgctaacgccgaccgccagcaggcggagacgctggcggcctcgccgaaagatcgcgctgaaaacctgatgattgtcgatctgatgcgcaatgatattggccgcgtcgccgagccgggcagcgtgcgcgtgccggagctgttcgttgtggaacctttcccggcggtacatcatctggtcagtactatcactgcacgcctgccggcctcgcggaccgcctgcgatctgctccgcgccgcgtttccgggcggctccatcaccggcgcgccgaaggtccgcgcgatggagattatcgacgaactggaaccgcatcgccgcaacgcctggtgcggcagcatcggctatgtgagcctgtgcggaaccatggataccagcatcacnnnnnnnnnnagcatcactattcgcaccctgacggcctgcgacggtaacctttactgttccgcaggcggcggcattgtagccgacagccaggccggggcggaatatcaggaaacctttgataaagtgaatcgtatcctgaaacaactggagaactcacggtga

SEQ ID NO: 522931 - DNA, 579 bp, Stenotrophomonas maltophilia
gtgaagaaagacaacctgacgctggatgattttctgtcgcgttttcagcttctgcggccccaggttaaccgcgccgcgctgaatcaacgtcaggcggcggtactgatcccggtcgtgcgtcgtgaacagccgggtctgttgcttacccagcgctcaccgcatatgcgaaaacacgccggtcaggttgcgtttccgggcggcgcggtggacagcaccgatgcttccctgattgccgccgcgctgcgcgaagcgcatgaggaggtggcgatccccccggaggcggtcgaggtaattggcgtgctgccgccagtggacagcgtaaccggttttcaggtcacgccggtcgtcggcattattccgcccgatcttcagtatcacgccagcgtcgatgaagtttcagcggtgttcgaaatgccgcttgaagaggcccttcgtctgggccgctatcatcctctggatattcaccgccgcgggcacgatcatcgggtctggctgtcatggtatcagcattattttgtctggggcatgacggcaggcatcattcgtgagcttgcgctacaaatcggcctgaagccttga

SEQ ID NO: 522932 - DNA, 1365 bp, Stenotrophomonas maltophilia
gtgattagtatattcgacatgttcaaagtggggattggtccatcttcttcccacactgtagggccgatgaaggccggtaaacagttcgtcgatgatctggtcgaaaaaggattactggaaagcgttacccgtgtcgccgtagacgtttacggttcactgtcattaacgggtaaaggccaccacaccgatatcgccattattatgggtctggcgggcaatatgccggacacagttgatattgatgccattccggcatttatccgcgacgtggaaacgcgcggtcgtctgctgctggctaacggtcagcacgaagtggacttcccgcaggatgacgggatgcgttttcgtagcgacaacctgccgctgcatgaaaacggtatgaccatccacgcctggagcggcgaaaaagagatctacagtaaaacctactactccatcggcggcggctttatcgttgacgaagaacactttggcaaagagagcgcgggcgatgtgaatgtgccctatccgtttaaatctgccaccgagatgttggcctattgcaaagagaccggtctctccctctccggcatggtgatgcagaacgaactggcgctgcacagcaagaaagagatcgaagactattttgctaacgtgtggcaaaccatgcgcgcctgtattgaccgcgggatgaacaccgagggggttctgcctgggccactgcgtgtaccacgtcgtgcctctgcgcttcgccgtatgctggtcaccaccgacaaattctccaatgatccaatgaatgtggttgactgggtgaacatgtttgcgctggcggttaacgaagagaacgcagcgggtggtcgcgtggtgacggcgccaaccaacggcgcgtgcggtatcgttcctgcggtgctggcctactacgatcactttattgagcccgtgacaccggagatctatatccgttatttcctcgcggcaggcgctatcggcgcgctgtacaagatgaatgcctccatctccggtgccgaagtaggctgtcagggtgaagtgggcgtggcctgctctatggcggcggccggtctggcggaactgctgggcgcaagccctgagcaggtgtgtgtggcggcggaaatcggcatggagcacaacctcggtctgacctgtgacccggttgccggccaggtgcaagtaccgtgcattgagcgtaacgccatcgcctccgtcaaagcgatcaacgcctcgcgtatggcgatgcgccgtaccagcgagccacgcgtgtcactggataaggttattgaaaccatgtacgaaaccggcaaggacatgaacgcgaagtaccgtgagacttcgcgcggcggtctggccattaaggtgcagtgcgactaa

SEQ ID NO: 522933 - DNA, 1599 bp, Stenotrophomonas maltophilia
atgcaaactgcacaaacgatcattaaagactatcgccgaaaacgcgttatcgtctgtgttacggttgcgctcgttacgctcgtcctgacgctgggcattcgctttatttcacagcgcaacattaatcaggatcggatccacgactttactcaccacaccgtgcgtgcgcttgataaggtgcttcttgcgttagaaacccagcgtgaaactctacgttttctggttgatatgccctgcgctgaagcgaatccgattctgcgaaaacaggcggcgatcctccagaccgtgcgctccatcgccctcgtcaaagacggaatactgtattgctcgagcgtatttggcagccgaaatatgcccgtcagtgacattgagccgatgcttccgtccagtgaacccaggctgatcttgttgaccgatcggtggctgttaaagggcagtccggtactgattcagtggtcaccccttgcgggcgacggcagtgacgggttgatggaggtagtgaatatcgatctcatcaccaaaatgattctggagccacagcggccacaaatcaccgacgtggtcctgagagtaggcgataattttctccgcgacgggcagcaggtgacgaatacgccgaccttcgatgaacacgcctccctgctggaacagtcttcacagcactaccctttcagcgtcacggtcagcggcccgggggcaggccaaatggcattgaaaaatctgcccacccagctaccgctggcgttgatgctcagtttactgatgggctatatcgcctggcttgccacggcgcgacgcataagtttcacctgggaaattaatatggggattgctgcccgggagtttgaactcttctgccagccgctggtaaacgcccgcacccgggaatgcgttggcgtcgagatcctcctgcgctggaacaacccgcgtcagggctggatttctcccgatgtctttatccccctggctgaagaacatagcctaattgttccgcttacccgctacgtcatcagcgaaacggtgcggcagataggctttttcccggcctcacgggatttccatattggcatcaacgtggccgccagccattttcgccgcgctgcgctgatccgggatctcaaccgcatctggtttaaggcgaaccctgttcaaaagttgattgtagagttaaccgagcgcgatgcgttgctcgatgtggattaccgcatcgtgcgagagctgcaccgcaaaggggtgaagcttgcgattgatgattttggtacgggcaatagttctctttcgtggcttgaaaaacttcacccggacgtgctgaaaattgataaatccttcaccaccgcgatcggcaccgacgccgtgaactcaacggtaacggatattattattgcgctgggccagaggttgaatattgaactggttgcagaaggggttgaaaccgaggagcagtcacgctatttgcgccgccacagcgtacatattttgcaggggtacttgtatgcgcggccgatgccgctgcgggagtttccgaaatggctggcggaaagtaaccctccgccagcccgtcacaacggacacatcgtgcctttattgccgttacgctag

SEQ ID NO: 522934 - DNA, 1560 bp, Stenotrophomonas maltophilia
atggaattcttaatggacccgtcaatctgggtaggcttgcttacgctggtcgtgctggagatcgttctcggtattgataacctggtgtttattgccatccttgcggataagctgccgccgaaacagcgtgataaagcccgtctgatcggcctctcgctggcgctgatcatgcgactgggcctgctgtccgtgatctcgtggatggttacgctgactaagcctctgttcaccgtcatggatttcaccttctccggccgcgatttaatcatgctggtgggagggcttttcctgctgttcaaagctacaacagaactgcatgaacggctggagaaccggcagcatgatgatggccacggtaaggggtatgccagcttctgggtggtggtcctgcagattgtggtgcttgatgcggtcttctcactggatgcggtgattacagcggttggcatggtgaaccatctgccggtgatgatggcggctgttgtgattgcgatggcggtaatgctgctggcgtcgaaaccgctgacgcgtttcgtcaaccaacatccgacggtcgtcgtgctgtgtctgagtttcctgttgatgattggtctgagcctggtggcagaaggttttggtttccatataccgaaaggctacctgtacgccgcgattggcttctcgattctgatcgagctgtttaaccagattgcgcgccgtaacttcattaagcagcagtcgaatcagccgctgcgcgcgcgtaccgccgatgcgatcctgcgcctgatgggcgggcgtcgtcaggtgaacgtgcaggcggataacgagaaccgtaacccggttccggtgccggaaggcgcgtttgtggaagaagaacgctacatgatcaacggcgtgctttcgctggcctcccgctccctgcgcggcattatgacgccgcgcggtgaaatcagctgggtggacgccaacctgagcgtcgacgaaattcgccagcagctgctctcctcgccgcacagcctgttcccggtctgtcggggcgagctggatgagatcatcggtgtggtgcgcgcgaaagagatgctcgtggcgctggaagagggcgtcaacgtcgaggccgtagcagccgcgtcgcctgccatcgtggtgccggagacgctggatccgattaacctgctgggcgtgttgcgtcgtgctcgcgggagctttgttatcgtcaccaacgaatttggtgtggtacaaggtctggtaacgccgctggacgtgctggaagccattgccggtgaattccctgatgcggatgaaacgccagaaatcgttgccgacggtgacggctggctggtgaaaggcaccaccgacctgcacgcgctctcgcacacgctgggcgtcgaaaacgtggtcaatgacgatgaagacatcgccacggtagcggggctggtgattgccgttaacgggcagatcccgcgtatcggtgatgtgcttgagctgccgccgctgcaaattaccatcgttgaagccaacgactatcgcgttgatatggtccgtattgttaaagagcactctgtacacgacgaagaagagtaa

SEQ ID NO: 522935 - DNA, 963 bp, Stenotrophomonas maltophilia
gtgaccattgctattgtcataggcacacatggttgggctgcggagcagttactcaaaacggcagaaatgctgttgggcgagcaggaaaacgtcggctggatcgatttcgttcccggtgaaaacgccgagacgctgattgaaaagtacactgctcagcttgagaagctggataccagcaaaggcgtgctgtttctcgtggatacatggggcggcagcccgttcaacgctgccagccgcattgtcgtcgataaagagcattatgaagtcgtcgccggggtaaatatcccaatgttggtggaaaccttcatggcgcgtgacgacaacccaggctttgacgagctggtggcgctggcggtggaaaccggtcgcgaaggcgtgaaggcgctgaaagcacagccggttgaaaaacctgcccctgcccctgctgcaccaaaagccgcggcaccggcgaagccaatgggtccgaacgattacatggttatcggccttgcgcgtattgatgaccgtctgatccacggccaggtggcgacgcgctggaccaaagagaccaacgtacaacgcatcatcgtggtcagtgacgaagtggccgccgacactgtccgtaaaacccttcttacccaggttgcaccgccgggcgtcaccgcgcacgtcgtggatgtcgccaaaatgatccgcgtttacaacaacccgaaatatgcgggcgaacgcgtgatgcttctgttcaccaacccgacagacgttgaacgcattgttgaaggcggcgtgaaaatcacctccgttaacattggcggtatggctttccgtcagggcaaaacgcaggtcaacaacgcgatttcagtggatgcgaaagatatcgaggccttcaacaagctgaatgcacgcggtatcgagctggaagcccgtaaggtttccacggatcagaaactgaaaatgatggatttgatcggcaaagtggggaaataa

SEQ ID NO: 522936 - DNA, 801 bp, Stenotrophomonas maltophilia
atggagattactactcttcagattgtgctggtgttcatcgtcgcgtgtattgcgggtatggagtccgtacttgatgaatttcagttccaccgccctctggtggcctgtacgttgattggcgccgttctcggtgacatgaaaaccggtatcatcatcggtggtaccctggaaatgatcgccctcggctggatgaacatcggtgcggcagttgcgccagatgccgcgctggcgtccattatttcgaccgttctggttatcgccggtcatcagagtatcggtgccggtatcgcgctggccattccactagccgcggcaggccaggtgctgaccatcattgttcgtaccatcaccgttgccttccagcacgcggcggataaggcggccgataacggcaacctgacagcgctctcctggatccacgtctcgtccctgttcctgcaggcgatgcgtatcgctattccggccgttatcgtggcgatttccgttgggaccagtgaagttcaaagtatgctgaacgccataccagaagtggtcaccggcggtctgaatatcgcgggcggtatgattgtggtcgtaggttacgcgatggtcatcaacatgatgcgcgcaggctatctgatgccgttcttctaccttggcttcgttaccgctgcattcaccaacttcaacctggttgcgctgggtgtgattggtgcggtgatggcgattctttatatccagctcagcccgaaatacaaccgtgtcgcgggtgcccctgcgcaggctgctggtaacaacgatctcgataacgaactggactaa

SEQ ID NO: 522937 - DNA, 852 bp, Stenotrophomonas maltophilia
atggttgatatgacaaaaactaccactgagaaaaaactcactccgggtgatattcgtggcgtgttcatccgttctaacctgtttcagggttcatggaacttcgaacgtatgcaggcgctcggcttctgcttctccatggtgccggcaatcaaacgcctgtatccggaaaacaacgaagcacgccgtcaggcaattaagcgtcacctggaattcttcaacacccacccttacgtagcggcgcctgttctgggcgtaacgctggcgatggaagagcagcgtgcaaacggggctgagatcgacgatggtgctatcaacggtattaaagtcggtctgatggggccgctggcaggcgtgggcgacccgatcttctggggtaccgtgcgtccggtctttgcggcactgggcgccgggatcgccatgagcggcagtctgcttggtcccctgctgttctttatcctgttcaacgcggtgcgtctgctgacccgctactacggcgtggcatacggttaccgtaaaggggtggatatcgttaaggatatgggcggcggcttcctgcaaaaactgactgagggggcgtcaatcctcggcctgtttgtaatgggggctttggttaacaagtggacgcacgtgaacatcccgctggtggtatcgacgatcaccggtcaggatggtcagacgcgcgtcaccaccgtgcagaccattctggaccagctgatgcctggcctggtaccgctgctgttaaccttcgcctgtatgtggctgctgcgtaagaaagtgaacccgctttggatcatcgttggcttcttcgtcatcggtatcgcgggctacgccgtcggcctgctgggtctgtaa

SEQ ID NO: 522938 - DNA, 459 bp, Stenotrophomonas maltophilia
atgactgtcacggacaccgtactggttttatttattgttgcccttctggcttacgcgatctatgacgagttcattatgcctcgccgccacggcgagacgctgctgacccttcccctcttacgccgtgggcgcattgatgcgtttatcttcgccggtctggtagtcatcctgatttacaataatgtgaccagccacggcgcaatattaaccacatggttattatgtgcgctggcattaatggcgatttacctgttctggatccgctcgccaaaactcatttttaaaaaacacggattcttcttcgccaatgtctggatagaatataaccgcattaaagagatgaatttatccgaagacggagttctggtgatgcaattagaacaacgccgcctgctcattcgggtcaaaaatattgacgacctggaaaaaatctacaaattactccttaaaactcaatga

SEQ ID NO: 522939 - DNA, 603 bp, Stenotrophomonas maltophilia
atgtgtcatatggatatccccggtctggacgcacttatgaatatctccgctacgatccttctggcttttggcatgtccatggacgcatttgccgcctctatcggtaaaggtgccaccctccataaacctaaattttccgaagccctgcgcaccggtctcatctttggcgcaatcgaaacgctgacgccgcttattggctggggtctggggatgctcgccagccagtttgtgctggagtggaaccactggatcgccttcgtgctgctggtgttcctcggcggacgcatggtaattgaaggttttcgtggcaacagcgatgaagatgatgcgccgctgcaacgccacggcttctggcttctggtgacaaccgctatcgcaaccagcctggacgcaatggccgtcggtgtcggtctggcgtttttgcaggtcaatattatcgccaccgcgctggcgattggctgcgccacgctgattatgtcaacgctggggatgatggtggggcggttcattggcccgctgttaggcaaacgcgccgaaattctgggcggtatcgtgttgatcggaattggtgcccaaatactctgggcacacttcgcgggttaa

SEQ ID NO: 522940 - DNA, 816 bp, Stenotrophomonas maltophilia
atgtctttcagttgtcccctttgccacgcgccgctgacgcgcgcagagaaaacgtttatctgtccactgggacatcagtttgaccgggctaaagagggctatgtcaatcttctgccggtacagcacaagcgctcccgggatccgggtgacagcgcggagatgatgcaggcgcgccgggcgtttcttgacgccggacactatcaaccgctcagggatgccgttgtcgacttactccgtcaatatctgacagaaggcgcatccgccatgctggatatcggctgcggtgagggctactacaccgccacgtttgctgacgtcgcggctgggaagggcgccgaaacttacgggctggacgtgtcgaaagtggctatccgtgcagcagcaaaacgctactcagcggtaacgttctgcgtggcctccagccaccgcctgccgtttgaggaagcgagtatggacgccgtagtgcgtatctatgccccgtgcaaggcagaggagctggcgcgcgtcgttaagcccggcgggtgggttatcaccgttacgccgggaccgcgtcatctgctggagctaaaagggctgatctatgatgaagttcacctgcatgcgccgcactctgaacagctggcgggcttcgcgttaaagcaggcgcagtcagtggcgtatgagatgacgttgcagggaagtgaagcggtggcgttactgcaaatgacgccgtttgcgtggcgggcaaaaccagaggtgtgggaaacgctggcagcacagacagaatttcgctgccagacggatttcagcatccattgctggcagcgcgaagattaa

SEQ ID NO: 522941 - DNA, 1593 bp, Stenotrophomonas maltophilia
atgcgttccctgcgcgaagtggcgatagacgccccgcgtgggatgattgttgaccgtgaagggcgtccccttgcggtaagcgtacctgtccaggccgtctgggccgatcccaaaactgtgcttgataaaggggggatcggctttgattcgcgctggcaggccctggcaaatgctttacacctttctctgagcacgctcgcatcgcgaataaacagcaatccgcacgggcgattcatttatctagctcgtcaggttgatccctcccaggcaaagtggattgataagctgcgtcttcccggtatcaacttacgcgatgagtcccgccgcttttatcctgccggacacgtggcggcaaacctgattggcttcactaatattgatggtcagggtattgagggcgtcgagaaaagctttaacacgcagctcaccgggaaggcaggcgtgcggctggtcaggaaagatcgctacgggcatgtggttgagaacctcacggaggtggcgcccgtaccggcacataatatccagcttagtatcgatgaacgcctgcaaactatcaccgaagacgcgctggacaatgccgtggcgtggaataaagccgagtcaggcgcgtcggtgctgattaatatccagacgggcgaaattctggcgatggcgagcttccctgacttcaaccccaacaatcgggaaggggcaacactggatgactttcgtaatcgcgcgatcagcgacacctttgaaccgggttcgaccgttaagcctctggtgctgatgacggcgctacagcaggggctggtgcagcctgacagcgtgatagacacgcatccctacaccattgatggtcatcgtattcgcgatgtgggttactaccccgagctgaccatgaccgggatcctgcaaaaatccagcgacacgggcgtatcccgtctttctctcgcgatgcccgtgcaacggttacttgatacctataaaaactttggttttggcgagagtaccgggcttggcttaacgggagaaagctcaggtttactgccgcagcgaaaattctggagtcagttagacagggcgacctttgcctttgggtatggcctgatggttactcccctccagctggcgcatgtgtatgccaccatcggtagctatggcattgaacggcctctgtccatcacccgtatcgatccccccgtgattggcaaacgggtgatgcccggggagattgttcacgaggtggaacacatgatggagagcgtcgcgttacccggcggtggcgggatcaaagcggcggtgcgtaactatcgtgtggcgattaaaaccgggacggccaaaaaaatcgatgaacacggtaagtatgtggataaatacgtcgcctacacagcaggcgttgcgcccgccagcgatccccgttttgcactggtggtggtgatcaacgatccgaaaaacggagcctactacggcggggccgtttccgcgcccgtgttcagcgaaattatgggtaacgtcttgcgcctggaaaacgtgaagccagacgggctgccggcagattctgaccatctgatcgtgatgcgtcacccagccgtttataaccctggcgaatag

SEQ ID NO: 522942 - DNA, 240 bp, Stenotrophomonas maltophilia
atgcgtttactcgttcgtacgataattgtactggcacttgtgtggatcggcctgctgttaagtgggtatggcgtattaatgggaagcaaagagaatgccgcgggtttgggtattcagtgtaaatatctcaccgcccagggggtaagcacggctcagtacatccattccgacagcgggatcatcgggttaaccaactgtcctgtgctgcgtaaatcatctgttgtggtggataacggctaa

SEQ ID NO: 522943 - DNA, 792 bp, Stenotrophomonas maltophilia
atggcaatcgcagatttggataagcagccagattctgtttcttccgtgctgaaggtgtttggcatcttgcaggcgctcggagaagagcgtgaaattggtattacagagttgtcgcagcgtgtgatgatgtcgaaaagcaccgtttatcgctttttgcagacgatgaaatcattgggttatgtcgcgcaggaaggagaatcagaaaaatattctctgaccctgaaattgtttgaattgggcgcccgcgccttgcagaacgtggatctgatccgcagcgctgacattcagatgcgtgaactttcgcggttgacgaaagagaccattcacctcggcgcactggatgaagacagcatcgtttacatccacaaaattgactccatgtacaacctgcgcatgtattcacgcatcggtcgtcgtaacccgctgtacagtaccgcaattggtaaagtcctgctggcctggcgcgatcgtgaagaggttaagcaaatccttgacggtgtggaatacaaacgcagcaccgatcgcacgattaccagtacggatgaactactgagcgtgctggataaagtgcgtgagcagggttatggggaagataacgaagagcaggaagaagggttgcgctgcatcggtgtgccggtgtttgaccgcttcggcgttgtcattgcgggactgagcatctctttcccaacgctgcgtttctccgaagagcgtcttcatgagtatgtggcaattctgcataccgcagcgcgcaaaatttcagagcaaatgggctataacgaatacccgttctga

SEQ ID NO: 522944 - DNA, 1374 bp, Stenotrophomonas maltophilia
atgcaaaaaaacgtttctgatggcctgcccttaccacagcggtacggggcaattgccactattgtcatcggcatttcgatggctgtccttgacggtgcgattgccaatgtggctcttcctaccattgccaaagaccttaatgcttctccggcaagctccatctggattgtgaacgcgtaccagatagcgattgtgatttcccttttgtcactctctttcctgggcgatatgtttggttatcgccgggtttatcagtgcgggctggtggtctttactctcacctcgctcttctgtgccctttccgattcactgcacacccttacgcttgcgcgtatcgcacagggttttggcggtgcggcgctaatgagcgtgaacacggccctgatacggcttatctatcctcatcgccatctggggcgcggcatgggcattaactcctttattgtggccgtgtcgtccgccgccgggccgacgatcgccgccgccattctgtccgtagcctcgtggcagtggctgtttgccattaacgtgccgctgggcattgtggcgatcttcttcgccctgcgctatcttccggaaaatggtccgaaaaacaccatgccacgttttgacctgcccagcgctgtgatgaacgcgctgacctttggcctgctgattactgcgctgagcggatttgcgcagggacagtctttgtcgctcattgccgcagaaatcgttgccctgcttatcatcggctttttctttgtacgacgccagctggcgctgcccgtgccgttactgccggtcgatttgctgcgtattccgctgttttcgctatcaatttgtacctccatttgctcgttctgcgcccagatgctggcgctggttgcgctgccattctttttgcagagcgtgcttggccgttcggaagtggaaacaggcttgctgctcacaccctggcctttggcaaccatggtgatggccccgctggccgggtaccttattgagcgcgttcatgccggactgctgggggctatcgggctgatcgtcatggcagcaggactgtttgcgctatcgctcctgccctcctcgccgggggatctggatattatctggcgcatgatcctttgcggggcaggtttcggtctgttccagtcacctaacaaccacacaattatcacctctgccccacgtcatcgcagcggtggcgccagcgggatgctgggtacggcaagactattagggcaaagcaccggggccgcaatggtggcgttgatgtttaaccttgccgggcaaaatgcgacacacgttgcgctgattaccgcagggacactggcgaccctcgcggctatcattagcggccttcgtgtgacccagccaaaggcgcaggcataa

SEQ ID NO: 522945 - DNA, 2280 bp, Stenotrophomonas maltophilia
atgctcaatcaagaactggaactcagtttaaacatggctttcgccagagcgcgtgagcaccgacatgagtttatgaccgtcgagcatttgctgctcgcactgcttagcaacccatctgcccgcgaagcgctggaagcctgctccgtggatctggtggcgctacgtcaggaactcgaagccttcatcgaacaaaccacaccggtgctgccagccagtgaagaagagcgcgacacacagccgacgctcagcttccagcgcgtgctgcagcgcgcggttttccacgtccagtcttccggacgtagcgaagtgacgggcgccaatgtgctggtcgccatcttcagtgagcaggagtcccaggcggcctacctgctgcgtaaacacgaagtcagccggcttgacgtggtcaacttcatctctcacggaacgcgaaaagacgagcctaaccaggcatcggatcccagcggacagatcaacagcaatgaagagcaagcaggcggggaggatcgtatggaaaacttcaccaccaaccttaaccagcttgctcgcgttggcggtatcgacccgctgattggccgcgacaaagagctggaacgtgccatccaggtgctgtgccgtcgccgcaagaataacccgctgctggtgggggaatctggcgtgggtaaaaccgcgattgccgaaggtctggcctggcgcattgtgcagggcgacgtgccggaagtgattgccgactgcaccatctactcgctggatatcggctcgctgctggcgggtaccaaataccgcggtgattttgaaaaacgtttcaaagcgctgttaaaacagctggagcaggacaccaacagcatcctgtttatcgatgagatccacaccatcatcggcgcaggcgcggcttccggtggtcaggtagatgccgccaacctgatcaaaccgctgctctccagcggcaagatccgcgtgatgggctctacgacgtaccaggagttcagcaacatctttgagaaggatcgtgcgctggcgcgtcgtttccagaaaatcgacgttaccgagccgtcggttgacgaaacggtgcagatcatcaacggtctgaaaaccaagtacgaagcgcaccacgacgtgcgttacaccgcgaaagcggtgcgtgcggcggtggagctggcggtgaaatacattaacgatcgtcatctgccggataaagcgatcgacgtgattgatgaagcgggtgcgcgtgcgcgcctgatgccagcgagcaagcgtaagaaaaccgtgaacgtagcggatatcgagtccgtggtggcccgtatcgcacgtatccctgagaagagcgtctctcagagcgaccgtgatacgctgcgcaccctcggcaatcgcctgaaaatgctggtctttggtcaggataaagccattgaggccttaaccgaagcgatcaagatggcccgtgctggcctggggcatgaccacaagcctgtcggttccttcctgttcgccggcccgaccggtgtgggtaaaaccgaggtaacggtgcagctctccaaagcgctgggcattgagctgttgcgctttgatatgtccgagtatatggagcgtcacaccgtcagccgtttgattggtgcgcctccgggctacgtgggctttgaccagggcggcctgctcaccgacgcggtgatcaagcatccgcacgcggtactgcttcttgatgaaattgagaaagcgcacccggacgtgttcaacatcctgttgcaggtgatggacaacgggacgctgaccgataacaacgggcgcaaggccgatttccgcaacgtggtgctggtgatgaccaccaacgccggggtgcgtgaaaccgagcgcaaatccatcggcctgatccatcaggataacagcaccgatgcgatggaggagatcaagaagatcttcacgccggagttccgtaaccgtctggacaacattatctggttcgatcacctgtctaccgaggtgatccatcaggtggtggataagttcatcgtcgagctgcaggttcagctggatcagaaaggcgtgtcgctggaagtgagccaggaggcccgcaactggctggccgagaaaggctacgaccgtgcgatgggtgcccgtccgatggcgcgtgtgattcaggacaacctgaagaaaccgctggcgaacgaactgctgtttggatcgctggttgacggcggccaggtgaccgtggcgctggatcaggcgaagaacgagctgacgtacgatttccagagcgcggcgaagcacaagccggaagcggctcactga

SEQ ID NO: 522946 - DNA, 321 bp, Stenotrophomonas maltophilia
atgggtaagaccaacgattggctggattttgaccagctggcggaagataaagtgcgcgacgcgctaaaaccgccatctatgtataaagttatgttaatgaacgatgattacacgccgatggaatttgttattgacgtgctacaaaagttcttttcttatgatgttgaacgtgcaacgcaactgatgcttaccgttcattatcgtggcaaagcgatctgcggcatctttactgccgaagtagcggaaaccaaagtagcgatggtgaacgactatgcaagggagaacgagcatccgttgctgtgtacgctggaaaaggcctga

SEQ ID NO: 522947 - DNA, 222 bp, Stenotrophomonas maltophilia
atggaaatgggtactgttaagtggttcaacaacgccaaggggtttggcttcatttgccccgaaggcggcggcgaggatatcttcgctcactattccaccattcagatggatggttacaggacgctcaaagccgggcagtccgtccggttcgatgtacaccaggggccaaaaggcaatcatgccagtctgatcgtccccgttgaagcagaagcggttgcatag

SEQ ID NO: 522948 - DNA, 1941 bp, Stenotrophomonas maltophilia
atgacggcgctgcttgagctgaatgacattcgtcgcagctatccgtccggcgacgggccggtggaggtgctgaaaggcatctccctgcgcgttgaagccggtgaaatggtggcgattgtcggggcatcgggctcgggtaaatcaacgctgatgaacattctcggctgtctggataagcctaccagcggcacctatcgcgtggccgggacggatgtttccaccctggacggcgacgcgctggcgaagctgcgtcgcgagcattttggctttatcttccagcgttaccatctgctttcacacctgagcgcggcgcagaatgtggaagtgccggcggtgtatgcgggcgtcgagcgcaaaaaacgcctcgaacgcgcgaaggcgctgttaacgcgtcttgggctggcggagcgtgttgattatcagccttcgcagctttccggcggtcagcagcaacgcgtgagtattgcccgcgcgctgatgaacggtgggcaggtgatcctcgccgatgagccaaccggtgcgctcgacagccattccggtgaagaggtgatggcgatcctgcatcagcttcgcgatcaggggcatacggtgattatcgtcacccacgatccgcaggtggcagcgcaggcggaacgcattatcgagatccacgacggcgagctggtcagcaacccgccgccacgtcagtccagagcggcggcggcgaaagaggcgctgccggccgcaactggctggggccagttttccagcggtttccgcgaggcgctgaccatggcctggctggcgatggcggccaacaaaatgcgcactctgctgaccatgcttggcatcattattggtattgcctcagtggtgtcgattgtggtggtgggcgatgcggcgaaacagctggtgctggcagatattcgcgccatcgggactaacaccatcgacgtttatcccggcaaagattttggcgacgacgagccgcagtatcagcaggcgctgaagtatgacgatctggcggctattcagaagcagccgtgggtgaactccgccacgcctgccgtctcgcaaaacctgcgtctgcgctatggcaacatcgacgtggcggccagcgctaacggcgtcagcggagattacttcaacgtctacggcatgaccttcagcgaaggggcgaccttcaacgctgaacagctggcgggcagggcgcaggtggtggtgttagacgctaactcccgcaggcagctgttcccgaataagaccaatgtggtgggggaagtgatcctcgtaggcaacatgccagcgacggtgatcggcgtggcggaagagaagcagtcgatgttcggcagcagtaaaatcctgcgcgtctggctgccgtacaccaccatttccgggcgcatcatggggcagtcctggcttaactcaattaccgttcgagtgaaggagggctacgacagcgggctggcggaacagcagctggagcggctgttaaccctgcgccacgggaaaaaggatttcttcacctggaatatggatggcctcttgaaaacggcggaaaagaccacacgtactcttcagctgttcctgacgctggtggcggtgatttcgctggtcgtcggcgggataggggtgatgaacattatgctggtgtcggtgaccgaacgtacgcgggagatcggcatccgcatggcggtcggagccagagccagcgacgtgctgcagcaatttttgattgaagcggtgctggtgtgtctggtgggcggtgcgatggggattgcgctctcgatgatgatcgcctttgcgctccagctcttcttaccgggctgggagattggcttctcgccgatggcgatcctgacggcgtttttatgttccaccttcaccggtattctgttcggctggctaccggcgcgaaacgcggcgcggctggatccggtggatgcgctggcgcgcgaataa

SEQ ID NO: 522949 - DNA, 927 bp, Stenotrophomonas maltophilia
gtgggcgcgcaggtcagcggtcagcttaaaaccctgtcggttgagattggcgataaggttaaaaaaggccagttgctgggcgtgatcgatcctgagcaggcgcaaaaccagatccgcgaagtggaagcgacgctgatggagttgcgcgctcagcgcgctcaggctcaggcggagcgtaatctcgctcaggtcaccctgtcgcgccagcaggcgctggcgaaaacgcaggccatctcgaaacaggatctggacacagccgccacggagctggcggtgaagcaggcgcagattggcaccatcgatgcgcaaatcaagcggaatcaggcctcgctggatacggcgaaaaccaacctcgattacacgcaaatcgttgcgccaatggccggggaagtgacgcagataaccaccctgcaaggccagacggtcatcgccgcgcagcaggcgccgaacatcctgaccctggcggatatgagcaccatgctggtgaaagcccaggtatctgaagcggacgtcattcaccttaagccggggcagaaagcctggtttacggtgctgggcgatccgcaaacccgctatgaagggatgctgaaagatatcctgccgacgccggagaaggtcaacgacgccatcttctactatgcgcgttttgaggtgccaaacccgcagggcgtgctgcgtctggacatgaccgctcaggtgcatatccagttgaccggcgtgaaaaacgtgctgacggttccgctctccgcgctgggcgaatccgccggggacaatcgctacaaggtgaaagtgctgcgcaacggtgaaacccgcgagcgggaagtggtgattggcgcacgtaacgacaccgacgtggtggtggtaaaagggctggaagagggtgaggaagtggtcaccagcgaaagcctgcctggagccgcgcaatga

SEQ ID NO: 522950 - DNA, 240 bp, Stenotrophomonas maltophilia
  misc_feature (202)..(211): n is a, c, g, or t
atgaacctgaagggaaaacgcagaaagctgtttctgctgctggcggtagtggtgttagcaggcggattctggttatggaaggtactgaacgcgccggtaccccagtatcaaacgctgattgttcgtccgggcgagctgcaacaaaacgtgctggcgacggggaagctggatgccctgcgtaaggttgacgtgggcgcgcagnnnnnnnnnngggaagctggatgccctgcggaaggttga

SEQ ID NO: 522951 - DNA, 957 bp, Stenotrophomonas maltophilia
atgtcttccatcgtcgatacaccttattcaacgctgtcccagcctaaatcgggctggcaactgtttaaaagcctggcatcgggttccctcacgccggggctggcgtggcaaaatccggcctatcgacgtaagtttatgttgcgctcgctggcaacgccgttcaccactgcgcgcctgctcggaaaccttgcaaaacagccccgtctgatgcagatcctgcgcgtgcagcccggcctgccgtgccgcctgcaccgaccgtggctgaccgtcaatatgggccgtcagaatacgctggacgcattggacaatcactatcagatgatgagccgccatcttccggcgtcactgctgaacggctacctttccagccagggcatcacgctggtgacgttaacgggcaaagaggagcagcagtttagcgttcgcctgagcgcggatgcgtttctggacaaagaaggggaagcgaccctcactttttgcgaccaccagaacacggtgctggccgagctgacctttacgctgtgcaaataccagggcaattcaacgctcttcatcggcggaatgcagggggcgaaagcgcatgtcccgcacgagcacattcagctggcgaccaaagcctgtcacggactgttcccaaaacgtctgctggttgaagcggtcatgacgctggcaggcgccttccccgtcgagcagatcctcgcggtgagtaacgccacccacatctaccgcagctggcgctatcgcaagaaaaaagagggaaaattgctggctgactatgacagcttctggcgctcccttggcggacagcagcaggagaacggcaactttgccctgccactgaccatgccacgcaaaccgatggaagagattgcgagtaaaaaacgatccgagtaccgccgccgctatatcctgcttgatagcctgcatcaacaggtatcgcaggcgactgcccgttaa

SEQ ID NO: 522952 - DNA, 1659 bp, Stenotrophomonas maltophilia
atgctactcgaacgtgtggagattgtcgggtttcgcgggattaaccgcctgtcgctgcaactggaacagaacaacgtcctgataggcgaaaacgcctggggtaaatccagcctgctggatgccctgacgctgctgctttcgcccgaagagaacttgtaccacttcgtccatgatgacttctggtttccgccgggggatgtcaacgggcgcgagaaacacctgcatatcattctgaccttccgcgaatccgagcccggtcgccatcgcgtgcgtcgttttcgccctatgtcgccctgctgggtgccctgtgaagatgggttccagcgtattttctatcgccttgagggcgaaatggcgcaaaacgacggggtattaaccctgcgtgaatttcttgatgagaaggggaatccgatcccgctcgataatattgacgagcttgcccgccatctgatccgcctctcccccgtgttgcgcttacgagacgcgcgctttatgcggcggatccgtaacggcaccgtgccgaatatgcctgaggtggaggtgaccgcccgcgagctggatttcctcgcccgtgaactggtctcgcggccgcagaacctcaccgacggccagatccgtcaggggctgtctgccatggtgcaactgctggagcactacttctctgagcagggaacggggcaggcgcgccaccgcctgatgcgccgccgctcgcacgacgagcaacgaagctggcgctatctcgatattatcaaccgcatgatcgaccgccccagcgggcgcacgcatcgggtgatcctgctgggattattctccacgctgttacaggcgaaagggacggtgcgcctggatcgggacgcgcgcccgctgctgctggtagaagatccggaaacgcggctgcacccgattatgctttccgtggcgtggcatcttcttaatctgctgccgttgcagcgtgtcaccaccacgaattccggcgagctgctctccctgacgccggtggagtatgtctgccgcctggtgcgtgaatcctcgcgggtcaccgcctaccggctcgggcccggcgggttaaatgccgaagatggccgacgcattgcgtttcatatccgttttaaccgtgcctcttccctgtttgcccgctgctggttgctggtggaaggggaaaccgaaacctgggtgataaacgagctggctcgccagtgcggacaccactttgatgccgaaggcatcaaagtgatcgaatttgctcagtctggcttaaagccgctgatcaaatttgcgcgccggatggggatagagtggcacgtgctggtggatggcgatgaggcgggtaaaaaatatgcggcgaccgtgcgcagcctgctcaataacgatcgagaagaggagcgggaacatctgaccacgctgcccgcgatggacatggagcactttatgtaccgccagggatttgacgacgtctttcaccgcgtggcgatgatcccggtggatgtgcccatgaatatgcgtcgggtgattgccaaagctatccatcggtcgtcaaaaccggatttggccattgaagtcgcgacggaagcgggcaggcggggcgtggagtcggtgcccacgctgctgcgtaaaatgttctcccgcgtcctctggctggctcgcgggagggccgattaa

SEQ ID NO: 522953 - DNA, 798 bp, Stenotrophomonas maltophilia
atgttgatggtttcaaaatactggctctttgagtcgtcatccctttatggcgatataacccgcgcgcaggaatgggcgtggacgtttattattgaggtggttatgttcagaaaattagcggcagaatgctttggtacattctggctggtgtttggtggctgcggtagcgcagtactggcagccgcatttccggaattaggtattggatttgtcggcgtcgcgctggcattcggtttaaccgtattaaccatggcattcgccgtggggcatatttccggcggtcatttcaacccggccgtcacgttaggtttatgggcgggcggacgtttcccggcgaaagatattattggctatattattgcccaggttattggcggtattattgccgcggcggtgttgtacgtcattgccagcggaaaagccgggtttgacgccgcggccagcggatttgcgtcaaacggcttcggcgaacactctccaggcggctactcaatgctgtctgctatcgtgattgaaattgtgctcaccgcaggtttcctgttggtgatccacggcgcaacggacaaatacgcgcctgcgggctttgcccccattgctattggtctggcgctgacgcttatccacctgatctccatcccggtgaccaatacctccgttaacccggcacgtagcaccgcggtggctattttccagggcggctgggcgcttgaacagctgtggctgttctgggtgatgccaattattggcggtattctgggcggcgtgctgtatcgcaccctgctggaaaaacgcgattaa

SEQ ID NO: 522954 - DNA, 900 bp, Stenotrophomonas maltophilia
atgttctcaggactcctcatcattcttctgcccctgattgtgggctaccttattccgctgcgtcatgaatcggccttaaagcttattaatcgttttctcagctggattgtttacgtcattctgttctttatggggatcagcctggccttcctggataatctggcgacgaacttgctttccatcctgcattattctgcggttacggtagtggttattctgctgtgcaatattgccgcgctgttctggctggaacgcactattccctggaaaaatcaccaccatcaggaaaagcttccctcccgaattgcgatggcgctggaatcattaaagctgtgcggcgtggtggtgctcggttttttactggggctaaccggatgggcttttttacagcacgctacggaagccagcgaatatacgctgattttcctgctcttcctgatcggtattcagttgcgaaataatggcatgacgctgaaacagattgtcctgaaccgccggggcatgatggttgccgttatcgttgtggccagctcaatggcggggggagtgattaacgcctttattctcgatctgccgctgaaaaccagcctggcaatggcatccggttttggctggtattcgctctccggtattctgctgaccgaatcgtttggtccggtgatcggcagcgccgccttctttaacgatctggcgcgcgagctgatagccatcatgctgatccccggcctggtacgccgcagccgctctaccgcgctgggcctgtgcggggccacctcaatggactttaccctgccggtgttacagcgctcgggaggtctggagatggttcctgccgctattgtacacggctttattctgagcctgctggtccccatcctgatggcgttcttctcagcctga

SEQ ID NO: 522955 - DNA, 1653 bp, Stenotrophomonas maltophilia
atgttttgtgtgcaatgtgaacaaaccatccgtaccccggcaggcaacggctgctcttacgcgcagggtatgtgcggcaaaaccgcagaaacgtccgatctccaggacctgctgattgcggcgctgcaaggcttatccgcctgggccttcaaggcccgtgaatatggccttgtcgatcactatgtcgacagctttgcgccgcgcgcatttttctccacgctgactaacgttaacttcgattctccacgcattgtgggctatgcccgcgaagcgattgccctgcgtgaagccctgaaagcgcaatgcctgaatgccgacgccagcgcccgcgtggacaacccgatggcggagctacagctggtgagcgacgacctgggcgagctacagcgtcaggccgccgaatttactcccaataaagacaaagcggcgattggcgagaacatcctcggcctgcgcctgctgtgcctgtacggtctgaaaggtgctgcggcgtatatggagcacgcgcacgtactcggccagtacgacaacgacatttatgcccagtaccacaaaatcatggcatggctgggcacctggccttccgacatgaacgccctgctggaatgctcgatggaaatcggccagatgaacttcaaagtgatgagcattctggatgccggtgaaaccagcacctacggtcacccaacgccgacgcaggtcaacgtcaaagcgaccgaaggtaaatgcatcctaatctctggccacgacctgaaagatctctacaacctgctgaagcagaccgaaggcaccggcgttaacgtttatacccacggcgaaatgctccccgcgcacggctacccggaactgcgtaaatttaagcatctgatcggtaactacggcagcggctggcagaaccagcaggtggagttcgcccgcttccctggcccaatcgtcatgacctctaactgcatcatcgaccctaccgtgggcgcgtatgacgaccgtatctggacccgcagcatcgtcggctggccgggcgtgagccaccttgaaggcgatgatttcggtccggttatcgcacaggcgcagcagatggcaggcttcccgtacagcgaaattccgcacctcatcaccgtcggttttggccgtgaaaccctgctgggtgcggcggattccctgattgacctcgtcagccgtgaaaaactgcgtcacatcttcctgatcggcggctgtgacggcgcgcgcggggaacgtaactatttcaccgatttcgccacccgcgttccggaagactgtctgatcctgaccctggcctgcggtaaataccgtttcaacaagctggacttcggcaacatcgaaggtctgccacgcctggtggatgctggtcagtgtaacgatgcgtattcagccatcattctggcggtcacgctggcagagaaactgggctgcggcgtgaacgatctgccgctgtcgctggtgctctcctggttcgaacagaaagcgatcgttattctgttgaccctgctctctctcggcgtgaccaacatcgtcaccgggccgaccgcgccaggcttcctgacgccggacctgctggccatcctgaacgagaaatttggtctgcgttccgtgaccaacgttgaagatgatatgaagcaactgctgagcgcgtaa

SEQ ID NO: 522956 - DNA, 969 bp, Stenotrophomonas maltophilia
atgaccatgccaacctcacaatgtccgtggcggatgcaggttcatcacatccaacaggagacgccggatgtgtggacactgtcgctgctgtgccatgactactacccgtaccgcgcaggtcagtatgcgctagtgagtgtgcgtaattcggcggataccctgcgcgcctacacgatctcctccacgccgggcgtgagcgaatacataacgctcaccgtccgtcgtattgatgacggcgcaggctcccggtggctgacccgtgacgtgaagcgcggggattacatctggctgtctgacgcgcagggcgagttcacctgtgacgacaagaaggaagacaaattcctgcttctggcggcaggctgtggcgtaacgccgattatgtcgatgcgccgctggctggcgaaataccgtcctcaggccgacgtgcaggtgatctttagcgtgcgttccccggaagatgtgatttttgccgaggaatggcgaaattatccggtgaccctggtggctgagcacaacgcgacgcacggttttgtcgcggggcgtctgagccgcgaaatgttgcaaagcgtgccggacattgcggatcgtaccgtgatgacctgcggcccggcgccgtacatggagatcgtggagaaagaagtgaaagcgctcggcgtgacccgcttctttaaagagcagttcttcacgcctgtagcggcagcggcgaccagcgggatgaagttcacgaagctgcaaccggcgcagaccttctttggtcgcgtgggcaccacgctgcttgaagcgctcgaaagcaataacgtgccggtagcggcagcctgtcgcgcgggtgtgtgcggctgctgtaagacgaaggtggtttccggtgaatacaccgtcaccagcaccatgacgctgaccgatgcggaaattgcagagggttacgtgttggcgtgttcatgccatccgcagggagacctggtgctggcataa

SEQ ID NO: 522957 - DNA, 1719 bp, Stenotrophomonas maltophilia
atgaaacaaaccgtggctgcatacatagcgaaaaccctggagcaggctggcgtaaagcgtatctggggcgtcaccggcgattcgctgaacggactcagcgacagccttaacaagatgaagaccattgaatggatgcccacccgccatgaagaggtcgccgcctttgccgcgggtgccgaagcgcagctcacgggcgaactcgccgtctgtgcaggttcctgcggaccgggaaacctgcaccttatcaacggtcttttcgactgtcaccgcaaccatgttccggtgctggcgattgccgcacatattccgtcatccgaaatcggcagcggctattttcaggagacgcatcctcaggagctgttccgtgaatgcagccactactgcgagctggtctcgtcgccggagcagatcccacaggtgctggcgatagccatgcgtaaggcgatcctgaatcgcggggtttcggtggttgtgctgccgggggacgtggcgctgaaggccgcacctgaaaccgccaccacccactggtactctgcgccacagccaaccattacccctgcggatgaagaacttaaaaagctggcgcaactgctgcgatactccagcaatatcgccctgatgtgcggcagcggctgtgctggcgcgcataaagagctggtggaatttgccgctaagctgaaggcgccagttgtgcacgccctgcgcggcaaagagcacgttgaatacgataacccgtacgatgtgggcatgaccgggctgatcggtttttccagcggcttccataccatgatgaacgccgatacgctgatcctgctcggcacccagttcccgtaccgcgcgttctacccgacggatgcgaaaattatccagatcgacattaatcccggtagcatcggcgcgcacagcaaggtggatatggcgcttatcggcgatattaaatccaccctcgccgccctcctgccgctgctggaagaaaaaacggaccgcaaattcctcgataaagccctgagcgactatcgcgatgcgcgtaaggggctggacgatctcgccaaaccgagcgaaaaagcgatccacccgcagtatctggcgcagcagatcagccacttcgccgacgacgatgccatcttcacctgcgacgtgggtacacccaccgtctgggccgcgcgctatctgaaaatgaacggcaaacgacgcctgcttgggtcgttcaaccatggctcaatggccaacgccatgccgcaggcgctgggcgcaaaagcgacggcaccggaacggcaggtggtggcgatgtgcggcgacggcgggttcagtatgctgatgggggatttcctgtcggtggcgcagatgaagcttccgctgaaaatcgtggtctttaacaacagcgtgctgggctttgtggcgatggagatgaaggccggaggctacctcacggatggcaccgagctgcacgacaccaacttcgcccgcatcgccgaagcctgcggtatcaccggtattcgggtggagaaagcctcagaggtggacgaagccctgcaacgtgccttcgccatcgacggcccggtgctggtggatgtggtggtcgccaaagaagagctggcaatcccgcctcaaatcaagctggaacaggctaaaggttttagcctctacatgctgcgcgccatcatcagcgggcgcggtgacgaagtgatcgaactggcaaaaaccaactggctcaggtaa

SEQ ID NO: 522958 - DNA, 1002 bp, Stenotrophomonas maltophilia
atgattgatttacgtagtgataccgttacccgtccgggccgcgccatgctcgaagagatgatggccgccccggtcggggacgacgtctacggcgatgacccgacggtcaacgaactccagcgctatgcggccgagctgagcggtaaagaggctgccctgttcctgcccaccggcacgcaggctaacctggtggcgctgctgagccactgcgagcgcggcgaagagtatatcgtcggccagggggcgcataactacctgtacgaagctggcggcgcggcggtgcttggcagcattcagccgcagccgatcgatgccgcgccggacggtacgctgccgctggacaaagtcgcggcaaaaatcaaagccgatgatattcacttcgcccgcactaaactgctgagcctcgaaaacacccataacggtaaagttctgccgcgcgaatacctgaaagcggcatgggattttacccgcgagcgcaagctcggcctgcacgttgacggcgcacgtatcttcaacgccgtggtggagtacggctgcgagctgaaagagatcacccaatattgcgactcgttcaccatttgcctctctaaagggctgggcacgccggtaggttccctgctggttggcagcgcggactacatcagacgcgccaaccgctggcgcaaaatgaccggcggcgggatgcgtcaggcgggtattctggcggctgccggactgtacgccctgaaaaataacgtgtcacgcctgaaagacgatcacgacaatgcggcgtggatggcagcgcaactgcatgaaatcggcgctgatgtcatgcgtcatgacaccaacatgctgtttgtccgcgtcggcaatgagcatgctgccgcgctgggcgaatttatgaaagcccgaggcgtgctgatcaatgcctccccggtcgtgcgactggtgatgcatcttgacgttaaccgcgagcagttgaccgaggtggtgaaacactggcaggcgtttttacagcgttaa

SEQ ID NO: 522959 - DNA, 1437 bp, Stenotrophomonas maltophilia
gtgccgcaacgtattctggtgctcggtgccagcgggtatatcggtcagcatctgaccactgcgttaagccagcaggggcaccaggtgctggcagtggcacgcaacacggaacgcctgcaaaagctacatttgcctggcgtgacgtgtcacaacgttgaccttaactggccgaaagcgcttcctgcgctgctggaaggggtcgatacgctttactaccttgttcacagcatgggcgaaggcggcgattttatcgcccacgagcgtcaggtggcgatgaacgtacgtgatacgctgctgcaaacgccggtaaagcaggtgatctttctaagctcgcttcaggcgcctgagaacgagcagtcagaccatctgcgcgcccggcaactgacggcagagacattgcgaagcgcccgtatccccgtcaccgaactgcgggcagggatcatcgtcggcgcgggttccgccgcgttcgaagtgatgcgcgatatggtctacaacctgcctgtgctgacaccgccgcgctgggtacgctcgcgcaccacgcccattgcgctggagaatttactccactatctggtggcattgctggatcatccggcggcggcgcatcgtgtgctggaggcggctggcccggaagtgttgagctatcaggcgcagttcgaacattttatgcgggtgagtggccgccgccgctggctggtgcccgtccccttcccgacccgctggatttcggtgtggtttttgaatgtgatcacctccgtgccgccgacgactgccaaagcgcttatacagggactgaaacacgatctgctggcggacgatcgtgaactgcgtgccttgatccctcaggaattgatccccttcgacgatgccgtacgcaatacgctgaaagaagaagagaagctggtgaactccagtgactggggctacgacgcgcaggcgtttgcccgctggcggcccgagtacggctattacccaaaacaggcgggctgtacggtaaaaaccactgccagcctctcagcgctgtgggacgttgtgaaccagatcggcggcaaagagcgctatttcttcggcaatatcctctggcaaacgcgcggctcgctggatctgctggtgggtcaccggctggcaaaaggccgtcctgccgccccgtatctgaacgtgggcgatacggtcgacagctggaaggtgatcatcgttgagccggaaaaacagctggcgctgctgtttggcatgaaggcaccggggctggggcggctctgcttcacccttaaagacaaaggcgttcaccgcgagctggacgttcgggcgtggtggcacccgcacggaatgcccgggctgttctactggctgctgatgatcccggcacacctgtttatcttccgcggaatggcgaaacggattgcgcaactggcagaagaaaagcgggaaagtaactaa

SEQ ID NO: 522960 - DNA, 1014 bp, Stenotrophomonas maltophilia
atgaaggtactggttaccggggcgaccagcggcttaggccgaaatgcggtcgaatttctgcgcaacaaaggcatcagcgtgagggccaccggtcgcaacgaggcgatgggcaagctcttgcaaaaaatgggcgctgagtttgtccatgccgacctgacggagctggtctcctctcaggccaaggtgatgctcgccggtatcgatacgctgtggcactgctccagttttacctccccgtggggtacccaggaagccttcgatctcgccaacgtgcgcgccacgcgccgtctgggcgaatgggccgtcgcctggggcgtgcgtaactttattcatatctcttccccgtcgctctattttgattatcaccatcatcgtgatattcaggaagatttccgccctgcgcgctttgcctgtgaatttgcccgcagtaaagcggctggcgaagaggtgatcgacctgctggcccagtcaaatccgcacacccgctttaccgtgctgcgaccacagagcctgtttgggccgcacgacaaagtctttatcccgcgactggcccagatgatgcaccattacggcagcgtgctgttaccgcgcggcggcgatgcgctggtagacatgacctattacgaaaatgccgttcacgccatgtggctggcgagccagccggagtgcgataagctggtgtcgggccgcgcctataacattaccaacggcgaaccctgtaccctgcgcagcattgtgcaaaggctgattgatgagttaaaaatcgactgccggatccgttccgttccctacccgatgctggacatgattgcccgcagcatggagcgctttggcagtaaatcggcgaaagagcctgcgctgacgcattacggtgtgtcgaagctcaactttgattttacgctggatatttctcgggcggagaacgagctggggtataaaccgattatctcgctcgatgaagggatagtgcgtacggcggcgtggttgcgggatcacgggaagttacaccggtaa

SEQ ID NO: 522961 - DNA, 1827 bp, Stenotrophomonas maltophilia
atgaacaaaaggacgttactgagtgtacttgttgctggtgcttgcgttgcaccttttatggcgcaggccgcctctttgcaggcgaccaccggcgagccgtacaccatgaaagccagcgatctggcgaagaaagagcatgagctcactaacttcccgctgatggcctccgttaaagagactattcagaccctggacaacgcgcaggtcgaactgattgagccaggccgcgcggcgaacccggacaacgtcaaacgcgttgaagggattgtgaaagccagcgactgggaatatctcttcccgctgcgtgcacaggcttatacctacagcaacttcctgaaagccgtgggtaaattcccggcgctgtgtaagacctacaacgacggtcgtgacagcgacgctatctgccgcaaagagctggcgaccatgtttgcccactttgcccaggaaaccggcggccacgaaagctggcgtccggaagccgaatggcgtcaggcgctggtccacgtgcgtgaaatgggctggagcgaagggcagaagggcggctataacggcgaatgtaacccggacgtctggcagggacagacctggccttgcggtaaagacaaagacggcgatttcctgagctatttcggacgcggtgcgaaacagttgtcctacaactacaactacggtccattctctgaagcgatgtacggcgacgtgcgtaccctgctcgataaacctgagttggtggcggacacctggctgaacctggccagtgctatcttcttcttcgcctatccacagccgccaaaaccaagcatgttgcaggtgatcgacggtacatggcagccgaacgatcacgataaagccaacggcctggtcccgggcttcggtgtaacaacccagatcatcaacggtggcgttgagtgcggcggcccgactgaaattgcgcagtctcagaaccgtatcaagtattacaaagaatttgcgaactacctgaaagtccctgttccggcgaacgaagtgttgggttgcgccaacatgaagcagttcgacgaaggtggcgcaggcgccctgaagatttactgggaacaggactggggatggagcgcggataccccggacggcaagacttactcttgccagctggtgggttatcagacaccgttcagcgcgttcaaagagggcgactacagcaagtgcgtgcagaagttctataacgtgaatatcgtgaatgacgacggttcctcggtgacgccggacgaaaccccggtcacgccaacgccaacaccttctgaagatgttacgccggccccaacgccagcgccagttccggatgaaactccggttgaacctgtcgcggtgaaccacgcgccggttgcgcagattgcaggcccaatcggtgccgtagaagcgggcgcgcaggtttctctgagcgcggaaggctctaccgacgcagacggcaacaagctgacctacacctggcgttctcaggatggccagaccgtgaccggcgaagataaagcggtggtgacctttaaggcgcctgagtctgcaacggcgcagcagtatgaagtgagcctgaccgtcagcgatggcgagctgagcagcaccacgtcttacctgctgaacgtgaaagcgaaagcggcaacgccatccggagaagatacgtcttacccggcatggagcgcgaacagcaagtacaacgccggtgatatcgtgaacaaccacggtaaattgttccagtgcaaaccgttcccgtacagcggctggtgtaacagtgcgccgacgtactatgagccgggtgcaggcctggcatgggctgaagcctggacggctctgtaa

SEQ ID NO: 522962 - DNA, 441 bp, Stenotrophomonas maltophilia
atgaaaaagctcattttgttattattaataataagccagggtgctctggcaaactgttgggataaagcggcgcgttattatcatgtcgacccttatttactgtacgcgatagcgaatgtggaatccggtatgaatccgtacgcggttgggaaaaaccgcgatggcacgcgggatgtcgggctgatgcaaatcaacagctcgcattttaccgcgctggaaagcagaggcatcgatgagtatcgcttaatgaccgagccgtgtacctccatcatggtgggtgcctccattctctccggaatgataagagtatatggctataactgggaagcggtaggcgcttataacgccgggttgaagaaagagaattatccgcagcggatgaaatatgcccataaggtctgggctaaatatcagcaattaaaattagcagcacgtgattaa

SEQ ID NO: 522963 - DNA, 2703 bp, Stenotrophomonas maltophilia
atgaaatttatgaaaccaaaatatctggcgctctttattgcggcggccaccagctccgcatttgcagctgcgccgggtacgccttctattacatcgggcaatgataaatttgcgctggtagaagtggatcaggcggcacaggattacaacaacctcatcaaagtgcataaagagggtgttgatgtaaaagtggaatggaacgtctggagcggtgacgccccaacgtctgcaaaagtgctgctggacggcaagaccgtctggaccggcgcgggcagcgcggcgggttctgcgaccttcaaagtcaaaaaagggggccgctatcaggaacaggtcgaactgtgtaacgacagcggctgtaccaaaagcgcaagcaaactgattatcgtggcggataccgacggaagccatttgctgccgctgaatacgccgctgctggaaaataacaaagctttcgctcagcataccgataaagtcgtcggtgcctatttccctgagtggggcgtttacgatcgaaacttctctgcggataagatcccggtcgcgaacattaaccacctgctgtacggctttattccaatttgcggcggtgacggtattaatgacagcgccaaatcttcaggtgcactggaatccctgaaacgcgcctgtgctggccgtcaggactacaccgtggccattcacgatccatgggctgcgttgcagaaaccgcagaaaggcgtaagcaactgggacgatccctacaaaggtaactatgggcagctgatggcgatgaaaaaagcccatcctgacctgaaaattctgccatccattggtggctggaccctgtccgatccgttctatcagatggataacaaagtactgcgtgaccgtttcgtggcgtcggtaaaagacttcctgaccacctggaaagtgtttgacggtgtggatattgactgggaattcccgggcggcggcggtgaaaacgccaaactcggcaatcctcagaccgataaagctacctacaccgcgctgatgcacgacctgcgtcagatgctgaatgaactgtctgcggaaaccggtcgtacctacgagctgactactgcaatcggtgccggtaaagataagatcgaagacgtggactataacaccacgcagcagtacctcgaccatatcttcctgatgagctacgacttctacggtgcctggagcaataccgatctgggccaccagacagccctgtacggtgcttcctggaaaccagacactaactacaccaccgataacgcggtaaaagcgatgctggagcagggcgttaagccaggcaagatcgtggtaggcgcaggtatgtatggtcgcggctggaccggcgttcatggttataccggcgataatccatttaccggcaccgcaaccggaccaattaaagggacatgggaaaacggtatcgttgactatcgtcaaatcgtcaaccagatgctgggcaaaccgggctgggaatacaaatatgacgaagcggctgaagcgccgtacgtgttcaacaagtccaccggtgagctggtgacgtacgataacgcccgttccgttatggcgaaaggcaaatacgtactgaacaaaaacctgggcggactgttcgcatggtctatcgagtctgataacggcgatatcctgaacgccatgaacgaaagcctgctgggcggaagttccatcccggatctgcctgttgagactaaccatgcgccaatggcttcagctgccgatcaaaatgtcaccggtcctgcaaccgtgaccctggatggctctgcttccagcgaccaggacgacgatgcgctgacctataaatggacgcaggtttcaggcccttctgtgaccatcgccaatagcaccaaagcaaaagccagctttagcgttccggctgtgacaagcgaccagaacctggtcttccgtttgaccgtaaccgacgctaaagggctgagcaatgctgttgacgtccaggttgtgaataaagcgcctaaagccaaccaggcgccggtaatcaatgctatggaagccgttaccgttcagtccggtgaagcaatttctctgcacgcacaggcatccgatcctgatggtgacgcgctgacctacagctggagcgtaccggctgatatgaacgcgaccggcactgattcggccaacgttcgcatcactgcgccagaagtgcacaatacctcttcctacaccctgagcgttattgtgacggacggtaaaaccagcgtgcagtctgacgtgcaggtgacggtggagcctaagccagctgacgaggtaacgcctcctgccgatgacgtcacaccaccggctgacgacgtaacccctccagctgacgacgtaacccctccagctgatgataccgccggcagctgcgacgcacctgtcgatgccaacgccagcaaatacgctgcgtgggacgcgagcaaaatctataacaacggcgataccgtaagcttcgaccacctcgtgtggaaagcgaaatactggactcagggcaatcagcctggcttcggtatggacgcgtgggagctggtaagcaacgtgaagatgaactggcgttctgacctggtctacaacggcggcgacaccaccacctatgaaggtaacgtttaccgtgcgaaatggtggacccgtggtgataacccagcaaatagcgacgtatgggtaaaagaaggcgcatcaacagattgcaaataa

SEQ ID NO: 522964 - DNA, 798 bp, Stenotrophomonas maltophilia
atgaataccttcacgctgatgcgggaggcctgtccgctcggtttcccgatgatgagtgctatcctgggcgggattatgggcagttttctcggcgttgttgccgagcgcgtaccgggaatggtgatggatgaggaggggagcggcaatctgctctttcctgcctcgcactgcccggtgtgtcagcacacgcttgctgcatgggaaaatatcccgctgctcagttggctgttattacgggggcgctgccaccagtgcggcagcgcgatcccgctgcgactctttttggtggaactgttctccgcgctgttttttggcatcacggcctggtgcatgccggacgttcaggcgctgttctctttgtggttactggcggcttttttactgccgctggccatgatcgactggcagcatcagttgttgccggactgcctgacccagccgctgctgtgggcggggttagtgctccatgctattgaccacacattgccgctacgcgctgcgctgtttggcgcggtggcgggctatctgtcgctctggctgctctactgggcttttcgtctgatcgccggacgagaagggctgggttacggggattttaagctactggcggcgctgggtgcctggtgcggctggcaggcattaccctccattgagctggcggcagcgttaagcggtattgtcggttatttcgccgtcaataatttaaataaaaataacctcactatttcttttggtccttacctcgccttttctggaatcgtggtgtttattagtcagcagtttgctttcacattttaa

SEQ ID NO: 522965 - DNA, 486 bp, Stenotrophomonas maltophilia
atgaaagagcgaatcgcgcagctgaaatcacgctatcagaattacagcgctcgggaaaaaatcattttaaaaatatgtgccgttgccattgtgggggctgcggtgtattacacaggagtaattcccctggataatatgatccaaaatagtaaatcgacgcttaaaagacaaaaagagacgctcaactggatgcgcagtgaaattgataaaaatcatcttcaggtccagttagttaaaacgaataatccgcgtacggtggtcgagaacagcgctcatgaaattaatctttcactgacggatgtgcgccaggaggggcaaactttatcgttcgtggtgaatcgggtaaatgtatatgaattaaaaagctggctgcgtgaaattaatcagacctccggcgtgacattgcaaaaaataaacctcacgccggttgaccacctcagcgatgtgaaagcacaggtgcagcttacctggtcaaaaagcgcatga

SEQ ID NO: 522966 - DNA, 1134 bp, Stenotrophomonas maltophilia
atgaaacaggtactttttgttcgccccgacagccgcgagggcgggaaaataatgtgctgtgagtccggcagcgagcgcgtcgaggtgctcgacagcctggagatgctggccgaacacccgctggctacacgcgtttgtctcctgctgcccgccagcgacatgattttccgccatttcacgctgccgaaaaaggtggcttctcaggcgatggccttctcgtggatggcggaagagacgctgattggcgacgtggacaacctccactggacagtgctctaccaaaaaggcgctgacgtcgacgccgttgccattgacgccgaccgcctgcgtgcggcattgacccgctgtcacgaggccggattaaacgtgattcaggccctgcctgatgcctggctgctgcccgtggcggcagggggcagcacgctggtcgcacaggataaaggctactggctgcgtttatctccccacgtggcgggtgaaatggagggaaccctgctgccgctgttgatgcagaaagccggagacggggaagtgtgttgctacggcgacgcgcctgcggacgttcacgttgacgtacagcatgcctggcagcacccgctggtgctgatccagccgcagtggaaaacctgtcgtgtgaatctgcttcacggtgaattcagccttaaggccggtcatggccaggccgcaaaaagcatgaaagcagcgatgatagcggcgggcctgctgtccgttggtctgctgctggggccgcgcattgcgatgggctggatgctggtacagcaggaaaatcgggttcagcaggagattgttcaggtttatcagcaccatttccccagcatgcgccagcagaccaatatcaaatatcactttggccaaagcctgaaaaaacagagcaaggggttctttcttcagcttgaggagctggagaaagcccggcagtcagtccctgcgatggagatcgatctgctggaatacgatgcgcagcaaaacaccttgacgctgagcgttagcgcgcaaagccagcccgcgttgcaggcgtttgtgaaccagaccagtgagaattttgattttaccttacaacctgtttcaacaaccgaaccgtataccgccatgatcgcagggaaacataaatga

SEQ ID NO: 522967 - DNA, 1011 bp, Stenotrophomonas maltophilia
atgaaccgaatccgtcaacaaaagggcgtcgccctgctggtggtgctgattttgctggtgatgatgtcggcgctggccgccaaaatcagccagcagttctgccgtaatttgcagaaaacgcattatcagataagccagcagcagctgcgctgggcgatgcaggcccaggaaaaagtggtgaaggacaggttacagaccgatgccagcggcgagagcaagccgctggcgctggacggcgactggcatcagccgctggagacgcagggagaagactacacggtcgtgagccaggtggaagacgctcaggactgctttaacgtcaataacctgttgaccgccgacgtcgcgccccaggggcaaaacgctcccgctgtggcggaaaaaccgcgtaaagagcggattgttgaacaactcctgacggaaagcgggctcagtccgggcacggcggaggcggtctatttccagctggtggattatctcgatggtgacagcaccacggcgaaagagggtgccgaaagcgatgcgtgggctggcatcgtgcccgcccggcaaccggcaaaccagatgatgcgcagcatcgcggagatcaaactgctgccagcgttcccggttacggcatatccgaaggtgagcaagctgttatgcgcgctgccggacgccgccagcaaggtggacgttaacaccctgcaaccggaacaggccgctgtgctggcggccatgtttccgggaaaattcacgcaggatgacgcggttcgtctgctggatacacgtccggaatcgggctgggaaaatatggacgcgttcagcaaagcgctggagcagaccttcccgcagttaaaagacgatctcccgcaggtggcagatcaattttctataaacagccggtacttccgcgtgaattacagcggcaataccgatgaattaacgcttcgcgtggtcagccagcttcagatgaataacgaagccggtgagatcgtgacgtggcagcgtcgttaccgaatgattgaataa

SEQ ID NO: 522968 - DNA, 654 bp, Stenotrophomonas maltophilia
gtgaagaaaacgcgacgccagcgcggatttaccctgctggagatcatgattgcgctgactattttcgcggtaatcagcaccctggcctggcaaattctggacggcgcgatgcgtaccagctcggccaccgatgccagcgccgctaagctcaaccagcttcagcgcggctggagtctgatggagcgcgattttttccagctacaggcgcgagcgccgcgtaatgagccagatctgttccgtcaggagggcgatgcccttgaactgaccaccctgaatggcgtgagcggaacggtccagctggagcgcgtgcgctggcggctggaagaggggcgtttgtaccgcgacgtctggcaggtcattgacggcccggtggacgttaagcctgacgaagtgccgattgtcagcggcgtaaaagcattgcagtggcggttttatcgtcagggctggcagacagcctggcacgacgccgcccatctgccggacggcgtggaggtcacgttgacgatggaaaacggggatacctggcgctgggtgttcaccacgccaggggatatgccggaggtggccgctgccgctgccccagagaaagccgccgacgcgcctgcgacgactccggacgcaacccctgcgccttcgccggagaccagaccatga

SEQ ID NO: 522969 - DNA, 381 bp, Stenotrophomonas maltophilia
atggctaacgacaacacaaagcaaaaggggatgacgctgctggaggtgatggtcgcgctggtgattttctccaccgccgcgctggcgctaatgaactcggtctccctgaacgtgcgttttacccatggcttggccgataccttgcaggccagttgggtggcggaaaatcagctggcggaagcgcagctcaccaaaaccgacttcccggatgctgagcagcaggggacggaaatcatgggcgggcgcagctggaactggcgtaagcagcgggtgaaaaccgccaacaacggctgggcgaactccattcgcgtctatgcggaaggcgatgagagccagccggttatttccctgcacatcattccgccgggagagagcaagtga

SEQ ID NO: 522970 - DNA, 486 bp, Stenotrophomonas maltophilia
atgaaaaatcaacgcggctttacgttgctggaaattattctggcgctggtgatatttgccagctgcgccatgatggtggtgtccaccattccttcgcgcagcggcgcggatatatttggccagcaattaaaagcgctcgttgattatggttcagaccgtgcggtgatggacggaaatattgtcgggctggtgatcgccaccgataaatatcagctggtgacgatcgcggataaaaatggcgagcgtcactgggtgccattatctgccggacgtattaccaccaaaggtgattttccggaagagatgcacgtgtcgctctcgccgcagcgcctggccgcgacggtggcgtccgagccacaggtgatctttttaccggacggtgaaatcagccgctttacgctgacgctgcaaagttacgacaaacagcaccatttccgcgtggtgtcgcagggtgcggcgccggtatcggtagaaaacgatggctaa

SEQ ID NO: 522971 - DNA, 450 bp, Stenotrophomonas maltophilia
atggctctaaaacgtaaaaacctggctcgccaggcgggcttcacattgctcgaattaatggtggtgattgttattcttggcgttctggcgagtatggtagtgccaaacttaatgggtaataaagaaaaagcggatacgcaaaaggcgaccagcgatattgtcgcgctcgaaggctcgctggatatgtataagctggacaaccaccgctacccgaccacagagcagggtttgcaggcgctggtgacgaagccggaaatcgcaccaatcccgaacggctatcgcgcggatggctatattcgccgcctgccgcaggatccatggggcagcgattatattctggtcagcccaggtgaacacggtgcggtggacattttctctgcgggtccggacggcgaagcgaatactgccgatgacattaccaactggtctctggataagaacgagaagtaa

SEQ ID NO: 522972 - DNA, 1209 bp, Stenotrophomonas maltophilia
atggctttctacgcctggacggcgacgagtgccgcgggaaaaacccagcgcgggacgttacaggccgagggacagaagcaggttcgccagtggcttcgcgagcaaaagctgatgcccgtgagtatcaccgaaacccgcgaaacggcgacaggcgggaaagcgaaaaccggggcgaagctctctaccccggtgctgtcgatgtttacccgtcagctttcgacgctggtgaacgccgcgctgccgctggaaagtgcgctgaaggcgatctctaagcagacggaagataaaaagctggcggcgatggtggtggagatccgcgagaaggtggtcgaggggcatacgctgttcgacgcctttagccagtttccacgcaccttcgacaaactttactgcacgctggtgatggctggtgaaaagaccggccacctgggcgacgtgctggagaagctggcggagtacaacgagcagcgccagaagatgaaaagcaagctgacgcaggcgatggtctacccgattaccctcaccgtggtcgctatcgcggtgatcggcattctgctggtggcggtggtgccgcaggtgattgagcagtttacccacatgaaacagcaactgccgatcaccacccggacgctgattgcggtaagtgatttcctgcaagcctggggtatctatattgtcggcagcctggcgagggcgttcgtcggcttcaaaacctgggtgcgaaacgtgaaaaaccgttttcgctggcacagctggctggtgaacggctcgccgattaaaaagctggtgtgcgccatcaacagcgcccgctatatccgtaccctgagcattttgcaggccagcagcgtgccgctgctggagggaatgtatatcgcgatggacggtattgaaaatctctatgcccgtcaggtgcttgagcaggccgccgataccgtacgtcagggggcgtcgctgtatgcggcgctggaacaggcgaaattattcccgccaaccatgctgtatatgattgcctccggtgaagagagcggggaattaggtaatttaatggatcgcgcggcagaaaatcaggaatcggcattacagcatcgaattacattaacgctgtcggtatttgaaccggcgctggtggtatccatggcgacgattgttttattcatcgttctttcaatattacaaccgcttctgcaacttaataatatggtaggttaa

SEQ ID NO: 522973 - DNA, 1479 bp, Stenotrophomonas maltophilia
gtggacgaactgagtaaaacactgtgtaacagcagctacgcaaaagataacggcgttctgttttacaacaatgatgtctatatccgggacgacactcctgcgcatgctctgctggaggtgcgccgggtgctgggccctgctttcatccccgtcactgtgacgccggaagcgtttgacgagatgctggccaaaatctggcagcagagcagcggcgtgtcgcagcagctggtggacgacatggacgcggatatcgatctgatggccttaaccgaggagatcccggataacgaagatctgctcgataacgacgaaaactcaccggtgatccgcctgatcaacgccattctcggcgaggcggtgaaggacggcgcgtcggatattcatatcgaaaccttcgagcgcacgctgagcatccgctttcgtgttgacggcgtgctgcgcccggtgttgcaaccggcgcgtaagctcgcgccgctgctggtgtcgcgtattaaggtgatgtcgaaactcgacatcgccgagaaacgtctcccccaggatggacgtatctccctgcgcattggccgtaaggccatcgacgtgcgtgtgtcgaccattccgtctcagtacggcgagcgcgtggtcatgcgcctgctcgataaaagcaatctcaagcccgacatcaacaagcttgggctgattgatgaagagctggagaagctgaaagggctgattgaccgcccgcacgggatcatcctcgttaccggcccgacgggttccggtaaaagtaccacgctgtacgccattctttcggcgctgaacggtcacgagcgcaacattctgaccgtggaagacccgatcgaatacgagctggaaggcgtggggcagacgcaggttaacccgcgcgtggacatgacctttgcccgcgggctgcgcgcgattctgcgtcaggacccggacgtggtgatgatcggggaaattcgcgacggtgagaccgcccagatcgcggtgcaggcgtcgctgaccggtcacctggtgatgtcgacgctgcacaccaacagtgccgctggggcgataacccgtctgcgggatatggggctggagtcgtttttaatcggttcatcgctgctcggtgtcattgcccagcgtctggtgcgtcggctgtgtacgcactgccggaccaccagtccgctggatgccaatgaaaaagcgttgttcagctttatggacgcgccgccaaaagcgatttatcgcgcggtggggtgtgaacactgccgtcagagcggctatcagggccgcgccggtattcatgagtttctggtggtggacagtaccatgcgccgcgccatccatgaagataaggacgaaatgtccatagaaacgcagctctttaagcaggcctacagcctgcgtgaaaacgggctgctgaaggtgattagcggcgtgacgtctctggaagaagtcatgcgcgtcaccgccgagcgtgggggggatgtgtaa

SEQ ID NO: 522974 - DNA, 1923 bp, Stenotrophomonas maltophilia
atgaaaaaaattccctgggcgtgcgtggcgctgaccgcattgtcgttatattccagttcgctgcttgcagctaactttagcgcgagttttaaaaatactgatattcgcgagtttatcgatacggtaggccgcaatctcaataaaaacattctggtcgatccgtccgtccagggaaccgtctcggtccgaacctacaacgtgctgacggaagatgagtactatcaattctttctgagcgtgctggatctctacggcctgtcggtgatcccgatggacaacggcatggtcaaagtggtgcgctcaagcgtggcgcgtaccgccggtgcgccgctggcagacagcaaaaatccgggcaaaggtgacgagatcatcacccgcgtggtgcgcatggaaaacgtgcctgttcgtgagctggccccgctgctgcgtcagctcaacgatgccaccggtatcgggaacgtggtccactttgagccgtccaacgtcctgctgttaaccggtaaagcctcggtggtgaaccggctggtggatctggtgcagcgcgtcgataaagacggcatccagcgtcgcgaaatcatcccgctgcgctttgcgtccgccaaagaactctcggagatgttgaataacctcaacaatgaagaacagaaagggcagaacgcgccgcagctggcgactaaagtcgtcgcggatgacgaaaccaacagcctggtgatcagcggcgcggaagatgcgcgggcgcgcacccgttcccttattcatcagctggatcgtgagcagaataacgagggcaatacccgcgtcttctacctcaagtatgccagcgccaccaaagtggtgccggttctcaccggcattggtgagcagctgaaagacaagccgggtgcggccaaagcgaaatccgcgagcgcctcaaccgatctgaatattaccgccgacgagtcaaccaactccctggtgatcaccgcacagcctaacgtgatgaactccctcgagaaagtgatcgacaagctggatattcgccgtccgcaggtgctggtggaagcgatcattgccgaagtgcaggacggtaacggcctggatcttggcgtgcagtggaccagcaagcacggcggggtgcagtttggctccaccggcctgccaatcagccagattaaaaatggcaccatgaaaggggcaagtttcactggccttgcgaccggcttctttaacggtgacttcggtgcgctggtgaccgcgctttccaccgacggcaaaaatgacatcctctccacgccaagcgtggtcacgctggataacaaagaagcgtcgttcaacgtcggtcaggatgtgccggtgctttccggttcgcaaaccaccagcggcgacaacgtctttaactcggttgagcgtaaaaccgtagggaccaagctgaagattgtgccgcagattaacgatggcgacatgatccatctgaagattgagcaggaagtgtcgagtgtcgacaacagcgcgacggaagactccagcctcggcccaaccttcaacacgcgcacgattaataacgaagtgatggtccacagtggtcagacggtggtgctcggcggtctgatggaaaatgtgaccaaacagtccgtgtccaaagtgcccctgctcggcgatatcccgctggtcggtcagctgttccgctacacctcgcaggatacttccaaacgcaacctgatggtgtttattcataccaccgtcctgcgtgacgacgacaactacagcgcggcctcgaaagagaaatatgaccagatccgggtgcgccagatgcagcgagtggaggagaaaaagctcggtattgttgagccgactgacaacgctgtcctgcccgcgtttccctctgcaagcactggcgccgcaccggtgaaaaccagcgccacgcgcaatccgtttaaagaatag

SEQ ID NO: 522975 - DNA, 774 bp, Stenotrophomonas maltophilia
atgaggttctcatttctttcacggtggataacgccttgtattatgtttgtgctgctgatcttttgcggccagcaagggtatctcacctttaaagattataaaaaagttatgaataagttggctaatgccgatcaacagccgctgaaaaaaacgcgcgaagagaaatccttttcgctttttacggcagccgtgcgtcaggaaatcttaccgggtgcggtgaaagccccgctggcagctgaaatcgaaggtattgtgaacagcgatgacgcctggctctcctttgctgtcatcaaaacgccaggcggtcagagaagctaccgtgagggtgaacctctctctggatttaacgacgcatttattcaggaaataaacaaagataatgtggtggttaattatgaaggtactacgcaggttctggcattaaataaaccggactattttaagggtggcgtggatagcggcccggtaacgaaatcgacaaaagatgttggcgcagagagtgtgcatcttgatgattatctggtgttaaaacccataattgaaaagggccgactggaaggctacaggataaacccaaggaatgcgtccgccttttacagccagtcaggtctggtaaaaggcgatgtggcggttcaggttaactctgtcgatatgaccgatgaagcaaaagcgaaaagcattattgccaactggtcaaaaatgaaagaagcggaggtcatcgtacgacgtcacgctcaccttgaaaatattcggattaatgttctaaacaattaa

SEQ ID NO: 522976 - DNA, 1563 bp, Stenotrophomonas maltophilia
atgtatcagagccactttaattttaaaaatccgccattcagatcgatcgcccgtttatccgggggttttctggtgccttatcatcaggatgtgttcaacctgttgaaagagaaaacccagcaggcgggaattatcgggctcttttgcgacgacgccccgcttctgggtcacttcagcgatgcgctaaaaacccgccacagtaacgtccttgttatcaatgcgtttcccaaactgagtgccagtagcctgctgtacaagctcaatccggtaacgaaagagagcaagaatcgcctgcaggcggtggatgccatcctgcgccagtggcacgagggaaaagcgaaaaccagagtgctggtgatttcacacgccgaagccatgaaagagagctgccgtgaagtcctgggtacgctgctcacgcgagccctggagctgaacttccggctctccgtggtgctgacgggcactgcggatcaggaaatcctgcttaagcaacctgaactgcgcgaatatacacacactcgtcatgtcctgcgccccctgacctgccgcgaattcctgggctatgtgcaggcgcaatgcgaagaacacggctgtgaaaattcgccgttaacgccggcccgcgtgcgcaaaatgcacacgttgaccaaaggcaacatcagcaaacttaacgaactggcgcacctgtcaatgctcgctgcctggacggaacgcgcgtcgcaggtcagcccgcgtcatttacgcctggcggcgggagagatcctgcccgcgaaaaaacacggtaagcgtctggcaaccgtggggctgttcgcatcggtgctgtttgccgcctgcggctggtatttaacctcgtccatcagcgagcatcttcccatccagctgccggtccccgtcagttggaaacagccgacgcgaaaaacggaggcgcccgtggtgccggttatcgacaatgaaatggttaatcagccggatgcgatgcaccagctctatctgatgtggggatatgacgcctcggccgaagatgcgctgtgccagaatgccgctaaagtgaacctgatgtgtaaacaggggaacgcgtcgccggagacgctggcgcaggaagggtatccgtgggtcagtgaactgaaaaccagcggtcaccttaactatgcggtggtcgccagggtcggagatacatcaattgacctgttaatgaataaccggacctggcaggtgagccgcagctggtttaaccggcatgcgaccggcaacttcacccagttgcaccgcctgacaccggaaggaaaagacgcgatcggcgcggccagcgacagcaaagacatggcctggctcgatcagcagttaagcctggcgctgaaccagcccgaaacgcatgcccggatctggaccgctgagatgatgaaacgcacccgtgagtttcagcaaaaaatgcatctgcacgtggatggcatccccggcgaagaaacgctgatgcagctgatgcgcgtaaccaacagcacgccgagcgtactgattcaggccacccgcactaccccggacgcaaaaatgcaggagaagaaagcctaa

SEQ ID NO: 522977 - DNA, 633 bp, Stenotrophomonas maltophilia
atgtcgaccatctgccttgcggcccagcgcagctatacaaccggggaagcggtctggttttcgtaccgcctccccagcctgaaaaacgttttcggcaaaacagcattatggatggtcggcctttgcgccatgctggttgtcggcctgtatatgcatgtctactggaacatgcgccacccggcgcctgacccggtcaacgccagcgttgccaaaccggaaacccagctttcggagatgcactacgtgtacgtgagtaaaccgttcccgcatccgcagcctaaagctgcgccagtgcctgttgatgttccaccgatgcaggatctgccgatcatcagtgatgatgccgactggcagcaggcgcccgacggcgcggtgccgcaagacccctcgcgggataccctacccggaactgaggcgcatgagcacgataccgcccccgccagcacgagcagtgaagagtcatcattaacggaattatttaaacaggcattaaaagagcaggagcaggattattctcaaggaaaaattcccgcaccgccggttgacgaaacgcaggataattcacaagcaagtgttaaaaacagtgaaaacagccgttcccctttcagtgataaaggagaccggcgggagtag

SEQ ID NO: 522978 - DNA, 624 bp, Stenotrophomonas maltophilia
atgttaagcatctatggaaaaaaattacgtccgcaacatgaaatggaaaagattatttctgcaacctcatgcgttgaagaaagaacgttaaaaaaatggcagaagatttccactgctgattccggtttaattcatattattgtcagcggcgaagttgaatttcgacgtgactctgacgaactgtgcttgttcaccgttaccgggcaatgcattttcggcctgtcgtcgatgtattacaacgccacccatatgtacggccttgttcggtcgaatacggttgttcgctcgatcaagaaagaggtcttcgcccagctgatgaccgagaaaaacctgtggcctgaactgacaaaagtgctttcctggtacatatgcctgatgagcaagcgcgatgatattctggtcgctcgcagcgcatattctgttgttcgcgaatttttatatgagatcaacgacctgattgtacagcatcagcgtgatattaacgtttatgattacattcaggaatacactaacctggcacgtagcaccattattaaaatcctctccgatctgaaaaaaggtcaatatattgtggtggaaaaaggtcgactgcttaacctcaccgcactgcctgaaaaatattaa

SEQ ID NO: 522979 - DNA, 831 bp, Stenotrophomonas maltophilia
atgaagcgttcgctctcaaccctcctgctggcattgttgctggcaggatgcgcctcggaagagggcattgttgataaaggcgcgtacgaacttgatacgcgccatcaggcgcaggcggcctacccgcgcataaaggtgctggtgatccattacaccgccgatgatttcgacacctcgcttgcgaccttgaccgataaaaacgtcagctctcactatctcatccccgcaaagcccccagctccgcagggcaaaccgcgtatctggcagctggtgccggagagcgagctggcctggcatgcaggtattagcttttggcgtgggaccaaccgcataaatgatacctccgtcggcattgagctggaaaaccgcggctggcggaaaaccgatggtgtgaaaacctttacccccttcgaaccggggcaaattgcggcgctaatcccgcttgccagagacatcatcgcccgctacgacattaaaccgcagaacgttgtggcccattcggatatcgccccgcagcgtaaagacgaccctggcccgctgtttccgtggcgcgaactggcgcagcagggcatcggagcctggcccgaaccggcgcgggtgaatttttatatcaacgggcgaccgcattatcagcaggttgataccgcagcactgctcgatctgctggcgcgctacggttacgaggtgccagaaaacagcacgcctgcacagcaaaaacgcatcatcatggtgttccagatgcattttcgtccgcagttatggaatggcgtagcggatgtggaaaccatggcgattgccgaagcacttttagagaaatacgggcaggggtaa

SEQ ID NO: 522980 - DNA, 324 bp, Stenotrophomonas maltophilia
atgcaattttcaacaacaccaaccctggaaggtcaacccattaccgagtactgcggcgtggtcaccggtgaggcgattctgggcgccaacatcttccgggacttctttgccggcattcgggatatcgtcggcgggcgctccggtgcctacgagaaagaactgcgtaaagcgcgtgacattgcgtttaaggagctgggcgagcaggccaaggcgctgggcgcggatgcggtggtgggcattgatatcgactacgaaacggtcgggaaagatgccagcatgctgatggtgagcgtaagcggcacggcggtgaaaacccgtcgatga

SEQ ID NO: 522981 - DNA, 519 bp, Stenotrophomonas maltophilia
atgcgctactctgctttaacgcttttagtgccctgcgcgctggtgctcagcgcctgcactacgccggtcacgccagcctttaaggatatcggttcccgcagcggcccctgcattgagggcggcccggacgccgtggcgcaacagttctatgattaccgcattcagcatcgcggtaatgacctcaccgccctgcgcccgtacctgagcgataatctggcgaaactgcttaatgacgcctcgcgcgatccgcagcaaaacgcgctgctttcatccgatccgttctccagccgcgccacgctgccggacagcgccgacgtcgccagcgcgtccaccattccgaataccgacgcacggaatattcctctgcgcgtgaagctaacccaggggacgcaaacctggcaggatgaggtgctgatgatccgtgaaggccagtgctgggcaatagatgatgtgcgctacattggcggcagcgttcatgctccggcgggcacccttcgccagtcgattgagaaccgctaa

SEQ ID NO: 522982 - DNA, 729 bp, Stenotrophomonas maltophilia
atgagtattaaactaaacggcattaactgcttctacggcgcacaccaggcgctgttcgacattacgctgagctgcccggagggcgaaacgctggttttgctcggcccaagcggcgcgggaaaaagctcccttctgcgtgttttaaatctgcttgaaatgccccgttcgggaacgctggccatcgccggtaaccattttgacttcgcgaaaaccccttctgataaagcgattcgtgaactgcgtcaaaacgtgggcatggttttccagcaatataatctctggccgcatctgacggtggtgcaaaacctgattgaagccccgtgccgcgtgcttggcttaagcaaagaccaggcgatggcgcgagctgaaaagctgctggaacgtctgcgtctgaaaccgtacagcgaccgttatcctctgcatctctctggtggtcagcaacagcgtgtggcgatcgcccgtgcgctgatgatggagccagcggtgctgctgttcgacgaaccaaccgcagcgctggacccggaaattactgcccagatcgtgagtatcattcgtgaactggcggaaaccaacattacccaggtcatcgtgacccacgaggtggaagtggcgcgcaaaaccgccagccgcgtggtctacatggaaaacgggtatatcgttgagcaaggtgatgcgagctgcttcaccaacccgcaaaccgatgccttcaaaaactacttatcacactga

SEQ ID NO: 522983 - DNA, 732 bp, Stenotrophomonas maltophilia
atgaaaaaagtattgattgccgcgctgcttgctagcgtcagcctttccgctaccgcagcccagaccatccgtttcgccactgaagcgtcctaccctccgtttgaatccattgatgcgaacaacaagattgttggcttcgacgtggatctggcaaatgccctgtgtaaagagatcgacgcgacctgtaccttcagcaaccaggcgttcgacagcctgatcccaagcctgaagttccgccgtatcgacgccgtgatggccggtatggacatcactccggagcgtgaaaagcaggttctgttcaccaccccttactacgacaactcggcgctgttcattggtcagaaaggtaaatacgcctccgttgacctgctgaaaggcaagaaagtcggcgtgcagaacggcaccacgcaccagaaattcatcatggataagcacccggaaatcaccaccgtgccgtatgacagctaccagaatgcgaagctggacctgcaaaacggccgtatcgatgcggtgttcggggacacggctgtcgtgactgaatggctgaaagcgaacgacaagctggccgccgtgggtgacaaggtgacagataaagactacttcggtacaggtctgggtattgccgtacgtcagggcaacaccgagctgcagcagaaattcaacgctgcgctggaaaaagtgaagaaagacggcacctacgaaaccatctacaaaaaatggttccagaagtaa

SEQ ID NO: 522984 - DNA, 717 bp, Stenotrophomonas maltophilia
atgaatgaaatttttcctttagcaagcgccgccgggatgaccgtcggccttgccgtttgtgcactgattatcggcctcgtactggcgatgttctttgcggtgtgggagtccgttaagtggcgccctgtcgcatggctcggttcagcgctggtgactgtgctgcgtggactgccggaaattctggtggtcctgtttatctatttcggctcctcacagctgctgttaacgctgtcggacggctttacgattaatctcggctttgcgcagatcccggtgcaaatgcagattgagaacttcgacgtcagcccgttcctgtgcggcgtaattgcgctctccctgctctattcggcctatgcgtcacaaacgctgcgcggcgcgctgaaagcggtaccgcagggacagtgggaatccggtcaggcgctgggcctgtcgaaagcggcgatcttcttccgcctggtgatgccgcagatgtggcgtcatgccctgccagggctgggcaaccagtggctggtactgctgaaagataccgcgctggtgagcctgatcagcgtgaacgatttaatgctgcaaaccaaaagtatcgccacccgtacgcaggagccatttacctggtacatcgtcgcggcggctatctacctggtgatcacgttgctgagccagtacgttctgaagcgtattgatctgcgcgcaacgcgttttgaacggagaccaggctga

SEQ ID NO: 522985 - DNA, 669 bp, Stenotrophomonas maltophilia
atgctggattatttacccgaactgatgaaagggctgcacaccagcctgacgctgaccgttgcgtctatcatcgtagcgctgatcctggcgctgttcttcaccatcgtcctgacgctgaaaacgccggtgctggtgtggattgtccgtggctacattacgctctttaccggtacgccgctgctggtgcagatcttcctgatttactacggtccagggcagttcccgtcgttacaggaatatccggttatctggcatttgctctctgagccatggctctgcgccctgatagctctctcactgaacagcgcggcctataccacgcagctgttttacggcgcgatccgcgcgatcccggaaggccagtggcagtcctgcggtgcgctgggcatgagcaagaaggacacgctggcgatcctgctgccatacgcctttaagcgtgcgctctcttcctattccaatgaagtcgttctggtgttcaaaagcacctctctggcctacaccatcaccctgatggaagtgatgggccacgggcagctgctgtacggacgtacctacgacgtgatggtgttcggtgcggcgggtctggtctatctggcggtcaacggtctgctgacgctgatgatgcgtcttatcgagcgtaaggcgctggcgtttgagcgcaggaattaa

SEQ ID NO: 522986 - DNA, 732 bp, Stenotrophomonas maltophilia
atgaaaaagttagttctggccgcattactcgcaaccttcgccgcaggcgcatccgccgcagataaaatcaattttggcgtttctgccacctatccgccgtttgaatcgctggatgccagcaaccagatcgtcggctttgacattgacctggcgaaagcgctgtgcaagcagatgcaggccgactgcacctttactaaccacgcgtttgacagcctgatcccgtccctgaaatttaaaaaatacgatgcggttatctccggcatggatatcaccccagagcgtagcaagcaggtcgcgttcaccgacccgtactacgcgaactctgcggtagtgattgcgaagaaaggggcttataagtctttcgacgagctgaaaggcaagcgcatcggcatggaaaacggcaccacgcaccagaaatatctccaggacaagcatcctgaagtgaaaaccgtggcctatgacagctaccagaacgcaattatcgacctgaaaaatggccgtatcgatggcgtatttggcgacaccgcggtcgtgaatgagtggctgaaaaccaacccgcagctgggtacagcgacggagaaagtgaccgatccgcagtactttggtaccggcctcggcatcgcggtacgtccggataacaaagccctgctggaaaaactgaacggcgcgctaaaagcgatcaaagctgacggcacataccagaaaatcagcgagcagtggttcccgcagtaa

SEQ ID NO: 522987 - DNA, 1470 bp, Stenotrophomonas maltophilia
atgatgtgtcgctttagcctgagccagcgcctgacgctgctgtttacggtgttacttttgctctgcgccaccgtcgcctgtgcggtgcagctctacgttagcatgcagtacggcaatgcgatggtgcagcgtctctccggcgggctggcgcagcagattgcgcagcgggaagcgattctggatacgcagggcagggtggatcgcagcgccttaaagccgctgttcgaccggctgatgacctttaatccgagcgtcgagctgtatgttgtctcgcctgatggcgatatcctggccgatgccgccccgccggggcacattcagcggcaaaaaattgacctcgcgccgatacagaatttcctgagcgggacggtgatgccggtgtttggcgacgatccccgaagccagaataagaaagtcttcagcgccaccccgctgcggcaggacggtgagctgaaggggtatctgtacattattctgcagggggaggagtccaacgcgctggcggagatggcctggcacaaagcgctctggagtacggcgctgtggtcgatgctgctggtggcgctgtttggtctgctggccgggttgctgctctggtactgggtgacgcgcccggttaaacagctcacgctggacgtggccgggctggagcaggacagcatcagcgcgattaagcagctggcggcccagccgctccagcctgccggccaggatgaagtggcgatcctgcgcaatacctttatcgagctggcgcgcaaaatcacctctcagtgggatcggctggccgacagcgaccgccagcggcgggagtttatcgccaacatttcgcacgacttacgcaccccgttgacgtcgctgctgggttatctggaaacgctgtcgctgaaatccgccacgctgtcgccgcaggagcatcagcagtacctcgctaccgcgctgcgtcaggggcaaaaggtacgccatctgtcgcagcagctgttcgagctggcgcgtcttgagcacggcggcatcaagccccagcgcgagcgttttgccatggctgaactgatttccgacgtggcgcagaagtttgaacttaccgcccgcacgcgcgaggtgaacctgcgtattgatgtgccggggcgattgccgctggtgaacgccgacgtgtcgatgatcgagcgcgtggtcactaatcttctggataacgccatccgtcatacgccgagcggcggagaaattcgtctggcggtctggcaggagaatgaacgacttcaggtcgaagtggcagacaatggtacgggcgtagatgcctcgctgcgcgacgatttgttccagcggccttcagcgttaaatcctcaggcgtcgcgggagaaccgtgggggattagggctgttaatcgtgaagagaatgctggagctgcacggtggcgggatcaggctgatggagtccgtgagcggggcgcggttcaggttctttgtgccgctatga

SEQ ID NO: 522988 - DNA, 708 bp, Stenotrophomonas maltophilia
atgaagcagatcctgctggtagaagacgaccacgatatcgctgcactcctgcgtcttaacctggaagatgaaggctacgccattacccacgagccggacgggggaaaggcgttaccgcttctggaaaaacagccgtgggacgcggtgatcctcgatctgatgctgccgaatgttgatggtctggagatttgccgccgtatccgccagatgacccgctacctgcccattatcatcattagcgcccgcagcagtgaaactgaccgtattaccggcctggaaaccggggcggatgattatctggcaaaacctttctcggtgcaggagctgattgcccgcattaaggcgctgttccgccgacagcaggcgatgggccaggcgcagacggacggcattattcaggcgcacggtctgactatcgatccgctggcgcgcaccgtgcgtcttaacggtcaacacgtcgatctcaccccgcgtgaatttgaactgctctatttttttgcccgccatcccggagaggtcttttcacggctggcattgctggagcaggtgtgggggtatcagcacgaaggctacgaacacaccgtcaacacccatattaaccgcctgcgcatcaaaatagagaaagatgccgccgagccggagatcgttcgcaccgtctggggtaaaggctacaaatttgcggagcagaaacatgatgtgtcgctttag

SEQ ID NO: 522989 - DNA, 1128 bp, Stenotrophomonas maltophilia
atgcagtgcgcactctatgacgccggacgctgccgctcctgtcagtggatagaacagccggtccctcaacaactcaccgccaaaatggccgacctgcaacagctgctggcagcacacgcggtgggcgagtggtgcgcacccgtcagcgggccggagcagggctttcgtaataaagccaaaatggtggtcagcggcagcgtcgaaaagccgctgctgggcatgctgcaccgtgacggcacgcccgtcgatctcaccggctgtccgctgtatcccgcctcgtttgagccggtgtttaccgccctgaaaccctttatcgcccgcgcggggttaacgccctataacgttgcccgcaggcgcggcgagctgaaataccttctgctgaccgaaagccaaatcgacggtgggatgatgctgcgctttgtgctgcgttcggaaaccaaactggagcagcttcgcgcggtgttgccgtggctgcaggaacagcttccgcagctcaaggtcattaccgctaatattcagccggtgcatatggcgatcatggaaggagagaaagagattttcttcaccgaacagcatgcgctggcggagaatttcaacggcgtgccgctgtggatccgtccgcaaagcttcttccagactaaccccaccgtcgccagcgcgctgtacgcgaccgcgcgcgactgggtgcgtgcgttacaggttcatcacatgtgggatctgttctgcggcgtcggcggctttggcctgcactgtgccacgccagacatgcagctcaccgggattgaaatttctgcggaggccatcgcctgcgcgaaacagtccgccgcggagctggggctgacgaatctgcacttccaggcgctggactcgacccggttcgccaccggccagggcaacgtgccggagctggtgctggtgaacccgccgcgccggggtatcggccaggcgctctgcgactacctgagccagatggcgccggagtacattgtctactccagctgtaacgcgcagaccatggcgaaggatatcgccagcctgccgggctaccgcattgcgcgcgttcagctctttgatatgttcccgcacactgcgcattacgaagtgctgacgttgctcgtgaaatcttaa

SEQ ID NO: 522990 - DNA, 474 bp, Stenotrophomonas maltophilia
ttgggattcttacaaaaaacacgtcattcgcacgcacgtccgaacgtccctgcgctggtgcaggtggcggcgctcgccattattatgatccgctgcctggatgtgctgatgattatgaacacgctgggcccgcgaggcatgggggagttcattcaccgcagcgcgcagacgtggaatctgacgctggtgtttctcagcagcctgatgctggtgtttattgagatctactgtgcgttctcgctggtaaaggggcgcaactgggcgcgctgggtatattttcttacgcagatcaccgccgccagctatctgtgggccgcctcgctgggctatggctatccggagctgttcagcattcccggcggctcccgccgcgagattttccattccttagtgatgcaaaaattgccggacatgctggtgctctgcctgctctatgttcccgcctccagtcggcggttcttccgcctgcaataa

SEQ ID NO: 522991 - DNA, 846 bp, Stenotrophomonas maltophilia
atgaacaacttaccggtagtacgctccccgtggcgaattctgatcctgattatcggctttaccttcctgtacgcgccgatgctgatgctggtgatctactcgttcaacagctctaagctggtcaccgtctgggcgggctggtcgacgcgctggtacagcgagctgttccacgatgatgcgatgatgagtgcggtggggctgagcctgaccattgcggcgctggcggcgacgatggcctgcgtgctgggcacgattgccgcgctggtgatggtgcgcttcggccgttttcgcggagcaaatggttttgcgtttatgatcaccgccccgctggtgatgccggacgtcatcaccggtctgtcgctgctcctgctgtttgtcgcgctggcgcacgccatcggctggccagcggatcgcgggatgctcaccatctggctggcgcacgtcaccttctgtacggcgtatgtggcggtggtcatctcctcgcggctgcgcgagctggatcgctccattgaagaggcggcgatggatcttggcgccacgccgctgaaggtcttttttatcattacgctgccgatgattatgccggcggtgatctccggctggctgctggcgtttacgctctcgctcgacgatctggttatcgccagctttgtgtcggggccgggcgcgacgacgctgccgatgctggtcttctccagcgtgcgcatgggggtgaatccggagattaatgccctggcctccatcatcctcggcgtggtcggaattgtcggatttatcgcttggtatttgatggcgcgcgcggaaaagcagcgcgtgcgcgatatccagcgtgcaagacgcggctga

SEQ ID NO: 522992 - DNA, 954 bp, Stenotrophomonas maltophilia
atgagcacacttgaacctccagcccgcgtcaaaaaaccgggcggtttctcgcactggctggcgcgcgtgcagatggcgcatggccgcaagctggtcatcgccatgccctatatctggctgatcctgctgtttttgctgccgttcctgatcgtctttaagatcagcctggcggagatggcgcgggcgatcccaccgtataccgatctgtgggagtgggccgacgggcagctgacgctgaccttaaacctcgggaatttcctgcaactgactgaggatccgctctatttcgaagcctatttacagtcgttacaggttgcggcgatctcaacgatctgctgcttgttgatgggctacccgctggcgtgggcagtggcgcacagcaagccgtcgacgcgaaatattttactgctgttggtcattttaccgtcgtggacatcgttcctgatccgcgtgtacgcgtggatggggatcctgaagaataacggcatactgaataacttcctgctgtggcttggggtgatcgaccagccgctgacgatcctgcataccaaccttgcggtgtatatcgggattgtctatgcctatctgccgtttatggtgctgccaatctatacggcgctgacgcgaatcgattactcgctggtggaagcctcgctggatctcggcgcacgcccgttgaagacgttcttcagcgtcattgtgccgctcacaaaaggcgggatcatcgccggatcgatgctggtgtttatcccggcggtcggggagtttgtgatccccgaactgctcggcgggccggacagcatcatgattggccgcgtgctgtggcaggagtttttcaataaccgcgactggccggtggcctcggcggtggcgattgtcatgttactgctgctgatcgtgccgatcatgtggttccacaaacatcagcagaaacagatgggagaccacggatga

SEQ ID NO: 522993 - DNA, 1086 bp, Stenotrophomonas maltophilia
  misc_feature (7)..(16): n is a, c, g, or t
atgacgnnnnnnnnnnttcgtaacctcaccaaatccttcgacggccagcatgccgtggacgatgtcagcctgacgatctacaaaggtgaaatttttgctttgctcggcgcatccggctgcggtaaatcgaccctgctgcgtatgctggccgggtttgaacaacctaccgccgggcagatcgtgctggatggggtagacctctccagcgtgccgccgtaccagcggcccattaacatgatgttccagtcctatgccctgttcccgcacatgaccgtcgagcagaacatcgccttcggcctgaagcaggacaaactgccgaaagccgaaatcaccgcgcgcgtggcggagatgctgagtctggtgcacatgcaggagttcgcgacgcgtaagccgcatcagctttccggcggccagcgtcagcgcgtggcgctggcaagaagtctggcgaagcgtccaaaattattactgctcgacgagccgatgggcgcgctggacaaaaaactgcgcgaccggatgcagctggaagtggtggatatccttgagcgcgtaggggtgacctgcgtgatggtgacgcacgaccaggaagaggcgatgaccatggccgggcgcattgcgatcatgaatcgcggtaagttcgtgcagataggcgagccggaggagatttacgaacacccgacaacccgctacagcgcggagttcatcggctcggtaaacgtcttcgaagggctgctgaaggaacgccaggacgacggtctggtgattgaatcgccggggctggtgcacccgcttaaggttgattctgataattccgtggtggacaacgtgccggtttacgttgccctgcgcccggaaaaaatcatgctttgcgatgagccgcccgccgatggctataactttgccgtgggcgaagtggtacacattgcctatctcggcgatctgtcgatttaccatgtccgcctgaaaagcggccagatgctcagcgcccagttacagaacgaacaccggtatcgcaagggacagccaacctggggcgacgaagtgagcctctgctgggatgcggacagttgcgtagtcctgacggtataa

SEQ ID NO: 522994 - DNA, 1113 bp, Stenotrophomonas maltophilia
atgatcgccttgaataaaaaatggttatcgggtctggttgcgggtgctctgatggccgtctctgccggcacgctcgctgcggaacaaaaaacgctgcacgtctataactggtctgactatattgcgccggacaccgtcgcgaattttgaaaaagagaccggcattaaggttgtctacgacgtattcgattccaacgaagtactggaaggcaaactgatggcgggcagtaccggtttcgacctggtggtgccctctgcaagcttcctggagcgtcagctgaccgccggtgtcttccagccgctggacaagaacaagttatcgaactggaaaaatcttgacccggaagtgctgaagctggtggcgaagcatgatccggacaacaaatacgccatgccttacctgtgggcgaccactggtattggctttaacgtggataaagtcaaagcggcgctggggccggacgtcaaactggacagctgggacgtcgtgctgaagccggaaaacctcgagaagctgaaaagctgcggcgtctctttcctcgatgcgccggaagagattttcgccaccgtgcttaactatctcggcaaagatccaaacagcagcaaggccgacgactacaccggtccggcgaccgacctgctattaaagctgcgtccgaatattcgctacttccactcctctcagtacatcaacgacctggctaacggggatatctgcgtggccatcggctgggcgggtgacgtctggcaggcagcgaaccgtgcgaaagaggcgaaaaacggcgtgaatgtttcctacttcattccgaaggagggggcgctggcgttcttcgacgtcttcgcgatgccggctgatgcgaaaaacaaagaggaagcgtatcagttcctcaactacctgatgcgtccggaagtgattgcccacatcagcgaccacgtctactacgccaacggtaacaaggcctccgtgccgctggtgagcgaagaaatccgcaataatccggcgatctacccgccagccgatgtgtttgccaagctcttcaccctgaaagtgcaggaaccgaaaattgaccgtgtgcgtacccgcgcgtggacgaaggtgaaaagcggtaagtaa

SEQ ID NO: 522995 - DNA, 477 bp, Stenotrophomonas maltophilia
atggatttacaggtcgtacctacactggatacgttacgtcaatggctcgatgatgccggtattacttttttcgaatgcgactcctgccaggcgctgcatctgcctcacatgcaaaatttcgatggtatttttgatgccaaaatcgatctgattaacgacgtgatcctgttctcggcgctggctgaagtgaagccttcagcgctgcttgcactggcatccgatctgtcagcgattaacgccagttctttgaccgtgaaagcgtttctcgacatacaggatgataatctgccgaagctggtggtttgccagtctttattctccggcgcggggctctccttcaaacagttcgcctggtttatgcgcctgagcgaagagcaaatttccatggtaatgatggaagccaacgcacatcacctgctgtatagcgcggaagatgatgccgagaataatgatgcatcttccaattttctccactaa

SEQ ID NO: 522996 - DNA, 924 bp, Stenotrophomonas maltophilia
atgtctttagagaggtgcagggtgaaaattgccatattgtcccgggatggaacgctctattcatgtaaacgcctgcgagaagcggcggcgaaacgcggacatcaggttgagatcctcgatccgatgtcctgctatatgaacatcgaccctgcggcgtcgtcgattcattacaaaggccgcaaactcccgcattttgatgcggtaattccccgcattggctcccagatcacctattacggcacggccgcgctgcgccagtttgaaatgctgggaagctatccgctcaatgaatccgtggcgatctcacgcgcccgcgataagctgcgctcgctgcagctgctggcgcgccaggggatcgatttgcccgtcaccgggattgctcactccccggacgacaccagcgatttaatcgacatggtgggcggtgcgccgctggtcattaagctggtggaaggcacgcagggtattggggtggtactggcggagacgcgtcaggcggcggaaagcgtgattgacgcctttcgcggtctgaatgcccatattctggtgcaggagtatattaaagaggccaaagggtgcgacatccgctgctttgtggtgggcgatgaagtggtggccgccatagagcggcaggcgaaagagggcgacttccgctctaacctgcaccgcggcggtatcgcgcgggtggcccttatcagcgagcgcgagcgcgagattgcggtgaaagcggcgcagacgctgggcctggacgtggcgggggtcgatctgctgcgtgccgaccgcgggccgctggtgatggaagttaacgcctcgccggggctggaaggggtggaaaaaaccacaggcgtcgatattgcaggtaaaatgatcgcatggattgaacgccatgcgacgccgggattttgcctgaaaacgggcggttaa

SEQ ID NO: 522997 - DNA, 723 bp, Stenotrophomonas maltophilia
atgacgccaaccattgacctgcttcgttcccaccgttccattcgccatttcaccgatgagccgatcacccaggcgcagcgggacgcgatcatcgacagcgcaagaggcacctccagctccagctttttgcagtgcagctccattatccgcatcaccgatccggcgatgcgtgaacagctggtaacgctgacgggcggacaaaagcacgttgcccaggcggctgagttctgggtgttctgcgccgattttaaccgtcacctgcaaatctgtcctgaggcggagctggggctggcggaacagctgctgctgggcgtggtggatacggcattgatggcgcaaaacgcgttcacggcggcggaatcgctggggcttggcggcgtctatatcggcgggctgcgtaataacatcgaaagcgtgacgcaactgctgaagctgccgaaacacgtgttgccgctgtttggtctgtgcctcggctggccggcggataacccggatctgaagccgcgtattcctgctgcgatgctggtgcatgaaaaccactaccagccggtcgatcaggacgttctgcatcaatacgatgaagagctggcgaactactatctgacgcgcgacagcaacaaccgccgcgatacctggagcgaccatattcgtcgcaccatcattaaagaaaaccgcccgttcattcttgattacctgcacaaacagggctgggcaacgcgatag

SEQ ID NO: 522998 - DNA, 270 bp, Stenotrophomonas maltophilia
atgtttgcagtaatttttggtcgtccaggatgcccttactgtgtgcgcgcgaaagagctggctgagaaactgactgaagaacgtgatgatttcaacttccgttacgtggatatccacgcggaaggcatcagcaaagccgatctggaaaaaaccgtgggtaaaccggttgaaaccgtgccgcaaatcttcctcgatcagaaacacatcggcggctgcaccgatttcgaagcgtacgccaaagagcacctgggcctgtttgccgctcagtaa

SEQ ID NO: 522999 - DNA, 375 bp, Stenotrophomonas maltophilia
ttgaactttaaacgaaactgggttggcgtaatcagctgctttttgctgtttacggtcgtttgcatgtcgcttgcttttaatgtgaagggcgccttcagagcgtccggtcatcccgagctgggcctgttgttcttcatcctgccgggggtagtggccagttttctctcgcgcaaaggcgaggtggtaatgccgctgctgggggccatccttgcggcgcccctctgcctgcttctgatgcgcgtgctgtttctctcgtcgagaagcgtctggcaggaagtggcgtggctactaagtggcgttttctggtgtgcgctgggggcgctctgtttcttatttatgcgcagcctgctgcaacagcggaagcatcataaataa

SEQ ID NO: 523000 - DNA, 1773 bp, Stenotrophomonas maltophilia
gtgcaaagtgattccctgactctgaaaacagtagcccaaatagtcctttcattcaacaacttactggtaaacaagaagttagcctccgtgaatataaacgtcgcagacttgttaaatgggaattacatcctgttattatttgtggtactggcactgggcctttgtctgggtaaattgcgcctgggttcagttcaacttggtaattccattggcgttttagtcgtctccctgttattaggtcagcaacatttcagtattaacacggacgcgcttaacttaggtttcatgctgtttattttttgcgtaggcgtggaagccggtccgaactttttttccattttcttccgagacggcaaaaattatctgatgctggcgctggtgatggtcggcagcgccctgctgattgcgttagggctgggcaaactgtttggctgggacatcggcttaacggccggtatgctggcaggctcgatgacctccacgccggtgcttgttggcgcgggggatacgcttcgtcattctggcatggcaggcacgcagctttccgccgcgctggataacctgagcctgggctatgccctgacctatctgattggtctggtgagcctgattgttggcgcgcgctatctgccaaaacttcagcatcaggatctccagaccagcgcccaaaccattgcccgagagcgtggtctggatacggactccaaacgtaaagtttacctgccggtgatccgcgcctaccgcgtcgggccagagctggttgcctggaccgacgggaaaaacctgcgcgagctggggatctaccgtcagaccggctgctacatcgaacgtatccgtcgtaacggcattctggcaaacccggacggtgacgcagtactccagatgggcgatgacatcgctctggttggttacccggacgcccacgcgcgtctcgatccgagcttccgcaacgggaaagaagtgttcgaccgcgacctgctggacatgcgtatcgtcaccgaagagattgtggtgaagaaccacaacgccgtgggccgccgtctggcgcagttgaagctgaccgaccacggctgtttcctcaatcgcgtgatccgcagccagattgaaatgcctatcgacgataacgtggtgcttaataaaggcgatgtgttgcaggtcagcggcgatgcccgacgtgttaaaaccgttgccgaccgtatcggctttatctcgatccacagccaggtgacggacctgttagccttctgcgccttcttcattgttggcctgatgatcgggatgatcaccttccagttcagtaactttagcttcggcatcggtaacgctgccggtctgctgttcgccgggatcatgctgggcttcctgcgagcgaaccatcccaccttcggctacatccctcagggagcgctgaacatggtgaaagagttcggtctgatggtctttatggcgggtgtcggcttaagcgccgggagcggcattggcaatggcctgggtgcggtcggctggcaaatgttggtttccggacttatcgtcagcctggtaccggtagtcatctgcttcctgttcggcgcctacgtgctccgcatgaaccgcgccctgctcttcggcgcgatgatgggcgcgcgcacctgcgcaccggcaatggagatcatcagcgacaccgcgcgcagcaacatcccggcgctgggctatgcaggcacctacgccatcgcaaacgtgctgctgacgctggcaggtacgctgatcatcattatctggccaggactcggataa

SEQ ID NO: 523001 - DNA, 783 bp, Stenotrophomonas maltophilia
atgttaaatgttggcatcaaccattccctgacacgaccagtcaataggaaattctataaatatcttaatatggaaaattgcttaaaaaccctgagtaacggtacattatggtattcaagaccagaaaaattcaacgatccttttgactgctacccatattttccatcccaaggcaaacaaaaactttttaaaagacttaaaagcatctataaactcgaacaaaaggcatctaataaattattgcaaagaaattttaatttaatgagtcaaacaggcgtaggtggaataactcatcgtttagtgtcaaataacttaacagtcacatgttttagtttagaccatttatccgctcctatgtgggcacattatgtcgacgaacatcaaggctttgcaattgagtttgaatatacatccgaaatgattgcacgaatttcaaaaactgaaaatccaataataatagttcctttcgatgttaattataccgacatgcgacctgccttatatgacaaagacggtaatatgaacgggttgaatattgcactatctaaaagcaaacaatgggcttatgaacaggaagtaagagcattaagtaaccgtgagggtatccatgaattttccagatttcaaattactaaggtttttgccggagtaagagctggtaaagagaataaagccaagataagaggcgcaatcgctgatatgaataaagagataaattcacgatgcaaatttattgaacttggtatggcattcgatagctacaaatttgttgagttgaattaa

SEQ ID NO: 523002 - DNA, 459 bp, Stenotrophomonas maltophilia
atgagtatagaccagtacgtaaagattttatttagattgccgaagcagaatggatatcctcccgttgagtgggaggggttgtgggctctccctcaaggtgaaggctatcgcatcgataatgtgccgttttacgctcggcttgtcagtttcggtgatgttgtatttgcagctgaagtgaatggtgatctggtattcgatggtgtgaaagttcctggtgggcattcaacaattcgcgttatatcgtattcgagtgaattggtatccgagatgcggggtggattcgaaagtcttggctgctctaccgagttgagtaatattgaaacctttttttctgtcgatgttccgccggaagttgattatcagcgtgttgtcgatcttttgagtatgtacgcggagagcggcgcgttggactatgaagaggcctcgattcagcatgatgatgcaagtggcggactatga

SEQ ID NO: 523003 - DNA, 237 bp, Stenotrophomonas maltophilia
atgtctgagctcagaatatttgtcgacttcaacaatagagatgctgatggcttcttgaggcttaacctcacggggacgctggaggatctgagaagagagcaactggttctcgaagaggggatgcccgctacaggatcagacggtgatctcactgctaagatcatcgttgttgcacctggaattgaaggcgtatggcgggggaggatcgttgaaggtccttgggaggagggggcataa

SEQ ID NO: 523004 - DNA, 372 bp, Stenotrophomonas maltophilia
atgccggatgcggtcaaggaatgcgcgtcgcaggtgggggtgaagcatgccgccatcggcgtgtgtagagtcgagccatgcccgactcagcgggcgaaccggagccgagcatggctcggctctacacgttctgggaaatccacgccatgcgtgaccggcaaagcgagccgagcatggctcgactccgcaggtgatgcatgtctggcgtggaggcgcctgcctcagaagtccatcgtcgccgacaccagcaccgtcctcggtgcacccagcgccaggctcgacaacaacggcatgccccaatacgccttgttggtcacgttgttcacactggctctcagcgcaagcggtcgacccgccacggtggtgctgtag

SEQ ID NO: 523005 - DNA, 525 bp, Stenotrophomonas maltophilia
atgttcccttaccatgccaagcagttggttacgtgcctgcgtgagctgcgtatgtcccaggtttgcctggtcaatcagttcaaagtcaaagcctgttgcggtacccagttcaataatggcagggaggttaaacggaaatacaagaccatctttgatctggctaaacgctttcgttgcgcggctgacaatcgcctcaacgccgttttccttgcccgggcgttcttcccatggcttcaggctgacgaaagcgataccggagttctgcccctgcccgctaaagctaaatccgtttacggtaaagaccgattcaacgttcgctttctctttcgtcagataatagtcctgaacctgatcgagtacctgctgggtacgcatctgcgtcgcccctgccggcagctgaaccatcgtcataaacaccccctgatcctcttccggcaggaaggaggaaggcaggcgcaggaacagtattgccatgccgccgacgatgatgacgtaaaccagcagatagcgtccggtcttacgtaa

SEQ ID NO: 523006 - DNA, 336 bp, Stenotrophomonas maltophilia
ttgctgccctggtacggacggcgtacctcccaactggcccgcagcaatctgatcgttctgcgttttcagttggttaatgacatccaacggcgtgagctgatatttattcatcgcgttgctgtccagccagatgcgcattgcatactgcgcaccgaacagctgcacatcaccgacgccggaagtacggctgatcgcatcttttacgttagaagcgacatagtcggagatatcatcctgagtgaggtttttattatccgacacaaatcccgcgaccagcaggaagctgctgctggatttttccacgccgatcccctgttgctgtacttcttgcggtag

SEQ ID NO: 523007 - DNA, 1140 bp, Stenotrophomonas maltophilia
atgacgaatcacttcagacgcttacccttatccggtttcattgtctgtgctgcactgctcgccgggtgcgatgggcaagaaaacccacagcagcatgggcaagctcctcaggtcagtgttcatattgtcaaaagcgcgccactggccgtaacgacggaattgccaggcagaactgacgcttatcgtgtggcggaggttcgtccccaggtaagtggtatcattctgcaccgtaattttaccgaaggcagcgacgtcaaagcgggtgaatcactttatcagatcgatccggccacctatcaggcagcctacgacaatgcgaaaggtgaacaggtaaaagcgcaggctgcggcaaacatagcccatctgacggtaaaacgttaccttccgctggtcggtacgcaatatgtgagcaagcaggagtatgatcaggcgggggcaaccgcccagcaggcggatgcaagcgtcgttgccgcgaaagctggcgttgagagcgcgcggatcaatcttgcttatacgaaagtcacatcgccaatcaacgggcgcattggcaaatccagcgtcactgaaggggcgttagtcactaatggtcagtcaaccgcactggcgacagttcagcagctcgatcccatttatgtcgatgtaacgcaatccagcagcgattttatgcgtctgaagcagcagacgagcctgcaaaagggagacaccagcagcgttgagttgctgatggaaaatggccagccttatccgctgaaaggaacgcttcagttctctgatgtcacggtagatgaaagtaccggctcaatcacccttcgcgctctcttccctaaccctcagcatatgctgttaccgggtatgtttgtccgtgcacgcattgacgaaggcacacagcctgatgccatccttgttccccagcagggggtaacccgtacacctcgcggtgatgcaaccgtgcttgtggtaaacgataaaaaccaggtggaatctcgcactgtcgttgcaccgcaggcgattggcgatcggtggttgatcacggaaggtctgaaaaatggcgaccgcgtcattatcagcggcctgcaaaaagttcgccctggcgtcaccgtcgtggctattcctgataccgccgcgactccagccagttaa

SEQ ID NO: 523008 - DNA, 648 bp, Stenotrophomonas maltophilia
atggcgcgtaaaaagaaagaagaggctcaaaagacccggcagcagctgattgaagccgctatcgggctattcgcgacacgtggcgtggctaataccacgcttaccgacatcgccgatgctgctcaacttactcgcggggcggtttactggcatttttcgagtaaagcggaaatatttaacgccatctgggaacagcaattgccgctgcgtgaaatgattcgtgacaggttaatactttctgaaaaagatgaccctttgttaatgcttcgtgaacagtttattgtcgcgctgcaatatattgcgagcgagccacgccagtatgctcttttacaaattctgtatcataagtgtgaatttcatgacgatgtgatttcagaatgtgaaatacgcaagcggatcggtttaaacgataattatcttcgcaggacgttgagacaatgcgttgcgcgtagcattatttcttcccaaactaatattgaactggcgctgattgttttccacgcattttttagcggagtcattaaaaactggttaatggatagcaacagttttaatctgtacaaacaggcgccggcgctggtggataatattcttgcgacactaaatatcactcgagtggcgccagtgttttacgatacagcctcatga

SEQ ID NO: 523009 - DNA, 2085 bp, Stenotrophomonas maltophilia
atgctggttagccaatacaaccaaatcctcgtcgtcatctcctttattgtcgccattcttgccgcctataccgcgctgaatatggctgcgcgcgttgccggaagccagggcgtcgctgcacgcgtctggctggcaggtggcggtgtttcgatggggattggcgtgtgggcgatgcatttcatcggtatgctggcgatggatctttccatgagcatgagttacaacgcgaccctgaccgtgctttcgatgattatcgccatcagctcgtcaatgttcgccctgtggctcgttagcggcgagcagctacatttgcgccgactgctgcctggcgccgtcgtgatgggtacaggcatagttgccatgcactacaccggtatggctgccctggaggtcactccgggtattgtctgggataaaacgtggatggctatctctgtgggcatagcccttgccgcttcactggccgctctttggctgacgttccgtttacgtcaggaagctgcacgaatggcgttgatgcgtctgggggcggcgatcaccatgggcatcgctatcgctggcatgcattacgccggcatggaagcagcacaatttccaatgtcgacgatggtccaccatcatggtcttaacgggagctggctggcgatactggttagcgtggtcgcgctcgctattctggggattacgctgctggtatcgatgttcgatgcccgccttcaggctcgtacctcgctgctggcctcatccctggcagaagctaaccgtgaactcgcacagctggcgttgcatgatacgctgacgcgcttacccaatcgtattctgcttgaggatcgcctcgatcaggccatcagcaaggccgatcgcgaaggaagccctttcgcgctgatgtttatggatcttgatggctttaaaaccgtcaacgatgcctatggtcatgatgtcggtgacaatcttctggttgcggtgactcagcgtttgctgttgcagttgaaaggtcagtacacgctggcgcgtatcggtggggatgaattcgtcctgctggccgaaaccactaccccggatgatgctgcctcactggcaaattcactggtacgcgtcattgatagcccgttccatctcgatccttacgaactgatggtcaccctgagcattggcattgcgctctatccacacgatggcaaaaccgatcgtgaactgatgtttaacgctgatgctgcgatgtaccacacgaaacatatgggtcgtaacggttatcacttctttcagccgtcaatgaatacgctggcgcagacgcatctacagctgatgaatgatctgtggcaggccatcgaccgtgatgagttacgcctgctttatcaacctaaattccatgcccctgccgggccggtcatcggattcgaagcgctgttacgctggcagcatcccaaacagggattactgccccccgacctgtttctaccgcttgcagagaaaaccgggctgattattccaattggaaactgggtaatcgacgaggcctgccgccagcttcgagaatggcaccttcagggccacacggactggtcaatggcggtgaatctttctacgttgcagttcgaacagccgtcgctggttaaaacggttctcgattgtctgacgcgccatagcgtaccgcccggcatgttgatcctggaggtgaccgaaaccacggcgatgagcaatccggacgaaagcgttcgtgtcctgacagcgctgacggatgcgggcgtaaaagcctcgatagacgattttggtacaggttattcaagccttctttatcttaagcgactccctgcctgcgagttgaaaatcgatcgtgcttttgtaaaagagttaagtggagagagtgaagatgcgacgatcgtctcggcgattatcgccctggcaaaaacgctgaatctgaaggtcgtggcagaaggggtcgaaaccgcagcgcagcagacctttctgacagaactgggatgcaatacgctacagggttatctgctgggcaaaccgattaccgcgcaggctattatggaacagtgccagcacggggagatgtcaccatcccgtatgcaatcatga

SEQ ID NO: 523010 - DNA, 165 bp, Stenotrophomonas maltophilia
atgattcgtaaatactggtggctggtcgtttttgctgtctctgttttcattttcgatgcgctgctgatgcagtggattgaactgatgagcaccgaaaccgataaatgtcgcaatatgaattccgtgaacccgctaaaactggtcaactgctcagagctggactag

SEQ ID NO: 523011 - DNA, 297 bp, Stenotrophomonas maltophilia
atgttcgaacaacgcgtaaattctgacgtactgaccgtttctaccgttaactctcaggatcaggtgactcaaaagcccctgcgtgactcggttaaacaggcactgaagaactattttgctcaactgaacggtcaggatgttaatgacctgtatgagctggtactggctgaagttgaacagccactgttggacatggtgatgcaatacacccgtggtaatcaaacccgcgctgccctgatgatgggcatcaaccgtggtaccctgcgtaagaaattgaaaaaatacggcatgaactga

SEQ ID NO: 523012 - DNA, 936 bp, Stenotrophomonas maltophilia
  misc_feature (44)..(53): n is a, c, g, or t
atggcaggtattaccgaccggccgttcaggacgctgtgctacgnnnnnnnnnngtgctacgagatgggagcaggattaaccgtttccgagatgatgtcgtctaacccgcaggtttgggaaagcgacaagtcccgccttcggatggtgcacgtggatgagccaggtatccgcaccgtgcaaattgccggaagcgtgcctgaagagatggcagatgccgcgcgtattaacgtggaaagtggcgcccagattattgatatcaatatgggttgcccggccaaaaaggtgaatcgcaagcttgcaggttcagcccttctgcaataccccgaccaggtgaagtcaatcctgacggcggttgtcagcgcagtggacgttcctgttacgttgaagattcgcacgggttggtcgccggaacaccgtaactgtgtagagattgcccaactggccgaagactgtggcattcaggccctgaccattcatggacgcactcgcgcctgtttgttcaacggtgaagctgaatacgacagcattcgggcagttaagcagaaagtttccattccgattatcgcgaatggcgacataactgacccgcttaaagccagagctgtgctcgactatacgggagctgatgctctgatgataggacgtgccgctcagggaagaccctggatctttcgggaaatccagcattatctggacactggggagctgcttgccccgctgcctctggcagaggttaagcgcttgctttgttcgcatgttcgggaactgcatgaccactacggccaggcaaaagggtaccgaattgcgcgtaaacacgtatcctggtatctccaggagcacgctccaaatgaccagtttcggcgcacattcaacgccattgaggatgccagcgaacagctggaggcgttggaggcatacttcgaaaatcttgcgtaa

SEQ ID NO: 523013 - DNA, 741 bp, Stenotrophomonas maltophilia
atgaaacacatttcaggcaaggcagcgctgctggcgctgagcgtgatttcggcttcaacttacgcctcacactggagctatcaaggagaaggcgcaccggaacactggggcgaactggatgaggcgtacaagacgtgtaaaagcgggatgtatcagtcgccggttaacattgataatacggtcaaagctcacatctctccgctggaaacgcactatatcgacggcccggtcaccctgataaacaacggccatactatccaggcgagtgaaaatgccgatacacgcgacagcatcacgcttgataaacagacctggacattacagcagttccatttccatgcgccatccgaaaacacggtgcacggtaaaaaatacgcaatggaaatgcatctggtccataaaaacgctgacggcgaactgacggtcgttgccgttatgttcgatcagggcgcggcaaacgctgcactagataaactctggggcgtgatgccaggacaggttgaccagaacgttacaattaagccaacactcgatatgaataaattactgcctgcggataaaacctactggcgttttagcggctccctgaccacgccaccgtgctcagaaggggtgacatggttggtgctcaagcatccgctgaccgtctctgctgaacagctgcaaaaattcactcacactatgcaccacgaaaacagccgcccggttcagccgcttcatggccgtctggttgttgaataa

SEQ ID NO: 523014 - DNA, 882 bp, Stenotrophomonas maltophilia
atgccgtggatccaattgaaactgaacacaaccggcgcgaacgccgaagaactgagtgatgcgctgatggaggccggttcggtctctatcacgttccaggacacgcatgacacgccggtctttgagccgctaccaggcgaaacgcgcctgtggggtgatacggacgttatcggcctgttcgatgcagaaaccgacatgaaagaggtcgtggcgattctggaaaaccatccgctgctgggcgcgggtttcgcgcataaaatcgaacagctggaagacaaagactgggaacgcgagtggatggacaacttccatccaatgcagtttggtcagcgtctgtggatctgcccaagctggcgcgacgttcccgatgaaaatgcggtcaacgtaatgctggatccgggtctggcgttcggcaccggtacccacccgacaacctccctgtgcctgcaatggctggatggcctggatctggaaggcaaaaccgtgatcgacttcggttgcggatccgggatcctcgctatcgcggcgctgaaactgggcgcggcaaaagccatcgggatcgacatcgatccgcaggcgattcaggccagccgtgataacgccgagcgtaatggcgtttccgatcgccttgaactgtatctgcctgatgcacagccagaggccatgaaagccgatgtggtggtcgcgaatatcctggctggcccgttacgcgagctggcgccgttaatcagcgtgctgccggttgaaggcggtctgctgggcctgtccggtatccttgccagccaggcagacagcgtctgtgaagcctacgccgatctctttgcgctcgacccggttgtcgagaaagaagagtggtgtcgcatcaccggtcgtaaaaaataa

SEQ ID NO: 523015 - DNA, 1452 bp, Stenotrophomonas maltophilia
atgcagcttgaagtcattctgccgcttgtcgcttacctgttcctggtgtttggcctgtcggtttatgcgatgcgtaaacgttcaaccggtacctttctgaacgagtatttcctcgggagccgctcaatgggtggcgtcgtgctggccatgacgctgaccgctacttacatcagcgccagctcgtttatcggtggcccgggcgccgcttataagtacggactgggctgggtactgctggccatgatccagctgcctgccatctggctctctctgggcatactgggtaaaaagtttgccattctggcccgtcgctacaatgccgtgacgctgaacgatatgctgtttgcccgctatcagagtcgcttgctggtatggctggcaagcctgagtctgctggtggcgtttattggtgcgatgacggtgcagtttatcggcggcgcacgtctgctggaaacggcagccgggatcccctacgagacgggtctggtcattttcggtgtgagtatcgcgctgtacaccgggtttggcgggttccgtgccagcgttctgaacgatacgatgcagggaatggtgatgctcattggcactctcgttctgctggtgggtatcgtgcatgccgcagggggcctgagccatgcggttgaaaccctggaagcgatcgatccgaaactggtctcgccgcagggggcggatgacatcctctcgccaacctttatgacctcgttctgggtgctggtgtgctttggcgtgattggcctgccgcatactgccgtgcgctgcatctcatataaagacagcaaagcggtgcaccgcgggatcattatcgggacaattgtggtggcgatcctgatgtttggtatgcacctggcgggcgcgctgggccgcgcggtgatccctgaccttaccgtaccggatctggtcattccgaccctgatggtgaaagtgcttccgccgtttgccgccgggattttcctcgccgcacccatggcggccattatgtcgaccatcaacgctcagttgctgcaaagttccgctacgatcattaaagatctctatctgaatttgcgccctgaacaggtcgaaaatgagcgacgcctcaagcgtatgtcggcggtgattaccctggtgctgggggcgttactgttgctggccgcgtggcgtccaccggagatgatcatctggctaaacctgctcgcctttggcgggctggaggccgttttcctgtggccgctggtgctggggctgtactgggaacgcgcgaatgccgcgggtgcattaagcggcatgattgtcgggggcgtcctgtatgccgttctcgccacgttgaaaattcagtatcttggctttcacccgatcgtgccttcgttaatgttaagtttactggcgtttgtggtgggtaaccgttttggccgtcccgttccacccgccaccctgatttctactgataaataa

SEQ ID NO: 523016 - DNA, 243 bp, Stenotrophomonas maltophilia
atggacaaacgttttgttcaggcccataaagaagcgcgctgggcgctgtggctgacccttctctatctcgctgcatggttagtaactgcttacttacctgattcagcgattggcattaccggcctcccgcactggtttgaaatggcctgcctgctgctgccgctggtgtttattgtgctgtgctgggcgatggtgaaattcatctatcgcgatatctccctggaggacgatgatgcagcttga

SEQ ID NO: 523017 - DNA, 1350 bp, Stenotrophomonas maltophilia
atgctggataaaattgttatcgccaaccgtggcgagattgcactgcgtattcttcgtgcctgtaaagaactgggcatcaagaccgtggccgtgcactcaagcgcggatcgcgatttaaaacacgtattgctggcggatgagacggtctgtatcggtccggctccgtccgtaaaaagctatctgaacatcccggcgatcatcagcgccgccgaaatcactggcgcggtcgcgattcacccgggttatggtttcctctctgagaacgccaactttgctgagcaggttgaacgctctggctttatcttcattggcccgaaagccgacaccattcgcctgatgggtgacaaagtgtctgccatcaccgcgatgaaaaaagccggcgtgccaaccgtaccgggctctgacggcccgctgaccgacgatatggatgctaaccgcgcccatgctaaacgcattggctacccggttatcatcaaggcgtctggcggcggcggcggtcgcggtatgcgcgttgtacgcagcgatgctgaactggcgcagtccatctccatgaccaaagcggaagcgaaagcggctttcagcaatgacatggtgtacatggaaaaatacctggaaaacccacgccacatcgaaattcaggtgctggctgacggtcagggcaacgcgatctatctggctgaacgtgactgctccatgcagcgtcgtcaccagaaagtcgtcgaagaagcgccagcgccgggcattacgccggaactgcgtcgctacatcggtgagcgttgcgccaaagcgtgtgtcgatatcggctatcgcggggcgggtacctttgagttcctgttcgaaaacggcgagttctacttcattgagatgaacacccgtattcaggttgaacacccggttaccgaaatgatcaccggcgttgacctgatcaaagaacagctgcgtatcgcagccggtcagccgctgtccatcaaacaggaagaagttgtggttaaaggccatgcggtagagtgccgtatcaacgccgaagacccgaacaccttcctgccaagcccgggtaaaatcacgcgtttccacgcgccgggtggctttggtgtgcgctgggagtcccatatttacgccggttacaccgtaccgccgtactatgactcaatgatcggtaagctgatctgctacggcgaaaaccgtgacgtggccattgcccgcatgaagaacgcccttcaggagctgatcatcgacgggatcaaaaccaacgtagatctccagatgcgcatcatgagcgacgagcacttccagaatggtggtactaacatccactacctggagaaaaaactcggtctgaacgagaagtaa

SEQ ID NO: 523018 - DNA, 462 bp, Stenotrophomonas maltophilia
atggatattcgtaagattaaaaaactgatcgagctggttgaagaatcaggcatctccgaactggaaatttctgaaggcgaagagtctgtacgcatcagccgtgcagccccagccgctagcttcccggtaatgcagcaagcttatgccgcgccagtgcagcagcctgcgctctccgcagccgttgcaccagcagcagaagccgcacctgcagcagctgcagaaatcagtggtcacatcgtacgttccccaatggttggtactttctaccgcaccccgagcccggacgcgaaagcgttcatcgaagtgggtcagaaagtcaacgtaggcgataccctgtgcatcgttgaagccatgaaaatgatgaaccagatcgaagcagacaaatcaggtactgtgaaagcgattctggtcgaaagtggtcagccggtagaatttgacgagccgctggtcgtcatcgagtaa

SEQ ID NO: 523019 - DNA, 453 bp, Stenotrophomonas maltophilia
atggctgacaaattccaaattttagtattgaacggaccgaacctgaacatgctcggcacccgtgagccagagaagtacggcacgctgacattgagcgaaattgttaaccgtctgggtacggaagcagcctcgctgaatgtggatttggaccattttcagtcaaacgcggagtacgcaatcatcgaccgtattcatcaggctaaagacactgtggactatatcctgatcaatccggccgcgtttacgcacaccagtgttgctatacgcgacgcactgctcgcggtgagtatcccgtttatcgagatccatctgagtaacgtgcacgcccgagagccgttccgccaccattcctacttgtcagatatcgccgctggcgtgatatgtgggctgggtgcagacggctattcatacgctttacagacagcggtaaaacgcttgtcacaatcacactaa

SEQ ID NO: 523020 - DNA, 600 bp, Stenotrophomonas maltophilia
gtgcgtttaacggcaaagcagataacctggctgaaggtactcctgcatttagccggattgctcccctttatctggctcttttgggcagccagccagggacagttcagtgccgatccggctaaagatattcagcattttacgggtcggatggctctgaaatttttgctggcgaccttgctcgtctcaccgcttgcgcgctacgctaaacagccattgctaatacgtacccgtcggcttttggggctatggtgttttgcctgggcgacgctgcatctcaccagttacgccctgctggaactgggcattaacaacctggcactccttggcagcgaactggttacgcgtccttatctgacgctgggtatcgtaagctggctggttttactggcgctgacactgacatccacgcagtacgcgcagcgaaaaatgggacggcgctggcaactgctgcacaacttcgtctatcttgtcgcgatcctcgcgcccatccattacctgtggtcggtgaagattttatctcctcagccggtcatctacgccctgctggcattggcccttttagcatggcgttacaagaagttccgccagtgggtacgatag

SEQ ID NO: 523021 - DNA, 1002 bp, Stenotrophomonas maltophilia
atgaaaacccgaaaactgacggaagccgacgtaacgtccgagtctgtctttatgctacagcgtcgccagatcctgaaaatgcttggcatcagcgtcactgccctgacgctcacccctgcggcccacgccgatctgctcgactggtttaagggcaacgaccgcccgaaagccccctctggcgcaccgcttaacttcacgaaaccggcgcagtggcagaataaactgacgttgacgccggaagataaagtcaccggctataacaacttctatgagtttggcctcgataaggccgatcctgccgccaacgccgggagcatgaaaaccgatccctggacgctgaagattgatggcgaagtggcaaagccgctgacgctggatcatcatgacctcaccacccgcttcccacttgaagaacgcatttaccgtatgcgctgtgtggaagcctggtcgatggtggtgccgtgggtaggtttccctttgcataaactgctggcgctggttgagcccaccagcaacgcgaagtatgtttccttccagacgcgctatgccccggacgagatgccaggccagaaggatcggtttatcggcggcgggctggagtatccctacgttgaaggtttacgtctcgacgaagccatgcatccgcttacgctgctcaccgtcggggtttacggcaaagcgctgccgccgcaaaacggggcgcccattcgcctgaccgtaccgtggaaatacggtttcaagggcatcaaatcgatcgtcagcattaagctcacccgtgaacgcccacccaccacctggaacctcgcagcgccagatgagtatggtttttttgccaacgttaacccgcacgttgatcatccacgctggtcgcaggcgacggaacgttttatcggttccggcggcgcgctggatgttaaacgccagccaacgctgctgtttaacggctatgcagatgaggtggcatccctctatcgggggctgaatttacgggagaacttctaa

SEQ ID NO: 523022 - DNA, 975 bp, Stenotrophomonas maltophilia
atgcaggctttgatcttagaacagcaggacggcaaaaccgttgcctcggtgcaagccattgacgagagccgcctgccggagggcgacgtgaccgtagatatcgactggtcaagcctgaactataaagatgcactggccattacgggaaaaggtaaaatcatccgaaatttcccaatggtgccaggcatcgacttggctggacgcgtgcataccagtgaagatccgcgttttcacgctggacagcaggtgctgctcaccggctggggcgtaggtgaaaaccactggggaggactggcagcgcaggcgcgcgtaaaaggtgactggctggtcccgatgccgaaaggcctggacggccgtaaggcgatgatcgtcggcacggcaggtttcaccgccatgctctgcgtgatggcgctggaagaggccgggatccgtcctgactctggcgaaattgtcgtgaccggcgccagcggtggcgtgggcagcacggccgtcacgctgctgcacaagctggggtaccaggtcgccgccgtctctggccgcgaaagtacgcatgattatctacgtcagttgggcgcaagccgtattctgagccgcgacgaattcgccgagacccgtccgctggaaaaacaggtctgggctggcgctgtagataccgtcggcgacaaagtgctggcgaaggtgctggcgcaaatgaattacggtggctgcgtggcggcctgtggtctggcgggtggttttgccctgccgacgacggtgatgccatttattctgcgtaacgtgcgtcttcagggtgtcgattcggtcatgaccccagccgagcggcgggctgaggcctgggaacgtctggcgcgggatctgccagcctcattctatgagcagagcgccactgagattaccctgagccaggcgccagagtacgccaataaaatcatggacaaccagttccacggtcgtgcgctggttaaaatcgcctaa

SEQ ID NO: 523023 - DNA, 1941 bp, Stenotrophomonas maltophilia
atgcgattaacgacgaagttctcagcttttatcaccttgctgacgggactgaccatatttgtcacgctaatcggctgctcgctgagcttttataatgccatccaggataagctggttaaccgggtagaatcggttgcatcggttatcgacactcgcctgattacaacctccttcccggcactttcgcgtgaactggatgagttaatggtgcctgtggatatcgtgcagatcgacattaaacaggggaagcagaccgttttcagccatacccgtcagggcagctaccgtcctgccggcacggtagatcagtatcgggacataacggtacgctcacttaaacatccgggtatgacaatccatctgatgtaccaggatccgatgagcaactatttacgctcgctcatgaccaccgcgcccttaaccatcgccgtagccttgatcgtcctgctgattttcctcgccgttcgctggcagcgtcgtcaactttccggccaggaactgctggaaacacgctcggtgcgaatactgaatggcgagcggggtccgcaggtacggggatcggtttatgaatggccatcacgtaccagtagcgccctggacgtgctgctctccgaaatccagtttgccagcgatcagcgtagccgtatggacacgttgattcgctcctacgccgcgcaggataacaaaacgggccttaacaaccgtctcttctttgataatcagctggctacgcttcttgatgaccccgaaaaggtggggacgcatggcgtggtaatgatgattcgcctgcccgacttcgatctgctccgtgatacctggggccagcgcgtggcggaagagaacctcttcacgctgattaacctgctgtccacctttattatgcgctaccccggcgcgttactggcacgctaccaccgcagcgactttgccgtcttgctgccgcatcgcaccttaaaggagtccgagagtatcgccagccagctgttgaaagccgtcgatgcgctaccccagagcaaaatgctcgaccgcgacgacatggtgcatatgggcatctgtgcctggcgcggcggtcagtcgacggagcaggtgatggaacatgcagaagcggccacgcgcaacgccgtattgcagggggcgaacggctgggcggtctatgatgatacgctaccggaaaaagggcgcggcaacgtacgctggcgaaccctgattgaacagatgctgagccggggtggaccgcgcatctatcaaaaaccggcggttataaaaaatggtcatgtccatcatcgtgagctgatgtgccgtatttttgatgggaccgaggaggttatctccgcagagtatttgccgatggtgctgcaattcggattgtccgaagagtatgaccgccagcaaatcacccgcctcattccgtttttatcgtactggcctgaagaaaatctggctttacaggtgaccgtcgaatcgctgatccgtccgcgttttcagcgttggttacgtgacacgttaatgcaatgcgaaaaatcgcaacgcaaacgcattatttttgaacttgcagaggcagatgtaggtcaacacatcagccggttgcgctcggttgtgcgtttaatcaatgcgcttggggctcgcgtggcggtaacacaggcgggtcttaccctggtcagcaccagctggatcaaagaactggatgtcgaattattgaagctgcatccgggtctggtaaggaatatcgaaaagcgcacggaaaaccagctgctggtacaaagcctggtggaggcgtgcaaaggaacgcaaacgcaagtatttgccgcaggcgtacgttcacgcagtgaatggcagatgttgacagagcgcggtgtgacgggcggtcagggggatttttttgccgcctctcagccgcttgacaccaatgtgaaaaaatatttgcaaagatactctgtttga

SEQ ID NO: 523024 - DNA, 1044 bp, Stenotrophomonas maltophilia
atgttgaaaaaatttcgtggcatgttttccaatgacctgtccattgacctgggtaccgcgaatacccttatctatgtaaaaggacaaggcatcgtattgaatgagccttccgttgtggccattcgtcaggatcgtgctggctcgccaaaaagcgtggccgcagtaggccatgatgcgaagcagatgctgggccgtacgccgggcaacattgccgcgatccgcccaatgaaagatggcgttattgctgacttcttcgtgaccgaaaaaatgcttcagcacttcatcaagcaggttcacagcaacagcttcatgcgcccaagcccgcgcgtactggtgtgtgtgccggttggcgcaacccaggttgaacgccgtgcaatccgtgaatccgctcagggtgccggtgcgcgtgaagtgttcctgattgaagaaccgatggctgcggcaattggtgcgggtctgccggtttctgaagcaaccggttctatggtggtggatatcggtggcggtaccactgaagtggccgttatctccctgaacggcgtggtgtactcctcttccgtgcgtatcggcggcgaccgtttcgacgaagccatcatcaattacgttcgccgtaactacggctctctgatcggtgaagcgaccgcagagcgcatcaagcatgaaatcggttctgcctatccgggtgatgaagttcgcgagatcgaagttcgcggtcgtaacctggcagaaggcgtgccacgcggattcaccctgaactccaacgaaatcctggaagcgttgcaggagccgctgaccggcatcgtgagcgcggtgatggttgcgctggaacagtgcccgccagagctggcctccgatatctccgagcgcggtatggttctgaccggtggtggtgcgctgctgcgtaacctcgaccgcctgttaatggaagagacaggtattcctgtcgtagttgcagaagatccactgacttgcgtcgcccgtggtggtggcaaggcgctggaaatgatcgacatgcacggcggcgacttgtttagcgaagagtag

SEQ ID NO: 523025 - DNA, 1017 bp, Stenotrophomonas maltophilia
atgaagccaatttttagccgtggcccgtcgctacagtttcgcctgatcctggcggttctggtggcgctcggggtcattattgccgatagccgcctcggtacgttcagccagatccgaacgtacatggataccgccgtcagtcctttctactttatttcaaatggtccccgtgaactgctcgactccgtgtcgcaaacgctttcatcgcgtgaccagctcgaactcgaaaaccgtgcattacgccaggaactgctgctgaaaaacagcgagctactgatgctggggcaatataagcaggaaaacgcgcgtctgcgggaactgcttggctcgccgctgcgccaggatgaacagaaaatggtcacccaggtgatctccaccgtaaacgatccatacagcgatcaggtggtgattgataaaggcagcgtgaacggcgtatacgaaggtcagcctgtcatcagcgataaaggcgttgtgggccaggtcgtggcggttgccaaactgaccagccgtgtgctgctgatttgcgatgccacccatgcactgccgattcaggtgctgcgtaacgatattcgcgtaattgccgccggtaatggttgtacggacgatctgcaactggaacacctgcccgccaacacggatatccgcgtgggtgacgtgctggtgacgtctggtctgggcggtcgtttccctgaaggctacccggttgcggttgtctcttccgtgaagctcgacactcaacgtgcctacaccgtgatccaggcgcgtccaacggctggcttgcagcgtttacgctacctgctgctgctatggggcgccgatcgcaacggcgctaacccgatgacgccggaagatgtgcatcgcgtggccaatgagcgcctgatgcagatgatgccgcaggtgctgcctgcgccggatgctatggggccacctgcgcccgtaccggctccggcgacggggttaacgcagccgctaccggatgcgccgccaccgccgcaagtctcgggtggagggcagtag

SEQ ID NO: 523026 - DNA, 489 bp, Stenotrophomonas maltophilia
gtggccagttatcgtagccaggggcgctgggtaatctggctctcattcctcgttgcattgttgctgcaaattatgccctggccggacgacattcttgttttccggccaaactgggtattactcattttgctctactggatccttgccctgccgcaccgcgtaaatgtcggcacaggttttgtgatgggtgccatactggatcttatcagtggctctacgcttggcgtccgcgccttatccatgagcattattgcgtatctcgttgcactcaaattccagctctttcgtaaccttgcgctctggcaacaggcgctggtggtgatgttgttgtcgctcgctgcggatatcgttgttttctgggcagagtttttagtgatcaacgtctctttccgaccggaagtgttctggagtagtgtagtaaacggtgtgctctggccgtggctgttcctgctgatgcgtaaaattcgccagcagtttgccgtgcaataa

SEQ ID NO: 523027 - DNA, 594 bp, Stenotrophomonas maltophilia
atgacgtctttgtatcttgcctccggttctccgcgtcgccaggaactgctcgcgcagttgggtgtatccttcgaacgcatcgttaccggtatcgaagaaaaacgtgctgagggcgaaagcgctcagcagtatgtctcccgtctggcgcgtgaaaaagcgcaggcgggcgttgcatgcgtgccgcgtgacttaccggtgctgggggccgataccatcgtcatcctcaatggtgaggtgcttgagaaaccccgcgacgcagaccatgctgcgcggatgctgcgtaacatgtccggacaaacccatcaggtgatgacggcggtagcgctggcagacagccagtacgttctggattgccttgtggtaacggaagtgacgttcagagtcctcaccgacgaggagatcgccggctatgtcgccagcggtgaacctatggataaagcaggtgcatacggtattcaagggttgggtggctgttttgtcaggaagataaatggcagctatcacgccgtagtcggcttaccgctggtggaaacgtatgagttgctgagcaattttaactcactgcgtgagggaagggataattatgacggctga

SEQ ID NO: 523028 - DNA, 1470 bp, Stenotrophomonas maltophilia
atgacggctgaattgttggtaaacgtaacgccatcggaaacccgtgtggcctacattgatggtggcattcttcaggaaattcatattgagcgtgaagcgcggcgcggaatcgtaggcaatatctacaaaggtcgtgtcagtcgtgtactgccgggtatgcaggcggcttttgtagatattgggctcgataaagcggcgtttttacacgcctccgacatcatgccgcataccgaatgcgtggcaggcgaagagcaaaagcagtttgccgtgcgcgacatctctgagctggtgcgtcagggccaggatctgatggtgcaggtggtaaaagatccgctgggcaccaaaggcgcgcgtctgaccaccgacatcacccttccttcacgttatctggtctttatgccgggggcgtcgcacgtcggcgtgtcacagcgtattgagagcgaaagcgagcgtgaacgactgaaaaaggtggtcagcgcctactgcgacgagcagggcgggtttattatccgtaccgcagcggaagggatcagcgaagaagacctggcctcggatgcggcctatctgaagcgcgtctggaccaaagtgatggagcgtaaaaaacgcaaccagacccgctaccggctgtacggtgagctggcgctcgctcagcgcgtattacgtgatttcgccgatgcgcagctcgaccgaatccgcgtggactcccgtctgacgtacgaagccttactggagttcaccgccgagtacatcccggaaatgccggggctgctggagcattacaccggacgccagccaatatttgatctctatgacgttgaaaacgaaatccagcgtgcgctggagcgtaaggttgagctgaaatcgggtggctatctaatcatcgatcaaaccgaagcgatgaccaccgtcgacatcaacaccggcgcgtttgtcggccatcgcaacctcgatgacaccatctttaataccaatatagaagcgacgcaggccatcgcacgccagcttcgcctgcgtaatctgggcggtattatcatcatcgactttatcgatatgaataatgaagaccaccgccgtcgcgtgctgcactccctggagcaggcgctgagtaaagatcgcgtgaaaaccagcatcaatggcttctcgcagctcggtctggtggaaatgacccggaaacggacccgcgaaagcgtggaacatgtcctgtgtaatgagtgtccaacctgccatggacgcggaacggtaaagacggtggagacggtctgctacgagatcatgcgtgagattgtccgtgtccatcatgcctacgactcagaccgttttctggtctatgcttcccctgcggtggcagaggccctgaaaggggaagagtcgcacgcgctggcggaagtggaaatctttgtcggcaaacaggtaaaagtgcaaattgagccgctctataaccaggagcagtttgacgtcgtcatgatgtaa

SEQ ID NO: 523029 - DNA, 3807 bp, Stenotrophomonas maltophilia
gtgaggcgattgccggggattttactgcttacaggggcaacgctggtcgtgattgtcgcgttgctcgtgagcgggctgcgtctcgccttgccgcatctggacagctggcggccgcagatcctggcaaaaatcgaatctgccaccggtctgccggtggacgtgagccatatcgaggcaagctggcagaactttggcccgacgcttgatgcgcgggatatcagcgccagcctgaaagatggcggccatcttaaaatcaaacgcgtcaccctggcgctggatgtctggcaaagcctgctgcatctgcgctggcagtttcgcgatctcaccttctggcaacttcagctgatgaccaacacgccgctgcaaagcggcgacagcgatcgtgggctggaaaccagccgtatcagcgatctcttcctgcgtcagttcgatcatttcgatctccgcgacagcgaagtgagctttataaccctttccggacagcgcgctgagctggcgatcccacagctgacctggctaaacgggaaagatcgccaccgcgccgaggggcaggtgaatctctccagcctgaacgggcagcacggcgttatgcaggtgcggatggatctgcgcgacgacaatggcctgctgaacaacggcagggtgtggctacaggcggacgatgtggacgtgaagccgtggctgggtgagtggctacagcagaacatgcagctggaaaccgcgcgcttcagcctggaaggctggatgaccctgacgaacggggcattcgccagcggcgatatctggcttaagcaggggggcgcgagctggaagggggaaaaccatcagcatcagctttccgtcgataacctcaccgcacacgtgacgcaggataaaggcggctggcagttcgctattccggatacgcgcatctccatggataacaaaccctggccgcgcggcgcactgacgctggcgtggatgccggagcaggacgtcggcggtataaacggtaaacgcagcgatgagctgcgtatccgcgccagtaacctggatctgacggcgatcgaagggttgcgttcaatggccgcaaaactctccccggagctgggcgaaatctggctggcgacgcagccgagcgggcagataaaccggctggcgttggatattccgctccaggccacggaaaagacgcgttttcaggcggcatggaataatctcgcatggaaacagtggaaactgctgccgggtgccgagcacttcagcggtaaactggaaggaagcgtggaaaacggcaggctgacggcagaaatgcaggaagcaaaaatgccgtacgaaacggtcttccgtgcgccactggagatcgaaaagggaaacgccaccctcaactggctgaagaatgacaaaggttttcagctcgatggtcgcgatattgatgtaaaagccaaagcggtacatgcccgcggtaatttccgttatctacagcctgaaggcgatgagccgtggctgggcattctggcaggcatcagcacagatgacggttcgcaggcgtggcgctacttcccggaaaacctgatggggaaagcgctggtagactatctcagcggcgccattcaaggcggtcaggcggacaacgccacgctggtctacggcggcaatccgcacctgttcccgtataagcataacgaaggccagttccaggttctggtgccgctacgcaacgccacctatgccttccagccggactggcccgcgctgaagaatctgaatatcgaactcaacttcctgaatgacggcttgtggatgaagacggacagcgttgcgctgggcggcgtaacggcaagcaacctgacggcaaacatcccggattactccaaagagaaactgctgattgatgcggatattaatgggccgggtaaagcggttggcccatattttgaagatacgccgctggatgactccctggcggccactctccagcagttgcagttagatggtgatgtgaatgctcgcttacatctggatatcccgctcgacggtgaaatgaccaccgccaaaggcgacgttcgtctgaataataacagcctctatatcaagccgctggacagcacgctgaaaaaccttagcggtcagttcagctttgttaacggcaatctgaaaagtaagccgctgaaagcgacctggttcaatcaacccctcaatatcgatttctccaccaccgagggcgataaagcctaccaggtggcggtcaatatggacgcgaactggcagccgtcacgcatggatgttctgccgaagccgattgagaatgcggtggacggcgcggtgtcatggaatggcaaggtcgccatcgatctgccttatcatgccggtgcgcgctataacgtcgacattacgggcgatctgaaaaacctcagtagccagcttcccgcaccgctgaacaagaaaagcggtgaagcactgcccgtcaacgtaaaggttgcgggcaaccttaacagcttcgatttaaccggaaacgctggcggaacaaaccacttcaacagccgctggctgcttaaccgcaagctgacgctggacagggcgatctggacgacggacagccgtaccacgccgccgctgccggagcaggcgggcattgaactgaatctcccgccgatggatggcgcagagtggctggcactgtttcagaaaggtgtcgggcaaaacgtcgatcaaacggcgcagttcccgcagtccattaccttgcgcacgcctgcgctgacgctgggtgggcagcagtggaacaacctgagtattgtctcccggccgacggtgaacggctcaaaggtcgaggcgcaggggcgtgaaattaacggttcgttgacgatgcgcgataacgcgccatggcaggcggctatccgttatctctattacaacccgacctttacggcgtctaaaacacagtcgacaagtacgtctcctttcagcagcagtggaacgtcgcgcgtggatttcagcaactggcccgatctccagctgcgctgcgcggagtgctggctgtggggacagaaatatggccgtatcgacggtgattttgctattcagggcaatacgctgagcctctctggtgggctggtggataccggctttggccgcatgaccgccgctggcgagtgggtgaacaaaccgggtgaacagcgcacctcgctgaagggcgatattaaaggcaacaagctggactccgcggctaacttctttgggatcagcacgccgcttcgcggatcgtccttcgatgtgaattacgatctgcactggcgcgcggcaccgtggcagccggacgttgcctcgctgaacggtatcctcagaacccgttttggtaagggacaaattgccgatgttagcaccggtcatgcagggcaaatactgcgcctgctgagctttgacgcgctgctgcgcaagctgcgcttcgatttcagcgataccttcaacgacggtttctattatgactccattcgcggaacggcctggatcaaggacggcgtgatgcataccgatgatacgctgctggacggcctggaagcggacatcgccatgaaaggatcagtgaacctcgtgcgccgggagctggatatggaagcggttgttgccccggaaatctccgctacagtgggtgttgctaccgcttttgtggtcaatccgataatcggcgcggcggtatttgccgccagcaaagtgctggggccgctctggagcaaagtctcgattctgcgctaccgcattacgggcccaatcgataaaccgcagattaatgaagtgctgcgccagccgcgcaaagaagcacagcaatga

SEQ ID NO: 523030 - DNA, 1446 bp, Stenotrophomonas maltophilia
atgagtctgaacctggtaagtgaacatttgctcgcagcgaacggcctgagccatcaggacctgttctccattcttggtcaactgaccgaacgccgcctcgactacggcgatctctatttccagtcgagctatcacgaatcctgggttttagaagacagcatcattaaagatggttcttataacattgaccagggcgtcggcgtgcgcgccgtcagcggcgaaaaaaccggttttgcttatgcagaccagataagcctggccgcgctggagcagagcgcgcaggcggcgcgaaccattgtgcgcgataccggcgacggtcgtgtcaaaaccctgggtgaagtgcagcacactgcgctttataccagcatcgatccgttgcagagcatgagccgtgaagagaagctggacatcctgcgtcgcgtggacaaagtggctcgcgcggcggataaacgcgtgcaggaagtttctgccagcctgagcggtgtttatgaactgatcctggtggcggcgacggacggtacgctggccgctgacgtgcgtccgcttgtgcgcctctctatcagcgtgcaggtggaagacgacggcaagcgcgagcgcggttcaagcggtggcggcggtcgttttggctacgactggttcctcggcgacgttgacggcgaagcacgcgcggatgcgtgggcaaaagaagccgtgcgcatggcgctggtcaacctgtctgccgtggcggcacctgccggtacgctgccggtggttctgggcgcaggctggcctggcgtgttgctgcacgaagcggtcggtcacggcctggagggggatttcaaccgtcgcgggacgtccgtattcagcggtcagatggggcagctagtctcctccgaactgtgtaccgtggtggatgatggcaccatgctcgaccgtcgcggctcgatttctatcgacgatgaaggcacgccgggccagtacaacgtgctgatcgaaaatggcgtactgaaaggttacatgcaggacaagcttaacgcgcgtctgatgggcgttgcgccaacgggtaacggtcgtcgcgaatcctacgcacacctgccgatgccgcgcatgaccaacacctacatgctgccgggtaaatccacgccgcaggagattatcgaatccgttgattacgggatcttcgcgccgaactttggcggcggccaggtggatatcacctccggtaaatttgtcttctctacctcagaggcgtatctgattgagaagggcaaagtgaccaaagcggtgaagggcgcaaccctgattggctctggcattgaggccatgcagcagatttccatggtgggtaacgacctgaagctggataacggcgtgggcgtttgcggcaaagagggccagagcctgcctgtgggcgtcggtcagcctacgctgaaggttgataacctgacggtgggcggcacggcgtaa

SEQ ID NO: 523031 - DNA, 927 bp, Stenotrophomonas maltophilia
atggaacgtctaaaacgcatgtccgtctttgcgaaagtggttgagcaaggctcttttaccgccgcagcacgtcagctacaaatgagcgtctcatccattagccagacagtgtcaaaactggaagatgagctccaggtgaagctgctcaaccgcagcacccgcagcattgggctgacggaagcgggtaaaatttactatcagggctgccgtcgaatgctgcatgaagtgcaggatgttcacgagcagctctacgcctttaacaacacgcctatcggcacgctgcgtatcgggtgttcttcaactatggcacaaaatgttctcgctgccatgacggcggaaatgctgaaagagtatcccggtttaaccgttaatctggtaacgggtattccggcaccggatctgattgccgatgggttagacgtggtgatccgcgttggcgcattgcaggactcgagcctgttctcgcgtcgactgggcagcatgccgatggtggtctgcgcttcgaaaagctatctggcacagtatggcgtaccggaaaaacctgccgaccttagcaaccactcgtggctggaatacagcgttcgcccagataacgaatttgaattgatcgcgccagaagggctttccaccaaactgctgcctgaaggccgcttcgtgaccaacgatccgatgaccatctcacgctggctggtggccggggccgggatcgcctacgtgccgctgatgtgggtgatcaacgagatcaacagcggcgaactggagatcctcttcccgcgctaccagtcggatccgcgcccggtgtacgcgctctataccgaaaaggacaagctgccgctgaaggtgcaggtctgtattaactatctgacggactattttgtggaagtggcagagctgtttcaggggatgcggggaagaaggaaagagtag

SEQ ID NO: 523032 - DNA, 204 bp, Stenotrophomonas maltophilia
atgagtctgtttcccgttatcgtggtgttcggtctgtcgttcccaccgatatttttcgagcttcttttatcactggcgatcttctggctggtgcgcaaggtgctggtccctaccgggatttatgatttcgtctggcatcctgcattgtttaataccgcgctgtattgctgcctgttctatttaatatcgcgcatgtttgtctga

SEQ ID NO: 523033 - DNA, 933 bp, Stenotrophomonas maltophilia
gtgaaaacgctaacaagaaaaatctcccgcactgccatcactatggcgctggtcatcctggcgttcatcgctatttttcgcgcctgggtttattacaccgaatccccgtggacgcgcgatgcgcgtttcagcgcggaggtggtcgcgatagcgcccgatgtcgccggtctcattacggcggtcaatgtccacgataaccagctggtgaaaaaagatcaggtactgttcactatcgaccagccgcgctatcaaaaagcgctggaagaagcggaagccgacgtagcgtattacaacgcgctggccgctgaaaaacgccgtgaagcaggacgtcgtaacaagctgggcatccaggccatgtcccgggaagagattgatcagtccaataacgtgctgcaaaccgtgctgcatcagctggcaaaagcgcaggcgacgcgcgatctggcgaagctcgatctggaacgtaccgttatccgcgccccgtccgatggctgggtaaccaacctcaacgtctatgcgggtgagtttatcacgcgcggctctacggccgtggcgctggtgaaacagaactctttctacgtcctcgcctatatggaagagaccaagctggaaggcgtgcgtccgggctatcgcgccgaaatcacgccgctcggcagcaaccgggtcctgaaaggaaccgtggacagcgtggccgcgggggtgaccaacgccagcagtaccaatgattcaaaagggatggcgaccgtcgattctaacctcgagtgggttcgtctggcgcagcgcgtaccggtacgcattcgtctggatgagcagcagagcaacctctggcccgcaggcaccacggcgacggtagtgatcaccggtgaaaaagaccgtgatgccagccaggattctatcttccgtcaaatcgcccatcgcctgcgcgagtttggttga

SEQ ID NO: 523034 - DNA, 1968 bp, Stenotrophomonas maltophilia
atgggcattttttccatcgccagccagcacatccgcttcgccgtgaagctggcatgcgccattgtgctggcgctgtttgttggcttccatttccagcttgcaacgccgcgctgggctgttctgaccgccgcgatcgtcgccgccggtcctgccttcgcggcgggtggcgaaccttactccggggcaattcgctatcgcgggatgctgcgtattatcggtacctttatcggctgtatcgccgccctgaccattatcatcctgatgatccgcacgccgctgctgatgctgattgtatgctgtatctgggcgggtttttgcacctgggtctcttcgctggtgaaggtggagaactcgtacgcctggggcctggcgggatataccgcgctgattattatcatcaccattcagagtgaaccgctgcttgctccgcagttcgccgtggaacgttgcagcgagattgtcattggtatcgtctgcgcgattgtcgccgatctgctcttctctccgcgatccatcaagcaggaagtcgatcgtgagctagacgcgctgattgttgcccagtaccagctcatgcagctgtgcattaagcacggcgacagcgaagaggtcgacaaggcctggagcgcgctcgtgcgccgcacgcaggcgctggaagggatgcgcagtaatctcaatatggagtcttcccgctgggagcgtgccaatcgtcgtctgaaagcgatcaataccgtctcgttaacgctgatcacccaggcgtgtgaaacctacctgattcagaacactcgccccgaagtggtaacggataccttccgcgaactgtttgatgagcctgtggagacggtgcaggacgtgcatcgacagcttaaacgcatgcgtcgtgtgattgcctggacgggggaacgggatacgccagtcaccatttatacctgggttggcgccgcaacgcgctacctgcttctgaaacgcggcgtgattagcaacaccaaaatcagtgcggcggaagaagaggtgttacagggcgaagtggtgatcaaaccggaatccgccgagcgtcatcatgcgatggttaacttctggcgtaccaccctggcctgtatactcggcacgctgttctggctgtggaccggctggacgtccggcagcggcgcgatggtgatgattgccgtcgttaccgcgctggcgatgcgtctgcccaacccgcgcatggtcgctattgattttctgtacggcaccattgcggcgttacccattggcgcgctctacttcctggtaatcatcccctcaacgcagcaaagcatgcttttgctctgtatcagcctggcggtgatggcgttctttatcgggattgaggtacaaaaacgccgtctgggatcgttaggtgcgctggcgagtacgattaacatcctcgtgctggataacccgatgaccttccatttcagccagttcctggatagcgcattaggccagctggtgggctgtttcctggcgatgatggtgatcctgctggtgcgggataactctcaggcgcggacagggcgcgtgctgctcaatcagtttgtgtcggccgccgtatcgtccttgaccaccaacaccgcgcggcgcaagcagaaccaccttccggccctttaccagcaactgttcctgctgttgaataaattcccgggcgatgtcgctcgcttccgtctggcgttaaccatgattatcgcgcaccagcgtctgcggaacgcgccagtgccgatcaacgacgatttgtccgctttccaccgccagctacggcgaacggcggaccatgtgatatcggcatccagtgatgacaaacgtcgccgctactttaagcaactgctggaggagctggatatctaccaggagaaactgcgagtctgggaagccccgccgcaggttaccgagccggtagagcggctggtgtttatgctgcaccgctaccagaatgcgctgacagacagctaa

SEQ ID NO: 523035 - DNA, 1461 bp, Stenotrophomonas maltophilia
  misc_feature (1215)..(1224): n is a, c, g, or t
atgacaacccaggctcttcaggacagtattctttttcagaccgggtatctggttaacggtatctggaaaacactcgacaccacgtttgatgtgctaaacccggccacgggcgaggtggttgcgaaagtggcgaaagcagggaaagccgaaaccgaagaggccattgcggccgcgacgaaagcctttcccgcatggcgcgcaaaaacggcaaaagagcgttccgcgatcctctatcgctggtatgaactgattatcgagaacaaaagctggctcgggcggctgatgaccaccgagcagggcaagccgctgaaagaggctgagggcgaggtggactacgctgccagctttattcagtggtttgcggagcaggccaagcgcgctaacggtgaaatcattcctccggttaaacccggctcccgtattctggccactcgtgaacctgttggggtggttgctgctatcacgccatggaatttcccgatggctatgctcacccgtaagctcggcccggcgctggcagcaggatgtaccggcgtcatcaagcctgcaaacaacacgccgctgagcgcctttgcgctgctgacgctggcgaagcaggccggtgtgccggatggtgtgctgaatgcggtcgcggggagcacctcagaaattagcgacgccattatggccagccatgacgtgcgcaaaatctcgtttacggggtcaaccgccgtcgggaaaacgctggttcgcaattccgctgagaccatgaaaaaggtatcgatggagctgggcggcaatgcgccgtatatcgttttcgaggacgcggatattgaggccgctgtcaaaggcgccatcgccaataaattccgtaacgccgggcaggtctgcgtcagcgtaaaccgtttctatattcaggagacggtctatgacaagtttgtcaatcagcttgccgatgcggtgaaggcgctgaaggtgggtaacggtctggacgagggcgtcgttgtcggcccgctgattgagccttcggctgtcgagaaagtccgtgagcacgtcgaagatgcggtagcgaagggggccacggtgctggctgggggtaaaccgcacgaacttggcggcaacttctggatgccaaccgtactcggtgactgccatgaaggcatgaagctggcagaagaggagacctttggtcccgttgccgcctgcttccgcttcacgtcggaagacgaagtggtnnnnnnnnnncgcgctaacaatacgccttacgggctggcggcctacttttatacccagaatctctcgcgcgtgttccgcgtctcacaggccattgagagcggcatgatcggaattaatgaatgtgcggtctcgaccgagctgggtccgtttgggggcgtaaaagagtccgggctggggcgcgaggggtccgtgctggggctggaggagtttctggaagttaaaaccctgcatatcgggggcttataa

SEQ ID NO: 523036 - DNA, 273 bp, Stenotrophomonas maltophilia
atgaaaatttatacctttgattttgacgaaattgatagtcaggaagacttctaccgcgagtttatccgggcgttcgacctggagcggggcagcgtaaacaatcttgatatgctgtgggatgtggttaccggcgacaggctgccgttaccgctggagatcgaatttacccatctgcctgaaaaactgcgcagacgctttggcgcattgattttattgtttgatgaagcggaggaggagctggaagggcaactgcgtttcaacgtgcgccagtga

SEQ ID NO: 523037 - DNA, 264 bp, Stenotrophomonas maltophilia
atgaaaattaaaaccactgtagctgccctgagcgtactgtcagtcctgtcattcggtgcgtttgcagccgacactattaacgccgaacaggcacaatcccgtcaggctatcgggaccgtttctgttggtgccatcggtacttctccgatggacatgcacgaaatgctgaacaaaaaagcggaagaacagggtgcgtcatcttatcgcatcatcgaagcgcgcagtggcgaccactggcacgctaccgcagaactgtacaaataa

SEQ ID NO: 523038 - DNA, 471 bp, Stenotrophomonas maltophilia
atgcgaagctcgtctaagcaagaagaattagtgaaagcgtttaaagcgctactcaaagaagagaaattcagttctcagggagaaattgttcaggcgttgcaggagcaaggcttcgacaacatcaaccagtcgaaggtctcccgcatgttaaccaagtttggtgcagtgcgtacgcgcaacgccaaaatggagatggtttattgcctgcctgctgaacttggcgtgccaacgacctccagcccgctgaaaaacctggttctggacattgactataacgatgccgtggtcgtgatccacaccagcccgggtgcagcccagctgattgcccgcctgctggactcgctgggtaaagcagaggggatcctcgggaccatcgccggtgatgacaccatttttacgaccccggcaaatggtttctcggtgaaagacctctacgaagcgattctggtcctgttcgaacaggagctgtaa

SEQ ID NO: 523039 - DNA, 939 bp, Stenotrophomonas maltophilia
atgaaagtcgcagtcctcggcgctgctggtggtatcggccaggcgcttgccctactactgaaaacccaactgccttcaggctcagaactctccctgtacgatattgctccggtaaccccaggtgtggcggttgacctgagccacatcccgacagctgtgaaaatcaaaggcttctccggtgaagatgcgcgtcctgcgttgcagaatgccgatgtggtgctgatctccgcgggtgttgcgcgtaaaccgggtatggatcgttcagacctgttcaacgtcaacgcgggcatcgtgaaaaacctggttcagcagatcgctgaaacctgcccgaaagcgtgcatcggtatcatcaccaacccggtgaacaccaccgttgccatcgcagcagaagtgctgaagaaagcgggcgtttacgacaagaacaaactgttcggcgtaactacgctggatatcatccgttccaataccttcgtggctgagctgaaaggcaagcagccaacggaagtggaagtgccggttatcggcggacactctggcgtgaccatcctgcctctgctgtcgcagatcccgggcgtgagcttcaccgagcaggaagtggctgacctgaccaaacgtattcagaatgcaggcaccgaagtggtggaagcgaaggcgggtggcggttctgcaaccctgtctatgggccaggcggcggcgcgtttcggcctgtctctggttcgcgcgctgcagggcgagaaaaacgtggttgaatgcgcttacgtagaaggcgacggtgaacacgcgcgcttcttctctcagccgctgctgctgggtaaaaacggcgttgaagagcgtaagtctatcggcacgctaagcgcgtttgagcaaaacgcgatggaaggcatgctggatacgctgaagaaagacatcacgctgggcgaagagttcgttaacaagtga

SEQ ID NO: 523040 - DNA, 1026 bp, Stenotrophomonas maltophilia
  misc_feature (958)..(967): n is a, c, g, or t
atgcttttaaagctctttcgttcaattgtcattggtttgatcgttgccggtctgctgctggtggctatgccatctttacgccagttcaacaaactgtcggctcctcagttcgacagcacggatgaaacgcctgcaacgtacaatcaggcggtacgccgtgccgcccccgccgtggttaacgtctataaccgcgggcttaacagttccgctcataaccagctggagatccgcacgctcggttccggtgtgatcatggatgaccggggttacatcatcaccaataaacacgtgatcaacgatgccgaccagattatcgtcgccttgcaggatggccgcgtgtttgaagccctgctggtggggtcggacagcctgaccgatctggcggtgctgaagatcaacgccacgggcggtctgccgactatcccgattaatcgcaaacgaacgccgcacatcggcgatgtggtgctggcgatcggtaacccgtacaacctgggccagaccatcactcaggggatcatcagcgcgacaggtcgaattggactgaacccgtcagggcggcagaacttcctgcaaaccgatgcctcgatcaaccacggtaactccggcggtgcgctggtgaactctctgggcgaactgatgggcattaataccctctccttcgacaagagcaacgatggcgaaacaccggaagggattggctttgccattccgttccagctggcgaccaagatcatggacaagctgatccgcgatggccgcgtgatccgtggctacatcggtattggcgggcgtgaaatcgcgccgatgcatacgcagggcggtggtatcgatcagatccaggggattgtggtcaacgaagtggcacctggcggcccggcggccaatgcaggtatccaggtgaacgacgttattctttccgtcaacggcacgccggcggtctctgcgcttgaaacgatgnnnnnnnnnnatggaccaggtggcggaaattcgaccgggctctatcatccccgtagaagtcatgcgtaa

SEQ ID NO: 523041 - DNA, 1368 bp, Stenotrophomonas maltophilia
atgaagaaaaaaaaccagctgttgagcgccttagcgttaagtgtcgggttatctctctcggcgtccttccccgccagtgcggcactaccttcgcaggtgccaggacaagaagccattcccagccttgcgccgatgcttgaaaaagtcctgcctgcggtagtcagcgttcaggtggaagggacggcacgccaaagccagcgtattcccgaagagctgaagaaatattttggcgaagaggcgccggatcagcaggctcagccgtttgaaggccttggttcgggcgtgattatcgacgcggccaaaggctatatcctgaccaataaccacgtgatcagccaggctgataaaatcagcgttcagctgaacgatggccgggagtttgacgccaaactgatcggcggtgacgatcagagtgatatcgccctgctacaggtgcaaaaccccagcaacctgacccagatcgccatcgccgattccgataagctgcgcgtgggtgattttgccgtcgcggtcggtaatccgttcggtttagggcagaccgccacctccgggattgtctctgccctggggcgcagcggcctgaatctcgaagggctggaaaatttcatccagaccgatgcctccatcaaccggggcaactccggcggtgcgctgcttaacctgaacggcgaactgatcggcattaataccgctatcctcgcaccaggcggcggtagcatcgggattggttttgccattccgagtaacatggctaaaaccctgtctcaacagctgatacagtttggcgaggttaagcgcgggctgctgggcattaaaggcatggagatgagcgccgatatcgccaaagcctttaagctcaacgtccagcgcggggcgtttgtcagcgaagtgctgcccaactcaggctctgcgaaagcgggcgtgaaatccggtgacgttattgtcagcctgaacgataaaccgctgagcagcttcgctgaattacgttcgcgtattgccaccactgagcctggcgctaaagtgaagctgggcctgatccgcgagggcaaaccgctgaccgtggaagtgacactggacaagagcacctcctcttccgccagtgcagaacagatctccccggcgctacagggcgcaacgctgagcgacggtcagcttaaagacggcacgaaaggcatttctgtcactgccgttgagaaaagcagtccagccgcgcaggcaggtttacatcaggacgacgtgatcgtgggcgtgaaccgcactcgcgtgcagtctattgccgaaatgcgtaaggtgctggagagtaaaccggcggtcattgccctgcaaattatccgtggcaacgacaccctctacattttactgcgttaa

SEQ ID NO: 523042 - DNA, 399 bp, Stenotrophomonas maltophilia
atgacctgggaatatgcgctaatcggtttagtcgtcggcatcatcattggtgctgtggccatgcgtttcggtaaccgcaaattgcgtcagcagcagtcactgcaatacgaactggaaaagaacaaagccgaactggaagaataccgcgaagagctggtcagccactttgcccgtagcgctgagctgctggacaacatggcgacagattatcgccagctctaccagcacatggcgaaaagctccagcagcctgctgccggaaatgaccgcggagagcaaccccttccgcaatcgtctggcggactctgaggccggtaacgatcaggcaccggttcagatgccacgcgactattcagacggcgcgtccggcctgctgcgcggtggcgtaaaacgcgattaa

SEQ ID NO: 523043 - DNA, 1125 bp, Stenotrophomonas maltophilia
atgcaaaacctgtccccatcatcgcgttaccaactcgccctgagtgagggcacacaccagccggatgatgtccagcgtgaagcggtaaaccgcctggacacgatttaccaggagcttctggcgaaacccgccgatgcggtgcagagcagtgggctgaaggcggcattcggccgtttactgggcaaaaaagagcccacggtaaacgcaccggttcgtggcttatatatgtggggcggcgttgggcggggtaagacctggctgatggacatgttctaccagagcctgcccggcacgcgtaagcagcgtctgcactttcaccgttttatgctccgggtccatgaagagctgacggcgctccagggcgaaaccgacccgctggaaatcgtggcggaccgcttcaaggcggaaacggacgttctctgcttcgacgaattctttgtttccgatattacggacgcgatgctgctgggggggctgatgaaagcgctgtttgcgcgtgggatcaccctggtggcgacctcaaatatcccgccggatgagctttatcgcaacggtctccagcgggcgcgtttcctgccagccatagatgccattaagcagcactgcgacatcatgaatgtcgacgctggcgtcgactatcgtttgcgcacgctgacgcaggcgcacctgtggctttcaccgctgaacgccgacacagccagcgagatggataaactctggctggcgctggcagggtcgccgcgggataacgcaccagcgctagagattaatcatcgtccgttgccgacgcttggcgtagagaaccagacgctggccgtctcgtttgcaacgctctgcgtggacgcccgcagccagcatgactacattgcgctttcgcgactgttccataccgttatgttatgggatgtgcccgtcatgacccctctcatggagagcgaagcgcgccgcttcatcgcgctggtggacgagttttatgagcgccacgtcaagctggtagtcagtgccgaggtgcctttatatgagatctatcagggcgagcgcctgaagtttgagttccagcgctgcctgtcgcgcctgcaagagatgcagagcgaagagtacctcaagcgtgagcatatgccataa

SEQ ID NO: 523044 - DNA, 429 bp, Stenotrophomonas maltophilia
atgaaaacttttacagctaaaccagaaaccgtacagcgcgactggtatgttgttgacgcgaccggtaaaactctgggccgtctggctactgaactggctcgtcgcctgcgcggtaagcataaagcggaatatactccgcacgttgataccggtgattacatcatcgttctgaacgctgacaaagttgctgttaccggcaacaagcgtactgacaaaatgtactaccaccacaccggccacatcggtggtatcaaagaagcgacctttgaagagatgattgcccgccgtcctgagcgtgtgattgaaatcgcggttaaaggcatgctgccaaaaggcccgctgggtcgtgctatgttccgtaaactgaaagtttacgcaggcaacgagcacaaccacgcggcacagcaaccgcaagttcttgacatctaa

SEQ ID NO: 523045 - DNA, 258 bp, Stenotrophomonas maltophilia
atggtagttcgccagccgctggaactggttgatatggtagaaaaactggatctgtacatcaccgttaaaggtggtggtatctccggtcaggcaggtgcgatccgtcacggtatcacccgcgcgctgatggagtacgacgaatccctgcgttctgaactgcgtaaagctggcttcgttactcgtgacgctcgtcaggttgaacgtaagaaagtgggtctgcgtaaagcacgtcgtcgtccacagttctccaaacgttaa

SEQ ID NO: 523046 - DNA, 639 bp, Stenotrophomonas maltophilia
atggctgtcgctgccaacaaacgttcggtaatgacgctgttttctggtcctactgacatttatagccatcaggttcgtatcgtgctggccgagaagggtgtcagttttgagatcgagcatgtggaaaaggataacccgcctcaggatctgatcgatctcaacccgagccaaagcgtaccgacgctggtggatcgtgagctgaccctgtgggaatcccgtatcattatggaatacctggatgagcgtttcccgcatccgccgctgatgcctgtttaccctgttgcgcgtggtgaaagccgcctgtacatgcagcgtatcgagaaagactggtactcgctgatgaacgttatcgttaacggttcctcttcagaagcggatgctgcgcgtaaacagctgcgtgaagagctgctggcgattgcgccggtatttggtcaaaaacctttcttcctgagcgatgagttcagcctggtagattgctacctggcaccgctgctgtggcgcctgccaaccctgggcgtagaattcagcggtcctggcgcgaaagagctgaaaggctacatgactcgcgtattcgaacgcgactctttcctggcatccttaactgaaccggagcgcgaaatgcgtctcggccgaggctaa

SEQ ID NO: 523047 - DNA, 504 bp, Stenotrophomonas maltophilia
atgactgtggaaatgtcacaactttcaccacgccgtccgtatctgctgcgcgccttctatgaatggctgctggataaccagctcacgccgcacctggttgtggatgtgacgttgccgggcgtgcaggttccaatggaatacgcacgcgacggacagattgtactgaatattgcgccacgtgcagtgggtaacctggaactggcgaacgacgaagtgcgctttaatgcgcgtttcggcggcgtgccgcgtcaggtttccgttccgctggctgcggttctggctatctacgcccgtgaaaacggtgcaggtaccatgttcgaaccggaagcggcttatgatgaagaggtcgccagcctgaacgatgatgggacatccgatgaacgtgaaagcgacacggtaatgtctgtgattgatggcgataaacccgatcatcacgacgacaatgaccctgatgacgatccgcctccgcgcggtggtcgtccggcactccgtgtcgtcaaataa

SEQ ID NO: 523048 - DNA, 741 bp, Stenotrophomonas maltophilia
atgaatatcacttttaaaaaattattttcatctgctgctatttgtgcagccctcgccatgtcaaatgcacacgctgctaatgatgtgacgttgaaagttattggtaatatcgttcctggttcctgcgtaccctcactgccaaacggtggagtggtagattatggcacaatgccagcttctaccatcaatccaactggcacggcgaatacactggttcagttgggggctaaaagtattactctcactattacctgtgacagcgataccagcgttggggtgacttctacggataaccgccatgatactcgtgtgggcctggggagcgccgcttatattgaaaatggttttttcgataatgtaaatgctaacgcttcaggaaacgcctatggcttgggtaaaacgagtgcgggtgtgaatattggctcctatgtcattgcagcagatcccgttaatacaacaacagatggtgttgtcgctgatctcattgcagccacaggtaccgatacatcaaattatacctgggtaaaatccagtacgggtgcttttgcaccagttaacagtggcacaggccagacacgtgtctttacggctgctgcatcgggaaccaccacaccaaaagcttttaaagttatgaatatgccgttacgcattacgactgcgcttcaggacaacactgtattgggtacaggcgatactatcacgcttgacggtaatgccacgctgagccttgtttatctttga

SEQ ID NO: 523049 - DNA, 747 bp, Stenotrophomonas maltophilia
atggaatttaaaaaagtactctcggcagcaaccgtcgccgtagccttcggtttatccgcttttgctgctcaggccgctaacgatgttacgctgaaagttgtcggtacgattaacccggctgcatgtacgccgaccctgcctgatggcggcgttgtagattatggaacggtactgaaccaaaatattgcaccgaccggtgcgacaaacaagctggtacaattggggcagaaaagcatcacgctaaatatcagttgcgaaagcaacatgagcgttgcttttacctccaccgataaccgcctggacagtcgcgttaacctgtcttcaaccgcgtttatcgcaggtagcggtacggataaatcagacttcagcaacaccgctggtgcctttggtctgggtaaaaccaccgctggcgtgagcattggtgcttacaccgttgccatcaatactgaagcggtcacagcggatggcgcgaatgttgacaccctggtaacagggagcatcactgaaggccagcgttcctgggagaaagttgcgccaggcctgggttacctctgctcgcttaatggctgcacgggctaccaaaaagcgaataccgtagcaacagccggtaccacgcagccaaaagccttcaaacagcttagcgtgccgttgctggttacctctgcagtgcaggataactcggtattaggtacgactgacgtaattacgctggacggtaacgcaaccattagtctggtatatctctaa

SEQ ID NO: 523050 - DNA, 672 bp, Stenotrophomonas maltophilia; identical to SEQ ID NO: 119233

SEQ ID NO: 523051 - DNA, 2388 bp, Stenotrophomonas maltophilia
atgcagcaaaaaacgttactcgcctgtctcattggcctggtctgttctggccaggcgatggctcagcagatggagactgctgccattaattttgatcaggaaacgcttcgttcactggggataaacccggacgtatcaaattatttctctcgcaagacgaagtatttaccgggtagcgtttccgtcgccctgaaggtgaatggtgataataaaggcaacgttattgctcgtttcgacaacaacggcgatctctgtttcgacaaaccttttatggagcaggcaggattaaaagttccctctgactatgagtccggctgctacgattataccggtcatatcccgagcgctattgtggaggcttcgcctgcgcaagaatctctaagtctggttgtaccggcggatcggatagcaaacagcgaatcggatatcggagcttatacttccggtggcactgctgcgctgttgaattattctcttctctcctcgcgcaatgagtttggtgacgggcactctgactattcacaggccatgctggacggtggggtcaatttcgacgactggatcttacgtactcagcaactgctgagccggagcgacggagaattcgagagtaataactcgtcgacctatttgcagcatacttttgtccccctgaaaagtaccctgagggcgggcgaggtcaatatcaataactcccttcttcagggaacgggaatctatggtatcgagctttcaccggagagcgccttacaacagggcggtagcggagtgagcgtgtccggtatcgccaatacgcctcaggcccgtattgaagtgcgtcagcaaaatgttctggtgtacagcacactggtgccggtcgggccgtttaatctcaccgatgtgccggtacgtaacggcgttagcgatctgaacgtgacggtagtggaaaccgatggcagccagcacagctatgtggtgcccgcagcgctgtataaccagagcgcaggggcgccttcaggatatcacttcgcgctgggacgagtgagcgatagctatagtgaaacgccatgggtagccagcctttctggaggctggaaactaagcgaacgggtaaatgtcaacgcaggctcaatcgtaggcgaagattaccaggctgtcgccaccagccttgatacagtgccgctaccagcctggcttgtttcactccaggcgaaccagtccaacgattcgaaagattcactgaaagggcagaggtacacgctatcggcaacatggagttctgaccccgcatttggcatgggggctaacgcctctgttacgcataaatcgcaagactatcgcgaactttttgaagcactggatgatgatttcgacagcggtaataaaaatgagtattccgccgggctgacctggagtgtgccctacttaggcacgcttagcaccagctactaccaaacgcagggttatgataagtcagatgattcccgcttcatctctgcgggttggaacaagtcattcaagtacgccacgatttccatgaactggcaacatcagttgagtgcagatgaggagaatgaggatgatggcgatctgttctacgtcaacctcagtattccttttggtgccagcaatagcgttagcctgtacagccgtcatgatgaccataaaacgcggtatggcgcctctgcgcttggcgttgtaagtgataccacatcctggtcgctgggagctgaacacgatcaggccacgaatcgcgataatgtaaacggtgggataagcagcaaccttcactatacgcagcttggcctgagcgccagttcggataacgagaatagccgcagctattcaggatcgctacaggggggcatcgcggttcatggacaaggcgttacgttctctccatgggcgatccgcgacacgttcgcgatcgctgctctggataaacccgtctccggtgtgaggattgacacgccccaggggccggtatggaccgacttccgtggtcaggcagtggtaccgtcagtgggagcctggcgcccagcgcgggtagaagtggatacggaaacattgccgaaaaatatggatatcgggaatggaacccgtgtcgtcacgcttggcaaaggagcggtagggcatcttgattttactgcgttaacccagcgacgtgcactggtgaacgttatcctggcaaacggtaaaaagctgccgaaagggatcgcccttgaggattcgcacggaaattatcttacgacctcagtggatgatggcgtggtcttttttaacgatgttgaacctgctcaacaggtggtggcaaaactggataacggcacctgtgcatttggtctgaagcttccgaaagaggcaaataccgatacattctatgaaactgtcaatgaggtgtgtaaatga

SEQ ID NO: 523052 - DNA, 531 bp, Stenotrophomonas maltophilia
atgaaggcgctttttttagccgtgtgcgcaatggcgttttctctgcatgctatggctgactgccagttagtatcaagccagcaaaaactcagctatggccgtatgagtgccgcagagcgccaggcggaagggaacacgttgattgagatgccggagaaacagattgtcctgaacgtgatatgcgatgaaccgtcgcgtattcgtctctttctgggcagtaacgtaccgaaagggcatgaatttggttttggtgataacggcgtcatgcgcgttactgccgcgcaggcaacggtggacgatcgtacagtcaatctggcggctatccatgccggcgacccgtgggttaccaatggcggcgtgagagagatcgcgccagcgcttaacgaagggattgcgtttatcaacggtcaggagctgcggggaaaaacggcgtctgtcacgcttaccatcaaaccgcgcttcaaaagtaaccatattacggacagagaagtgtggcgcggaaatttacgcgtaaggatggatgtacaatga

SEQ ID NO: 523053 - DNA, 705 bp, Stenotrophomonas maltophilia
atgaaaaagcgtatagcgctattactctgcggaatgtctgccgcttcagcggtatgggcaactgatacggtcaatattgatgtggatgtcaccgttgacgctgccgcctgtacaccggcgttgagcaatggcggtgtggcagatttcggcacgcgctatgcggggtcgctctcctccagcgcattcacacagcttggtactcgcgatcttacactatcggtgacgtgtgaatcttctacgggagttgcgattaccgcgcgtgatacccgcgccagttccgtggtcgttggcaaagataaatccgggcaagaaggggtaaaattccagataaataacggtgcctatgtgcgtgatacgacccgcctgtttggtttaggattgaccagcgagcagaagccgattggcagttatggggtgcaaattaacgcggcaggcgtgacggcagccgacgaaagtgccgctgttcaggtggagatcgccggggccgcgaccaaaaatggtccatggacgcgcacgacgctattgcccttgccgacccagcaggactttttctatacgtttgtgcaaaaaggcacggatattccgcagccgatctcatcggcggttgttccgctacaggtgagtgccgctgtcgccaacgggcttggcagcgggcaagagatcaagttggacggcgaggcggtgattacgctggtctatttataa

SEQ ID NO: 523054 - DNA, 1281 bp, Stenotrophomonas maltophilia
atgcagaataataccctcaccattcgtcaggcccgtttacaggggcaagaggggttatggcagatcgcaattgaaaacgggcgctttagccgtattgaaccgcaggacgcggcatcgtcacctgtgggccaggtgcttgatgctgaaggcgggctgatcattccccctttcgttgagccgcatatccatctggataccactcaaacggctggtgaaccgagctggaaccagtctggtaccttattcgaggggattgagcgctgggctgaacgtaaggcgctgctcacccacgaagatgttaagacccgcgcaatgcagacgctgaaatggcagatggccaacggcattcagcatgtgcgtactcacgttgacgtctccgatcccacgctgacggcgctgaaagcgatgctggaagtgaagcaggaggtcgccccgtgggtcgatctgcaaatcgtggcgttcccccaggagggcattctttcttatcccaacggtgaagcgttgctggaagaggcggtgcgtatgggggcggacgtcattggcgcaattccgcactttgaatttacccgcgagtatggtgtggagtcgttgcacaaaaccttcgcactggcgcagaagtacgacaggctgatcgacgtacactgcgacgaaatcgatgatgaacagtcgcgcttcgtggaaaccgtcgccgcgctggcgcaccgtgatgggatcggctcgcgcgttaccgccagccataccacagcgatgcactcctataatggcgcctacgcgtcccgcctgtttcgtttgctgaaaatgtcgggcatcaacttcgtcgccaatccgctggtgaacatccaccttcagggccgtttcgacacctatcctaagcgccgcggcgtaacgcgcgtgaaagagatgctggaggcggggatcaacgtctgctttgggcatgatgacgttttcgatccgtggtatcccctgggcaccgccaatatgttgcaggtgctgcatatgggtttacacgtctgccagctgatggggtacgggcagattaacgacgggctgaatctgatcaccacccacagcgcgaaaacgctcaacctgcaggactacggcgtgaaggtgggtaattctgcgaacctggttgttttaccggccgaaaatggctttgatgcggttcgtcgccagacgccagcgcgttattcggttcgtcacgggcgggttatcgccgagacggtacccagccagacaacgctgcatctgacgcagccggaagcggtgacctttaaacggtaa

SEQ ID NO: 523055 - DNA, 1251 bp, Stenotrophomonas maltophilia
gtgtcgcaagataacaattatagccagggccccgtccctctggcggcgcggaaaggcgtggttccactcacttttgtgatgttagggttaacctttttttccgccagtatgtggaccggaggtacgctcggtaccggtctttcctataatgatttcttcctcgcagttctcttcggcaatctcctcctcggtatttacactgcttttcttggctacattggcgcaaaaaccggcctctcaacccatcttcttgcgcgttactcgttcggtataaaaggttcctggcttccctccatgcttttaggcggtacgcaggtaggatggtttggcgtcggcgtagcgatgtttgccatcccggtgagtaaagccacgggcatcgacgtcaatatcctgatcgcggtatccggtctgttgatgaccatgaccatcttctttggtatctcagcgctgacgattctgtcgatcatcgccgttcccgcgatagttatcctcggcagctactccgtctggctggcggtggacggcgtgggcgggctggatcatttaaaagcgatcgtgccacagaccccgctcagtttttcaggcgcgctggcgctggtcgtcggctccttcatcagcgccggaacgctgaccgccgacttcgtccgctttgggcgtaacgcgaaaggcgccgtggtggtggcaatggtggcgtttttccttggcaactcgctgatgtttatcttcggtgcggcaggcgccgcggcagttggacaggcggatatctcggacgtgatgatcgctcaggggctactgctgcccgccattatcgttctcggtctgaacatctggacaaccaacgacaacgcgctctatgcgtcgggtctgggctttgccaacgtgaccggcctttccagccgcacgctgtcggtggttaacggtattatcggcacgctctgcgcgctgtggctgtacaataactttgtcggctggctcacctttctgtcggcggcgatccctcccgtcggtggggtgattatcgccgactatctgatcaaccgccgccgctacgccagcttccatagcgctacctttgtgccggtcaactgggtagccattctttcggtcgcgctcggcgtggctgccgggaatattattcccggtatagtgccggtgaatgcggtcctcggcggcgtattcagctaccttctgttaacccccttagtcagacgtacctttgctaccgccccggaggctccccatgcagaataa

SEQ ID NO: 523056 - DNA, 1419 bp, Stenotrophomonas maltophilia
atgagccagaacgtttaccagtttatcgaccttcagcgtgttgatccgccaaagaaaccgctgaagatccgtaaaattgaatttgttgaaatctacgagccgttttcagaaggccaggccaaagcacaggcagaccgctgcctgtcctgcggtaacccttactgcgaatggaagtgtccggtccataactacatcccgaactggctgaagctggccaacgaagggcgtatttttgaagccgccgagctgtctcatcagaccaacaccctgccggaagtgtgcggccgcgtgtgccctcaggatcgtctgtgtgaaggctcctgtacgctgaacgacgagtttggcgcggtgaccatcggcaacatcgaacgctatatcaacgataaagcgttcgaaatgggctggcgtccggatatgaccggcgtgcgtcaaaccgacaagcgcgtggcgattatcggcgcgggcccggcaggcctggcctgtgcggacgtgctgacccgtaacggcgtgaaggcggtggtctttgatcgccaccctgagattggcggcctgctgaccttcggtatcccggccttcaagctggagaaagaggtgatgacccgccgccgcgaaatcttcaccggcatgggcattgagttcaaactgaacgtggaagtgggccgtgacgtgcagctcgacgacctgctgaaggattacgacgccgtgttcctgggcgtgggtacttatcagtccatgcgcggtggcctggagaacgaagatgcgccgggcgtgtacgacgcgctgccgttcctgattgccaacaccaggcagatcatgggctacggtgagaccgccgatgagccgttcgtcagcatggaaggcaaacgcgtggtggtgctgggcggcggtgataccgcgatggactgcgtgcgtacctccattcgtcagaacgcggcgcacgtcatctgtgcttaccgtcgtgacgaagagaacatgccgggctctaagcgcgaagtgaaaaacgcgcgtgaagagggcgtggagttccagttcaacatccagcctctgggtattgaggtgaatgccaacggtagagtgagcggcgtgaagatggcgcgcacggagatgggcgcgccggatgcgaaaggccgtcgtcgcgcggagatcgtggccggttctgaacacgtgatcccggctgacgccgtggtgatggcgtttggtttccgtcctcacagcatggagtggctggcgaagcacagcgtagagctggactctcagggccgcataattgcgccggaaggcagcgacaacgcgttccagaccagcaacccgaaaatcttcgccggtggcgacatcgttcgcggctctgacctggtggtgacggcgattgccgaaggccgtaaagcggctgacgggatcatgaacttcctggaagtgtaa

SEQ ID NO: 523057 - DNA, 4461 bp, Stenotrophomonas maltophilia
atgttgtacgataaatcccttgagaaggataactgtggtttcggcctgatcgcccacatagaaggcgaacctagccacaaggtagtgcgtactgctattcacgcactggcccgtatgcagcaccgtggcgccatccttgccgatggtaaaaccggcgacggttgcggtctgctgttgcaaaaaccggatcgtttcttccgcatcgtggcggaagagcgcggctggcgtttagccaaaaactacgctgtcggtatgctgttcctgaatcaggatcctgaaaaagctgccgcgtcacgccgcatcgttgaagaagaacttcagcgtgaaaccctgtcgattgtcggctggcgcgatgtgccaaccaacgaaggggtgctcggtgaaatcgccctctcctcgctgcctcgtattgaacagattttcgtcaacgcgcctgcgggctggcgtccgcgtgatatggaacgccgtctgtttattgcccgccgccgcattgaaaaacgtcttcaggacgataaagagttctacgtctgtagcctctctaacctggtgaacatctataaaggtctgtgcatgccggctgacctgccgcgcttctacctggacctggcggatctgcgtctggaatcggccatttgcctgttccaccagcgcttctccaccaacaccgttccacgctggccgctggctcagccgttccgctacctggcgcacaacggtgagatcaacaccatcaccggtaaccgccagtgggcccgcgcccgtacctataagttccagaccccgctgatcccggacctgcacgatgccgcgccgttcgtgaacgaaaccggctcggactccagctcaatggataacatgctggaactgctgctggcgggcggtatggatatcgtacgcgccatgcgtctgcttgtaccgccggcctggcagaacaacccggatatggaccctgagctgcgcgcgttctttgactttaactccatgcacatggagccgtgggatggcccggcaggcatcgttatgtccgacggacgttttgccgcctgtaacctggaccgtaacggtctgcgtccggcgcgctatgtcattaccaaagacaagctcatcacctgtgcctctgaagtgggtatctgggattaccagccagacgaagtggtcgagaaaggccgcgtcggaccgggtgagctgatggtgatcgacacccgcggtgggcgtattctgcactctgctgaaaccgacaacgatctgaagagccgccatccgtacaaagagtggatggagaaaaacgtgcgtcgtctggtgccgtttgaagatctgtcagacgaagaagtgggtagacgcgagctggacgatgacaccctcgcgagcttccagaagcagtttaactacagcgcggaagagctggactcggttattcgcgtgctcggcgaaaacggccaggaagcggtcggctcaatgggtgacgataccccgtttgctgtgctctccagccagccacgcattatttacgactatttccgtcagcagtttgcgcaagtcaccaacccgccaatcgatccgctgcgcgaagcccacgtcatgtcgctggccaccagcatcggccgtgagatgaacgtattctgtgaagccgaaggtcaggcgcaccgtctgacctttaaatcaccgatcctgctgtactccgatttcaaacagctcaccaccatgaccgaggagcactatcgcgccgacacgctcgatatcaccttcgacgtgaccgaaacgagcctcgaagagacggtgaacgcgctgtgcgacaaagccgagcagatggtgcgtaacggcaccgttctgctggtgctgtctgaccgcaacatcgcgaaaaaccgtctgccggtgcctgcacccatggcggtgggggctatccagacgcgtctggtggacaagagcctgcgctgcgatgccaacatcatcgttgaaactgcgagcgcgcgcgacccgcaccactttgcggtgctgttaggctttggcgccacggcgatctacccgtatctggcctacgaaacactggcccgcctggtggatacccgcgcgatcgacaaagactaccgtgctgtgatgctgaactaccgtaacggcatcaacaaaggtctgtacaagatcatgtccaaaatgggcatctcgaccatcgcctcttaccgctgctcgaagctgtttgaggcggtcggtctgcatgacgacgttgccaacctctgcttccagggcgtgatcagccgtattggtggcgcaggctttgctgacttccagcaggatctggtgaacctgtcgaaacgcgcctggctggcacgtaagccgctggaacagggcggtctgctgaaatacgttcacgggggtgagtatcacgcttataacccggacgtggtgcgcacactgcaacaggcggtgcaaagcggcgagtacagcgattatcagcagtatgctgatctggtgaacaaccgtccggcggcgacgctgcgcgatctcattgccctcaatccgggtgaggaagcggtcagcattgacgaggttgaacccgcatctgaactgttcaaacgtttcgataccgcggcgatgtccatcggcgcgctgagcccggaagcccacgaagcgctggcggaagccatgaacagcatcggcggcaactccaactccggcgaaggcggtgaagatcctgcccgttacggcaccaataaagtgtcccgtatcaagcaggtagcgtccggccgtttcggcgtaacgcctgcgtacctggttaacgccgacgtgatccagattaaggtcgcgcagggggcaaaaccgggtgaaggcggtcagctgccgggtgataaagtcaccccgtacatcgctaagcttcgctactcggtgccgggcgtgacgctgatctccccgccgccgcaccacgatatttactctatcgaggatctggcgcagctgattttcgacctgaaacaggtcaacccgaaagcgatgatctccgtgaagctggtttccgagccgggcgttggcaccatcgccaccggcgtggcgaaagcctatgcggatctgatcaccatcgccggctacgacggcggcaccggcgcaagcccgctctcctccgtaaaatacgcgggttgtccgtgggagcttggcctggtggaaacccagcaggcgctggtcgccaacggcctgcgtcacaagatccgtttgcaggtagacggcgggctgaaaaccggcctcgacatcatcaaagcggcgattctgggtgcggaaagcttcggcttcggtaccggcccgatggttgcgctcggctgtaaatacctgcgtatttgccacctgaataactgcgcaacgggcgttgctacccaggacgaaaagctgcgtaagaatcactatcacggcctcccgttcaaagtgactaactactttgacttcatcgcccgtgaaacccgcgagctgatggcgcagctgggcgtgaagcgtctggtggatctgattggccgtaccgacctgctgaaagagcttgagggcttcacggccaagcagcagaagctggagctgtctaagctgctggaaaccgctcagccgcatcctggcaaagcggtttactgcaccgagaacaacccgccgttcgacaacggcgtgctgaacgcgcagctgctgcaacaggcgaagccgtacgtggacgagaagcagagcaaaacgttctggtttgatatccgcaacaccgatcgttccgtgggtgcatccctctccggttacatcgcgcaaacgcacggtgaccagggcctggcatcggatccgattaccgcgcacttcagcggtaccgcgggtcagagcttcggtgtgtggaacgcgggcggcgttgagttatacctgaccggtgatgccaacgactacgtcggaaaaggcatggcgggcggtctgctggcggtgcgtcctccgcttggttcagccttccgcagccatgaagcaagcatcatcggcaatacctgtctgtacggtgcaaccggcggtcgtctgtttgccgcgggccgtgcgggcgagcgttttgcggtgcgtaactccggtgccatcaccgtggtggaaggcatcggcgataacggctgtgaatacatgacgggcggaattgtgtgcgtcctgggtaaaaccggcgtgaactttggcgcgggcatgacgggcggttttgcctacgtcctggatgaagacggtgagttccgcaaacgcgtgaacccggaactggtggaagtgctggacgttgatacgctggccatccacgaagaacacctgcgcggcttaattaccgaacacgtgcagcataccggttcttcgcgcggcgaagagatcctggccaactggccggcgttctctgcgaaatttgcgctggttaagccgaagtccagcgatgttaaagccctgttgggtcaccgtagtcgtagcgcagcagagctgcgcgtgcaggcgcagtaa

SEQ ID NO: 523058 - DNA, 984 bp, Stenotrophomonas maltophilia
atggcaggcttgtcccctttcttcgggacggtctatcagattatgcagttacagaaattagtcaatatgtttggtggggatcttttgcagcgctacggacaaaaggttcacaaactgacgctgcacggcggctttagctgtccgaaccgcgatggcaccatcgggcgtggtggctgcaccttctgtaacgtggcctcgtttgctgatgaagcccaacagcataaatctatcgctgaacagctcgcccatcagtcgagtctggtgaaccgcgcgaagcaatatctggcctatttccaggcctacaccagcacgtgggcggaggtgcaggtgctgcgcgctatgtatcaacaggcggttgctcaagcgaacattgtcgggctgtgcgtggggacgcgtccggactgcgtgccggacgccgtgctggatttacttagcgagtacaaagagaagggctacgagatctggctggagctgggcttgcagaccgcgcacgacaaaaccctgcaccgtatcaatcgcgggcatgattttgcctgctaccagcgcaccacgcgtctcgcccgcgagcgtggtttaaaagtctgctcgcatctgattgtcggcttgccgggagaagggcagcagcatggccttgaaacgctggaaaaagttgttgagaccggcgtggacggcattaagctgcacccgctgcatattgttacgggaagcattatggcgaaagcctgggaagcggggcgattaaatggtatcgaactcgacgactatacggtgacggcgggggagatgattcgccacacgccgccggagattgtttaccaccgcatctcggcaagcgcccgccgcccaacgcttctggcaccgctctggtgtgagaaccgctggacggggatgctggaaatcgaccgctatctacaggagaacggcgtacaggggtcggcgcttggccgcccgtgggttccaccgctaccggcgacggccgcctaa

SEQ ID NO: 523059 - DNA, 1503 bp, Stenotrophomonas maltophilia
atgagtacaccattgttaatcgccaggacgctggaaaaagagctgtttttactgcccgcgatggcgaaccgtcatggcctgatcaccggcgcgaccgggacgggaaaaaccgtcaccctgcaaaagctggctgagtcgttgtccgaggctggcgtgccggtttttatggctgacgtgaagggcgatttaaccggggtggctcaggaaggcacggcgtcagaaaaactgctcgagcgcctgaaaaatatcggcatcacggactggacgccgcacggtaatccagtggtggtctgggatatcttcggcgaaaaagggcatccggtgcgcgccaccgtctccgacctcggccctttgctgctggcccgtctgcttaatcttaacgacgtgcagtccggggtgctgaacattatcttccgtatcgccgacgatcagggcttactgctgctcgacttcaaagatctgcgcgccatcacccagtacattggcgataacgccaaatccttccagaaccagtacggcaatatcagcagcgcctcggtgggcgccattcagcgcgggctcctgacgctggagcaacagggcgccgagcatttctttggcgagccaatgctggatatcaaagactggatgcgcaccgatagcagcggcaaaggcatcatcaacattctgagcgcagagaagctctaccagatgccgaagctctacgccgccagcctgctgtggatgctctctgaactctacgaacaactgccggaagcaggcgatctggaaaaacccaaactggtgttcttctttgacgaagcgcacctgttgtttaacgacgcgccgcaggtgctgctggataaaattgaacaggttatccgcctgatccgctccaaaggcgtcggggtctggtttgtgtcgcaaaacccgtcggatattccggacaacgtactggggcaactgggtaaccgcgtgcagcacgccctgcgcgcctttacgccgaaagatcaaaaagcggtgaaagccgcggcgcaaaccatgcgtgccaatccggcctttgataccgaaaccgccattcaggcgctgggcaccggtgaagcgctgatttcgttcctcgatgcaaaaggcagcccgacagttgtcgagcgcgcgatggtgattgcgccctgctcgcgcatggggccagtaacggacgatgaacgcaacggcctgatcaaccactccccggtgtacgggaagtatgaagacgaggtggatcgcgaatccgcgttcgagatgctgcaaaaaggggtgcaggcgactgccgaatcgcagaatgcgcctgccgccaaagggcaatctgtagccgtggacgacggcattctcggcgggctgaaagatattctgttcggcagcaccgggccgcgcggcggtaaacgcgatggcgtggtgcaggccatggcaaaaagcgcgacgcgtcagattaccaaccagatagtgcgcggcatgctgggaagtctgttaggcggccgtcgccggtag

SEQ ID NO: 523060 - DNA, 1641 bp, Stenotrophomonas maltophilia
atgtccagattcttttttaacgaccgcaaacagcttgtcaacgatgccattgaaggcatacttctctccgcgccgcacggtaatctcgtcaaactggatatcgatccggccatccgcgtggtggcacgcggcgactgggataaaagccgcgtggcggtgatctccggtggcggctccggccatgaaccggcacatgccgggttcgtcggtaaaggcatgcttaccgcagcggtgtgtggcgatttgttcgcctccccaagcgtggatgcggtcctcaatgccattgtggcggtgacgggcgatcgtggctgcctgctgattgtgaaaaactacaccggcgaccggcttaactttggcctggcggcggaaaaagccaaacgctacggcctgaaggtggagatggttatcgtcgcggatgatattgccctgccggataacaagcagccgcgtggtatcgcgggaacggcgctggtgcataagattgcgggatatgcggcagagcaggggaaatcgctaaacgacgtgcgggatatagcgcaacaggcctgcgataacctctggagcctgggcgtggcgatgcaaacgtgcaacctgccgggcagcgatgatgaagaggggcgcataaaacaaggccatgtcgagctgggtttgggcattcacggcgagccgggagcttccgtcgtggatacgcaaaacagcaaagccattatcgacacgctggtgacgccgttacgcgcgcaggcgggggacgggcgctttgcggtgctgatcaacaacctcggcggcgtgtcagcgctggagatggctctgctcaccaaagagctggcgcattcggcgctgaaagagaacatagcgtatctgattggcccggcgccgctggtgagtgcgctggatatgaaagggttttcgctaacgctgttaaagctcagcgatttcttcgagaaggcgatacacgccgaggtcgagacgctgggctggcagaagcccgtcgcgttcgcgcccctgcgtaccgtcccccatagcgcccttcatgaccgcgtggaatataccccatcggacaatccgcaggtgagcgaggccgtcgcttcggtaacgaagacattgatccagctggaaaaccgcctcaacgcgctggatgccaaagtaggcgatggcgatacgggctccacctttgcgcaaggggcgcgggatattgcgcagcgacttgaggagaacaacctgccccttaacgacgtgccgacattactcctgctggtgggggagcggctggctacggtaatgggcgggtcgagcggggtgctgatgtcgatcttcttcacggcggcaggacaaaagcttcacgatggacagccgctaccagaagcattgttgagcggactggcgcagatgaagcagtatggcggtgcagatcttggggatcgcacgctgatcgacgccctgcaaccggcgctggaggcgttaagggatagcgatctgcggacggcggcgcaggctgcgcagcagggcgccgaagcaacggcaaaaatggcgaaagccggcgcgggacgctcgtcgtatgtcaataaagagaacctggatggggtgatggatccgggagcggtcgcggtggcagaagtacttaacgtattggcgcggcagtga

SEQ ID NO: 523061 - DNA, 1020 bp, Stenotrophomonas maltophilia
atgtcgaagataaaaagctacgccgcaccgcaggcgggtgcagaacttgagctgtacgagtacgatgcgggcgaactaaaagcggaagacgtcgaagtacaggtggattactgcgggatctgccattcagacctctcgatgatcgacaatgaatggggcttttccagctatccgctggttgccgggcacgaagtcattggccgcgtcgtggcgctcggcagcgccgcgcaggacaaagggctgaaagtgggccagcgcgtgggtatcggctggacggcacgcagctgcggccactgcgacgcctgtattagcggtaaccagatcaactgccttgagggcgctacgccgaccatcctgaacaagggtggtttcgccgataaactacgcgccgactggcaatgggttatcccgctgccggacagcattgatattgaatccgcaggtccgctgctgtgtggcggtatcaccgtatttaaaccgctgctgatgcatcacgtaactgccaccagccgcgtgggcgtgatcggtattggcgggctggggcatattgccatcaaactgctgcacgcgatgggctgtgaagtgacggcgttcagctcgaacccggcgaaagagcaggaagtgctggcgatgggtgcggataaagtggtgaacagtcgcgatcccgaggcgctcaccgccctggcaggccagtttgacctgatcatcaacaccgtcaacgtcgatctcgactggcagccgtactttgaagccctggcctacggcggtaacttccacaccgtgggtgcggtgatgaagccgctgccggttccggcgtttaccctgatcggcggcgatcgcagcgtatccggatctgctaccggcacgccatatgagttacgcaagctgatgaagtttgccggacgcacaaaagtggcacccaccaccgaactgtatccgatgtcaaaaatcaacgaagcaatccagcacgtgcgcgacggtaaagcccgctaccgcgtagtgttgaaagcggatttctga

SEQ ID NO: 523062 - DNA, 504 bp, Stenotrophomonas maltophilia
atgagcgtgattacccccgtcgcgacgacaatgcgtcggatcactgagcaggacaacccggctatcgccgccgttatccgcacggtatcggccgaatatggcctgaccgccgacaaaggctacactgtggccgatcccaatctggacgaactttttcagctgtacaaccagccgggccatgcctattgggtcatcgagcaggacggccaggtcgtgggcggcggcggcattgcccccctgctctgcagcgagccggatatctgtgaactccagaaaatgtatttcctgccaacgatacgcggacaaggcctggcgaaaaagctggcgctggtcgccctggaacatgcacgctcacagggctttaaacgttgctaccttgaaaccaccgctttccttaaagaggccattggcctgtatgagcatctgggctttgagcatatcgatgccccactgggctgcacgggccacgtggactgcgaagtcaggatgctgaaaagtctgtaa

SEQ ID NO: 523063 - DNA, 2856 bp, Stenotrophomonas maltophilia
atggaaaagacatataacccacgcgatatcgaacagccgctttacgagcactgggaacagcagggctatttcaagcctaacggcgacgaaagcaaagagtccttctgcatcatgatcccgccgccgaacgtcaccggcagtttgcatatggggcatgctttccagcagaccatcatggataccatgatccgctaccagcgtatgcagggtaaaaacaccctgtggcaggcggggactgaccacgcgggtatcgcgacccagatggtggttgagcgtaaaattgccgctgaagagggtaaaacccgccacgactacggtcgcgacgcgtttatcgacaaaatctggcagtggaaagcggaatccggcggcactattacccgtcagatgcgccgtctcggcaactccgtggactgggagcgtgagcgcttcaccatggacgaaggcctgtccaacgccgtgaaagaagtcttcgtgcgcctgtacaaagaagacctgatttaccgtggcaaacgcctggtcaactgggacccgaaactgcgtaccgccatctctgacctggaagtggaaaaccgcgagtctaaaggctccatgtggcacatccgctatccgctggccgacggtgcaaaaaccgcagacggtaaagattacctggtggtggcgaccacccgtccggaaaccctgctgggcgataccggcgtggccgttaacccggaagatccgcgctataaagatctgatcggcaaatttgtggtgctgccgctggtgaaccgccgtattccgattgtgggcgacgaacacgccgacatggaaaaaggcaccggctgcgtgaaaattaccccggcgcacgactttaacgactatgaagtcggtcgtcgtcatcaacttccgatgatcaacattctgaccttcgacggcgatatccgcgaaagcgcagaagtgtacgacaccaaaggcaacgaatccgacgtttattccagcgacatcccggctgagttccagaagctggagcgctttgccgcgcgtaaagccgtcgtagccgccgtggacgcgctcggcctgctggaagagattaaacctcacgatctgaccgtgccgtacggcgaccgtggcggcgtggttatcgagccaatgctgaccgaccagtggtacgtgcgtgccgacgtgctggcgaaaccggctgtggaagcggttgagaacggcagcattcagttcgtgccgaagcagtacgaaaacatgtacttctcctggatgcgcgatattcaggactggtgtatctcccgtcagctgtggtggggtcaccgtatcccggcgtggtacgacaatgaaggcaacgtctacgttggccgcaccgaagaggaagtgcgtcaggaaaacaacctgggcgctgacgttgcgctgcgccaggacgaagacgtgctggatacctggttctcttccgcgctgtggaccttctcgaccctcggctggccggaaaacaccgacgcgctgcgtcagttccacccaaccagcgtgatggtctccggcttcgacatcatcttcttctggatcgcccgcatgatcatgatgaccatgcacttcatcaaagacgaaaatggcaagccgcaggttccgttccataccgtttacatgaccggcctgatccgcgacgacgaaggccagaagatgtccaaatccaagggtaacgttatcgacccgctggacatggttgatggtatctctctggaagagctgctggaaaaacgtaccggcaacatgatgcagccgcagctggcggagaaaatccgcaagcgtaccgagaagcagttcccgaacgggatcgaatctcacggtaccgacgccctgcgcttcaccctggcggcgctggcctccaccggtcgtgacatcaactgggatatgaagcgtctcgaaggttaccgtaacttctgtaacaagctgtggaacgccagccgcttcgtgctgatgaacaccgaagatcaggattgcggctttaacggcggcgaaatgaccctgtctctggcagaccgctggatcctggcggaatttaaccagacggtgaaatcgttccgcgacgcgctggacagctaccgcttcgacatcgcggcaggcatcctgtacgaattcacctggaaccagttctgtgactggtatctggagctggcgaagccggtcatgaacggcggcactgaggcggagctgcgcggtacgcgtaatacgctgattaccgtcctggaaggtctgctgcgccttgcgcacccgatcattccgttcatcaccgaaaccatctggcagcgcgtgaaggtaattgccggtataaacgccgataccatcatgctccagccgttcccagcattcgatgccgcgaaagtggatgaagccgcgtctgcggataccgagtggctgaaacaggcgatcgttgcggtacgtaacatccgcgcggaaatgaacatcgctccgggtaaaccactggagctgctgctgcgcggttgcagcgaagctgccgttcgtcgcgtcaccgagaacaacaccttcctgaaaaccatggcgcgtctggaaagcatcaccgtgctgcctgccgatgataaaggtccggtttccgtgaccaaaattatcgacggcgcggagctgttgatcccgatggcgggcctgatcgacaaagacgctgagctggctcgtctggcgaaagaagtggcgaaagtcgacgtggaaatcggcaaaatcgaaagcaaactggcgaacgaaggctttgtggcccgcgcgccggaagcggtcatcgccaaagagcgtgagcgtctggttgccttcgccgatgcgaagaccaaactgatcgagcagcaggcggttatcgcagccctgtaa

SEQ ID NO: 523064 - DNA, 444 bp, Stenotrophomonas maltophilia
atgaagaatgcaacgttctaccttctggacaatgacacccatcaggatggcctcagcgccgttgaacaactggtgtgtgaaattgccgcagaacgttggcgcgcaggtaaacgcgtcctgattgcctgtgaagatgagcagcaggcgattcgtctggatgaagcgctatgggcgcgcccgccggagagttttgttccgcataacctgtcgggcgaaggtccacgcggcggggcaccggtggagattgcctggccgcaaaaacgcaacagcagcgcgcgcgacattctcattagcctgcggacagactttgcagattttgccaccgctttcacagaagtggtagactttgtcccttacgaagaatctttgaaacagctggcgcgcgaacgctacaaagcgtaccgcctggccggttttaacctgaatacggcaacctggaaataa

SEQ ID NO: 523065 - DNA, 1512 bp, Stenotrophomonas maltophilia
atggagttcagtgtaaaaagcggtagcccggagaaacagcggagtgcctgcatcgttgtgggcgtctttgaaccacgccgactctccccgatcgccgagcaactcgataaaatcagcgacggctatatcagcgccctgctgcgccgtggcgaactggaaggcaaaccagggcagaccctgttgctgcaccacgttccaaacgtcctgtccgagcgtattctgctgattggctgcggtaaagaacgtgagcttgatgagcgccagtacaagcaggttattcagaaaaccattaatacactgaatgatactggttcgatggaagccgtctgcttcctcacggagctgcacgttaagggccgcaacacgtactggaaagtacgccaggccgtcgaaaccgcaaaagagagcctctacagctttgatcagttgaagaccaccaaaagcgagccgcgtcgcccgctgcgtaaaatggtctttaacgtgccgacccgtcgcgagctgaccagcggcgagcgcgccattcagcacggtctggcgattgctgccggtattaaagcggcaaaagatcttggcaatatgccaccaaacatctgtaacgccgcgtacctggcgtcacaggcgcgccagctggctgacgcctacagcaagaacgtcatcacccgcgttatcggcgaacagcagatgaaagagctggggatgcactcttatctggcggtcggtaacggctcccagaacgaatccctgatgtcggtcatcgaatacaaaggcaatccgtctgaagacgcgcgtccgatcgtactcgttggcaaagggctgaccttcgactccggcggtatctccatcaagccttcagaaggcatggatgagatgaagtacgacatgtgtggcgcggcggcggtttacggcgtcatgcgcatggtcgcggaacttcagttgcccatcaacgtgatcggcgtgctggcgggctgcgaaaacatgcctggcggccgcgcttatcgcccgggtgatgtgctgactaccatgtccggccagaccgttgaagtgctgaacaccgacgccgaaggccgtctggtgctgtgcgacgtgctgacctacgttgagcgtttcgaacctgaagcggttatcgacgtagctaccctgaccggcgcctgcgtgattgcgctggggcatcacatcaccggcctgatgtcgaaccacaatccgctggcgcatgagctgatcggcgcgtccgagcaggctggcgaccgcgcgtggcgtctgccgctgggggacgagttccaggaacagctggagtctaacttcgcggacatggcgaacattggtggccgtcctggcggcgcaattaccgcaggctgcttcctggcgcgcttcacccgcaagtacaactgggcgcacctggacattgcggggaccgcatggcgctccggtaaagccaaaggcgcgaccggacgtccggtggcgctgctgtcgcagttcctgctcaatcgcgcgggttttaacggcgacgagtga

SEQ ID NO: 523066 - DNA, 1101 bp, Stenotrophomonas maltophilia
gtgataatcataagatatctggttcgggagacgctgaagagccaactggcgatcctctttatcctccttctgatctttttctgtcagaagctggtcaggatcctcggcgcggcagttgatggcgaaatcccaacgaatctggtgctttccctgctcgggcttggcgtgccggaaatggcgcagcttatcctgccgttaagcctgttccttggtctgctgatgaccctgggtaagctctataccgaaagtgaaatcaccgtgatgcatgcctgcggcctcagtaaggccgtattggtaaaggcagccatggtgctggcgctgtttacgggcattgttgccgcggttaacgtcatgtgggcggggccgacctcgtcccgtcatcaggatgaggtgctggcggaagcaaaagctaacccggggctggcggcgctggcgcaggggcagttccagcaggcgaccgacggtaactccgtgctgtttatcgaaagcgtcgatggcagccgcttcaatgacgtgtttcttgctcaactgcgcccgaaaggtaacgcgcgcccttctgtggtagtggcggattccggtcagctggcgcagcgtaaagacggctctcaggttgtcacgctgaacaaaggaacgcgtttcgaaggcacggctatgctgcgtgacttccgtatcacagatttccagaactaccaggccatcattggtcatcaggccgtcgcgctcgatccaacggatactgagcagatggatatgcgcaccttaatgaatactgataccgatcgtgcgcgtgctgaactgcactggcgtatcacgctggtattcaccgtatttatgatggcgctgatggtggttccgctgagcgtggtaaacccgcgccagggccgcgtgctgtcgatgctgccagcgatgctgctgtatctggtgttcttcctgctgcaaacctcaatcaagtctaacggcgggaaaggaaaaattgacccgatgatctggacctgggtcgtgaatggtttgtatctgctgctggcagtcggactcaacttgtgggacacggtgcctgtgcgtcgtcttcgtgcccggtttacgcgtaaaggagccatctaa

SEQ ID NO: 523067 - DNA, 1083 bp, Stenotrophomonas maltophilia
atgcaggcgtttggcgtacttgaccgctatatcggtaaaacaatttttaccaccatcatgatgaccctgttcatgctggtgtcgctctcgggcattatcaaatttgtcgaccagctgaaaaaagccgggcaggggagttacgacgcgttgggcgccgggatgtacaccctgctcagcgtaccaaaagatgtgcagatcttcttcccgatggcggccctgctgggtgcgctgctgggcctggggatgctggctcagcgtagcgaactggtggtgatgcaggcatcgggctttacccgtatgcaggttgcgctgtcggtgatgaaaaccgcgatcccgctggtgctgctgaccatggcgatcggcgaatgggtcgcgccgcagggcgaacagatggcgcgtaactaccgtgctcaggcgatgtacggcggttctctgctctccacgcagcagggattatgggcgaaagatggccagaacttcgtctatatcgaacgcgtgaaaggggatgacgagctgggtggcgtgagtatctatgctttcaataacgatcgtcgtttgcagtcagtgcgttatgccgcctctgctaaatttgatgcaaacaacaagctgtggcggttatcccaggttgatgaatctgacctgactaacccgaaacagatcaccggttcgcagaccgttagcggtacctggaaaaccgacctgacgccggacaagctcggcgtcgtggcgcttgaccccgatgcgctctccatcagcggtctgcataactacgtgaagtatctgaaatcgagcgggcaggatgcggggcgttaccagctcaacatgtggagcaaaatcttccagccgctgtccgtggcggtgatgatgctgatggcgctgtcgttcatctttggaccgctacgtagcgtgccgatgggggttcgcgtggtaaccggtatcagctttggcttcgtgttctacgtcctcgatcagatttttggtccgctgacgctggtgtatggcattccgccaattatcggcgcgctgttgccgagcgccagtttcttcctgatcagcctctggatgctgctaaaacgctcctga

SEQ ID NO: 523068 - DNA, 2334 bp, Stenotrophomonas maltophilia
atgaagcaaattcgaatgctggcccagtactacgttgacctgatgatgaagctcgggctggtgcgtttttccatgctgctggcgctggcgctggtcgttctggccatcgtcgtgcaaatggccgtgaccatggttctgcatggtcaggtcgagagcatcgacgtgatccgctctattttctttggcctgctgatcaccccatgggcggtctatttcctctccgtggtggttgagcagctggaagagtcccgacagcgtttatcgaaactggtggataagctggaagagatgcgcgagcgcgatcttaaactcaacgttcagctcaaggacaacattgcccagctgaatcaggaaatttcagaccgtgagaaggcggaagccgagcgtcagaccacgctggagcagctgaaaattgagatgaaagagcgtgaggtcacgcagatccagcttgaacagcaatcctctttcctgcgctcgttcctcgatgcgtcgccggatctggtgttctaccgtaatgaagataaagagttctccggctgtaaccgggccatggaactgttgaccgggaaaagcgaaaagcagctgatccacctgaaacctcaggatgtctattccgaagaggcggcggcaaaagtgatggagacggatgaaaaggtcttccgtcataacgtctcgttgacctatgagcagtggctggattatcccgacgggcgcaaagcctgctttgagatccgcaaagtgccttattacgaccgggtgggtaaacgtcatggtctgatgggctttggccgtgatatcaccgagcgtaagcgatatcaggatgcgctggagcgcgccagtcgtgacaagaccaccttcatctccaccatcagccatgagcttcgtacgccgctaaacggtatcgtggggctgagccgtattctgctggataccgacttgaccagcgagcaggaaaaatacctcaaaacgatccacgtttcggcggtcacgctgggcaatatcttcaatgatattatcgacatggataagatggagcgccgtaaggttcagctcgacaaccagccggttgattttaccggcttcctcgcggacctggagaacctgtcaggtttgcaggcccagcagaaaggactgagcttcgtgatggaaccgacgctgccgctgccgcataaagtggtgacggacggcacgcgtctgcgtcagatcctgtggaatctcatcagcaacgccgtgaagtttacccagaagggacaggttgctgtgcgcattcgctatgatgagggggacatgctgcactttgaagttgaggactcgggtatcggcattcctcaggatgagcaggataagatcttcgccatgtattatcaggttaaagacagccacggcggtaaaccggcgaccggcacgggcattggcctggcggtgtcgaaacgtctggcgaaaagtatgggtggggatatcaccgttgccagccagccgggtaaaggctccacctttacgcttaccgtccacgcccctgctgttgctgaagaagtggaagatacgtttgagaacgacgatatgccgcttccagccctccacgtcctgctggttgaagatattgagctgaacgtcattgtcgcccggtcggtactggaaaaactcggtaacagcgtggatgtcgcgatgaccggcaaagccgcgctggagatgttcacgccgggcgagtacgacctggtgctgctcgatattcagctaccggacatgaccgggctggatatctcccgcgagctgacgcgcaaatatgctcctgacgggctgccgccgctggttgcgttgaccgcaaacgtgctgaaagataaaaaagagtacctcgaggccggtatggacgacgtgctcagcaagccgctggcagtacctgccctgacggcgatgatcaagaagttctgggatacctgtgatgaagaggagagcaccatgacgtctgttgatagcgctaaaacccaaacgatactggataccgccatgctggagcagtatatcgatctggtgggacccaaactgataaccgatggcctggccgtgttcgaaaaaatgatgccgggctatctgaacgtgctcgaatccaacctgacggcgcgtgaccagaagggcatcgtcgaagagggacataaaatcaaaggcgcagctggttcagtcgggttacgccatctccagcaattgggccaacagattcagtcgcctgatttacctgcctgggaagataatgtaggtgattgggttgaagagatgaaacaagagtggcaaaacgatgtggcagtgctgaaagcctgggtagaatcccgaaaaaaatga

SEQ ID NO: 523069 - DNA, 654 bp, Stenotrophomonas maltophilia
atgaagaaagtgggtgtcgtgctgagcggatgtggcgtttacgatggttcagagatacatgaaaccgtattaacgctgctggcattatcgcgtcagggggccgacgttatctgcttcgctccggataaaacgcaggcagacgtggttaatcatcttaccggcgagccaatggcggaaagccgtaacgtgctgattgaagcggcacgtattgtgcgcggggatattcatccgctggtacaggccgatgcggctgagctagatgcgctcatcgtgccgggcggctttggcgcggcgaaaaacctgagcacgtttgcaacgcaaggcgcggcgtgtcaggtcgagcccgacttaaaagcgctatcgctggcgatgcatgcggcaggtaagccgcagggctttatctgcattgcgccagccatgctgccgaagatttttgatttcccgctgcggctcacgatcggaaccgacattgatactgctgaaattgtcgaagatatgggcggcgaacatgtgccatgtccggtagacgacattgtggtggatgaggacaataaaatcgtcacctcgccggcgtatatgctggcgcagaacattgccgaggctgctgcaggcattgaaaagctggtggacagagtgctggttcttaccgaatga

SEQ ID NO: 523070 - DNA, 726 bp, Stenotrophomonas maltophilia
atgagccgtaaattatcccctggcgggtggttaaaacggatcctgctgcgtattgtgctggtcctggccgttttttggggcggaggcattgcgctgttcagcatcctgcccgtcccgttctcggccgtgatggcagagcggcagattagcgcctggctctcgggtgattttggctatgttgcccactcagactgggtcggcatggatgaaatctccccgtggatggggctggcggtcattgcggcagaagatcagaaattcccggagcactggggttttgacgtggcggctatcgagaaggcgctggatcataatgaacgtcatgaaaaccgcgtccgcggtgcgtcgacgctttcccagcagacggtaaaaaacctgttcttatgggacggtcgcagctgggtgagaaaagggctggaggccgggctgacgctgggcgtcgagacggtgtggagcaaaaaacgcattttgactgtttacctgaatatcgcggagtttggtgacggcgtgtttggcgtcgaagcggcatcgcagcgctattttggcaagcccgccagcaggctgactatgtccgaagcggcactgcttgccgccgtgctgccgaacccgctgcgttttaaggccagcgcgccgtcaggctacgtgcgaagccgccaggcgtggattatgcgccagatgcgtcagctgggtggggaagggtttatggagcgaaataatcttatgtaa

SEQ ID NO: 523071 - DNA, 273 bp, Stenotrophomonas maltophilia
atgaccgtaaaacagaccgtcgaaatcaccaataagctgggcatgcatgcgcgcccggcgatgaagctgtttgaactgatgcagggttttgatgctgaggtgctgctgcgcaacgatgagggaaccgaggcagaagccaacagcgtgattgcgctgctgatgctggattctgccaaaggccgccagattgaagttgaagccaccggcccgcaggaagaagaagcgctggcggcagtgattgccctgtttaacgccgggtttgacgaagattaa

SEQ ID NO: 523072 - DNA, 855 bp, Stenotrophomonas maltophilia
atggtgctgatgatcgtcagcggtcgttcggggtccgggaagtccgtggccctgcgcgcgctggaagacatgggattttactgcgtagataacctgccggtagtgctgttacccgatctggcgcggacgctggcggacaggcaaatctctgccgccgtcagtattgacgtgcgtaacatgccggaatcgccggaaatcttcgagcaggcaatgaacagcctgccggagtgcttctcgcctcagctcttgttcctggatgctgaccgcaacacgctgatccgccgttacagcgatacacgtcgtttgcacccgctctcgagtaaaaatctttcgctggaaagcgccatcgataaagagagcgatctgcttgagccgctgcgttcccgggccgacctgattgtcgacacttcagaaatgtccgtccacgagctggcggaaatgctgcgtactcgcttactcggcaagcgcgagcgcgaactgacgatggtgtttgaatccttcggctttaagcacggtatccctatcgatgcggattacgtttttgatgtgcgtttcctgccgaacccacactgggatccgaaactgcgtccgatgaccggtctggataagccggtggcggcgttcctcgaccgacacacagaagtacacaattttatctaccagacgcgaagctaccttgagctatggttacctatgctggagacaaacaatcgtagctacctgacggtggcgattggctgtaccggcggtaaacatcgttcggtctacattgccgaacagctggccgattacttccgctcacgcgggaagaacgttcagtcccgtcatcgcacgctggaaaaacgcaaaacatga

SEQ ID NO: 523073 - DNA, 492 bp, Stenotrophomonas maltophilia
atgataaacaacgattccgctcttcaactgagcaatgtccttaaccaggattgtacccgcagtggcgttcactgccagagcaaaaaacgtgcgctggaaatcatcagtgagctggccgcaaaacagctgggtctgccgccgcagatcgtgtttgaagccattctgacccgtgaaaaaatgggcagtaccggcatcggcaatggcattgcgatcccgcatggcaagctggaagaagatacgctgcgtgccgtgggggtgtttgtgcaactggaaacgcctatcgcttttgacgccatcgataaccagcctgtggatctgctcttcgcgctgctggttcctgccgatcagaccaaaacccacctgcacacgctgtcgctggttgccaaacgtctggcggataaaaccatttgtcgtcgactgcgctcagctcaaagtgatgaagagctttatcaaattatcactgaagcagaaggcaatcaggatgaggcataa

SEQ ID NO: 523074 - DNA, 288 bp, Stenotrophomonas maltophilia
atgcagctcaatatcaccggacataacgtcgaaattactgaggctttacgcgattttgtaaacgctaagttcgcgaaactcgagcagtatttcgagaggatcaaccaggtctatgttgtgttgaaagtggagaaagtgacgcatatctcggatgcgaccctgcacgtcaacggaggggaacttcatgccagtgcggaagggcaagacatgtacgcggctatcgacggcttgattgataagcttgcgagacagctcaataaacataaagataaactgaaacaacactaa

SEQ ID NO: 523075 - DNA, 1434 bp, Stenotrophomonas maltophilia
atgaagcaaggtttgcaattacggctcagccagcaactggccatgacgccgcagctacaacaggcaatccgtctgttgcagctgtccacgttagaactccagcaggagctccagcaggcgctggacagcaatccgctgctggagcaaaccgatcttcatgacgaggtagacgctcagcagacgcaggacacagaaacgctcgactccgtagatgcgctcgaacagaaagagatgccggaggaactgccgctggatgccagctgggatgaaatctacaccgcgggtaccccttccgggacgcgtgcagattaccaggacgatgaactcccggtctaccagggcgaaactacccagtcgcttcaggactacctgatgtggcaggtggagctgacgcctttctccgataccgatcgcgccattgccacctcgattgtcgatgccgttgacgacacgggctatttgaccgtgacgctggacgagattctggaaagcatcggcgatgacgagattgaactggaagagatcgaagccgtcctgaaacgcgttcagcgtttcgacccgattggcgttgctgcgaaagatctgcgcgactgccttctgatccagctttcgcagtttgccaaagagacaccgtggattgacgaagcccggctcatcatcagcgagcatctggatttgctggcaaatcacgacttccgcaccctgatgcgcgtcacgcgcctcaaagaagaggtgctgaaggaagcggtgaatctgatccagtcactcgatccgcgtccggggcaatcgatccagaccagcgaaccggaatacgttattcctgatgtgctggtgagaaaacacaatggccgctgggtcgttgaactgaacgccgacagcattcctcgcctgcaaatcaaccagcaatacgcctccatgtgcaccagcgcccgtaacgacgctgataatcaatacattcgcagcaaccttcaggaagcacgctggttgattaagagtctggaaagccgtaatgacacgctgctgcgcgtcagccgctgtattgtcgaacagcagcaggcattctttgagcagggcgaagagtttatgaaaccgatggtgctggcggacatcgcccaggccgtcgagatgcatgaatcaaccatttcccgcgtgaccacgcagaagtatctgcacagcccacgcggtatttttgagcttaagtatttcttctccagccacgtgaacaccgaaggcggcggcgaagcctcgtcaacggctattcgcgcactggtgaagaagttgatcgccgcggagaaccccgcgaagccactcagtgacagtaagttaaccaccatgctgtccgatcagggtattatggtggcacgccgtactgtcgcgaagtatcgagagtctttatccattccgccgtctaaccagcgtaaacaactggtttga

SEQ ID NO: 523076 - DNA, 726 bp, Stenotrophomonas maltophilia
atggcaactttaactgcaaaaaacctcgcgaaagcgtataagggccgccgcgtcgtcgaagatgtcagtctgaccgtcaactccggcgaaatcgtgggtttgcttggccctaacggggcgggtaaaaccacgaccttctacatggtggtgggcatcgtcccgcgtgacgccggcaacatcatcatcgatgatgaagatatcagtctgctgccactgcatgcccgcgcgcgtcgtggcatcggctatctgccgcaggaagcctccatcttccgccgcttaagcgtgttcgacaacctgatggccgtgcttcagatccgtgacgatctgaccagcgagcagcgcactgaccgtgcgaacgagctgatggaagagtttcatatcgaacatctgcgtgacagcctcggtcaggcgctgtccggtggtgaacgccgccgcgttgagattgcgcgcgcgctggcagcaaacccgaaatttatcctgctggatgaaccgtttgcgggcgttgaccccatctccgttatcgatatcaaacgtattattgagcacctgcgcgacagcgggcttggcgtactgatcacggaccacaacgttcgtgaaacgctggccgtgtgtgagcgcgcctacatagtgagccagggccatctgattgcccacggcacgccacagcaaatcctcgaagatgagcatgttaagcgcgtgtaccttggggaagacttcagactctga

SEQ ID NO: 523077 - DNA, 555 bp, Stenotrophomonas maltophilia
atgaaattcaaaacaaacaaactcagccttaaagttgttatcgccagcgcgctgctggcggccagtcttcccgcgcttgctgtgactggcgataccgaacagccgattcatattgaatccgatacccagtctctggatatgcagggtaacgtcgtcacctttaccggcaacgtggtcatgacccagggcaccatcaaaatcaacgccgacaaagtggtcgttacccgaccgggcggcgagcagggcaaagagattatcgatggttatggcaacccggccaccttctaccagatgcaggacaacggcaagccggtgaaaggccatgcctcgcatatgcactatgaactggcgaaggatctggtcatcctgaccggtaatgcttacctggaacagctggacagcaatatcaaaggcgacaaaatcacttatctggtgaaagagcagaaaatgcaggcctccagtgaaaaaggcaaacgcgtcacgaccgttcttgtgccttcgcaattgcaggacaagaacaacggccaggctccggcacagaaaaagagtaactaa

SEQ ID NO: 523078 - DNA, 576 bp, Stenotrophomonas maltophilia
atgagtaaaaccagacgttgggttatcattctgcttgcgcttgtcgccctggtactgattggcgtaaacctcgctgaccgcgaagatacgcaagcggaagtggttaacacgagcgacccgacctataaaagcgatcacagcgacaccgtggtctatagcccggaaggtgcgctgaactatcgcctcgttgctcagcatgtagaatatttttcagatgacggtacttcgtggtttacccaaccggtcatgaccacctttgatacggacaaagtgccgacgtggtctatcaagtctgaccgggcaaaactgacaaatgaccgtatgctttacctgtatggtcacgttgaagtcaacgccctgaccgctgacgcgcaactgcgaaaaattacgacggataacgcccagatcaacctggtcacccaggatgtcacgtcgcaggatttagtcaccctgtatggcacaacatttaattccagcggtttaagaatgcgcgggaacttacgcagcaaaaacgccgagctgattgaaaaggttagaacctcctatgaaattcaaaacaaacaaactcagccttaa

SEQ ID NO: 523079 - DNA, 567 bp, Stenotrophomonas maltophilia
atgagtaatgcgggtgcatcccttgcaacctgttatggcccggtgagcgcccacatgatggcaaaggcggaaaatatccgcctgctgatcctcgatgtggatggtgtgctctccgacggtctgatttatatgggcaataacggcgaagagctgaaagcctttaacgttcgcgacggttacggtatccgctgtgcgctcacgtccggtattgaagttgcaatcatcaccgggcggaaagctaaactggtagaagatcggtgtgaaacgctgggcattacccatctctatcaggggcagtctgataagatggtagccttccgggatctgttgggaaaactggccattgcaccagagaatgtggcatacgtcggggatgatttgatcgactggccagtcatggcggaggtgggtctgagcatcgccgtggctgacgcgcacccgctgctgatcccgcgtgctgattacgttacccatattcacggtggccgcggcgccgtccgtgaagtctgcgatctgcttctgctggcgcagggcaagcttgatgaggcgaaagggcaatcgatatga

SEQ ID NO: 523080 - DNA, 987 bp, Stenotrophomonas maltophilia
atgtcgcaaatagaattgcagccgggttttgactttcagaaagcaggcaaagacgttctggagattgaacgtgaaggtctggcgcagttagatcagtacattaatcaggattttagtttggcctgtgagaagatgttctactgcgccggtaaagtcgtggtgatgggaatgggcaaatccggccatatcgggcgcaaaatggcggcgacctttgccagtaccggcacgtcgtcattcttcgttcatcccggtgaagccgcgcacggtgacctcggcatggttacgccgcaggacgtggttatcgcgctgtccaactccggggaatcgaatgaaatcctggcgttgatcccggtgctgaagcgtctgcacgtaccgctgatttgcatgaccagccgcccggaaagcagcatggcgcgtgcggcagatattcacctgtgcgtgaaggtgcctaaagaagcctgtccgctggggctggcgccgacctccagcacaaccgccgcgctggtgatgggcgatgcccttgccgttgcgctgctggaagcccgcggttttacgcctgaagatttcgctctgtctcaccccggcggcgcgctcgggcgcaaactgctgctgcgggtcaacgatattatgcacaccggggatgagatcccgcacgtcagcaaagaggcctctttgcgcgacgcgttactggagattacccgtaaaaacctgggcatgacggttatctgcgacgatctgatgaaaattcagggcattttcaccgacggcgacctgcgccgggtattcgatatgggtgtggatgtccgaacgctgggcatcgctgatgtaatgacaccaggcgggatccgcgtccgtccgggcacgctggcggtagatgtactgaacctgatgcagtcccgtcatattacctcagtgatggttgccgatggcgaccaactgctgggtgtggtacatatgcatgatctgctgcgcgctggcgtagtgtaa

SEQ ID NO: 523081 - DNA, 978 bp, Stenotrophomonas maltophilia
atgcttttagcaacagcactgttaataattggtttactgttggtggtctacagtgctgaccgtttggtctttgccgcatccattctctgtcgactcattggcatgccgcccatcattattgggatgacggtggtcagtgtaggcacatcgcttcctgaaatcattgtttctgtttcagcctcgttgcatggccaggtcgacctcgctattggcactgcgattggctctaacatcgtaaatatcttgctgattttaggcttagccgcattactgcatccatttcgcgtacattccgatgttttgcgtcgtgaattgccgctaatgttagtcgtcagtctgctggcaggctatgtgctttatgacggggtgctgagcgtcggtgacggtatattcctgctcgccctggccgtgatctggttgctttacagcgtgaagatcgcacgtctggcggaaaaacagggtaacgatagcctcacgcgtgagcatctcgccgaactgccacgggaagggaccttacccgtcgccctgctgtggctgggcgtcgcgctgattataatgccaatggccacgcggatggtggtcgataacgcgacggtgctggcgaacgcgtttgcgatgagcgaactgacaatcggtctgacggtcatcgccatcggcaccagcctgccagagctggctaccgccatcgccggggcgcgtaaaggggaagatgatatcgccatcggcaatatcattggctcgaatattttcaatatcgcgatcgtgacggggctgccggcattaatctcaccggggccgtttaaccctatggtcttcacgcgcgattacggtgtgatgctactggtcagcgtaattttcgccctgctctgctggcggcgaaaagagcagatcggcaaaggcgcgggcgcgctgctgacgggtggatttatcgtatggctggcgatgctgtactggctctcgccacttctctctgggtaa

SEQ ID NO: 523082 - DNA, 813 bp, Stenotrophomonas maltophilia
atgagccaaacgatggcgaatatagtcgatgtccggggcgtcagtttttctcgcggcaaccgggtgatatttgatgatatttcgctgaccgtgccgcgcggtaaaatcaccgccatcatggggccgtcagggatcggtaaaacgacgttgctgcgtcttatcggcgggcaaatcccccctgatagcggcgaaattctcttcgacggtgaaaacgtcccggagatgtctcgctcgcgcctctacacggttcgcaaacggatgagcatgctctttcagtcgggtgcgctgttcaccgatatgaacgtatttgacaacgtggcctatccgctgcgtgagcatacccatcttcctcctgcgctgttgcacagcacggtgatgatgaagctcgaagccgtggggttgcggggggctgcgaaacttatgccgtccgaactctcgggtgggatggcgcgccgcgccgcgctggcgcgtgctattgccctggaacccgatttaatcatgttcgatgaaccgttcgttgggcaggaccctatcaccatgggcgtgctggtgaagttaatctcggagctgaacagcgcccttggcgtcacctgcgtggtggtttcccacgacgtgccggaagtgctgagcattgctgattacgcctatattgtggctgacaaaaagatcgtcgcccacggcagcgctcaggcgttgcaggagaatggcgatccgcgcgtgcggcagttcctggacggtatcgcagatgggccggtgcctttccgctatccggcgggcgactatcatgacgatttactgggaatagggagttaa

SEQ ID NO: 523083 - DNA, 783 bp, Stenotrophomonas maltophilia
atgctgttaaatgcgttggcgggtcttggacaccgtggcctaaaaaccatcagtacgttcgggcgtgccggattaatgttgttcaacgcgctggttggcaaaccggagttccgcaagcatgcgccgttactggtgcggcagctttataacgtcggcgtgctgtcgatgcttatcatcatcgtgtcgggtctgtttattggcatggtgctggggttgcaggggtatctggtgctgacaacctacagcgcggaaaccagccttggcatgctggtggcgctctcgctgctgcgtgaactcgggccggttgtagcagcgctgctgttcgccgggcgtgccggatcagcgctgacggctgaaattggcctgatgcgcgccacagagcagctctccagtatggagatgatggcggtcgatccgctgcgccgggtgatctcgccgcgcttctgggccggggttatctccttgccgttactgactatcctctttgtggcggtaggtatctggggaggcgcgctggttggcgtcaactggaaaggcattgatgccgggttcttctggtctgccatgcaggacgccatcgatctgcggatggatctggtgaactgtctgatcaagagcgtggttttcgctgtgacggttacctggattgcgttgtttaatggttacgatgccattccgacgtcggcgggcattagccgtgcaacgacgcgtactgtcgtacattcgtcgctggccgttttaggtctggattttgtgctcaccgcactgatgtttgggaattga

SEQ ID NO: 523084 - DNA, 549 bp, Stenotrophomonas maltophilia
atgcaaacgagaaaaaatgaaatttgggttggcgtgtttttgcttctggcgctgctggccgcgctgtttatctgcctgcgcgcggcggacatcacctctgttcgcaccgagccgacgtatcgcgtctacgcgactttcgataatatcggcggcctgaaggcgcgctcaccggtccgtattggtggcgtcgttattggacgtgtcgctgacattacgcttgatgagaaaacctatctgccgcgcgtcgcaatggatatcgaagaacgctataaccacattccggacaccagctcgctctctatccgcacctctggcctgctgggggagcaatatctggcccttaacgttggttttgaagatcctgagctgggaacgtctatccttaaagacggtagcgtaatccaggataccaagtcagcgatggtgctggaagatatgattggtcagttcctttacaacagtaaaggggatgataaaaagtctgacgatgcccctgcgcagagtgaagaccacaccaacgtcgaaccgacgccaggcgcgacgaattaa

SEQ ID NO: 523085 - DNA, 636 bp, Stenotrophomonas maltophilia
atgtttaaacgactgttaatggttgccatgctggtcattgcccctctaaccgcggcgcacgctgcggatcagagtaacccgtacaaactgatggatgaggccgcgaagaaaaccttcgaccgtcttaaaaacgaacagccaaaaatccgcgctaaccctgattatctgcgtgatgtggtggatcaggaactgctgccgtatgtgcagatcaagtacgcgggcgcactggtgctgggccgttactacaaagacgcgaccccggcgcagcgcgaggcttactttgcggcgttccgtgaatacctgaaacaggcttacggccaggcgctggcgatgtaccacgggcagacctatcagattgctcctgaacagccgctgggcgatgccaccatcattcctatccgcgtgacgattatcgatccaaacggtcgtccaccggtacgcctggacttccagtggcgtaaaaacagccagaccggaaactggcaggcgtacgacatgatcgctgaaggcgtcagcatgatcaccactaaacagaacgagtggagcgatctgctgcgcaccaaaggcatcgatggcctgacggctcagcttcagtccatctctcgtcagaaaattaccctggacgagaagaagtaa

SEQ ID NO: 523086 - DNA, 294 bp, Stenotrophomonas maltophilia
atgtcacagcagcttagctgggcgcgtgacggcgagacgttgacgctgacgggagagctggatcaggatctgcttaacccgctgtgggacgctcgccataacgcgatgcagggcgtgacgttgattgatctccatggcgtcacgcgggtagataccgccggtatcgccctgctggcgcacctggtggccacgggcaaaaagcaggggagtagcgtcaccctgacgggggtaagcgataatgtcgtaacccttgcacagctttacaatttgcctgaagacgtattacctcgctaa

SEQ ID NO: 523087 - DNA, 255 bp, Stenotrophomonas maltophilia
atggaaaataatgaaatccagacagtgctgatgaatgcactctcccttcaggaagcccacgtctctggcgatggcagtcacttccaggttattgctgtgggtgagatgttcgacggaatgagtcgcgtgaagaaacagcaggctgtgtacgcgccgctgatggaatacattgcggataaccgcatccacgccctgtcgattaaagcgttcaccccacaggagtgggcacgcgatcgcaaactaaacggtttttga

SEQ ID NO: 523088 - DNA, 1260 bp, Stenotrophomonas maltophilia
atggataaatttcgtgtacagggacccacgcgtctccagggcgaagtcacaatttctggcgctaaaaacgccgcgctgcccattcttttcgctgcgctgctcgcagaagagccggtagagatccagaacgtaccgaagctgaaagatatcgacacgaccatgaagttgctcggccagttgggcaccaaagtggagcgtaacggttccgtctggatcgatgccagcaacgtgaacaacttctcagcgccttatgagctggtgaaaaccatgcgtgcttccatctgggcgcttggcccgctggtggcgcgtttcggtcagggacaggtttcactgccgggcggatgcgctatcggcgcccgtccagtcgacctgcatatcttcggtctggaaaagctgggcgcggagatcaagctggaagaggggtacgttaaagcgtccgtcaatggtcgcctgaaaggcgcgcacattgtcatggacaaagtgagcgtgggcgcaacggtaaccatcatgtcggctgctacgctggcagaaggcactaccatcatcgaaaacgccgcccgagagccggaaatcgtggataccgcgaacttcctggtcgcgctgggggcgaagatcagcgggcagggcacagaccgtatcaccatcgaaggcgttgaacgtctgggtggtggtgtgtaccgcgtactgccagaccgtatcgaaaccggtactttcctggtagcggctgccatttctggcggtaagattgtttgtcgtaacgcacaaccggataccctggatgcggtgctggcgaaactgcgcgatgcgggtgcggacattgaaattggtgaagactggatcagcctcgatatgcacgggcagcgtcctaaagccgttaacgtgcgcactgcgccacatccggcattcccgacggatatgcaggcacagttcaccctgttgaacctggtggccgaaggcacaggcttcatcacggaaactatcttcgaaaaccgtttcatgcacgtaccggaactgatccgtatgggtgcgcatgctgagattgaaagcaacacggtcatttgccacggcgttgaaaaactgtccggtgcgcaggtgatggcgaccgatctgcgcgcgtctgcgagcctcgtactggcaggttgtattgcagaagggactaccgttgtcgatcgtatctaccacatcgatcgtggttacgagcgtattgaagacaaactgcgcgcgctgggtgcgaatatcgagcgtgtgaagggcgagtaa

SEQ ID NO: 523089 - DNA, 288 bp, Stenotrophomonas maltophilia
atggacacaaaattcatcgactggcattctgcggacattattgcggcactgcgtaaaaaagggacatcgctggctgccgaatcacgtcgtcatgggctgagctcgtcgacgctggcaaacgccctgacccgcccatggccgaagggggaactgattattgcgacggcgctggatacgcatccgtgggtgatatggccgtcacgctatcacgatcccattactcatgaatttatcgacagaacgcgcatgatgcgccagagcaaagcgaagaaagcacatcaggactga

SEQ ID NO: 523090 - DNA, 972 bp, Stenotrophomonas maltophilia
atgaatttagaaaaaatcaatgagttaaccgcgcaagatatggcgggtgtgaatgcagcaatcctggagcaactcaactctgacgttcagctgatcaatcagttgggctattacatcgtcagcggcggcggtaaacgtattcgtccgatgattgccattctggccgcacgcgcggttggctatcagggaaatgcccacgtcacgatcgcggcgctgatcgaatttatccacaccgccaccctgcttcatgacgatgttgtggatgaatcagacatgcgtcgtggcaaagccaccgccaatgccgcgtttggtaatgcggcaagcgttctggtaggggattttatctatacccgagccttccagatgatgaccagccttggctcgctgaaggtgctggaagtgatgtcagaagccgtaaacgttatcgctgaaggcgaagtcctacagttgatgaacgtcaacgacccggatatcaccgaagaaaactatatgcgggtgatttacagcaagaccgcacgtctgtttgaagccgccgcgcagtgctccggcattctggcaggctgtagcgaagctcaggaaaaagggcttcaggactatggccgttacctcggcaccgcgttccagctgattgatgatttgctggactacagcgcggatggcgaaacgctcggtaaaaacgttggcgatgacctgaacgaaggcaagccaacgctgccgctgctccacgcgatgcgcaatggctcaccagagcaggcgaaaatgatccgggaggctatcgagcagggaaatggtcgccatcttctggaaccggtactggaaacaatggccatctgtggttcccttgagtggacgcgtcagcgtgctgaagaagaagcagacaaagccatcgccgcaattcaggtcattcccgacagcccatggcgtgatgcgctaatcggcctcgcgcacatcgccgtccagcgcgaccgttaa

SEQ ID NO: 523091 - DNA, 312 bp, Stenotrophomonas maltophilia; identical to SEQ ID NO: 115457

SEQ ID NO: 523092 - DNA, 258 bp, Stenotrophomonas maltophilia
atggcacataaaaaggctggcggctccacacgtaacggtcgcgattcagaagctaaacgcctgggcgttaagcgtttcggtggcgaatccgttctggcgggtagcatcatcgttcgtcagcgtggcaccaagttccacgcgggtaccaacgtaggttgcggtcgtgaccacactctgtttgctaaagcagacggtaaagtgaaatttgaagttaaaggcccgaacaaccgtaaatacatcagcatcgttgctgagtaa

SEQ ID NO: 523093 - DNA, 966 bp, Stenotrophomonas maltophilia
atgaagcagcaggccggcattggtattcttttggcgctcactaccgcgatgtgctggggtgcgctgccaattgcaatgaagcaggtactggaagtgatggaaccgcccacggtggtgttttatcgcttcctgatggcaagtataggcctgggcgccattctggccgtcaaaggtaagctgccaccgctgcgcatcttccgaaaaccgcgctggctggtgttactggctatcgcgacgggcggtctgttcggtaacttcattctgttcagctcttccctgcaatatcttagccctacagcgtcgcaggtgattggtcagctatcaccggtcggcatgatggtcgccagcgtattcatcctcaaggagaagatgcgcggtacgcagatcatcggggcaagcatgctgctttgcggtctggtgatgttctttaacaccagtctgatcgagatttttacccgcctgacggattacacctggggtgtcatttttggggtgggtgcagcaacggtctgggtgagttatggcgtcgcgcaaaaggtgttattgcgtcgtcttgcctcacagcagatcctctttttgctgtacactttgtgtacactggcattattgccgttagctaagccgggggtgattacccagctcagcgactggcaactggcgtgcctcattttttgtgggctgaacacgctggtcggttatggcgcgctggctgaagccatggcgcgctggcaggcagcacaggtgagcgccttaatcacgcttaccccgctgtttacgctgttattttcagatttgttatcaatggcctggcccgatgtcttcgtcaagccgatgctcaacctgttgggttatctcggtgcgtttgtcgtggttgcgggcgcgatgtattccgccattggtcatcgtctctgggggcgttggcgcaaaaatgaagcggttgtaatagtcccccgctcaggcgaatga

SEQ ID NO: 523094 - DNA, 1134 bp, Stenotrophomonas maltophilia
atgaagtttgttgatgaagcgacgattctggtcgtggcaggtgatggcggtaacggttgtgtaagcttccgccgtgaaaaatatattcctcgtggcggtcctgacggcggtgacggtggggacggtggcgacgtgtggctggaggcggatgaaaacctcaacacgctgatcgactaccgtttcgaaaaatctttccgcgccgaacgtgggcagaatggccagagccgcgactgtaccggtaaacgcggtaaagacgtgacgatcaaagtgccggtaggtacgcgtgtcatcgatcagggcacgggcgaaaccatgggtgatatgaccaaacacggtcagcgcctgatggtggcgaaaggcggctggcacggtctgggtaacagccgtttcaaatcttccgttaaccgtaccccgcgtcagaaaaccatgggtaccccgggtgtggggatgctgggtatgccaaacgccggtaaatcgacgtttatccgtgcggtctctgcggcgaaaccaaaagtggcggattatccgtttacgacgctggtaccgagcctgggcgttgtccgtatggataacgagaagagcttcgtggtcgctgacatcccgggtctgattgaaggggcagcagaaggcgccggtctggggattcgcttcctgaagcaccttgagcgttgtcgcgtactgttgcacctcatcgacatcgatccaatcgacggttccgatccggttgaaaacgcccgtatcattatcggtgagctggagaaatacagtgaaaaactggcgcaaaaaccgcgctggctggtatttaacaagatcgacctgatggataaagcggaagctgaagcgaaagcgaaagcgattgccgaagcgatgggttgggaagataagtactacctgatctctgccgccagccaggttggcgtgaaagatctctgctgggatgtgatgacctttatcatcgagaatccggttgttcaggcagaagaggcgaaacagcctgaaaaagtcgaattcatgtgggatgactaccaccgccagcagctcgaagagctggaagcggaagaagatgatgaagactgggacgatgactgggatgaagacgacgaagaaggcgtcgagttcatctacaagcactaa

SEQ ID NO: 523095 - DNA, 1044 bp, Stenotrophomonas maltophilia
atgaacagtatgcgccggcgattaatggtgttgctggcggttatactgctattttttcaactggttagcgtagtctggctgtggcatgagagccgcgagcaaatcggttttctggtgaatgaaacgttgtctgcgaaagcgcgcaacaaccatgtcgaaaaagagatccgcgaagccattgcctccctgctggtcccttctctggtgatggtcggttttaccctgctcttctcattctgggccgtcacctggatcacccgaccactcaacaaacttcgcgccagccttgcgaaccgttcggcggataatctgactcccctgccgatgtattctgatatggaagagataggcgcagtaaccacgtccctcaaccaactcctcgcccggctggaccacactattcaacaggaacgcctgtttaccgccgatgcggcacacgagttacgtacgccgcttgcggggatcaggctccatctggaactgatggctcagtccggttccccgcaggccacgccactgataaaccggatcgatcagttgatgcacacggtggaacagctgctgatgctggcgcgtgccggacaggcgatggccagcggccattacgataccgtgaactggactgagacgatcattgctccgcttagcctggagcatgaagccaaagagcatacggtgatatggccggcccacagcgcgctgacggttcagggggacgccgtcctgttacgtctgatgctaaggaaccttctggagaatgccgcccgctacagcccggcaggcacaaccattgaagtggcattaacagcgacggaaagtggtacccaggtgagcgttaccgatcaggggccgggtattgatgaggcacaccgccagtcgatcaccgaacctttccgacgtctcgaccagcgctacggcggcagcggccttgggctgagcatcgtacagcgtatcgtacagctccatcatggctatttaacgctggagaacggcgctgagggcggcctcatcgccagctgttggttaccggcgaaaataggataa

SEQ ID NO: 523096 - DNA, 663 bp, Stenotrophomonas maltophilia
atgaaactactgatagttgaagacgatctgttattacaggaagggttagcgctggcactggggaatgagggctacgccctggattgtgccgccacggcggctgaagcagatgccttgatccagagcggagaatacagccttgtgatcctggatttgggactgccggataaagacggcgcgacgctgctctgccagtggcgtcgtcgcggagtggagaatcccgtattgattctcaccgcccgcgatgccattgaagacagaattaacgggctggattctggcgctgacgattatctggtaaaacccttcgcccttgccgagctacaggctcgcgtacgggcgttaatccgccgctatcagggccacagcgacaacctgctaacggacggggatatcaccctcaatctgcaaactcagcaggtgctgcgccagtctcagcctgtggaagtgaccccaaaagagttcgctctgctgacgcgcctgatcatgcgcagcgggcagaccgtgcaccgtgaaacgctgcaacaggacatctactcctggcaggacgatccaggatcaaacacgcttgaagttcacattcataatctgcgccgcaagctcggtaaagatcgcatcaaaaccgtacgtggcgtgggttaccgtctggagagccagaaatga

SEQ ID NO: 523097 - DNA, 1434 bp, Stenotrophomonas maltophilia
atgcgattttccagttttatcatcggattgactaccagtataacgttcaccgttcaggccgcgaatgttgatgagtacattaatcaactgcccgccggcgcgaaccttgccctgatggtgcagaaggttggcgcgcaggctcccgagattgactatcacagtcaacagatggcgctgcctgccagtacccagaaggtgatcactgccctcgccgccctgctccagctcgggcctgacttccgttttactaccacccttgaaaccagaggtaacgttgagggtggcgaactgaaaggcgatcttatcgcccgttttggtggcgatcccacctttaagcgccaggatgtccgcaacatggtggcggtactgaaaaaatccggcgtaacaaaaattgatggcaacgtgctgatcgacacctccattttcgccagccacgataaagcgcctggctggccatggaacgacatgacgcagtgctttagcgccccgccagccgccgccattgttgaccgtaactgcttctccgtatcgctttacagcgcgccaaaacccaatgacttagcgtttatccgcgtggcgtcttactacccggtcacgatgttcagccaggtgcggacgctggcgaaaggctccccggaggcacagtattgtgagctcgacgtggtaccgggcgatctcaatcgctatacgctcaccggctgcctgacccagcgggccgatcccctcccgctggcctttgccattcaggatggcgcaggctatgccggtgccatttttaaagatgaactgaagcaggcgggcataacctacaccggaacgctgctgcgccagacgcaggtgaatgaaccaggcacggtgattgccagcaaacagtccgcgccactgcatgatttgcttaagattatgctgaaaaagtcggataacatgattgccgacaccgtgttccgtatgattgggcacgcacgctttggtgtgccaggaacctggcgggccggttctgatgccgtacgtcagatcctgcgccagcaggcgggtatcgatctgggcaatacgatcgctgtcgacggttctggtttatcgcgccataacctgatctcaccggccaccatgatgcaggtgttgcagtacatcgctcagcatgacgctgagctaaactttattacaatgctgccgctcgccggacacgatgggtcacttcagtaccgtgcgggccttcacgctgcaggcgtggatggcaaagtgtcagccaaaacgggttccctgcagggcgtttacaaccttgccggttttatcacgacagccagcgggcaacgcatggcctttgtgcagtatctttccggctatgccgtcgaaccggctgaccagcgcaatcgtcgtattccactggtgcgtttcgaaagcaggctctataaggacatctaccagaataactag

SEQ ID NO: 523098 - DNA, 477 bp, Stenotrophomonas maltophilia
atgcaagctattccgatgaccttacgtggtgccgaaaaactgcgcgaagagctggattttctgaaatccgtacgtcgccctgaaatcatcgccgctatcgcggatgcgcgtgagcatggcgacctgaaagagaatgctgaataccacgcggcgcgtgagcagcagggtttctgcgaggggcgtatcaaagatatcgaagcgaaactgtccaacgcgcaggttatcgatatcactaaaatgccaaacaacggtcgcgtgatcttcggctctaccgtcaccgtcctgaatctggacaacgacgaagagcaaacctatcgcatcgtgggtgatgatgaagcggacttcaaacagaacctgatttcggtgaactccccgattgctcgcggcctgattggcaaagagcaggatgatgttgtgactatccgcaccccaggtggcgaagtggaatacgaaattattaaggttgaatacctgtaa

SEQ ID NO: 523099 - DNA, 333 bp, Stenotrophomonas maltophilia; identical to SEQ ID NO: 115449

SEQ ID NO: 523100 - DNA, 627 bp, Stenotrophomonas maltophilia
atgacaggtaaaaagcgttctgccagctccagccgctggcttcaggaacactttagcgataaatatgttcaacaggcgcagaaaaaggggttacgttcccgcgcctggtttaaacttgatgaaatacagcaaagtgacaaactttttaaaccgggaatgacggtggtcgacctcggtgcggcacctggcggatggtcccagtatgcggttacgcagatcggcggaacgggccgaatcatcgcatgcgatcttttaccaatggatcccatcgtcggtgtcgacttccttcagggcgactttcgtgatgaattagtgcttaaagcattacttgatcgtgtaggtgacagtaaggtccaggttgtcatgtcggatatggcaccaaatatgtgtggaacaccggcggtggatatcccccgcgccatgtatctggtggaactagcgttagaaatgtgtcgtgatgtactagcgcctggtggtagttttgttgtgaaggtgtttcagggcgaaggtttcgaggagtatcttaaggaaattcgctccctgtttgcgaaggtcaaagttcgtaagccggactcttcccgggcccgttcccgtgaagtgtatattgtagcgaccgggcgaaaatga

SEQ ID NO: 523101 - DNA, 1935 bp, Stenotrophomonas maltophilia
atggcgaaaaacctaatactctggctggtcattgccgttgtgctgatgtcagttttccagagctttgggcccagcgagtcgaatggccgcaaggtggattattctaccttcctgcaagaggtcaatcaggaccaggttcgcgaagcgcgtatcaacggacgtgagatcaacgttaccaagaaagatagtaaccgttacacgacttacatcccggtgaacgatcctaagctgcttgataaccttctgaccaaaaacgtcaaagtggtaggcgagccgccggaagaaccaagcctgttggcttctatcttcatttcctggttcccgatgctgcttcttatcggtgtctggatcttctttatgcgccagatgcagggcggtggtggcaaaggtgccatgtcgttcggtaagagcaaggcgcgtatgctgacggaagaccagatcaagaccacctttgctgacgtagcaggttgtgacgaagcaaaagaagaggtgggtgaactggttgaatacctgcgcgagccgagccgtttccagaaactgggcggtaagatcccgaaaggcgtcctgatggtcggccctccgggtaccggtaaaaccctgctggcaaaagccattgcgggtgaagcgaaggtcccgttctttactatttcaggttctgacttcgttgaaatgttcgtgggtgtcggtgcatctcgtgtgcgtgacatgttcgagcaggctaagaaggcagcaccgtgcatcatcttcatcgatgaaatcgacgccgttggccgccagcgtggcgcaggcctgggcggtggtcacgatgaacgtgagcagaccctgaaccagatgctggttgaaatggacggctttgaaggtaacgaaggtatcatcgttatcgcggcaactaaccgtccagacgtactcgaccctgcgctgctgcgtccaggccgtttcgaccgtcaggttgtggtcggtctgccggatgttcgtggtcgtgaacagatcctgaaagtgcatatgcgtcgcgtaccgttggcgccagatatcgacgcggcaatcatcgcgcgtggtactccaggcttctccggggcggatctggctaacctggtcaacgaggcagcactgtttgccgctcgcggtaacaagcgtgtagtgtccatggtggaatttgagaaagcgaaagacaaaatcatgatgggtgcggaacgtcgctccatggtgatgacggaagcgcagaaagagtccacggcatatcacgaagcgggccacgcgattatcggtcgtctggtgccggaacacgatccggtacacaaggtgacgatcattccacgcggtcgtgcgttgggtgtgaccttcttcctgcctgaaggtgacgcgatcagcgccagccgtcagaagctggaaagtcagatttcaaccctgtacggcggtcgtctggcagaagagatcatctacggtgcggaacatgtttccaccggtgcgtcgaacgatattaaagtggcgacaaacctggcacgtaacatggtgacccagtggggcttctccgacaaactcggtccgctgctctatgcagaagaagagggcgaagtattcctgggccgctccgtggcaaaagcgaaacatatgtccgatgaaacggctcgtatcatcgaccaggaagtgaaagcgctgattgagcgtaactacgctcgcgcccgtcagatcctgaatgacaatatggacatcctgcattcgatgaaagatgcgctcatgaaatatgagaccatcgatgcgccgcaaattgacgacctgatggctcgccgcgaagtgcgtccgccagcaggctgggaagacccaggcgcgtctaacaattctgacaacaatggcaccccgcgtgcaccgcgtccggtcgatgaaccgcgtacgccaaacccgggcaacaccatgtcagagcagttgggcgacaagtaa

SEQ ID NO: 523102 - DNA, 849 bp, Stenotrophomonas maltophilia
atgaaactcttcgcccaggactcgcatctcgacctttcacatccgcatgtgatgggaatcctgaatgtcacgcctgattccttctctgacggcggcacgcataactcgcttatcgacgcggttaaacacgcgaatttaatgatcaacgcgggtgccaccatcattgacgttggaggggagtcaacgcggcctggcgcggcggaggtttcggtggaagaagagctggcgcgcgtggtgccggtggtggaggctatcgcccggcgctttgaagtgtggatctccgttgatacctccaaacccgaagtgatccgtgaagtggcgagagtgggtgctcacattattaatgatatccgctcgctgaccgagccgggcgcaattgaagccgccgctgaaaccgggctaccggtgtgtctgatgcatatgcagggccagcctaagacaatgcaggaggcgccaaaatatgaagatgtgtttgccgacgtcacccgcttctttattgagcatatcgaacgctgtgaacgtgcgggtatcgcaaaagagaaattgctgctcgacccgggcttcggtttcggtaaaaatctctcacacaattacgcgttgcttgcgcgcttatcagagtttcatcagttcggcctgccactgctagtgggaatgtcgagaaaatcgatgattggtcagttgttgaatgtcgggccgaacgaacgtctgagcggcagtctggcctgcgcggtgattgccgcgatgcaaggtgcacacatcattcgcgtccatgacgtaaaagaaacagtagaagccatgcgtgtggtggaagccacactggcagcgaaggaaaacaaacgctatgagtaa

SEQ ID NO: 523103 - DNA, 1338 bp, Stenotrophomonas maltophilia
atgagtaatcgtaaatattttggtaccgatggcatccgtgggcgcgtaggcgatgcgccaattacccctgactttgtcctgaagctgggttgggcggcgggtaaggtactggcgcgtcatggctcccgtaagatcattattggtaaagatacccgtatttcgggttatatgctggagtccgcgctggaagccgggctggcggcggcggggctttcagcttcctttacggggccaatgccgacccctgctgttgcctatctgactcgtaccttccgtgcggaagcgggcatcgtgatttcagcttctcataatccgttctatgacaacggtatcaaattcttctccatcgacggcactaaactgccggatgacgtggaagaggcgattgaagcggaaatggagaaagagatcacctgtgtcgactccgctgagctgggtaaagccaaccgtattgtcgatgccgcaggccgctacattgaattctgcaaaggcacgttcccgaatgaactgagcctggcacacctcaaaattgtagtggactgtgcaaacggtgcgacctatcacattgcgccgaatgttttccgcgagctgggtgcgaaagtgatcaccatcggctgcgagccggacggtctgaacatcaatgaagaagtcggcgcgacagacgtgcgtgccttgcaggcgcgtgtactggctgaaaaagccgatctgggtattgccctggatggcgatggcgatcgtgtgatcatggttgaccacgaaggtaacaaggtcgatggcgatcagatcctctacatcattgcgcgtgaaggcctgcgtcaggggcaactgcgcggtggcgcggtgggcacgctgatgagcaatatgggtctggagctggcgctgaaacagctgggcatcccgtttgttcgcgcgaaagtgggtgaccgctacgtgctggaaaaacttcaggaaaaaggctggcgcattggcgcggaaaactccggccacgtgatcctgctcgataaaaccaccaccggtgacggcattgtggcggcgcttcaggttgttgccgcgatggcgcgtaaccatatgagcctgcacgatctgtgcagcggcatgaaaatgttcccgcagatcctggtgaacgtgcgtttcaccgctggtaaaggcgacccgctggaaaatgataacgtgaaagcggtgatggcagaggtggaagcgacgcttggcagccgtggacgcgtcctgctgcgtaagtcgggtaccgagccgctgatccgcgtgatggtggaaggtgaagacgaagcgcaggtaactgaatttgcgcaccgcattgcggatgcagtgaaagctgcataa

SEQ ID NO: 523104 - DNA, 333 bp, Stenotrophomonas maltophilia
atgtacgaagctcttttagttattttccttattgtagccatcgctctcgtagcgctgattatgctgcagcaaggtaaaggcgctgatatgggagcctccttcggagcaggcgcttccggtacgctgttcggttcaagtggttctgcgaacttcatgacccgtacgacggcgattctggctacgctgttcttcatcatcagtctggtgctgggcaatatcaacagcaacaagaccagtaaaggaagcgagtgggaaaatctgagcgcgccagcaaaaactgagcaaactcagccagctgcaccggctaagccaaccagcgatatcccgcagtaa

SEQ ID NO: 523105 - DNA, 1347 bp, Stenotrophomonas maltophilia
atgacgacgattctcaagcatcttccggtaggacaacgtattggcatcgctttctcaggcggcctggataccagcgctgcactgctgtggatgcgccagaagggagcggttccgtatgcatatactgcgaacctgggtcagccggacgaggaagattatgacgcgatccctcgtcgtgccatggagtatggcgcagagaacgcacgtctgattgactgccgtaagcaactggtcgctgaaggcattgccgctatccagtgcggtgcttttcataacactaccggcggcctgacctattttaataccactccgctgggtcgtgctgtcaccggcaccatgctggtcgccgccatgaaagaagatggcgtgaacatctggggtgatggcagtacctataaaggcaacgatattgaacgtttctatcgttacggtctgctgaccaacgccgagttgcagatctacaaaccgtggctggataccgacttcatcgacgaactgggtggccgtcatgaaatgtctgagtttatgattgcctgcggctttgactataagatgtccgttgagaaagcctactcaaccgactccaacatgctgggtgcgacgcacgaagcgaaagacctggaattcctgaactccagcgtaaaaattgttaacccgatcatgggcgtaaaattctgggatgagaacgtgaagatcccggcggaagaagtgaccgtgcgtttcgaacgcggtcatccggttgccctgaacggtaaaaccttctcagacgatgttgaactgatgctggaagcaaaccgcatcggcggtcgtcacggtctgggtatgagcgatcagatcgaaaaccgtatcatcgaagcgaaaagccgtggcatttacgaagctccggggatggcgctgctgcacatcgcttacgagcgtctgctgaccggtattcacaacgaagacaccattgagcagtatcacgctcatggccgtcagctgggcaaactgctgtatcagggtcgctggtttgatccacaagcgctgatgctgcgtgacgccctgcaacgttgggtggcgagcgcaatcaccggcgaagtgacgctggaactgcgtcgcggcaatgattactccatcctcaataccgtgtctgacaacctgacctataaagcagagcgtctgaccatggagaaaggtgagtcagtattctctccggacgatcgtattggccagctgaccatgcgtaacctggacatcaccgatacccgtgagaagctgttcaactatgttgagaatggcctgctctccgcgaattccggtaatggtctgccgcaggttgagaacctggaacacagcgataagaagtga

SEQ ID NO: 523106 - DNA, 531 bp, Stenotrophomonas maltophilia
atggttctgataatttatgcgcatccctatccgcaacattcgcatgcgaataaacggatgcttgagcaggcaaggacgctcgaaaacgttgagatacgttccctctatcaactctatcctgatttcagtatcgatgtcgccgccgaacaggaggcgctctctcgtgccgatctgatcgtctggcagcatccgatgcagtggtacagcacacctccgctgctgaaattgtggatcgacaaagtcttgtcgcacggttgggcatacggacacaacggcaaagcgcttcagggaaaaagcctgatgtgggctgtaaccaccggtgggggtgaaagccactttgagattggcgctttccccggatttgacgtgctggcgcagccgctccaggctaccgccctttactgtggcctgaactggcttccgccttttgcaatgcactgtacctttgtctgcgacgatgaaaccttgcaggcgcaggctcgtcactacaaacaacgcttactcgagtggcaggaggggcacaatggatag

SEQ ID NO: 523107 - DNA, 1866 bp, Stenotrophomonas maltophilia
atggatagccatacgatgatacaggcgctgatttacctcggcgcggcggcattaattgtgcccgtggcggtccgtctggggctgggctcggtgctcggctatctgattgccgggtgtgtgattggcccttggggctttcggctggtgacggatgccgagtcaatcctgcattttgcggaaatcggcgtggtgctgatgctgtttgtgattggcctggaattggatccgcagcggctgtggaaactgcgcgcctcggtgtttggcggtggcgctttgcaaatgctggcctgcggtctgctgttgggcgggttctgcattttgctggggatggagtggaaagtcgcagagctgattggcatgacgctggcgctctcctcgacggcgattgccatgcaggcaatgaacgaacgtaacctgacggtctcgcaaatggggcgcagcaccttctccgtactgctgttccaggatattgccgccatcccgctggtagcgatgatcccgctgctggcaaccagcggcgcatcaacgacgctgggggcatttgccttatctgcgctgaaggttgtcggtgcgctggcgctggtaattcttttggggcgctacgtaacgcgtccgttgctgcgctttgtggctcgctctggcctgcgcgaagtattcagcgccgttgcgttattcctggtgtttggttttggattgctgcttgaagaggctgggctgtcgatggcgatgggcgctttcctcgcaggggtcttactggcaagctccgaatatcgtcacgcgctggaaagcgatatcgagccgtttaaaggattgctgcttgggctgtttttcatcggcgtcgggatgtctatcgacttcgggacgctggtaacccacccgctgcgcatcatcattctgctggtgggtttcctggtcattaaaatggcgatgctgtggctgattgcccgaccgttaaacgtgccaaaaccgcaacgccgctggtttgccgtgctgttggggcaggggagtgagtttgctttcgtggtctttggcgcagcgcaaatggcaaatgtactcgatccggaatgggcaaaagcgctgacgctggcggtcgcgctgtcgatggccgcaacgccaattctgctggtgctgctgacgcgtctggaaaaaacgggaagcgaacaggagcgagaagccgatgagatcgacgaggagcagcctcgcgtgatcatcgccggatttggccgcttcgggcagatcgccggccgtttactgctctccagcggtgtgaaaatggttatcctcgatcacgatcctgaccatgttgatacgctgcgtaaattcgatatgaaagtgttttacggtgatgcgacccgggcggacctgctggaatccgccggggcggcgaaagccgaggtgctgattaacgccatcgacgatcctgagaccagcatgcagatggttgagctggttaaagagcattttccgcatctgaccattatctcccgtgcgcgcgatgtggatcactacatccagctgcgtcaggcgggggtggcagcccctgaacgtgaaaccttcgaaggggcgctcaaatctggccgcatggcgctggaaagtctggggcttggtgcgtatgaagcgcgtgaacgtgccgatctgttccgccgctttaaccatgagatggtggaagagatggtggcgatggcgagcagtacggcaaccgaacgcgcagcggtgtttaaacgcaccagcaccatgctgacggaaatcatcaacgaggatcgtaatcacctgtcgctggttcagcgccacggctggcaggggacggaagagggcaagcataccggcgatcctgcggatgaaccggagagtaaaccctctgcgtga

SEQ ID NO: 523108 - DNA, 480 bp, Stenotrophomonas maltophilia
atgatcagtctgattgcagcgctggcggtagaccgcgttatcggcatggaaaacgccatgccgtggaacctgcctgccgatctcgcatggtttaaacgtactacgttaaacaagccggtagtgatgggccgcctgacctgggagtcgattggtcgtccattgccgggtcgtaagaatattgtgatcagtagccagccgggcactgacgatcgcgtgcagtgggtgaaatccgttgatgaagcgattgccgcctgcggcgatgccgaagagatcatggtgatcggtggtggtcgcgtgtatgagcagttcctgccaaaagcgcagaaactgtatctgacgcacattgatgcggaagtggaaggggatacccattttccggattacgatccggacgagtgggagtccgtattcagtgagtttcacgatgcggatgcgcagaactcgcacagctactgcttcgaaattctggaacgtcgttaa

SEQ ID NO: 523109 - DNA, 849 bp, Stenotrophomonas maltophilia
atgtctacatatctgattggcgacgttcacggttgctacgatgaactgatcgcattattaaaacaggtcgatttcactcccgggcaggacacgctctggcttacaggcgatttagtggcgcgcggccctggctcccttgacgtcctgcgttacgtcaaatctctgggcgacagcgtgcggctggtactgggcaaccacgatctgcatctgctggccgtatacgccgggatcagccgtaataagccgaaagatcgcattacccccctgctggaagcaccggatgccgatgagttgctcaactggctgcgtcgccagccactgctacagattgacgaagagaaaaagctggtgatggctcatgccggcatcacgcctcagtgggatcttgagacggcaaaaacctgtgcgcgcgacgccgaagcggtgctggcgagcgactcctacccgttcttcctcgatgcgatgtacggcgacatgccgaataactggagtgatgacctcagcggcctggcgcggctacgttttatcaccaatgcttttacgcggatgcgctactgcttcccgaacgggcagctggatatgtattgcaaagatacgccggaaaatgcccctgcgccgcttaagccatggtttgcgattccgggccccgtgacaaacgaatatagcgtggtatttgggcactgggcatcactggaaggaaaaggcaccccggaaaatatctatgcgctggataccggatgctgctggggcggggatttaacctgcttacgctgggaagataaaacctactttgtccagccatccaaccgacagctggatttaggcgagggagaggcggtcgcctcctga

SEQ ID NO: 523110 - DNA, 378 bp, Stenotrophomonas maltophilia
atgattgattcgccccgcgtctgtgttcaggttcaaagcgtctacattgagtcccaatccacaccggatgaagaacgttttgtctttgcttataccgtaaccattcgcaatctggggcggatgcctgtgcaactgctcgggcgctactggcttatcaccaacggcaatggccgcgaaattgaagtccagggtgaaggtgtggtcggtgaacaaccccatatcgcccctggcgaagagtatcagtacaccagcggtgcggtcattgaaacgccactgggtaccatgcaaggccattacgaaatggtcgatgccgacggtaatgctttccgcattgctattcctgtgttccgtctcgccgtacctacacttattcattaa

SEQ ID NO: 523111 - DNA, 822 bp, Stenotrophomonas maltophilia
atgactaatcgagtccatcagggccacttagcccgtaaacgcttcgggcaaaacttcctcaacgatcagtttgtgatcgacagtatcgtttctgccattaatccgcagaaaggccaggccatggtcgaaatcggcccgggtcttgccgcgctgaccgagccggtaggcgaacgccttgacgaactgaccgttatcgaactcgaccgcgatctggccgcgcgtctgcaaacgcaccctttcctcgggccgaagctgacgatttatcagcaggatgcgatgaccatgaactttggcgaactgtcagaaaaaatgggacagccgctgcgcgtgttcggtaacctgccgtacaacatctccaccccgctgatgttccatctgtttagctatactgatgccattgccgacatgcacttcatgttgcaaaaagaggtcgttaaccgtctggttgcagggccgaacagtaaagcgtatggtcgtttaagcgtgatggcgcaatattactgcaacgtgatcccggtattagaagtgccgccttccgcgttcacgccaccaccaaaagtggattctgcggttgtgcgcctggtgccacataaaacgatgccgtatccggtcaaagacctgcgcgtgctgagccgtatcacgacagaagcctttaaccagcgccgtaaaacgattcgtaacagccttggcaatctgtttaccgttgacgtgttagctgagttgggcatcgacccggcaatgcgtgcggaaaatatttccgtagagcactactgcaagctggctaattacatcagcgacaatgcgccgccgaaggagagctaa

SEQ ID NO: 523112 - DNA, 987 bp, Stenotrophomonas maltophilia
atgaaaccgcatcgtgttgtgatcactcccggcgaacccgccgggattgggcctgaccttgtggttcagctcgcccagcgcagctggccggtagagttggttgtttgcgcagatgcaacactgttacaagaccgggcagccttgctcggtctgcctttaacgctcctcccttacgttgaaggccaacagcccgcaccgcagcaggctggtactctcaccctgctttctgttccgctccgtgcacctgttgtccccggtgagttacacatcgaaaacggccactacgttgtcgagacgctggcgcgcgcctgtgacggttgccttcagggtgaatttgcagccctgatcaccggtccggtgcataaaggcgtaatcaacgacgcgggcattccgtttaccgggcataccgaatttttcgaagagcgttcgcacagcccgaaagtggtgatgatgctggcaaccgaagcaatgcgcgttgcgctggtaacaacgcacctgccgatcaaagccattccggatgccattacgcctgaactcctgcgtgagatcattggcattttgcatcacgatctgcaaaccaaattcggtattccgcagccgcatgtgctggtttgcggcctgaatccgcacgcgggtgagggcggacatatgggcactgaagagatcgacaccatcattccggtgcttgaggagatgcgggcgaaggggatgaacctcagcgggccactgcctgccgacacccttttccagcccaaatacctggataaagccgatgccgtactcgcgatgtaccacgatcagggtctgcccgtgctaaaataccagggatttggtcgcggggtgaatatcaccctcggcttaccctttattcgaacgtccgttgaccacggtactgcgctggatctggcaggccagggaaaagcggatgtcggcagttttatcacggcgcttaatctcgccatcaaaatgattgttaatactcaatga

SEQ ID NO: 523113 - DNA, 1287 bp, Stenotrophomonas maltophilia
atgaagaactggaaaacgctgctactcggtgtcgctatggttgcgaataccagcttcgcggccccacaggttgtcgataaagtcgcggctgtggttaacaacggcgtcgtgcttgaaagtgacgttgacggtttgatgaaatctgtaaagctcaactcgggccaggcaggtcaacaacttccggatgacgctacgctgcgccaccagatcctggaacgtctgatcatggatcagattgtcctgcaaatgggccagaaaatgggtgtgaagatctctgacgagcagctcgatcaggcgatcgccaacattgcaaagcagaacaacattaccccggaccagatgcgtagccgcctggcctatgacggcatcagctatgccacctaccgtaatcagatccgtaaagagatgctgatttcagaagtgcgtaacaatgaagtccgtcgccgcgtcaccatcctgcctcaggaagtggatgccctggcgaaacaggtgggtaatcagaatgatgccagcactgaacttaacctgagccacatcctgatcccactgccggaaaacccaacctccgatcaggcggctgaggcggaaagtcaggcgcgcgctatcgttgagcaggcgcgtaatggcgatgacttcggcaaactggcgatcacctactctgctgaccagcaggcgctgaaaggcggccagatgggctggggccgtattcaggagctgccatccctgtttgcccaggcgctgagcacggcgaagaaaggcgacatcgtcggtccaatccgttccggtgtgggcttccacattctgaaagtgaacgacctgcgcggtcagagccagaacatttcggttaccgaagtgcatgcgcgccatatcctgctcaaaccgtctccgatcatgactgacgatcaggcccgtgcaaagctggaacaaatcgccgcagacatcaagagcggtaaaaccaccttcgataaagcggcaaaagagttctctcaggatcctggctctgcaaaccagggcggtgacctgggttgggcggcagcggatatttacgatccagctttccgcgatgcgttaatgaagctgaataagggtcagatgagcgcgccagtgcactcctccttcggctggcatctgatccagctgatggacacccgcaacgtggataaaaccgatgcggcacagaaagaccgcgcgtatcgcatgctgtttaaccgtaagttctctgaagaagccgcaacctggatgcaggaacaacgcgccagcgcttacgtgaaagtgttgagcaactaa

SEQ ID NO: 523114 - DNA, 2352 bp, Stenotrophomonas maltophilia
atgaaaaaacgtatccccacccttctggccacaatgattggcaccgccctgtacagccaacaggggctcgcagccgatctcgcctcgcagtgtatgcttggcgtcccaagttacaatcgcccactggtgaaaggcgatacgaatgacttacccgtcaccattaatgccgacagcgcaaaaggtaattatcctgacaatgcaacctttacgggcaatgtcgatattaaccagggaaacagccgtctgctggctgacgaagtgcaattgcaccagaagcagccggaaggtgctcaggcgcctgtccgtacggtggatgcgctgggtaatgtgcactatgacgacaatcaggtcatcctgaaaggtccgaaagcctggtcgaatctgaataccaaagacaccaacgtctgggaaggtgattatcagatggtcggtcgtcaggggcgcggtaccgcagacctgatgaagcagcgcggcgagaaccgctacacaattctcgaaaacggctcgtttacgtcctgtttgccagggtcaaatacctggagcgttgtgggcagcgaagtgatccacgaccgtgaagaacaggttgcagagatctggaacgcccgttttaaactcggcccggtgcccattttctatagtccttacctgcaactgcctgtgggtgacaaacgtcgttcaggcttcctgatcccgaacgccaagtacagcacgtcgaactactttgagttctacctgccgtactactggaacattgcgcccaacatggacgccacgatcacgccgcactacatccataagcgcggtaacatcatgtgggagaacgaattccgctatctgaccaaagcgggcgcgggcctgatggagtttgattatctgccatcagataaggtgttccaggacgaacatccgagcgaaggtgataagcaccgctggatgtactactggcagcacgccggggtaatggatcaggtttggcgcttcaacatcgactacaccaaagtcagcgatccgtattacttcaacgacttcgactctaaatacgggtccagtaccgacggttacgccacgcagatattcagcgtgggctacgccattgaaaattttgacgcaacggtgtcgaccaagcagttccaggtgtttgatacgcaaacaaacagcacctacggtgcagagccgcagctggacgtgaactggtaccagaacgatgtgggtcctttcgacacgcacgtttacgctcaggcggtccatttcgtcaacaccaactcggatatgccggaatcaacgcgtctgcatatcgagccgacgatcaatctgccgtggtcaaacgactgggcaagcctgaataccgaagccaagctgatggccacccactatcagcagaaaaatctggactggtataacaaacgctatggcaccgatcttgaagagtcggtaaaccgtacgcttccgcagttcaaaatggacgggaagctgattttcgaacgtgacatggctcttctcgcggatggatacacccagacgcttgagccacgtatgcagtatctgtacgtgccttatcgcgatcagagcaaaattcaaaactacgactcgtccttcctgcaatcagactacagcggcctgttccgcgatcgtacctacggcggccttgaccgtattgcgtctgctaaccagttaacgaccggcgtcacaacgcgcgtttatgatgatgctgccgttgaacgttttaacgtttctgttggtcaaatctactatttcaccgagtctcgtaccggtgatgacgacattaactgggagaaagacaacaaaacgggctcactggtatgggcgggcgacacctactggcgtatgacggatcgttggggtctgcgcggtggtgttcagtacgatacacgactggacaatatcgcgacgggcagcgctgccatcgaatatcgtcgtgatgaagatcgcatgttgcagttgacgtaccgttacgccagcccggagtatatccaggcgacactgccaaactatgcgaatacagaccaatacaaagacggtatttcacaggtgggtaccgccgcgagctggccgatcgccgatcgttggtcagtcgtcggagcctactactatgacacgaatgcccaaaaacctgctgaccagatgctgggtctgcaatataactcctgctgttacgcaatacgtgtcggttacgaacgcaaacttaacggctgggatacgcaaaacagtcagggcaaatacgataacgtgattggctttaatatcgagttgcgcggcctgagctctaactacggtctgggcacgcagcagatgctgcgctcgaacattctgccgtatcgtagttcattgtaa

SEQ ID NO: 523115 - DNA, 816 bp, Stenotrophomonas maltophilia
atgcagtattggggtaaaataatcggcgttgcgttcgcaattattatgggtgccggattctggggtgttgttcttggcctcattatcggccatatgtttgataaagcacgcagccgcaaaatggcctggtttgccaaccagcgcgagcgccagtcactctttttctccaccaccttcgaggtgatggggcacttaaccaaatcaaaagggcgcgtaacggaagccgatattcaggttgccagcgtctttatggatcgcatgaatctgcacggcgaatcccgcgtcgcggcgcagaatgcattcaggattggtaaagcggataactacccgctgcgtgaaaaaatgcggcagttccgtagcatctgcttcgggcgctttgatttaattcggatgtttctggaaattcaaatccaggccgccttcgcggatggctctctgcatccgaatgaacgggacgtcctgtatgtgattgctgaagagctgggcatttcccgcatgcagttcgatcagttcctgcgcatgatgcagggtggcgcgcactttggcggcggttatcaacagcaatcgtccggtggcggctggcagcaggcgcagcgtggccctacgcttgaagatgcctgtaatgtcctcggcgtgaagccctctgacgatgtcacgaccatcaaacgcgcctatcgtaagctgatgagcgagcaccatccggataagctggtggcgaaaggcctgccgcctgagatgatggagatggcgaaacagaaagcgcaggaaatccagaaagcctacgagctgattaaagagcagaaaggttttaaataa

SEQ ID NO: 523116 - DNA, 660 bp, Stenotrophomonas maltophilia
atggtaatggagccctacaatcccccgatggatccgtggctggtcattctgtatcaggacgagcacattatggtggttaacaagccgagcggcctgttgtccgtgccggggcgtctggaagagcataaagacagcgtgatgacgcgtatccagcgcgattatccccaggccgagtctgtccatcgtctggatatggcgaccagcggcgtgattgtggtggctcttaataaggcggcagaacgtgagctgaagcgtcagttccgcgagcgcgagccgaagaagcagtatgtcgcccgcgtgtggggccatccggcgcaggcggaagggctggtggatttaccgctgatttgcgactggccgaaccggccaaagcagaaggtgtgttatgaaaccggcaaggctgcgcagaccgagtatgaagtgctggagtacgcgccggataataccgcgcgcgtcctgctgaagccgattaccgggcgctcccatcagctgcgtgtgcatatgcttgcgatgggtcacccgattctgggtgacagattctatgcgccgccggaagcgctggcgttagcgccgcgcctgcaactgcatgcgcagacgctcaccatcacccaccctgctttcggcaacgccatgactttcaaagccccggtggacttctga

SEQ ID NO: 523117 - DNA, 2907 bp, Stenotrophomonas maltophilia
atgccttttacacttggtcaacgctggatcagcgatacagaaagcgaacttggattaggaaccgtcgttgccgtcgatgcgcgcatggttaccctccttttccctgctaccggtgaaaaccgcctgtacgctcgcaatgactcccctgttacccgcgtaatgttcaatccgggtgataccgtgaccagccatgacggctggcaactgaaggttgaagacgtaaaagaagagaatggactgctcgcctacatcggaacgcgtcttgataccgacgagacaaatgtcatcctgcgtgaagtgctgctcgacagcaaactggtgttcagcaagccgcaggaccgtctgtttgccgggcaaatcgaccgaatggatcgcttctccctgcgctaccgcgcgcgtaagttccagagtgagcagtaccgcatgccgtggagcggcctgcgcggtcagcgtaccagccttattccccatcagctgaatatcgcccatgacgtgggccgtcgccatgcgcctcgcgtgctgctggctgacgaagtgggcctgggtaaaaccatcgaagcaggcatgatcctgcaccagcagctgctctctggcgctgccgagcgcgtgctgattgtggttccagaaacgctgcaacatcagtggctggttgaaatgctgcgccgctttaacctgcgcttctcactgttcgacgatgagcgctatgccgaagcccagcacgacgcggacaacccgtttgaaaccgaacagctggtcatttgttccctggacttcgtgcgccgcagcaagcagcgcctggagcatctgtgcgacgctgaatgggatctgatggtcgtcgacgaagcgcaccacctcgtctggagcgaagacgcgccaagccgtgaatacatggcgattgagcagcttgccgagcgcgtaccgggcgttctgctcctgaccgccacgccggagcagctgggtcttgagagccacttcgcccgtctgcgcctgctcgatcccaaccgtttccacgattttgagcagtttgttgaagagcagaaaaactaccgcccggtggcggacgccgtcgcgctgctgctggccggtaatcgtctctctaatgatgagcttaacactctcagcgatctgattggcgagcaggatattgagccgctgcttcaggccgcgaacagcgacagcgataatgcgggatccgcgcgtaaagagctgatcgacatgctgatggatcgccacggtaccagccgcgtgctgttccgtaacacccgtaacggcgtgaaaggcttcccgaaacgcgagctgcacaccatcaaactgccgctgccgacccagtaccagacggcgattaaagtctccggcattatgggtacccgtaaatctgcggaagatcgcgcgcgcgacatgctctacccggagcagatttatcaggaattcgaaggcgacaccggcacctggtggaacttcgatccgcgcgtggagtggttgatgggctacctcaccgctcaccgttcccagaaagtgctggtgatctgcgccaaagccgctaccgcattgcagctggagcaggttctgcgtgagcgcgaaggcattcgcgccgccgtgttccacgaaggcatgtccatagttgagcgcgatcgtgcagcagcctggtttggtgaagaggacagcggcgcgcaggttctgctgtgctctgaaatcggttctgaaggccgtaacttccagttcgccagcaatctggtgatgttcgatctgccgtttaacccggatctgctggagcagcgtatcggccgtctggatcgtatcgggcaggcgcacgatattcagatccacgtgccgtatctggagaaaaccgcccagtccgtgctggtgcgctggtaccacgaagggctggacgcgtttgaacatacctgcccgaccggccgcaccatttacgatcaggtgcatgcagacctgatcggttacctggccgcgcctgaaaatagcgagggctttgatgagctgattaaatcctgccgtgagaagcacgacgcactgaaagcgcagctggagcagggtcgcgatcgcctgctggagatccactccaacggcggtgaaaaagcgcagcagctggccgaaagcattgaagagcaggacgacgacaccagcctgatcagcttctccatgaatctgttcgacatcgtcggtataaaccaggacgatcgcggcgagaacatgatcgtgctgaccccgtccgatcatatgctggtgccggatttcccgggcctgccggaagacggctgcactatcacctttgagcgtgatgtggcgctgtcccgcgaagacgcacagttcattacctgggagcacccgctgatccgcaacggtctggatctgatcctctccggcgataccggcagcagctccatttccctgttgaagaacaaagccttgcctgtgggcacgctgctggtggagctgatctacgttgtggaagcgcaggcgccgaaacagcttcagcttaaccgcttcctcccgccaacgccggtgcgtctgctgctggataaaaacggtacgaatctggccggccaggtggagtttgaaagcttcaaccgtcagttgagcgcggtgaaccgccataccggcagcaagctggtgaatgcggtgcaacaggacgtgcatgccattctgcaactgggtgaaacccaggccgaaaaagcggccagagtgctgattgatgcggcgcgcagcgaagccgatgagaagctttctgccgagctgtcgcgtctggaagcgttgaaagcggtgaacccgaacattcgtgacgatgagctggccgcaattgagagcaaccgccagcaggtgctggaaagtctgaatcaggccggatggcgtctcgacgccctgcgtcttatcgttgtgacgcatcagtaa

SEQ ID NO: 523118 - DNA, 2358 bp, Stenotrophomonas maltophilia
gtggcacaggcgcaagaaggctttttactgacccgacactggcgggatacccctcagggcaccgaggttgcgttctggctggcgacggataacggcccgctgcacgttaccctgccgcctcaggagtccgtggcgtttatccctgaacaccacgtcgagaaagtaaagcagctgctgcgcggtgaaaacggctggcgcctcacgcctcttgagctaaaagacttccaccgccagccggtttatggcctctactgccgcgcccatcgccagctgatgcgctatgaaaaattgctccgcgaagcgggcgtgacgctctacgaagcggacattcgcccgccggaacgttttctgatggagcggtttatcaccgcccccgtctgggtggacggcgctgagcagaacggttgtctcgtgaacgcgcgcctgaagcctaacccgcactatcgcccgccgctgaagtgggtctcgctggatatcgaaaccacccgtcacggtgaactgtactgcatcggcctggagggctgtgggcagcgggttgtctatatgctcgggccgccgaacggcgatgcgtccgcgctggattttcatctggaatacgttaccagccgaccacaactgctggagaaacttaaccagtggtttgccgagcacgacccggatgtattgatcggctggaacgtggtgcagtttgacctgcgcgtgttgcaaaaacatgccgagcggtaccgtattcccctgacgttagggcgcggaaacacggagctggagtggcgagagcacggttttaagaacggcgtattcttcgcacaggctaacggtcgcctgataatcgacggcatcgaggcgctgaaatcggccttctggaacttctcttccttctcgctggaagcggtcgcccaggcgctgctcggtgaaggtaaatccatcgacaatccctgggaccgaatggacgagatcgaccggcgctttaatgaggataagccagcgctcgctacctataacctgaaagactgtgagctggtaacgcagattttccataaaaccgagatcatgcccttcctgctggaacgcgcaacggtaaacggtctcgcggtcgacaggcacggcggctcggtagcggccttcagccacctctatttcccgcggatgcaccgggcgggctatgtggcccctaacctcggtgacgtgccgccgcaggccagtcccggcggttacgtgatggattcacggcccgggctgtatgattcggtgctggtgctggattataaaagtctgtacccgtcgattatccgcacatttctgattgatccggtagggctggtcgaggggatggcgcagccagacgatgcgcacagtactgaaggttttctcggggcacgcttctcgcgcgaaaaacactgcctgcctgagatcgtgggaaacatctggcacggccgcgacgaggcaaaacgccacggcaacaagccgctctcacaggcgctgaaaatcattatgaacgccttttacggggtgctgggcaccagcgcctgccgcttctttgatccgcgtctggcgtcgtccatcaccatgcgcgggcacgacattatgcgccagaccaaagcgttaattgaatcccggggttatgacgttatttatggcgacaccgattccacctttgtctggctgaaatcggcccgttcagaagacgacgccgcgcaaatcggcaaagaactggtcgccttcgtgaacgcctggtggcgcgaaagtttgcaaaaagagcggttaaccagtgcgttagagctggagtttgaaacccattttgcccgctttttaatgccgaccattcgcgggaccgaccagggcagcaagaagcgctacgccggactgattcaggaaggcgacaagcagcggatggtgtttaaagggctggagacagtgcgcaccgactggacgccgctggcacagcagtttcagcaaaccctttatctgcgggtgttccgcaatgagccgtatcaggactacgtgcgcgagacgatagccagcctgatggcaggcgaacttgacgcgcagctggtgtatcgcaagcgcctgcgccgcccgctggcggagtaccagcgtaatgttcctccgcacgtccgcgcggcgcgactggcggatgaagagaacgttcgccggggccgcgcgccgcagtatcagaaccggggaacgatcaaatacgtctggacaacgaacggaccagaacccgttgattaccagcagtctccgctcgattacgatcactacctgacccgccagctacagcctgttgcggagggaattttaccgttcatcaacgacgactttgctacactagtgacaggacaacttgggctattttga

SEQ ID NO: 523119 - DNA, 696 bp, Stenotrophomonas maltophilia
atgttagaagatctcaaacgtcaggtactcgaagccaacctggcgctgccaaaacataacctggtgaccctgacttggggcaacgtcagcgccgttgaccgggaaaaaggcgtgttcgtgatcaagccttcgggcgtggattacacggtgatgaccgcggaagatatggtggtggtcagcatcgaaacgggtgaagtggttgaaggcgataaaaagccctcctccgatacgcccactcaccgcctgctgtatcaggccttcccgaccatcggtgggattgtgcatacccattcgcgtcacgcgaccatctgggcgcaggcgggccagccaattccggccaccggcaccacccacgcggactacttttacggcaccattccctgcacgcgtctgatgaccgatgcggagatcggcggtgagtacgaatgggaaaccgggaacgtgatcgtcgaaaccttcgaaaaacagggtatcgacgcggcgcaaatgcccggcgtgctggtgcactcccacggtccgtttgcctggggtaaaaacgcggaggacgcggtgcacaacgcgatcgtgctggaggaagtcgcctacatggggatcttctgccgccagctggcaccgcagttgccggatatgcagcaaaccctgctcgataagcattatctgcgcaagcacggcgcgaaggcgtactacgggcagtaa

SEQ ID NO: 523120 - DNA, 1503 bp, Stenotrophomonas maltophilia
atgaccatttttaataattatgaagtgtggtttgtgattggcagccagcatttgtacggaccggaagcgttgcagcaggtgacgaaacacgcggagcacgttgtgaatgcgctgaacgcggaagccaaactgccgtgcaaactggtgctgaagccgctgggtaccaccccggacgaaatcaccaacatttgccgcgatgccaattacgatgacaaatgcgctggcctggtggtgtggctgcacaccttctcgccagccaaaatgtggatcaacggcctggctatcctcaacaaaccgctgctgcaattccacactcagttcaacgcctccctgccgtgggacagcatcgacatggacttcatgaacctgaatcagaccgcgcacggcggtcgcgagttcggcttcatcggcgcgcgtatgcgtcaacagcatgccgtggtgaccggccactggcaggacggccaggcacaaaaacgcattggctcatggatgcgtcaggcggtctctaagcaggatacccgtcaccttaaagtggtgcgtttcggcgacaacatgcgtgaagttgccgtaaccgacggtgataaagtggccgcgcagatcaagttcggcttctccgtaaatacctgggcggtgggcgacctggtgcaggtggtgaatgacatcagcgatggcgacgtgaacgcgctggtggacgagtacgaaagcagctaccgcctgacgcctgcggcacaggtcaacggtgacaagcgccagaacgtgctggatgccgcacgcattgaactgggcatgaagcgcttcctggaacagggcggcttccatgccttcaccaccacctttgaagatctccacggcctgaaacagctcccgggtctggcggtacaacgtctgatgcagcagggctacggttttgcgggcgaaggcgactggaaaactgccgctctgcttcgcatcatgaaggtgatgtcaaccggtctgcagggcggcacctcttttatggaggactacacctaccacttcgagaacggcaacgatctggtgctcggctcgcacatgctggaagtgtgtccctctatcgccgtcgaagagaaaccgatcctcgatgtgcagtacctcggcattggcggcaaagcggatccggcccgtctgatcttcaacacccgcaccggcccggccatcaacgccagcctgatcgacctcggcgatcgtttccgcctgctggtgaactgcgtcgatgcggtggaaactccgcattctctgccgaaactgccggtcgccaacgccctgtggaaagcgcagcctgacctgccaaccgcgtcggaagcctggatcctggccggaggcgcgcaccacaccgtcttcagccacgcgcttgacctgaacgatatgcgtcagtttgccgagctgcacgacatcgaactgaccgtgattgataacgacacccgtctgccagcctttaaagacgcgctgcgctggaacgaagtctattacggttcaaaacgctaa

SEQ ID NO: 523121 - DNA, 1710 bp, Stenotrophomonas maltophilia
atggcaattgcaattggcctcgattttggcagcgactcagttcgcgcgctggcagtggactgtacgactggccgggagatagcaaccagcgttgagtggtatccgcgctggcaagaggggcgctactgcgatgcgccgaacaaccagttccgtcaccacccgcgcgattacattgaatcaatggaagcggcgatcaaaaccgtgctggcggagctgacggatgcccagcgggccgacgtcgtggggattggcgtcgacagtaccggttcaacgccggccccggttgatgcagaaggccgcgtactggcgcttcgcccggagtttgccgataacccgaacgccatgtttgtgctgtggaaagaccataccgccgtggaagaggcggaagccatcacccgcttatgccaccagccgggcaaaaccgactactcgcgctacatcggcgggatctactccagcgaatggttctgggcaaaaatcctgcacgttacccgcgcggatgggtcggtcgcacaggcagcggcgtcatggattgagctgtgcgactgggttcccgccctgctctccggcaccactcgtccgcaggctattcgccgtggccgttgcagcgccgggcataaatcgctgtggcatgaaagctggggtggtctgcctccggcagcgttcttcgatgaactcgacccgatcatcaacaaaaacctgacatacccgctgtttaccgacaccttcaccgccgatattccggtcggcacgctctgcgaagagtgggcgaaacgcctcggtctgccgcaaaacgtgaccatttccggcggcgcgttcgactgccatatgggcgccgtgggcgcgggtgcgcagcctaacacgctggtgaaagtgattggcacctccacctgcgacattctgacggcggataaaaccagcgttggcgaccgcgcagtgaagggtatctgcggtcaggttgacggcagcgtggtgcccgattttatcggcctcgaagcgggtcagtccgcgtttggcgatatctacgcctggtttggccgggtgctcggctggccgctggatcagctggcggccgcgcatcctgaactgaaaacccagattaccgcgagcaaaaaacagctcctgccgcagctcaccgaagcctgggcaaaaaatccgtctctcgatcacctgccggtggtgctggactggttcaacggccgtcgtacgccgtttgccaaccagcgtctgaaaggggtgattaccgatctcaacctggcgaccgacgcgcccgcgctgtttggcggcctgatcgccgccaccgcgttcggcgcgcgcgccattatggagtgcttcaccgggcagggcattgacgtgaacaacgtgatggctttgggcggtatcgcccgtaaaaacccggtgatcatgcaggcctgctgcgacgtgctcaaccgtccgctgcaaattgtggcctccgatcagtgctgtgcgctgggcgcagcgattttcgctgccgtggccgcaggtgtccatgcggatatcccgaccgcgcaacagcatatggcgagcgccgtcgaaagtacgcttcagccgcaggctcagcaggcacaacgctttgaacagctttatcagcgctaccagcaatgggcaaaaagcgccgaacttcactatctccctgtcgccgccccggccaaaagcaccgcggacactacggcaaccctgacacattaa

SEQ ID NO: 523122 - DNA, 846 bp, Stenotrophomonas maltophilia
atggccgaaccgcaaaacgatcccctgctgccgggatactcatttaacgcccatctggtggcggggctgacgcccattgaggccgaggggtatctcgatttctacgtcgatcgaccgctcggaatgaaagggtatattctgaacctgaccgttcgcggggaaggggtgattaaaaacggcgatcggcagtttatctgccgccctggtgatatgctgttgttcccgccgggggagatccaccactacgggcgccacccggatgccaaagagtggtatcaccagtgggtctatttccgtccgcgcgcctactggcaggagtggctctcgtggccggccattttcgcccataccggtttatatcgcccggatgaggcgcatctggcgcagttccgtgagctgttcgcacaaattattgaggcagggcaggcgggagggcgctacgccgaactgctggccatcaacctgcttgaacaggtgctgctgcgccgcatggaggccatcaacgagtcgcttaatccgccgctggacaaccgcgtccgcgacgcctgccagtacatcagcgaccaccttgccgacagccagtttgatattgccagcgtcgcccagcatgtgtgcctgtcgccgtcacggctgtcgcatctgttccgccagcagcttggcgtgagcgtgctcagctggcgcgaggatcagcgcatcagccaggcgaaactgctgctcagcaccacccgaatgcctatcgccaccgtcgggcgtaacgtcggctttgaagatcagctctatttctctcgcgtgtttaagaagtgcaccggtgccagcccgagcgaattccgtgcgggatgtgaataa

SEQ ID NO: 523123 - DNA, 768 bp, Stenotrophomonas maltophilia
atgcaggcattgctggaacattttattacccagtccgttatgtattcgctcatcgccgtggcgctggtggcgtttctggagtcgctggcgctggtcgggctgatcctgcccggcaccgtgatgatggcggggcttggggcgcttatcggcagcggcgaggtcaatttctggcaggcgtggatggccggtattatcggctgtttgctgggggactggatctccttctggctgggctggcgctttaagaagccgctacaccgctggtcgttcatgaaaaaaaacaaagcgctgctggataaaaccgagcatgcgctgcaccagcacagcatgttcaccatcctcgtggggcgcttcgttgggccaacgcgtccactggtgccgatggtggccgggatgctggatctgcccgtcgcgaagtttgtggtgccgaatatcatcggctgcgtcttctggccgccgttctacttcctgccgggtatcctggcgggcgcggcgattgatattcctgacggtatgcaaagcggtgagtttaaatggcttctgctgggtacggcggtgctgctgtggctggcggtttggctctgctggcgcctgtggcgcagcgcgaaagcgagcgtcgatcgcctgacccgctatctcccgcgcacgcgcctgctctggctggccccacttacgctcggcgtggcggtggtagcgctggtggcgctgatccgccacccgctgatgccggtgtacggcgagatcctgttgaaggtggtgagccgttaa

SEQ ID NO: 523124 - DNA, 657 bp, Stenotrophomonas maltophilia
atgcgttttaccctctccgttcgtcagggagagcgaatcgcagtgcttggccccagcggggccggaaaaagtaccctgctcaatctgattgccggttttttgcagccagccagcgggtcgatcgtcattgataatggcgagtatacctacgctccgccggctaagcgcccggtgtcgatgctgtttcaggaaaacaatctgttcaatcatcttacggtctggcagaacatcgcgctgggtatggatccggggttaaagctcagtgctgcgcagcgtcagacgctggaggcgatcgccgaacaaatgggcctgtctgcgtttatcaacagacttccgggggagctttccggcggccagcgccagcgcgtggcgctggcacgctgtctggtgcgcgagcagccgctgctgctgctcgacgaacccttttcggcgctcgacccggccctgcgccaggagatgctctcgctggttgaggaagtgtgcgagcgcgagcaactgacgatgctgatggtttcgcacagcattgaagatgccgcacgcatcgcgccgcgatcggtggtgatcgcggagggaagtattttgtgggatggagaaacagaagaacttctgagtggtaacgcaggggcatcttcattgttgggtattcgtgcggtctga

SEQ ID NO: 523125 - DNA, 1611 bp, Stenotrophomonas maltophilia
atggcaacgcgccgtcagccgctgatccccggctggttagttcccgggctgctcgccgctatactgatggtggtcgtcagcctgggtgcattccttgcgctgtggtttaacgcgccagagagcgatctgcttgccctctggcacgacagctatctctggcacgtcatccgtttctccttctggcaggcgtttctctccgcgctgctgtcgacgctcccggccattttcctcgcgcgcgccctctatcgcagacgtttccccggcaggcttgccctgctgcggctgtgcgcgatgacgctgatcctgcccgtgctggtggcggtgttcggcattctgagcgtctatggtcggcagggatggctggcattccttttcaacctgcttggtctggaatggaccttctcgccatacggcctgaaaggcattctgctggcgcatatttttttcaatatgccgatggccacgcgcctctttttacaggcgctggaaaacattcccggtgagcagcgtcagattgccgcccagcttggcatgcgcggctggtcgttcttccgctttgtcgaatggccgtggctgcgacgccagattgccccggttgccgcgctaatctttatgctctgcttcgccagcttcgcgaccgtactttctctcggcggcgggccgcaggccaccaccattgagctggcgatctatcaggctttaagttacgactacgatccgggccgcgccgcgctgctggcgatcgtgcagatggtatgctgtctggcactggtgttactcagccagaggctaagcaaaacgatccccgcaggaagcaataacatgacaggctggcgcgatccgcaggacagcctgtatagccgcgtcgcggattttatgctgatcgcactggcactcctgcttttgctgcccccgctgctggccgttatcgttgatggactgaatcgcaatgtgttgtcggtactgcaacaacctgtcctgtggcaagcgacgtggacctccttgcgcattgcgctggcagccgggctactgtgcgtgatcctgaccatgatgctgctctggagcagccgcgagctgtacgcgcgtcatgcccgtaaagccggacacgcgctggaactgacgggtatgctgatcctggcgatgccgggcattgtgctggcgaccggattctttttactgttcaacagcaccctcggcctgccggaaagcgccgacggcatcgtcatttttaccaacgcactgatggccatcccttacgcgctcaaggtgctggaaaacccgatgcgcgacgtcaacagccgctacagcttgctgtgtcagtcgctgggcatgcagggctggcagcgtctgaaggtggtagaattgcgcgcactgaaacgtccgctcgcccaggcgctggcgtttgcctgcgtgctgtcgattggcgattttggcgtagtggcgctcttcggcaacgaggatttccgcacgctgccgttctggctttatcagcaaattggctcctatcgtagccaggatggcgccgtcacggcgctgctcctgttgctgctgtgctttgcgttatttaccgttatcgaaaaacttccggggcgtgatgttaaaactgactga

SEQ ID NO: 523126 - DNA, 984 bp, Stenotrophomonas maltophilia
gtgttaaaaaacgttcttcctctgctggcgctgtttgcgctgcctgtttttgctaagcctgtcctgacggtctacacctacgactccttctccgccgactggggccccggcccggcggtgaaaaaagcctttgaagccgactgcaactgcgagctgaaattcgtggcactggaagatggtgtctctctgcttaaccggctgcgtatggaaggcaaaaacagcaaagccgacgtggtgctcgggctggataacaacctgctgcaagccgccactcaaaccagactgttcgccaaaagcggcgtggcggcagatgccgtcaacgtgccgggcggctggaaaaacgacaccttcgttccctttgattacggttactttgcgtttgtctacgataaaaacaagctgaagaatccgcccaaaagcctgaaagagctggtcgaaagcgatcagaagtggcgcgtgatttatgaagatccgcgcaccagcacgccgggtctggggctgctgttgtggatgcagaaagtctatggcaacaaaacgcctgaggcgtggcagaaactggctgcgaaaaccgttaccgtcaccaaaggctggagcgaagcctacggcctgttcctgaaaggcgaaagcgaccttgtgctgagctacacgacttctccggcctaccacattatcgccgagaagaaagacaactacgccgccgcgaactttgctgaagggcattatttgcaggtggaagtggccgcccgcaccgccgcgagcaaacagccggagctcgccgagaaattcctgaagtttatggtttcaccggcattccagaatgctattccgacaggaaactggatgtacccggtcactgatgttgcgctgccggcaggttttgagcagctgaacaaaccgcaaacctccctggaatttacgccgcagcaggttgccacccagcgcgccgcatggataagtgaatggcaacgcgccgtcagccgctga

SEQ ID NO: 523127 - DNA, 1656 bp, Stenotrophomonas maltophilia
atgccttctggtcgtctgcaacaacaatttatccgcctctggcagtgctgcgaggggcaatcgcaggagaccacgctgaacgagctggctgagctcctcaactgctcccggcgtcatatgcgtaccctccttaacaccatgcagcagcagggctggctaaactgggaggccgaagccggacgcggtaagcgctcgcgcctgactttcctctataccggcctggcgttgcagcaacagcgggcggaggatctgctggagcaagaccgcatcgatcagctggtccagctggtgggcgacaaagccgccgtgcgccagatgctggtctcgcatctgggacgcagctttcgtcagggacgccacattctgcgagtgctttactatcgcccaatgaaaaatctgttgcccggtacggcgttacgtcgctctgaaacccacatggcccggcagatttttagcggcctgacgcggataaatgaggaaaacggggaactggaagcggatattgcccatcactggcaacaggtgtctccgttgcactggcgcttctttttacgtcccggcattcatttccaccatggacgcgagctggagatgcgcgacgttatcgactccttagagcgcgcccgcacgctgccgctctattcgcatatcgcgcggatccactcccccacggcctggacgctggatattgagctatcgcagccggacaaatggcttccgtggcttctgggctacgtgccctcgatgatcctgcctgccgagtggcgatccctgaacaatttttccagccagccgattggtacgggcccctactccgtttcacggaacaacagtaatcagctgaagatccgcgcctttgatgattactttggctatagggcgctgatcgacgaagtcaacgtctgggtactaccggatctcaacgaagagctgagcgcaggcctgacgctggaagggccaacaaccagcgaaaaggcgttcgagagtcgcctggaagagggttgctactatctgctttttgacagccgcagccatcgcggggcgaatcacgacgtccgcaagtggatcagccatattctggctcccgctaacctgatttatcacgctgaagagcaataccagacctggtggttcccggcctatggcctgcttccgcgctggcaccatgcgcagccagtacgcagtgaaaaacctgccggactggagaccatcaccctcagctactatcgcgatcacattgaacaccggtttatcgcaaggatcatgagtaagctgctggcagccgagggcgtgacgctggcgatacaggaagtggactatgatgaatggcaccgtggagacgttatcagcgatatctggctcaacagtgcgaacttcacgctgccgcttgatttttcgctcttctctcacctgtatgaagtgcccctgattcagcactgtatcaatcgggactggcagcgagacgccgcacggtggcgggcaggagaaatggatctggccgcctggtgtcaggagctgctggccgggcagacgatcgtaccgttgattcaccactggctgctgatccagggtcagcgcagcatgcgcggcctgcgaatgaataccctgggctggtttgattttaaatccgcgtggtttgcgccgccggagccataa

SEQ ID NO: 523128 - DNA, 153 bp, Stenotrophomonas maltophilia
atgaagaggtctaccgcacgtcagttttatcagcactatttttcagcgacaaagggagtgtcctggctggcccgccagtgcgcagagcagcggctgagaatactggaagatctgatgcagtgggacgttacgaaaccgacctcttctcgctaa

SEQ ID NO: 523129 - DNA, 1179 bp, Stenotrophomonas maltophilia
atgctctggttgatgacgatggggcgacgcctgaacggcgtgtacgccgcttttatgctggtggccttcatgatgggcgtggccggtgcgctacaggcgccgacgctgagcctgtttctcagtcgtgaggttggggcgcagccattttgggtaggcctgttctacaccgtcaacgccattgccgggatcctcgtcagcctgtggctggcgaaacgatccgacagccagggcgatcgccgcaagctgatcctcttttgttgcgccatggccgtgggcaacgcgttgctgtttgcctttaatcgtcactacctgacgcttatcacctgtggcgtgctgttggcctctctggcgaacaccgccatgccgcagctcttcgccctggcccgggagtacgccgacaactcggcgcgggaagtggtgatgttcagctcggtgatgcgtgcgcagctctctctcgcatgggtcatcggccccccgctggcgttcatgctggccctgaactacggtttcaccatcatgttcaccatcgccgcgggaatttttgccatcagcctggcgctgatagcctttgtgctgccatcggtggcgcgcgtagagcaggtgacggacaagcccatcacccaggtaagcggctggcaggataaaaacgtccgcatgttgtttatcgcctccacgctgatgtggacctgcaacaccatgtacattatcgatatgccgctgtggatcagcagcgatctgggactgtccgacaagctcgcggggatcctgatgggcaccgctgccgggctggagatcccggcgatgattctggcgggttactacgtaaaacgtttcggaaagcgtcggatgatggtcgtcgccgtggcggctggggtggtgttctacgcggggttaatccttttccattcgcgggaagctttgctggcgttacagctatttaacgcggtatttatcggaatcgttgccgggatcggcatgctctggttccaggatttaatgccggggcgagcaggctccgcgaccacgctgtttactaacagtatctctaccggcgtgattctggcaggggtgattcagggggcgctgtcgcaaagctatggacatgcatccgtgtactgggtgatcgcagcgatttcggtcatcacgcttgtattaacgtgccgggttaaagacgtttga

SEQ ID NO: 523130 - DNA, 153 bp, Stenotrophomonas maltophilia
atgccaaaacgtactctgctgttaggtttgtttctgatctgtacgacgttgttgatcttcacctggatggtgcgtgactcgctgtgtgagctgcacttcagacaggagaaaacagagctggcggcagtgttggcttacgaagcaaaacgttag

SEQ ID NO: 523131 - DNA, 606 bp, Stenotrophomonas maltophilia
atggcagagaaatttacccaacatacgggccgtgttgtcccgctggacgccgctaacgtcgatactgacgcgatcattcctaaacagtttttgcagaaagtgacgcgcacgggttttggggcgcatctgttcaacgactggcgcttcctcgacgataaaggcgaagtgccgaacccggaattcgtcctgaactttcaggaatacaaaggcgcctccattttgctggcgcgggaaaactttggctgcggatcgtcgcgtgaacacgcgccatgggcattgaccgactacggttttaaagtggttatcgccccaagcttcgcggatatcttctacggcaacagcttcaacaaccagctgctgccggtgacgctgagtgacgaacaggtcgatgaactgtttgcgctggtgcaggcaaatccggggatgtcgtttgaagtggatctggaagcagaagtggtgaaagccggtgacaagtcctacagcttcagcattgatgcgttccgtcgccactgcatgctgaacggtctggatagcattggcctgacgctgcaacacgaagaggctatctccacctacgagaaaaaacagcctgcgtttatgggctaa

SEQ ID NO: 523132 - DNA, 1401 bp, Stenotrophomonas maltophilia
atggctaagacgttatatgagaagttgtttgatgcgcacgttgtttacgagacgccagacgaaaccccactgttgtacatcgaccgtcatctggtacacgaagtgacgtctcctcaggcatttgacggcctgcgtgcgcacaagcgcccggtgcgtcagccgggtaaaacctttgccacgatggatcacaacgtttccacccagaccaaagacattaatgcatctggcgagatggcgcgtatccagatgcaggagctgattaagaactgtaacgagtttggcgtggagctgtacgatctgaaccacccctatcagggcatcgtccacgtaatggggcctgaacagggtattaccctgccgggcatgaccattgtctgcggcgactcccacaccgcgacgcacggcgcatttggcgccctggcgttcgggattggcacctctgaagtggaacacgttctggcgacgcagaccctgaagcagggccgcgccaaaaccatgaagattgaagtgaaggggaaagccgcgccgggtatcaccgcgaaagatatcgtgctggcgattatcggcaaaaccggcagtgcaggcggtaccggtcacgtcgttgagttctgcggcgacgctatccaggcgctgagcatggaaggtcgtatgaccctgtgcaacatggccattgagatgggtgccaaagcaggcctggtggccccagacgacaccaccttcaactatgtgaaggggcgtcttcatgcgccgaaaggacagaattttgacgacgcggtagcgtactggaaaaccctgaaaacggacgagggggcaatttttgataccgttgtgacgttgcaggcggaagagatcgccccgcaagtcacctggggcaccaacccgggccaggtcatttccgtcaacgacagcattcctgacccggcttccttcgccgatccggtcgagcgcgcgagtgcggaaaaggcgctggcttacatggggttgaaacccggcgtaccgctgaccgacgtgagcattgataaagtgttcatcggctcctgcactaactcccgtatcgaagatttacgcgctgcggcagaaattgcaaaaggccgcaaagtggcaccgggcgtgcaggcgctggttgtgccgggctccggtccggtgaaagcccaggcggaagcggaaggtctggataagatctttaccgaagcaggcttcgagtggcgcctgcccggctgctccatgtgtctggcgatgaacaacgaccgccttaatccgggcgagcgctgtgcctccaccagcaaccgtaactttgaaggccgtcagggccgcggtgggcgcacccacctggtcagcccggcaatggccgccgctgcggcagtcaccggtcatttcgccgatattcgcagcctgaaataa

SEQ ID NO: 523133 - DNA, 1092 bp, Stenotrophomonas maltophilia
atgtcgaagaattaccatattgctgtgttgccgggtgacggtattggcccggaagtgatggcacaggcgctgaaagtactggaagccgttcgttcgcgttttgcgatgaaaattaccaccagccactacgatgtgggcggtattgcaattgataaccacggtacgccattgccgaaagccactgtggaaggctgtgaaaatgccgatgccgtgctgtttggctccgtgggcggccctaagtgggaacatttgccgccagcagagcagccggagcgcggtgcgctgctgccgctgcgtaaacatttcaaactgttcagcaacctgcgtccggcgaagctgtacccggggctggaagagttctgcccgctgcgcgcggatatcgcggccaacggtttcgacattctctgcgtgcgtgagctgaccggcggcatctacttcggtcagccaaaaggtcgcgaaggcagcggtcagcatgagaaagcgtttgataccgaggtctatcaccgttttgaaattgaacgtatcgctcatatcgcgtttgagtcagcgcgcaaacgccgccgtaaagtgacctctattgataaagcgaacgtgctccagtcttccattttgtggcgcgaaatcgtcagtgaagtcgctaagcagtacccggacgttgcgctgtcgcatatgtatatcgacaacgcaacgatgcagctgatcaaagatccgtctcagtttgacgtgttgctgtgctccaacctgttcggcgatattctctcggatgaatgcgccatgatcactggctccatgggcatgctgccctcggccagcctgaacgaagaaggctttggcctgtacgaaccggcggggggctccgcgccggatatcgcaggcaaaaacatcgccaacccgattgcgcagatcctctccctggctctgctgctgcgctacagcctggatacaggcgatgcagcaaccgcaattgaaaacgccattaaccgggcgttagaagaaggcgtccgtaccggtgatttagcacgcggcacggcggcagtcagtaccgatgaaatgggcgacatcattgcccgctatgtcgctgaaggggtgtaa

SEQ ID NO: 523134 - DNA, 1572 bp, Stenotrophomonas maltophilia
atgagccagcaagtcgttattttcgatactactttacgtgacggtgaacaggcattacaggcgagcctgagtgttaaagaaaaactgcaaattgcgctggccctggaacgcatgggtgtagacgtaatggaggtcggttttcctgtctcctcgccgggtgattttgagtcagtgcagaccatcgcccgcaccatcaaaaacagccgcgtgtgcgctctggctcgctgcgttgagaaagatatcgatgtggccgcggaatccctgaaagttgcagaagctttccgtatccatacttttattgccacctcccccatgcacattgcaaccaagttgcgcagcacgctggatgaagtgatcgaacgtgcggtgtatatggttaaacgggcgcgtaacttcactgacgacgtggaattttcctgtgaagatgcaggccgcacgccgattgacgatttggcccgtgttgtggaagccgctattaatgccggagccagaaccatcaacatcccggataccgtcggctacaccatgccgtttgagtttgccaacatcattaccggtctgtatgaccgcgtaccaaatattgataaagccattatctctgtacacacccacgatgacctgggtctggccgttggcaatgctatcgcggcggtgcacgccggcgcgcgtcaggtagaaggcgcgatgaacggcatcggcgaacgcgcaggcaactgttcgctggaagaagtgatcatggcgatcaaagtgcgcaaagacatcatggacgtgcacacacgcatcaatcacaacgaaatctggcgcaccagccagaccgtcagccagatttgcaacatgccgatcccggccaacaaagcgattgtcggtacgggcgcgttcgctcactcttccggtatccaccaggatggggtgctgaagaaccgtgaaaactacgaaatcatgactccggaatccatcggtctgaaccaggttcagttgaacctgacctcacgctctggtcgcgcggcagtgaagcaccgtatggaagagatgggctacaaggacagcgattacaacatggatcagctgtacgacgccttcctgaagctggcggacaagaagggccaggtgttcgattacgatctggaagcgctggcattcatcaacaaacagcaggaagagccagagcacttccgtctggactacttcaacgtccagtccggctcaagcgacatcgccaccgcctccgttaagctggcctgcggggatgaaattaaagcggaagccgccaacggcaacggccctgtggatgccatttaccaggcgattaaccgcgtcactgagtacgacgtagagctggtgaaatacgacctgacggctaaagggcacggtaaagacgccctgggtcaggtggatatcgtcgtcaattataacggtcgccgcttccacggtgtgggtctggcgacagatatcgtcgaatcctccgcgaaagcgatggtgcatgtcctgaacaacatctggcgagccgccgaagtcgaaaaagagttgcaacgcaaagctcagaataaagagaacaacaaggaaaccgtgtga

SEQ ID NO: 523135 - DNA, 945 bp, Stenotrophomonas maltophilia
  misc_feature (486)..(495): n is a, c, g, or t
atgccagaaaataatattaaccaaccacagacttatgatggggttaagcctcagttacgcacagtggatcttaacttgttaactgtattcgatgcagtgatgcaggagcagaatattacgcgagcagcgcaatctctgggaatgtctcagcctgccgtgagtaatgccgtagccagacttaaggtgatgtttaacgacgagttattcgttcgttatgggaggggaattcagcctacagcgcgtgcattccagctattcggttcgattcgtcaggcgctacagctggttcaaaatgaacttcccggttcgggctttgaacccttaagcagtgagcgggttttccatctctgtgtttgcagtccgttagataattatttgacgtctgttatatataataaagttgaacagatcgccccaaatattcatctcgtttttaaatcatcattaaatcaaaacactgaacaccagcttcgttatcaggaaacnnnnnnnnnnctgggatacgaagagttccgccgtccagagtttgcctgtgttccgttgttcaaagacgaaatggtgttagtcgccagtaaaaaacatccccgtatgaattcgccgctgcgtgaaagcgatgtttacagtgagcaacacgccgttgttgctcttgacagatatgcctcatttagtcagccgtggtatgacaccgccgataaacaagccagcgtggcttatcagggaatggccatggtcagtgtattaaatgtcgtttctcagacgcagttagtcgctattgcgccgcgctggcttgctgaagagttctccgattcacttaatctgcaaattttacctctgccgctcaagcttaatagccgtacctgttatctttcctggcatgaggctgcgggtcgggataaagggcatcagtggatggaagagctgctgatcaatatttgccgtcgctag

SEQ ID NO: 523136 - DNA, 1725 bp, Stenotrophomonas maltophilia
atggagatgttgtctggcgcggaaatggtcgtccgatcgcttatcgatcagggcgtgaaacaagtgttcggctatcccggaggcgcggttctcgatatttatgacgcgctgcacacggtaggcggtattgatcatgttctggttcgtcatgaacaggctgctgtgcatatggctgacggcctggcccgcgccacgggcgaagtgggtgttgtgctggtcacttccgggccgggggcgaccaatgccattaccggcatagcgactgcgtatatggactctattccactggtcattctttccggacaggtggcgacgtcgctgattggctatgatgcgtttcaggagtgcgacatggtggggatctcacgccccgtggtgaagcacagctttctggttaaacaaactgaagatatcccgggcgtactgaaaaaagccttctggctggccgccagcggtcgtcctgggccagtggttgtcgatctgccaaaagatattctcaatccggggaataaactgccttacctttggcctgagtcggtgagcatgcgttcgtataatccgaccacgcaagggcacaaaggacagattaaacgtgcgctgcaaacgctgctggctgcgaaaaaaccggtggtctatgtggggggaggcgccgtcaatgcagcctgcgaaacgcaactacgcgaactgatcgagaagcttaatcttcctgtcgcgtcatcactgatggggctgggggcgttccctgccacgcatcggcaggcgctgggcatgctgggtatgcacggcacctacgaagccaatatgacgatgcacaattctgacgtgatttttgccgtcggcgtgcgttttgacgatcgcaccacgaacaacctggcgaaatactgcccgaatgcgacggtgctgcacattgatatcgatcctacttctatctctaaaacggtgccggcggatgtgccgatcgtgggagacgcacgacaggtgctggatcaaatgttggatctgctggcgcaggagaccgcctctcaaccgctggacgagatccgcgactggtggcaacaaatcgagcaatggcgtggccgtcagtgccttaaatacgacacgcaaagtgagaacatcaaaccgcaggcggtgatcgagacgatctggcgtctgactaatggcgatgcgtatgtcacttctgacgtgggccagcatcagatgtttgctgcgctgtattacccgtttgataaaccgcgtcgctggatcaactcaggcgggctcggcacgatgggctttggtttgcccgccgcgctgggggtaaagctggcgttgccaaacgaaacggttatttgcgtaacgggtgacggcagtatacagatgaatattcaggaactttccactgcgctgcaatatgaactgccagtgctggtgctgaacctgaataacggttacctcggcatggtaaaacagtggcaggatatgatttattcgggccgtcactcccagtcctatatgaaatcacttccggactttgtccgtctggctgaagcctatggtcatattggcatgcgggtaaccgatccgtcagagctggaagcgaagctcggcgaagcgcttgagcacgttaaaaacaatcgcctcgtcttcatggacgttatcgtcgatggcacagagcacgtttatccgatgcatattcgtggcggtggtatggatgaaatgtggttaagcaaaacggagagaacctga

SEQ ID NO: 523137 - DNA, 495 bp, Stenotrophomonas maltophilia
atgcgccggatattatctgtattactggaaaatgagtcgggcgcactgtcgcgggttattgggctttttgcccagcgcggctataacattgaaagcctgaccgtggcaccgaccgatgaccctacgctctcgcgcatgacgatccagactgtcggcgatgcgaaagtgcttgagcagatcgaaaagcaattgcacaagctggtggacgtactgcgcgtcagcgagctggggcagggtgcttacgtcgaacgtgaagtgatgctggtgaaaattcaggccagcggttacggccgtgatgaggtcaagcgcaacacggatattttccgtgggcagattattgacgtcacgccttctatatatactgtccagcttgccggaacgagcgataagctggacgctttcctggcctctgtcagggatgtggcaaaaattgttgaagttgcgcgctctggcgttgttggcctctcgcgcggcgataaaatcatgcgtgagtag

SEQ ID NO: 523138 - DNA, 1005 bp, Stenotrophomonas maltophilia
gtgaaactggatgaaatcgcccggctcgccggcgtgtcgagaaccacggccagctatgtgattaacggtaaagcaaagcagtatcgtgtcagcgataagaccgttgagaaagtgatggcagtcgttcgtgagcataattaccatccgaatgctgtcgccgcaggtttacgtgccgggcgcacccgctctattggcctggtgatcccggacctggaaaacaccagctatacccgcatcgccaactatctggaacgtcaggctcgtcagcggggctatcagctgttgattgcctgctccgaggatcagcccgacaacgagatgcgctgcattgagcatctgctgcaacgtcaggttgatgccatcatcgtgtcgacctctttaccacccgagcatccgttctatcagcgctgggcgaacgatccgttcccgatagtggcgctggatcgtgcgctcgatcgtgaacatttcaccagcgtcgtgggtgccgatcaggacgatgcagaaatgctggctgccgagctgcgtaccttcccggctgaaacggtgctgtatcttggcgctttgcctgaactttcggtaagcttcctgcgtgaacaagggttccgtacggcatggaaagacgatccgcgtgacgttcattatctctatgccaacagttatgagcgcgaagcggctgcccagctgttcgagaaatggctggaaacgcacccgatgccgcaggcgttgtttaccacctcgtttgctctgttgcagggagtgatggacgtgacgttacgtcgcgatggcaagctgccatccgatctggcgattgctaccttcggtgataacgaactgctcgacttcctgcaatgcccagtgctggccgtggctcagcgtcaccgcgacgtcgccgagcgcgtgctggagattgttctggcaagcctggatgaaccccgcaagccgaaacccgggcttacgcgtatcaaacgtaatctctatcggcgcggaattttgagccgccattaa

SEQ ID NO: 523139 - DNA, 156 bp, Stenotrophomonas maltophilia
atggattcgttcgtgtacattgaggcctggagggagagtgaaaaatggctgaatattcatcggctggcgcctgtttgtaacaaaacaatacaaagaaatgtcagtcaaaaatttataattgtgctttttaacaccaaaatggattcagaaaaatag

SEQ ID NO: 523140 - DNA, 495 bp, Stenotrophomonas maltophilia
ttgtgggttaaagtggtgaggaggggtgaggctggcatgttccgtggagcaacgttagtcaatctcgacagcaaagggcgtttatcggtaccaacccgataccgtgaccagctgattgagaacgcttcgggtcaactggtttgcaccattgacatcaactccccctgcctgctgctttatcctttgcctgaatgggaaatcattgagcaaaagctgtcgcgactgtcgagcatgaacccgcaggaacgccgcgtacagcggttgttattgggacatgccagtgaatgtcagatggatagcgccgggcgattattgattgcgcctgtgttgcggcaacatgccggtctgactaaagaagtgatgctggtcgggcagttcaacaagtttgaactgtgggacgaaacgacctggtatcaacaggtcaaggaagatatcgacgctgagcagtctgattccgcaacattatcggaacggctgcaggacttgtctctataa

SEQ ID NO: 523141 - DNA, 942 bp, Stenotrophomonas maltophilia
atgatggaaaattataaacatacaacggtgctgctggatgaggccgttaacggcctgaatattcgtccagatggcatctatattgatggcacttttggtcgcggtggccactcgcgtttgatcctctctcagcttggagcggaagggcgcctgctggcaattgaccgcgatccgcaggcgattgccgttgcgcaaaccatcgatgaccctcgcttttccatcgtgcatggacctttctctgcgcttgcggattatgtcgccgagcgcggcctgaccggcaaaatcgacgggatcctcctcgatcttggtgtctcttcaccacagcttgatgatgcagaacgcggcttctcttttatgcgcgacggtccgctggatatgcgtatggaccccacccgcggccagtctgccgccgagtggttacaaactgctgacgaagcggatattgcctgggtgatcaaaaccttcggcgaagaacgctttggcaaacgtattgcgcgcgccatcgtggagcgcaaccgcgttgagccaatgacccgtaccaaagagctggcagaagtcatcgcggcggcaacgccagtgaaggacaagcacaaacatcctgcgacccgtaccttccaggcggttcgtatctgggtaaacagtgaactggaggaaatagagctggcgctaaaaagctcgctcgacgtgctggccccgggtgggcggttatccatcatcagcttccattcgctggaagatcgcatcgttaagcgctttatgcgtgaacagagccgcggtccgcaggttccagctgggctgccgatgacggaagaacaactcagaaagctgggaggccgtcagttgcgagcattaggcaagttgatgccgggcgaagaagaggtggcagagaatccacgtgcccgtagttcagtgctgcgtattgcagagaggacgaacgcatga

SEQ ID NO: 523142 - DNA, 366 bp, Stenotrophomonas maltophilia
atgatcagcagagtgacagagaccctaagcaaagttaagggatcgttaggaagcaacgagcgccatgccttgcctggcgtgatcggcgacgatcttttgcggtttgggaagctgccactctgcttgttcatttgcatcattgtgacggcagtcatggtggtaaccaccgctcaccatacccgtttgttaactgcgcagcgcgaacagatggtactggaacgcgatgcgctggatattgaatggcgaaatctgatccttgaagaaaacgcgctcggcgatcacagccgggttgaacggatcgcaacggaaaaactgcaattacagcatgttgatccttcgcaggaaaatatcgtagtacaaaaataa

SEQ ID NO: 523143 - DNA, 1767 bp, Stenotrophomonas maltophilia
atgaaagcagcggcaaaaacgctaaaaccaaaacgccaggaagaacaggccaactttatcagttggcgttttgcgttgctttgcggctgcattttactggcgctgggtttcctgctgggacgcgtggcgtggctacaaatcatcgcgcctgacatgctggtacgtcagggtgatatgcgttctctgcgcgtgcaggaagtttctacctctcgtgggatgatcaccgaccgctccggccgcccgctggcggtgagcgtaccggtgaaggcgatctgggccgatcctaaagagctgcatgacgcaggcgggatcacccttgataaccgctggaaggcgctctcagacgcgttgaaaatgccgctggatcagctggcgtcacgcgttaacgccaacccgaaagggcgcttcatctatcttgcccgtcaggtgaaccctgatatggctgactacattaaaaaactcaagctgcccggcattcatctgcgggaagaatcccgccgttattatccttccggcgaagtcaccgcgcacctgattggcttcaccaacgtggatagccaggggattgaaggcgttgaaaaaagcttcgacaagtggcttaccggccagcctggcgagcgaatcgtgcgtaaagaccgctatggtcgcgtcattgaagatatttcctcgacagacagccaggccgcgcacaacctggccctgagtattgatgagcgcttgcaggcgctggtctatcgtgagctgaacaacgccgtcgcgtttaacaaggcggaatcgggcagtgccgtgctggtggatgtggcgacaggtgaagtgctggcgatggccagtagtccctcatacaacccgaataattttgccggtacagcaaaagatgcgatgcgtaaccgctccatcaccgatgtgtttgaacccggttcaaccgtaaaacctacggtggtgatgacggctctacagcggggcatcgtcaacgaaaataccgttctgaatacgatcccttatcgaattaacggccacgaaataaaagacgtggcacgttacagcgaactgaccctgaccggggtcttacagaagtcgagtaacgtcggtgtgtcaaaactggcgttagcgatgccgtcctcagcgttagtagatacttactcacgttttgggctgggaaaggcgaccaatttggggttggtcggagaacgcagtggcttatatcctcaaaaacaacggtggtctgacatagagagggccaccttctctttcggctacgggctaatggtaactcccttacagttagcgcgagtctacgcaacgattggcagctatggcatttatcgcccgctgtcgatcaccaaagttgatccaccggtaccgggggaacgtgttttcccggaatctatcgttcgtaccgtcgtacatatgatggaaagcgtcgcgctgcccggtggtggtggcgtgaaggccgcgattaagggctatcgtatcgccatcaaaaccggtacagcgaaaaaagtggggccggacggccgctatatcaacaaatacattgcctataccgcaggcgtagcgcctgcaagcaatccgcgttttgcgctggtggtcgtcatcaacgatccgcaggcgggtaaatactacggcggcgccgtctccgcgcctgtgttcggggctattatgggcggcgtgttgcgcaccatgaacattgaaccggatgcgctggcgacgggcgaaaaaagtgaatttgtaattaatcaaggcgagggaacaggtggcagatcgtaa

SEQ ID NO: 523144 - DNA, 1416 bp, Stenotrophomonas maltophilia
atggtactggatagccgcgtagcggcttctggcgatctttttgtggcagtggtaggtcatcaggcggacgggcgtcgttatatcccgcaggcgattgcgcaaggtgttgctgccattattgctgaggccaaagatgaggcaacagacggtgagatccgtgaaatgcacggcgtgccggtcatctatctcagccagctgaatgagcgtctctccgcgctggcaggacgtttttacgacgaaccttccgaccagttaaagcttgttggcgtgacaggaaccaacggaaaaaccaccaccactcagctgatggcgcaatgggctcagctgctgggtgaaaccggtgccgtcatgggcacggtggggaacggtattctgggcaaagtaagcccgacggaaaacacgacaggctcggcggttgacgtgcagcgtgtgctggcaggccttgcagagcagggggcgaccttcgcggcgatggaggtctcctcccatggtctggtacaacatcgcgtggcggcactgaaatttgccgcctctgtctttacaaacctgagccgcgatcaccttgattatcatggtgatatggagcactacgaagcggcgaaatggctgctttattccactcaccaccacgggcaggcgatcattaacgccgacgacgaagtcggtcgccgctggctggaaaaactgccagatgcggtggcggtgtcgatggaagatcgcattaatccgaactgtcgtggccgctggctgaaggcagtcgaagtgaactaccacgatagcggggcgacgatccgctttgcttccacctggggcgaaggtgaaattgaaagccgcctgatgggggctttcaacgtcagtaacctgctgctggcgctggcgacgctgctggcgctgggttacccgatggtagatctgctgaaaacgtctgagcgtttgcaaccggtctgtggccgcatggaagtgttcagtgcgccgggcaagccgacggtggtcgtggattacgcccatacgccggatgcgctggaaaaagcgctggaagcggcgcgtctgcactgcgctggcaagctctggtgcgtgtttggctgcggtggcgatcgcgacaagggcaaacgtccgctgatgggcgccatcgctgagcagttcgcggatattcccgtggtgaccgatgacaacccgcgtaccgaagagccgagggccattatcaacgacattctggcgggcatgctggatgctgggcgtgcgcgcgtggtcgaaggccgtgcggaggccgtgactaacgccattatgcaggcgcaggagaacgatgtggttctgctggccggtaaaggtcatgaagattatcagatcgtcggcaatcgtcgtctggattactccgaccgcgtgacggcagcgcgtctgctgggagtggtggcatga

SEQ ID NO: 523145 - DNA, 1359 bp, Stenotrophomonas maltophilia
atgattagcattacgttaagccaggccgctgcggtattgcaggggatgctgcatggtcaggatcagaccatcgaggctgtgaccaccgacacccgtaaggtgacggcgggctgcctgtttgtggcgctgaagggtgaacgttttgacgcccacgattttgcgcaacaggctaaagataacggcgcgggtgcgctgctggtcaaccgtaagctcgatatcgatttgccgcagattgtggtgaaagatacgcgcctggcgtttggtgagctggcggcatgggttcgccagcaggtgccaacacgcgtcgtggcgctgacgggctcgtcgggcaaaacctccgttaaagagatgacggcggcgatccttagccagtgcggaaacacgctttatacggcgggcaaccttaataatgacgtcggtgtaccgatgacgctgctgcgcctgacccacgagcatgaatatgcggtgattgagttaggggctaaccatcagggcgaaatcgcctggaccgtgagcctgacgcgtccggaagcggcgctggtgaataacctggcggcggcacatcttgaaggttttggttcgctggccggtgtggcgaaagcgaaaggtgaaatttataccggcctgccggatgacggcatcgccattatgaatgccgataacaatgactggctgaactggcagagcatcattggttcacgcaaaacctggcgcttctccccgaatgcggcaaacagtgatttttcggcgaccaacattcatgtgacgtcacacggcaccgagttcaccctcctgaccccaacgggcgacatcgacgtgctgctgccgttgccgggtcgtcataacatcgccaatgcgcttgctgcggcagcgctctcaatggcggtaggggcttcacatgctgcgataaaaactggtctggcaaatttaaaagccgtgccggggcgtctgttcccgatccagctggctgaaaacaaactcctgctggatgactcctacaacgctaacgtcggctccatgacggcggccgtgcaggtcttgtctgagatgccgggctatcgcgtgatggttgtgggcgatatggccgagctgggtgatgaaagcgaagcctgccacgtacaggttggcgaagcggcgaaagctgccgggcttgaccgcgtactgagcgcaggcacgctgagcaaggccatttccgatgccagtgaagttggcgaacattttgccgataaatctgcactgatcgaacgcctgaaggcattgattacagaaaaacagattgtgactgttttagttaaaggttcacgtagtgccgccatggaagaggttgtgcacgcattacaggagaacgggacatgttag

SEQ ID NO: 523146 - DNA, 1083 bp, Stenotrophomonas maltophilia
atgttagtttggctggccgaacatttggtcaaatattattcaggctttaacgtcttttcctatctgacgtttcgcgccatcgtcagcctgctgactgcgctgttcatctcgttgtggatgggcccgcgcatgattgcccgtctgcaaaaactctctttcggccaggttgtacgcaacgatggtccggaatcacacttcagcaagcgcggtacgccgaccatgggcgggatcatgatcctgaccgcgattgtggtgtccgttctgctgtgggcttatccgtctaacccctacgtctggtgcgtgctgaccgttctggttggctacgggatcatcggttttgttgatgactaccgcaaagtcgtgcgcaaagacaccaaaggtttgatcgcccgctggaagtatttctggatgtcggtaattgcgctgggtgtggccttcgcgctttacctggcaggaaaagacaccccggccaccgagctggtggtgccgttcttcaaagacgtgatgccgcagctggggctgttctacattctgctggcttactttgtgatcgtcggcaccggcaacgccgtcaacctgaccgatggtctggacggcctggccatcatgccaaccgtgtttgtcgcgggcggtttcgcgctggtggcgtgggcgaccggtaacatgaactttgcaaactacctgcacatcccgtacctgcgacacgctggtgagctggtgatcgtctgtacggcgattgtcggcgcggggctgggcttcctgtggttcaacacctatccggcgcaggtctttatgggcgacgtcggttcactggcactgggcggcgcgctgggcattatcgccgtgctgctgcgtcaggagttcctgctggtgattatgggcggtgtgtttgtggttgagaccctgtcggtgattttgcaggtcggttccttcaagctgcgcggccagcgcatcttccgtatggcaccgattcaccaccactatgaactgaaaggctggccggagccgcgcgtcattgtgcgcttctggattatttcgctgatgctggtgctgattggcctggcaacgctgaaggtacgttaa

SEQ ID NO: 523147 - DNA, 1317 bp, Stenotrophomonas maltophilia
atggcagattaccagggcaaaaaagtcgttatcatcgggttgggcctcaccggcctctcctgcgtggactttttccttgcgcgtggcgtgacgccgcgcgtgatggatacgcgcgtctctccgccgggtctggacaagctgccggagcaggttgaacgccacctgggtggtctgaatgatgagtggctgctggtcgccgatctgattgttgccagcccgggcatggcgctggcgcatccttcgctgagtgccgcggcggatgcaggcgttgagattgttggcgatatcgaactgttctgccgggaggcgcaggccccgatcgttgccattaccggttcaaacggtaaaagcaccgtcaccaccctggtgggtgagatggcgaaagcggcgggcaaaaatgtcggcgtgggcggtaacattggcctacccgcgttgatgctgctcgataaagggtgtgagctgtttgtacttgagctttccagcttccagctggaaaccacttcaagcctgcatgcggcggcagcgacgatccttaatgtcaccgaagatcatatggacagatacccgttcggcttgcagcagtaccgcgcggccaagctgcgtgtctatgaaaatgccaaagtctgcgtggtgaatgccgatgatgcactcaccatgccggtgcgtggcgcagacgatcgctgcattagcttcggtattaacatgggtgactatcaccttaaccgccagcagggcgaaacctggctgcgggtgaaaggtgagaaggtgctgaacgtgaaagagatgatgctctccggccagcataactacaccaacgccctggcggcgctggcgctggcggatgccgttggcctgccgcgatcttcaagcctgaaggcgctgaccacctttaccggcctggctcaccgttttcagctggcgctggaacacaacggcgtacgctggattaacgattccaaagcgaccaatgtgggtagcaccgaggcggcattgaacggtctgcacgttgaaggcacactgcatctgctgctgggcggcgacggtaaatcagccgatttctcctcgctgaagcagtacctcaacggtgataacgtgcgcctttattgctttggccgcgatggcagcgagcttgcggcgttgcgtcctgaggtcgccgaacaaaccgagaccatggaacaggcgatgcgccttatcgccccacgcgtgaagcccggcgatatggtgctgctctcgccagcctgtgccagcctcgatcaatttaagaatttcgaacagcggggcgatgtctttacccgcctggcgaaggagttaggctga

SEQ ID NO: 523148 - DNA, 1245 bp, Stenotrophomonas maltophilia
atgcgtttatctctccctcgcctgaaaatgccgcgtctgccagggtttggtatcctggtatggctgtttacggcgctgaaaggctgggtgatggcttcacgggataaagattccgacagcctgattatgtacgaccgcacgctgttctggctcacgctggggctggcagcgaccggctttattatggtcacctcggcgtcgatgcctgtcggacagcgtctggcaaacgatccgttcctgtttgccaagcgtgacgggctgtacatcattctcgcgttctgcctggcaatgatcaccttacgcctgccgatgtcgttctggcagcggcacagtacggccatgcttatcgcctcaatcatcatgctgttgatcgttctggtcgtcgggagctccgttaacggggcatcacgctggatcgcctttggtccgctgcgtattcagcctgcagagttcaccaagctttcgttgttctgctacctggcaaactacctggtgcgtaaagtcgacgaagttcgtaacaacctgcgcggcttcttaaaaccgatgggcgtgattctggtgcttgcgatcctgctgctggcgcagcccgatctcggtacggttgtcgtactgtttgtcactacgctggcgatgctgttcttggcgggcgcaaaactgtggcagttcattgccatcatcgggatggggatttcggcggtggtgctgctgatcctcgccgaaccataccgtatccgccgtgtgacctcgttctggaacccatgggaagatccgttcggcagcggttatcagctgacacagtcgctgatggcgtttggccgcggcgaagtctggggccaaggcctgggcaactcggtgcaaaaactggagtatttaccggaggcgcataccgacttcatcttctccattattggggaagaactgggttatatcggtgtggtattggcgctattaatggtattcttcgtcgctttccgcgccatgtcgattggccgtaaagcgctggagatcgatcaccgcttctccggtttcctggcttgctcaattggtatctggtttagcttccaggcactggtaaacgttggggccgcagcgggtatgctgccgaccaaaggtctgacgttgccgttgatcagttatggtggttcgagtctgttgatcatgtcgacggccatcatgtttttgttacgcatagattatgaaacgcgtctggagaaagctcaggcgtttacacgaggttcacgatga

SEQ ID NO: 523149 - DNA, 1065 bp, Stenotrophomonas maltophilia
atgaatcaaccgaagcggttaatggtgatggcaggcgggaccggcggacacgtgttcccgggactggcggttgcgcaccatttaatggaacagggctggcaggtacgctggctgggaaccgcagaccgcatggaagccgaccttgtacctaaacacggtatcgagatcgactttattcgtatttctggccttcgtggcaaagggatcaaggcgctgctgctggcgccggtgcgcattttcaatgcctggcgtcaggcgcgcgacattatgaagcgctttaagcctgacgtcgttctgggcatgggcggctacgtttccggtccgggaggactggcggcgtggtcactgggcatccctgttgttctgcatgagcagaacggtattgccgggttgaccaacaaatggctggcaaaaatcgccaccaaagttatgcaggccttccctggggcattcccgaaagcggatgtcgtagggaatccggtgcgtgtggacgtgctggcgctgccgctgccagatacgcgtctggcgggtcgcgaagggccggtgcgcgtgctggttgtcggcggttcacagggcgcacgtattttaaaccagacgatgccacaggttgcgacaaaactgggtgatgcggtgaccatctggcaccagagcgggaagggcgctcagcagagcgttgagcaggcctacgcgcaggaaggtcagccgcagcataaagtgactgaatttattgatgatatggccgcagcctatgcctgggccgatgtcgtggtctgtcgttcgggtgcgctgacggtgagcgaaatcgccgccgccggtttgccagcgctgtttgtgccgttccagcacaaagaccgacagcagtactggaatgcgctgccgcttgagaaagcgggtgccgcaaaaatttttgagcagccacaatttaccgctgatgcggtcgccactaccctggcgggctggaaccgagatgtattactggagatggcgcaacgcgcacgcgcgaccgctatcccggatgcaacggaacgggtggcaaaagaagtgagcctggcagcccaggcataa

SEQ ID NO: 523150 - DNA, 1476 bp, Stenotrophomonas maltophilia
atgaatacacaacaactggcaaaactgcgttctatcgtgcccgagatgcgtcgcgtccggcacattcactttgtcggcatcggtggtgctggcatgggcggtattgccgaagtgttagctaacgaaggctatcagatcagcgggtctgacctggcgccaaaccctgttacgcagcagctggcgtcgctgggggcgactatctatttcaatcatcgcccggaaaacgtgagcgatgcgagcgtggttgtagtgtccagcgcgatctccgcggataacccggaaatcgttgcggcgcatgaggcgcgcattccggtgatccgtcgcgcggaaatgctggcggaactgatgcgtttccgtcacggcattgcggtggccggtacgcacggtaaaaccacaacaacagcgatggtctccagcatttatgcggaagcgggtctcgacccaacgttcgttaacggtggtctggtgaaagccgctggcgtgcatgcgcgtctgggccacagccgttatctgattgcggaagcggatgaaagcgacgcgtcgttcctgcatttgcagccgatggtggctatcgtcaccaatatcgaagctgaccatatggatacctaccagggcgacttcgagaacttaaagcagacctttattaacttcctgcacaacctgccgttctatggccgtgcggtgatgtgcgtggacgacccggtgatccgcgagctgctgccgcgcgtcgggcgtcaaattaccacctacggcttcagcgaagacgctgatgtacgcgtggaagattataagcagattggtgcgcagggacatttcaccctggcacgccaggataaagagctcctgcatgtcaccctgaacgcgccgggacgtcacaatgccctgaatgcggcggcggcggtggctgttgcaacggaagaaggcattgatgatgaggcgatcctgcgcgcgctggaaagcttccagggaacgggccgtcgcttcgacttcctgggtgagttcccactggagccagtaaacggtaagccaggttctgcgatgctggtcgatgactacggtcaccatccgacggaggtggacgcaaccatcaaagcggcacgcgcgggttggccggaaaagaatctggtcatgatcttccagccgcaccgttacacacgtacccgcgatctgtatgacgattttgccaacgtcctttcgcaggtcgataccctgctgatgctggatgtttatgccgcgggtgaagcgccgattccgggcgcggacagtcggtctttatgtcgtaccatccgcggacgcggtaaagtggaccctatcctggtccccgacccggtgcaggtagctgaaatgcttgccccggtcctgacgggtaacgatctcatcctgattcagggtgcgggaaatatcggcaaaatcgcccgtaccttagctgaaatcaaactgaagccgcaaactcaggaggacgagcgtcatggctga

SEQ ID NO: 523151 - DNA, 921 bp, Stenotrophomonas maltophilia
atggctgataagattgctgtcctgtttggcggcacttccgccgaacgcgaggtttctctgaattcgggcgctgccgtgctggcgggcctgcgtgaaggtggtgtggacgcgcatccggttgatccgaaagaggtggacgttacgcagctgaaagcgatgggcttcgataaagcctttatcgcgttgcatggccgcggcggtgaagacggcacgttgcaggggctgctggagctgatcggtatgccgtacaccggcagtggcgtgatggcatccgctatctccatggataaactgcgcagcaaactgctgtggcagggggcgggtctgcccgttgcgccatgggttgcactgacgcgccgtgaatttgaattgggcttgtcggacagcgttaatacacgcattgcgtcactgggcttaccggttattgtgaagcctagccgtgaagggtcgagcgtgggaatgtccaaagttgataaagctgtagatttggctgacgctttagctctggcatttcaacatgatgaagaagttctgattgaaaaatggcttagcgggccggaatttaccgtcgcgatgcttggtgaagaaattttaccgtcaattcgcatccaacccgccggagtcttctatgattatgaggcgaagtatctctctgatgagacgcaatatttctgcccagctggtcttgaagcacaacgtgaagcggaattacagtctctggtgcttaaagcatggaatgttttgggatgccgaggctggggacgaattgatgtgatgcttgacggtgatgggcaattttatctgctggaagcaaacacgtctccgggtatgaccagccatagccttgtgccgatggcggcgcgtcaggcgggaatgagcttctcgcaattagtcgtacgtattctggaccaggcgggctga

SEQ ID NO: 523152 - DNA, 843 bp, Stenotrophomonas maltophilia
atgtctcaggctgcgttgaacacgcgcaaccgcgatgacgaagaagaatattcttcttcgcgccggagtaatggaacgcgtcttgcagggattatcttcctgctcggggtgctgtgcaccgtgtttatcagcggctggatggtgctgggctggatggaagacgcacagcggttgccgctgtcgaagctggtagtgaccggagagcgtcactacacgcgtaacgatgacattcgccagtcaattctggcgctggggtcgcctggcacctttatgacgcaggacgtcaacattatccagagtcagattgaacgtctgccgtggataaaacaggcgagtgtcagaaagcaatggcctgatgaattgaagattcatctggttgaatatgtgccgattgcgcgttggaatgatcagcatatggttgacgtagacggaaattcgttcagcgtcccgagcgatcgtgtcaacaagcagaatttaccgatgttgtatggcccggaaggcagcgaaaacgaagtattacagggttttcgtgagatggggcaggtgctggctaaggatcgctttacgttaaaagatgctgcgatgacggcgcgccgttcctggcagctgaccttaacgaatggcattaagctcaatcttggccgcggcgacacaatgaaacgtctggcgcgttttgtagaactttacccggttttacagcagcaggcgcagacggatggcaaacggataagctacgttgatttgcgctatgactcaggcgcagcagtcggttgggagccggctccggtcgaggaacctaatcagcaacaaaatcaggcacaggtacaggcagaacaacaatga

SEQ ID NO: 523153 - DNA, 1257 bp, Stenotrophomonas maltophilia
atgatcaagtcgacggacagaaaattggtagtaggactggagattggcaccgcgaaggttgccgctttggtaggggaagttctgcccgacggtatggtcaatatcattggcgtgggcagctgcccttcccgtggtatggataaaggtggggtaaacgaccttgagtcggtggtgaaatgcgttcagcgcgccatcgaccaggctgaattgatggcagattgccagatttcctctgtctatctggctctttctggtaagcacatcagctgccagaatgaaatcggtatggtgccgatttctgaagaagaagtgacgcaggaagacgttgagaacgttgtccacacggcgaaatctgtgcgtgttcgcgacgagcaccgtgtgctgcatgtgatcccgcaagaatacgcgatcgactaccaggaaggtatcaagaatccggtcggtctgtcgggcgtacgtatgcaggcaaaagtgcacctgatcacatgtcacaacgatatggcgaagaacattgtaaaagccgttgaacgttgtggcctgaaagttgaccaactaattttcgccggacttgccgcgagctattccgtgctgaccgaagacgaacgtgaactgggcgtctgtgtggtcgatattggtggtggtacaatggacatggctgtctataccggcggtgcgttgcgccacaccaaagtgatcccgtacgccgggaatgtggtgaccagcgatatcgcttacgcctttggtacgccaccgagcgatgcagaggcgattaaagtgcgccacggttgcgcgctgggctctatcgtcggcaaagacgagagcgttgaagtaccgagcgtaggcggtcgaccgccgcgcagtttgcaacgccagacgctggcagaggtaattgagccgcgttataccgagctgctcaacctggtcaacgaagagattttgcagttacaggaacagcttcgccagcagggtgtgaaacatcatctcgcagcggggattgtattaaccggcggggcagcgcaaattgaaggtcttgcggcctgcgctcagcgcgtgttccatacgcaggtgcgtattggtgcgccgctgaatatcaccggtttaacggattatgctcaggagccgtactattcaacggcggtgggcctgctgcactacgggaaagaatcccatttaagtggtgaggcagaggtggaaaaacgcgtctcggtggggtcgtgggtcaaacgacttaacacctggttgcgaaaagaattttaa

SEQ ID NO: 523154 - DNA, 1152 bp, Stenotrophomonas maltophilia
atgtttgaacctatggaattaaccaacgacgcggtgattaaagtcatcggcgtcggtggcggcggcggtaacgccgtagagcacatggtgcgcgagcgcatcgaaggtgttgaattcttcgcggtgaacaccgatgcgcaggcgctgcgtaaaacggctgttggccagacgattcagatcggtggtggcatcaccaaaggtctgggagcaggggctaacccggaagtgggccgcaacgcggctgaagaagatcgtgaagcgctgcgcgctgcactggacggtgcagacatggtcttcatcgcagcgggtatgggtggcggtacaggtaccggtgcagcacccgttgtagcggaagtcgctaaagatttaggtattctgaccgttgctgtcgtgaccaagcctttcaactttgaaggtaagaagcgtatggctttcgcggagcagggtatcaccgagctgtccaagcacgtggactctctgattaccattccgaacgacaagctgctgaaagtgctgggtcgcggtatctctctgctggacgcctttggcgcggcaaacgacgtgctgaaaggcgcggttcagggtatcgctgaactgattacccgtcctggcctgatgaacgttgactttgcagacgttcgcaccgtgatgtccgagatgggctacgcgatgatgggctctggcgtggcgagcggtgaagaccgtgcggaagaagccgctgaaatggcgatctcttctccactgctggaagatatcgatctgtctggcgcgcgcggcgtgctggtcaacattaccgctggctttgacctgcgtctggatgagttcgaaaccgtgggtaacaccatccgtgcattcgcctctgacaacgcgaccgttgttatcggtacgtcccttgacccggaaatgaacgacgaactgcgtgtgactgttgtggccaccggtatcggtatggacaagcgtcctgagatcaccctcgtgaccaacaaacagactcagcagccggtgatggatcgttaccagcagcacggtatgtcgcctctgactcaggagcaaaaaccggctgcgaaagtggtgaacgacccgactccacaaacggcaaaagagccagattatctggatatcccggcgttcctgcgtaagcaagctgactaa

SEQ ID NO: 523155 - DNA, 918 bp, Stenotrophomonas maltophilia
atgatcaaacaaaggacacttaaacgtatcgttcaggcgacgggtgtcggtttacataccggcaagaaagtcacactgacgttacgccctgcgccggccaataccggggtcatctatcgtcgcaccgacttgaatccaccggtagattttccggccgatgccaaatctgtgcgtgatactatgctctgtacttgtctggtgaacgagcatgacgtgcggatttctaccgtagagcacctgaacgccgccctggcgggtctgggtatcgacaacattatggttgaagtcgatgcgccagaaatcccgatcatggacgggagtgctgctccgttcgtttatttgttgctggatgccggcatcgaagaactgaactgcgcgaagaaatttgttcgcattaaagagaccgttcgcgtcgaagatggcgacaaatgggctgaattcaaaccgtacaatggtttctcgttggacttcaccatcgattttaaccatccggcgattgactccagcacccagcgctatgcgatgaacttctctgcggatgcgttcatgcgtcagatcagccgagcacgtaccttcggctttatgcgtgatatcgaatatctgcaatcccgcggcctgtgcctgggcggcagcttcgattgtgccatcgttgttgacgattatcgcgtactgaacgaagatggcctgcgttttgaagatgaatttgtccgtcacaaaatgctggacgcgatcggcgacctcttcatgtgtggtcacaacatcattggtgcctttaccgcgtttaaatccggtcatgcactgaacaacaaactgttgcaggccgtcctggcaaaacaggaagcctgggaatatgtgaccttcgaagacgaagctgaactgccgctggcgttcaaagccccgactatggtcctggcgtaa

SEQ ID NO: 523156 - DNA, 435 bp, Stenotrophomonas maltophilia
atggtcgcggcgagtctcggcttgcctgtgctcagcaacagcgcagacgcggcaacgccagcacgttccacgacgaccaaacacgatctcaccacgcgggttaacttcactaatctcgcatggcttgaagccaaccgtcgtcccaatttctccgttgattactggcagcaacacgcgattcgcacggttattcgccatctgtcgttcgcgatggcgccgcagacgatgcctgttgctgaagaaacgctgccggtccaggctcagcaccttgctctgctcgatacgctcaatgcgcttctgacgcaggacaaccagccgcctgtgaccgtgagtcagacggcgcaaactgcttttgtttcccccgcatccttctctgtttcgacctggattagccaggttcacggcatccgtgccgggcctcaacgcctcagctaa

SEQ ID NO: 523157 - DNA, 2706 bp, Stenotrophomonas maltophilia
atgctaatcaaattgttaaccaaagtttttggtagtcgtaacgatcgtaccctgcgccgcatgcgcaaagctgtgaacgtcatcaacggtatggaaccggcgatggagaagctctctgatgatgaactgaaagcaaaaaccgcggagttccgtgcgcgtctggagaaaggcgaaaccttagaaagcctgatcccggaagcctttgccgtagtacgtgaggccagtaaacgcgtgttcggcatgcgtcacttcgacgtgcagctgctgggcgggatggtgctcaacgagcgctgcatcgcggaaatgcgtaccggtgaaggtaaaaccctgactgcaacgctgccggcttacctgaatgcgctgacgggtaagggcgttcacgttgttaccgtcaacgactatctggcgcaacgcgacgccgaaaataaccgtccactgttcgaattcctcggcatgaccgtgggcattaacatgtccggcctgccggcacctgcgaagcgtgaagcctacaacgcggacatcacctacggcaccaacaacgaatacggcttcgactacctgcgtgacaacatggcgttcagccctgaagagcgcgtccagcgtaaactgcactatgcgctggtggatgaggttgactccattctgatcgatgaagcgcgtaccccgctgatcatctccggcccggccgaagacagctccgagatgtaccgtaaagtcgacaaaatcattccacacctgctgcgtcaggagaaagaagactccgatactttccagggtgaaggtcacttctccgtggatgaaaaagcgcgtcaggtcaacctgaccgaacgcggcctggtgaaaatcgaagagctgctggtggctgaaggcattatggaagagggcgagtctctgtactccccgagcaacattatgctgatgcaccacgtaacggctgcactgcgcgcgcacgccctgttcacccgcgacgttgactacatcgttaaagacggtgaagtcatcatcgtcgatgaacacaccggtcgtaccatgcagggacgtcgctggtccgatggtctgcaccaggccgtggaagcgaaagaaggcgtggatattcagaacgaaaaccagacgctggcgtctatcaccttccagaactacttccgtctgtacgagaagctggcggggatgaccggtaccgcagataccgaagcgtttgagtttagctccatctataagctggataccgtggtagtaccaaccaaccgtccaatgatccgtaaggatatgccggacctggtttacatgaccgaagcggaaaaaatccaggcgatcatcgaagatattcgcgatcgtaccgcgaagggccagccggttctggtggggaccatctccatcgagaaatctgaagtggtgtctaacgagctgaccaaggcgggcatcaagcacaacgtgctgaacgccaagttccacgctaaagaagcagatatcgttgcgcaggcgggttacccggctgccgtaaccatcgctaccaacatggcgggtcgtggtaccgatattatgctcggcggtagctggcaggccgaagtggccgagctggaaaacccaaccccggagcaaatcgcgcagatcaaagccgactggcaggtgcgtcacgacgcggtgctggcatccggtggtctgcacatcattggtaccgagcgtcatgaatctcgtcgtatcgataaccagctgcgcggtcgtgcgggccgtcagggtgatgccggttcttcccgcttctatctgtccatggaagatgcgctgatgcgtattttcgcctctgaccgtgtgtccggcatgatgcgtaaactgggcatgaaacctggcgaagcgatcgagcacccgtgggttaccaaagcgattgccaacgcccagcgtaaagtagaaagccgcaacttcgacattcgtaagcaactgctggaatatgatgacgttgccaacgaccagcgtcgtgcaatctatacccagcgtaacgaactgctggacgtgtccgacgtgagcgaaaccatcaacagcattcgcgaagatgtgttcaaagccactatcgacgcgcacattccaccgcagtctctggaagagatgtgggatatcgaaggcctgcaggaacgtctgaaaaacgacttcgacctcgaactgccaatcaaagagtggctggacaaagagcctgagctgcacgaagagaccctgcgcgagcgtatctacgaaaccgcgctggacgtctataagcgtaaggaagaagtggttggcgctgagatgatgcgccacttcgagaaaggcgtaatgttgcagaccctggactccctgtggaaagagcacctggcggcaatggactacctgcgtcagggtatccacctgcgtggttatgcgcagaaagatccgaagcaggagtacaagcgtgaatccttctccatgtttgctgccatgctggagtcgctgaagtatgaagtcatcagcactctgagcaaagttcaggtgcgtatgccggaagaagtggaagcgatggagcagcagcgtcgtgaagaagctgagcgtctggcacagatgcagcagctgagtcatcagaccgatgagagcgaagccgcagcggcaatcgcagcgcagacgggcgatcgtaaagtcggtcgtaacgatccgtgcccatgcggttccggcaaaaaatacaaggcgtgccacggccgcctgagctaa

SEQ ID NO: 523158 - DNA, 396 bp, Stenotrophomonas maltophilia
atgatgaaaacactgcaaattgctgtcgggatcattcgcaacccgcaaaaccagatcttcattacccaacgtgccgccgatgcgcatatggccaacaaatgggaattccccggcgggaaaatcgaatcaggtgaaacgccggagcaggcgctggtgcgtgagcttcaggaagaggtggggatcaccccgcttgatgcaacgctgttcgataagctggagtaccagtttccggacaggcacatcacgctctggttctggctggtggaaaactgggaaggtgagccatggggaaaagaggggcagccgggtaactggattgagcttcaggccagcgatgcggaaaaattcccgcctgccaatgagcctgtgatcctccggctggtcgcacaaccgtag

SEQ ID NO: 523159 - DNA, 195 bp, Stenotrophomonas maltophilia
atgtctgacgtaaccaccgtaaactgcccaacctgtgggaaaactgtcgtctggggagaagtgagtccatttcgcccattctgctgcaaacgctgtcaacttatagacctgggcgaatgggcggcggaagagaaacgcattccgagcgaaggcgatctctcggatagcgatgactggagcgaaaaccagcagtaa

SEQ ID NO: 523160 - DNA, 744 bp, Stenotrophomonas maltophilia
atgtcgactcatatcctttttgagcatccgcttaacgaaaaaatgcgtacctggctacgcatagaatttcttattcaacaactttcacaacatctgcccgtcaacgatcatgccaccgcgctgcattttttccgcaacgtgggcgatctgctggatgtgattgaacgcggcgatgtccgcactgagctgttgaaagagctggagcgccagcagcgtaaattacaggcctgggccgaagtaccgggcgtagataaaagtcgaattgacgctttacgccagcagctaaaaaacagcagcgcgacgctgatggccgcgccacgcgttggacaatttttacgcgaggaccgtctgattgcgctggtgcgtcagcgtctgagcataccgggcggttgctgtagctttgaccttccaacgctgcatatgtggctgcacatgccgcaggaacagcgcgatcgccaggtaaacagctggatgggcagtctggagccgatgaatcaaacgttatccctgatcctcgatcttgtgcgtaactctgccccgttccgcaagcagaccagtctcaacggtttttatcaggataacggcgacgacgccgatcttctgcgtttgaatctctctcttggcgagcagctttacccgcaaatttccggacataaaagccgtttcgcgatccgctttatgccgctggacagtgagcatggcaccgtgccggaacgcctcgattttgaactggcctgttgttaa

SEQ ID NO: 523161 - DNA, 621 bp, Stenotrophomonas maltophilia
atggggtatatcgtcgcattaaccggcggcatcggtagtggtaaaagcaccgttgcgcacgcgtttgctcgtctcggcatcacgattatcgacgccgatatcattgcccgtcaggtggtagaacccaatacacccgccttaaacgccatcgaagcgcattttggtcgccgtgtgatacaggctgacggcaccctgaatcgtcggcagttgcgtgagtgcatattttccgatccggcggaaaaagcctggcttaatgccctgctccaccccattatccaccatgaaactcagcgtcagattgccgcagccagttcgccctatgtgttgtgggtgatcccgttactggtggaaaatcagcttcaaaataaagcagacagaacgctggtgattgacgtttcccgcgaaacgcaaatccagagaaccatggcgcgtgaccatgtttcacgcgagcatgctgaacaaattcttgccgcacaggccacgcgcgaagcgcgcctcgccgttgcggatgatgttattgataataacggcgcaccagatgccattgcatcggatgttgctcgtctgcatgcgcagtatctgaccttcgccgcgcaggccgttgcacaggaaaaaccataa

SEQ ID NO: 523162 - DNA, 1044 bp, Stenotrophomonas maltophilia
atgcgtattgaagaagatctgaagttaggtttcaaagacgttcttatccgccctaaacgctctacactgaaaagtcgctcagacgttgaactcgaacgtcaattcacctttaagcattccggtcagacgtggtctggcgtgccgattatcgcggccaatatggacaccgtcgggaccttcgagatggcgaccgcgctggcgcaattcgacatccttactgcggtacataaacactacagccctgaggagtggaatgcgtttgtcgcctccgcctcggctgacgtggtgaagcatgtgatggtctcgaccggtacgtctgatgcagatttcgagaaaaccaaacagatcctgaacgccaatccggcgctgaattttgtctgcattgacgtggcaaatggttattccgagcatttcgtccagttcgtcagcaaggcgcgtgaagcctggccaaccaaaaccatcatcgcgggcaacgtggtgaccggtgaaatgtgtgaagagctgatcctctccggggccgacattgtgaaagtaggcattggcccggggtccgtttgcaccacgcgcgtgaaaaccggtgtgggttatccgcagctgtctgcggtaattgaatgcgctgacgccgcgcacggtctgggcggccagatcatcagcgacggtggctgcaccatgccaggcgatgtggcgaaagccttcggcggcggcgcggacttcgtgatgctcggtggcatgctggccggccacgaagagagcggtggtaccgtggtggaagagaacggtgagaaattcatgctgttctacggaatgagctctgaatctgcgatgacccgtcacgtggggggggtcgcgaaataccgtgcggcggaaggcaaaaccgttaagctgccactgcgtggcccggtcgaaaacacggcgcgcgatatcctcggcggtctgcgttctgcctgcacctacgttggggcttcccgcctgaaagagctgacgaaacgcacgacgtttatccgcgttcaggagcaggaaaaccgcgtatttaatagcctctga

SEQ ID NO: 523163 - DNA, 1185 bp, Stenotrophomonas maltophilia
atggctgctaattcgctctggcgctggcgtgccctgaccaccgagggggaggtgcaaaccggcaccctctgggccatcgaccgtaacgcagcttacacggctctggtgcttaaacagctgcacccgctggcgctaaaacgctgccagcagcgacaccgatggcaggtgcaacactgctacgatatttttcgccagctcgccacgctgctacaggccggactaacgctgtcccaaagcctgcacatgctggcggaacagcatcctttgaagcactggcaggcgctgctgcacagtcttgctgatgacctgagcgaaggttgcgccctgtcagaggccatgaagaaatggccagaggtgtttagccccctttatgtctcgatggtgaagacgggtgagctgacgggtaagctcgaagcctgctgccgtcagcttgcgcagcaacaaaaatcccagcagcagctcagtgcaaaggtgaagaaagcgctgcgctatccgctgatcatcctgacgctggccgttttcgtggtgctggcgatggtcacactggtgttgcctgagtttgctgcaatctacaaaacgttcaacaccccgctccctttgctcacggaggcagtcatggggctggcggccctggttcaggcgcatatcctcactcttttggccctgctcgtggcaatggttgtcatcgcctgtaagctgcggcggcatccgcgctggcagtatgtcttattacacgtaccggtgatgggcacgctgatgcgtgggcaaaaactggggcaaatttttacagtgctgtcattaacccagcaggccgggattgcctttttacaaggagtggagagtgtggaggagaccgttgagagtggctactggcaggagaaactccgtgagatacgcagcgatatcgaacaggggatgcccgtgtggtcctccttccagaaggcctctgtttttacgccactgtgtattcagctcattcgcaccggagaagtatcgggttcactggatgtgatgctgatgaatctggcccgccatcatacggaacagacatttcagcaggcagacaatctggcggcgcttcttgagcctttgctactggtcgtgacaggtctgattattggcacgctggtggtggcgatgtatctgccaattttccatctgggggatgcaatgagcgcggggtaa

SEQ ID NO: 523164 - DNA, 1380 bp, Stenotrophomonas maltophilia
atgaacaccgaacagcttatgacgctctgtcagcgccatcacgcactgctactcgcaagcgacaccgagatgatcagcattgcggtggtgggtaatcctgcctctgagctgatggaagcgttacgcttcgccacgcagaaacgtattgatattgagtgctggacggccgaacggatggaaaaacggcttcagtccctctcatcatcacacctgccgggaatagcgccaaactcagccgctgacgtgctcagtacaacgttgcagcaggcagtgaaccagcgggcttctgacatccatattgaaccgacggagcacggctaccagatccgtttgcgaatcgacggtgttctctacccgcaaccgccggtttccgccgccctcggtacgacgcttgccgcacgcctgaaggtgctgggccaactggatattgcggagcgccgcctgccgcaggacggtcagtttacggtggagctggcaagcgtccccgtctcttttcgtatcgcaacccttccctgtagcggtggagaaaaaatcgtgcttcgtctgcttcaccaggtgcagcaggcactggagcttgaactgctggggatgagtgcagaccagcaggcccgttttgccggggcgcttaacagccctcagggattgattctggtcaccggcccgaccggtagcgggaaaacggtgacgctgtacagcgcgttacaggcgcgaaatacccctgacgttaatatttgcagcgtggaagatcccgttgaaatcccgcttgcaggcttaaaccagacgcagattaatccgcgcgcggggctgaccttccagagcgtgctgcgtgccctgctcaggcaggatcctgacatcattatggtgggtgaaattcgtgacggcgaaacggcagaaattgccattaaggcggcgcaaaccgggcatctggtgctgtccaccctccatactaattcgacgactgaaacgctggtacggctgcaacagatgggcgtcgcgcgctggatgatctcttcggcgctctcgatggtgattgcccagcggctggtgcgtcgtttatgcccgtactgccgacaggaagccagccgccacaccgaattacctcgcacgctgtggccccggccgcttcctcgctggcaacccaccggttgcgatcgctgctaccacggtttttatggtcgcgtagccatttttgaagtgctcgtcatcgacgacacgctgcggcaggccatcgccagcggagcaagcacggaggtgattgggtccagcgcacgtcaggcgggaatgacatctttgtttgagcatggctgcatgtccgtggagcaagggctgaccacgctcgaagagctgttgcgcgtcctgggaatgcccgatggctgctaa

SEQ ID NO: 523165 - DNA, 438 bp, Stenotrophomonas maltophilia
atgaacagacaacaaggatttaccctgattgagttaatggtggtcattggcattattgccatcctgagcgcgattggcatcccggcttatcagaactacctgcgaaaagcagcgctcaccgatatgctgcaaacgttcattccctaccgcaccgctattgagctttgcgccctggatcgtggtggtgtggatcgctgcgacgcaggaaccaatggcatcccctccccgactaccacgcgttacgtttcagcgatgagcgtggcgaagggggtcgtatcgttaacagggcaggaaagccttaacggacttgaagtgctcatgacaccgatctggagcgacggtaacggtatgacgggctggacgcgcgcctgcaacattgcgtccgacacggcgctcagacaagcctgtgaagatgttttccgcttcgacaacaactga

SEQ ID NO: 523166 - DNA, 894 bp, Stenotrophomonas maltophilia
atgccgcctcgccgctataaccccgaccaccgacgtgacgcgcttctggaacgtattaatagtgatatcccggcaagcgttgcccatgccctgagagaagacctcggcggtgacgtcagtgccgataacgatattaccgcccaattgttgccaaaagagacacggtcgcacgcggtagtcatcacccgcgaagcgggggttttctgcggcaaacgctgggttgaggaggtctttacccagctggcgggcgacgaggtgcaggtaacatggcacgttgaggacggtgatgcggtcacggcaaatcagctactgttcgagctggacggcccgtcccgcgtcttgctgaccggtgaacgcaccgcgctcaattttgtgcaaacgctctctggcgttgccagtgaagtacgccgctacgttgacctgctggcaggcacccgcacgcagctactggatacccgtaaaaccctgccgggcctgcgcaccgcgctgaaatacgctgtgctctgcggtggcggcgccaaccatcgtctggggctatccgatgccttcctgatcaaagagaaccacattattgcctctggctcggtacgtcaggccgtggaaaaagccttctggctgcatccggatgtgccggttgaggtggaagtggaaacgctggatgagctggacgaggccattaaagcgggggctgacatcatcatgctcgataacttcgacacggagcagatgcgtgaagcggtcaaacgcacaaacggccaggcgcagcttgaggtgtccggcaacgtgacgttcgacaccctccgcgaatttgctgaaaccggcgtcgattatatctccgttggcgccctgaccaagcacgtacgtgccctggacctctcgatgcgcttcaaataa

SEQ ID NO: 523167 - DNA, 564 bp, Stenotrophomonas maltophilia
atgttgttagaaaacggatggctggtggacgcgcgacatgtaccgtcgccgcaccacgattgccgcccggaggatgaaaagcccacactgctggtggttcacaacataagtctcccgccaggtgagtttggcggtccgtggatcgacgcgttattcacgggaacgatagatcccgatgctcatccttactttgctgagattgcgcatttgcgtgtatcggcgcactgcctgatccgccgtgatggcgaagtggttcagtatgttccttttgataagcgagcctggcatgccggcgtgtcgatgtatcaggggcgcgagcggtgcaatgatttctccattggaattgaactggaaggaacggacaccacgccttacaccgatgcgcaatatcagaaactggttgctgtgacgcaaactttagtggggctttatcccgccattgcagacaatattacggggcacagcgacatcgcccccgaaagaaaaaccgaccccggcccggcgtttgactggtcccggtttcacgccatgcttaccacgtcgtcagataaggagataacatga

SEQ ID NO: 523168 - DNA, 855 bp, Stenotrophomonas maltophilia
atgacgttgtttaccatgctgctggttatgatcgccgaacgcctgtttaagctcggcgagcactggcatctggatcatcggctggaagtgttattccgccggatcaggcatttttccatgctacgcacgctgcttatgacggcaggtgtgatggtgattacgttcctgttgctacgctcactttacggcctctttttcaacgtgccgctgctggtggtatggatactgctgggcgtgttgtgtattggcgcgggcaaggtgcgtttgcactatcacgcgtatctgaaagctgcttcccgggatgatgtccacgcgcgcggcgcgatggcgagcgagctgacgatgatccacggcgtaccgccggactgcgatgaacgcgaatttctgcgcgagctacaaaacgcgctgctgtggattaacttccgttactacctggcgccgctgttctggtttgtggtgggcggtccatggggaccggtactgctgatgggctatgcttttctgcgcgcctggcagacctggcttgcccgctaccttacgccgcatgaacgtctccagtccggcattgatgccattctgcacgtgctcgactggcttccggtgcgactggtcggcgtggtctatgccctcatcggtcacggtgaaaaggcgttgccagcgtggtttgcctcccttgcagaccgccataccgcgcagtatcaggtcttaacccgactggctcaattctcgctggctcgcgagccgcacacgaacaaagtcgaaacgcctaaagctgccgtctcgatggcgaaaaaaacgtcgtttgtggtggtggtgattgtggcgttgctgacgatttacggcacgctggtctga

SEQ ID NO: 523169 - DNA, 951 bp, Stenotrophomonas maltophilia
atgcaaacctggccaaacccgtttattgaacaacgcgccgacccgtatatcctgcgccacgaaggacaatattactttatcgcctccgtgccggagtatgaccggctggcgatccgccgcgcggactcgctggaagatttaggcaatgccgaagaggtagttgtctggcgcaagcccgacaccggcccgatgagccagctgatctgggcaccggaactgcatcatatcgacggcaagtggtacatctactttgccgccacacatacccaggcgctcgacgaactcgggatgttccagcatcgcatgttcgccattgaatgcgcagatcgcgatccgctcaccggtacgtgggtggaaaaagggcaaatcaaaaccccgtttgacaccttcgcgctggatgccactacctttgtgcatcagggcaaacgctggtatctgtgggcgcaaaaagccccggacatttccggtaactccaatctttacctgtgtgaaacggaaaatccgtggacgctgaaaggcgagccggtgatgctcagtaaaccggaatatgactgggagtgccgcggattctgggtcaacgaaggcccggcggtgctgttccatggtgataagctatttatcagctattccgccagcgccaccgacgagaattactgcatgggattactgtggatagacgtagatgccgatccgcaaaacccggctaactggcataaatccccgcgcccggtgttcgtcaccagctacgaaaaccgtcagtatggaccaggccataacagctttacgcagacgccggaaggcgacgatgtgctggtctaccacgcgcgaaactacactgaaattgaaggcgatccgctttacgatccgaatcgccacactcgcctgaagctcgtccgctgggacgacaacgggatgcctgatttcggcatcccgcctgcggatacgctgtaa

SEQ ID NO: 523170 - DNA, 1398 bp, Stenotrophomonas maltophilia
atggataacaacaaactgtcagtaaaagaaaagatcggctatggcatgggtgacgccggatgcaacattatctttggcgccatcatgttatttgttaactatttttatacggatatttttggtctggcgcctgcgctggttggggtactgctgctgtccgttcgcgtgattgacgccgtaacggacccaatcatgggcgcgattgccgaccgtacccgcagcaaatatggccgatttcgtccatggctactgtggattgccttcccctatgcgctgttcagcatcctgatgttcaccaccccagagtggagctataacagcaaagttatctatgcatttgtcacctacttcctgctgtcgctgacctataccgccatcaacattccgtactgctcgctcggtggcgtgatcaccaacgacccgaaagagcgcgttgcctgccagtcctatcgttttgttatggtcggtatcgccacgctgctgctgtcgcttacgctcctgccaatggccgactggttcggtggggataacaaagccaaaggctaccagatggcgatgaccgtgctggcgctgattggtacctgcatgttcctgttctgcttcgccacggtgcgcgagcgcgttcgcccggcggtacaaacccatgacgaactgaaaaacgacctgaaggatgtgtggaagaatgaccagtgggtgcgcattctgcttctgacgctctgcaacgtctgcccgggctttatccgcatggcggccaccatgtattacgtcacctgggtaatggggcaaagcacccatttcgccacgctgtttatcagcctgggcgttgtcggcatgatgttcggtagtatgctggcgaaagtgctgaccgaccgctggtgcaagctgaaggtcttcttctggaccaacatcgcgctggcgattttctcctgcgccttctacttcttcgacccgaaagcgacgacaaccattgttgtgctttacgtcctgctgaatatcctgcaccagatcccatcccctctgcactggtcactgatggccgacgtggacgactacggtgaatggaaaaccgggaaacgtatcaccgggatcagcttctccggcaacatcttcttcctgaagctgggtctggcgattgccggggcgatggttggcttcctgctctcctggtacggttatgacgcgggcgcaaaagcgcagagcgcggatgccatcaacggcattgtgctgctctttaccgtcattcctggcattggatatttaattaccgcgggcgttgtacgtctgctgaaagtggaccgtgagaccatgaagcaaatccagtccgatctggagaagcgtcgcaccaactatcgtgaactgagcgactatcaggaatttaaagccgctgagactaaataa

SEQ ID NO: 523171 - DNA, 1371 bp, Stenotrophomonas maltophilia
atggaagctcaacagcatggcgatcagctaaagcgcggccttaaaaaccgccatattcagctcatcgccctgggcggtgctattggtactggcctgtttctgggcagtgcgtccgttatccagtcggccggtccgggcatcattctgggttacgcgattgcaggtttcattgcgtttttgattatgcgccagttaggggaaatggtcgttgaggagccggttgcaggctcttttagccactttgcctacaaatactggggcagctttgcgggcttcgcctccggatggaactactgggttctttacgtgctggttgctatggcggaactcaccgccgtcggtaaatacattcaattctggtacccggagatccccacctgggcgtctgcggcagtcttcttcgtgctgatcaacgccattaacctgaccaacgtgaaagtgtttggggaaatggagttctggttcgccattatcaaagtaattgccgttgtagcgatgatcatttttggcggctggttgctcttcagcggcaacggtggcccgcaggcaaccgtacgcaacctctgggaacagggcgggttcctgccgcacggcatgaccggcctggtaatgatgatggcgatcattatgttctccttcggcggtctggagctggtgggcatcaccgccgcggaagccgacaacccggagcagagcatcccgaaagccacaaatcaggttatctaccgtattctgatcttctacgtgggctccctggcggtcctgctctccctgctgccatggacacgcgtcacggcggataccagcccgtttgtgctgatcttccacgagctgggcgacaccttcgtggcgaacgcgcttaacgtcgtagtgctgaccgccgcgctctctgtttataacagctgcgtttactgcaacagccgtatgctgttcggcctggcgcaacagggcaacgcaccgaaagcgctgcttaccgttgataaacgtggcgtaccggttaacaccattatcgtgtcggcggtcgtgacggcgctttgcgttctgattaactacctggcaccggaatcggccttcggcctgctgatggcgttggtggtttccgcgctggtgatcaactgggcgatgattagcctcgcgcacatcaagttccgccgcgccaagcagcagcagggcgtaaccacgcgcttccctgccctgctctatccgctggggaactgggtttgcctgctgttcatggcggccgtgctggtcatcatgctcatcacgccaggcatggcgatttccgtctacctcatcccggtgtggattgcgatcctcggcgtgggctatatggtgaaacagaaaaacgccaaaacggtgaaagcgcactaa

SEQ ID NO: 523172 - DNA, 765 bp, Stenotrophomonas maltophilia
atggcctacagcaaaattcgccaaccaaaactttccgatgtgattgagcagcagctggagtttttgattctcgaagggacactgcgcccgggcgagaaactcccgccagaacgcgagctggcaaaacagttcgacgtttcacgcccctctctgcgtgaggcgattcaacgtctcgaagcaaagggcctgttgctccgtcgtcagggtggcggaacctttgtgcaaaacagcctgtggcagagcttcagcgacccgctggtagaacttctctctgaccacccagaatcccagtttgatctgcttgagacccgtcacgcgctggaaggtatcgcggcctattacgccgcccttcgcagcactgatgaagaccgcgtacgtattcgcgagctgcatcaggccattgaacgggcacagcagtccggcgacttagacgccgaatccagcgccgttgtccagtatcaaattgccgtcaccgaagcagcgcacaacgtggtgctcctccatctgctacgctgcatggagcccatgctggcccagaacgttcgtcagaattttgaattgttgtatgcccgtcgggagatgctcccgctggtaagtaaccatcgcacccgagtattcgaggcgataatggccggggaaccggagcaggcgcgtgaagcgtcgcaccgccatctggctttcattgaggaaatcttgctggaccgcagccgtgaacaatcgcgtcgcgagcgttcattgcgccgcatacagcaacgaaaggattaa

SEQ ID NO: 523173 - DNA, 2664 bp, Stenotrophomonas maltophilia
atgtcagaacgtctccaaaatgacgtggatccgatcgaaactcgcgactggctacaggcgatcgaatcggtcatccgtgaagaaggtgttgagcgtgctcagtatctgattgatcagctgctttcagaagcgcgcaaaggcggcgtgaaagtggcttcaggtgcaggggctagcaactacgtaaacacgattgccgtcgaagacgaaccggaatacccgggcaatctggatctggaacgccgtatccgttctgctatccgctggaacgctatcatgaccgttctgcgcgcatccaagaaagatctggaactgggtggtcacatggcgtccttccagtcctctgcgaccgtttacgaagtgtgcttcaaccacttcttccgtgcagccaacgagaaagacggcggcgatctggtgtacttccagggccacatctctccgggcatctatgcacgtgccttcctggaaggtcgtctgactgaagagcagatgaacaacttccgtcaggaagttcacggtaagggtctgtcttcttatccgcaccctaaactgatgcctgagttctggcagttcccgaccgtatctatgggtctgggtccaattggtgcaatctatcaggctaaattcctgaagtacctggaacaccgtggtctgaaagacacctctgagcagaccgtttacgccttcctgggcgacggtgaaatggatgagccagaatctaaaggcgcgatcaccatcgcgacccgtgagaagctggacaacctgtgcttcatcatcaactgtaacctgcaacgtctggatggtccggtaaccggtaacggcaagatcattaacgaactggaaggcatcttcgcgggtgcaggctggaacgtgatcaaagtcatgtggggcggtcgttgggatgagctgctgcgtaaagacaccagcggtaaactgatccagctgatgaacgaaaccgttgacggcgactaccagaccttcaaatccaaagacggtgcctacgttcgtgagcacttcttcggcaaatatcctgaaaccgcagccctggttgcagactggactgacgagcagatctgggcgctgaaccgcggtggtcacgatccgaagaaagtttacgctgcactgaaaaaagcgcaggaaaccaaaggtaaagcgactgtgatcctggcccacaccatcaaaggttacggcatgggtgataccgcagaaggtaaaaacatcgctcaccaggttaagaaaatgaacatggacggcgtgcgttatatccgcgaccgtttcaacgttccagttaccgatgagcaggtagaaaacctgtcttacattaccttcccggaagggtctgaagagcataaatacctgcacgaacgtcgtcaggcactgaaaggctacctgcctgctcgtcagcctaacttcaccgagaagctggaactgccagccctggaagacttctctcagctgctggaagagcagaacaaagagatctctaccactatcgctttcgttcgtgccctgaacgtgatgctgaagaacaagtcaatcaaagatcgtctggttccaatcatcgccgacgaagcgcgtactttcggtatggaaggtctgttccgtcagatcggtatctacagcccgaacggccagcagtacaccccgcaggaccgtgagcaggttgcatactacaaagaagacgagaaaggtcagatccttcaggaaggtatcaacgaactgggtgcaggcgcatcctggctggctgctgcgacctcttacagcaccaacaacctgccgatgatcccgttctacatctactactccatgttcgggttccagcgtatcggtgatctgtgctggcaggcaggcgaccagcaggctcgcggcttcctgatcggtggtacttctggtcgtacgaccctgaacggtgaaggtctgcagcacgaagatggtcacagccacattcagtctctgactatccctaactgtatctcttacgacccgtcttacgcgtacgaagtggcagtcatcatgcatgacggtctgcagcgcatgtacggtgaagcgcaagagaacgtttactactacatcaccaccctgaacgaaaactaccacatgccggcaatgccagcaggtgccgaggaaggtatccgtaaaggtatctacaaactcgaaaccatcgaaggtagcaaaggtaaagttcagctgctgggctccggttctatcctgcgtcacgttcgtgaagcagcgcagatcctggcgaaagactacggtgtgggttccgatgtgtactctgtgacctccttcactgaactggcgcgtgatggccaggattgtgagcgctggaacatgctgcacccaatggaaaccccacgcgttccgtacatcgctcaggtgatgaacgacgcgccagcggtggcgtctactgactatatgaaactgttcgctgagcaggttcgtacttacgttccagctgatgattatcgcgtactgggtactgacggcttcggtcgttctgacagccgcgaaaacctgcgtcaccacttcgaagttgatgcttcctacgtggtagtagcagcactgggcgaactggctaaacgtggcgaaatcgataagaaagtggttgcggacgcaatcaccaaattcaacatcgatgcagataaagttaacccgcgtctggcgtaa

SEQ ID NO: 523174 - DNA, 1896 bp, Stenotrophomonas maltophilia
atggctatcgaaatcaatgtaccggacatcggggctgatgaagttgaaatcaccgagatcctggtcaaagtaggcgacaaagttgaagctgaacagtcgctgatcaccgtagaaggcgacaaagcctctatggaagtcccgtctcctcaggctggcatcgttaaagagatcaaagtctctgttggcgataaaaccgagactggcaaactgatcatgattttcgattccgccgacggtgcagcagctgctgcacctgcgcaggaagagaagaaagaagccgctcctgctgctgctccagcagcggccgcggcagcgaaagaagtaaatgtgcctgacatcggcggtgacgaagttgaagttaccgaaatcctggtgaaagtgggcgacaccgttgcggctgagcagtcactgatcaccgtagaaggcgacaaagcctctatggaagtgccagcaccgttcgccggtaccgttaaagagatcaagatcaacactggcgacaaagtgtctaccggctcgctgatcatggtcttcgaagtggcgggtgcagcacctgccgctgcgcctgctcaggctgctgctccggctccggccgctgcgccagcggctgctggcggcgcgaaagacgttaacgtaccggacatcggcggtgacgaagttgaagtgaccgaagtgatggtgaaagtgggcgacaaagttgccgctgaacagtcactgatcaccgttgaaggcgacaaagcttccatggaagtgcctgcgccgttcgccggtaccgttaaagagatcaaaatcaacaccggcgacaaagtgtctaccggctctctgatcatggtcttcgaagtggaaggcgcagcgcctgccgccgctccggctgccgcggctgctccggcacctgctgctgcaccggctcaggctgctaaacctgctgctgcccctgctgctaaagcagaaaaatctgagttcgctgaaaacgacgcttacgtccacgcgactccgctgattcgtcgcctggcgcgcgaattgggtgtgaacctggcgaaagtgaagggcaccggccgtaaaggtcgtatcctgcgcgaagacgttcaggcttacgtgaaagacgcggtgaaacgcgccgaagctgcacctgcggcagccgctggcggcggtatcccgggcatgctgccatggccgaaagtggacttcagtaagttcggtgaaatcgaagaagtggagctgggccgtatccagaaaatctctggtgctaacctgagccgtaactgggtgatgatcccgcacgttacgcacttcgataagaccgatatcaccgatctggaagcgttccgtaaacagcagaacgccgaagctgagaagcgtaagctggacgtgaagttcaccccagtggtctttatcatgaaggccgttgccgctgcccttgagcagatgccacgcttcaatagctccctgtctgaagacggccagaagctgacgctgaagaaatacatcaacatcggtgttgcggttgatacgccaaatggtctggtggttccggtcttcaaagacgtgaacaagaagagcattaccgagctgtcccgtgaactgaccaccatctccaaaaaagcgcgtgatggtaagctgactgccggcgaaatgcagggcggctgcttcactatctccagcatcggcggcctgggtaccacccacttcgcgccgattgtaaacgcgccggaagtggctatcctcggtgtgtccaagtccgcgatggagccggtgtggaatggcaaagagttcgtgccgcgtctgatgatgccaatctctctgtccttcgaccaccgcgtaatcgacggggctgatggtgcgcgtttcatcaccatcatcaacaacaccctgagcgacattcgccgcctggtgatgtaa

SEQ ID NO: 523175 - DNA, 1425 bp, Stenotrophomonas maltophilia
atgagcacagaaatcaaaactcaggtcgtagtacttggggcaggcccggcaggttactccgcagcatttcgcgccgcggatttaggtctggaaaccgtcatcgtagaacgttacagcaccctcggcggtgtttgtctgaacgtcggctgtatcccttctaaagcgctgctgcacgtagcgaaagttatcgaagaagccaaagcgctggctgaacacggtatcgtcttcggcgagccgaaaaccgatatcgacaaaattcgtacctggaaagagaaagttatcactcagctgaccggcggtctggcgggtatggccaaaggccgtaaagtgaaagtggtaaacggtctgggtaaattcaccggtgcgaacaccctggaagtggaaggcgaaaacggcaaaaccgtgatcaacttcgacaacgcgatcatcgcggcaggctctcgcccaatcgaactgccattcattccacatgaagatccacgcgtgtgggattccaccgatgcgctggagctgaaaaccgttcctaagcgtctgctggttatgggcggcggtatcatcggtctggaaatgggtactgtgtaccatgcgctgggttcagagatcgacgtggttgaaatgttcgaccaggtaatcccggcagccgacaaagatatcgttaaagtcttcaccaaacgcatcagcaagaaattcaacctgatgctggaaaccaaagtgactgccgttgaagcgaaagaagacggtatttacgtttccatggaaggcaaaaaagccccatccgaaccacagcgttacgacgccgtgctggtggctatcggccgtgtgccgaacggtaaaaatctcgacgcgggcaaagctggcgtggaagtggacgaccgtggcttcatccgcgttgacaaacagctgcgtaccaacgtgccgcacatctttgctatcggcgatatcgtcggtcagccaatgctggcgcacaaaggtgttcacgaaggtcatgttgccgctgaagttatcgccggcatgaagcattacttcgatccgaaagtgatcccatctatcgcgtataccgagccagaagttgcatgggttggtctgactgagaaagaagcgaaagagaaaggcatcagctacgaaactgccaccttcccgtgggctgcttctggccgtgctatcgcgtccgactgcgcagacggtatgaccaaactgatcttcgacaaagaaactcaccgcgtcatcggtggtgcgattgtcggtaccaacggcggcgagctgctgggtgaaatcggtctggctatcgaaatgggctgcgacgcagaagacatcgcgctgaccatccacgcacacccgactctgcatgagtccgtgggcctggcggcagaagtgtttgaaggtagcattactgacctgccaaacgcgaaagcgaagaagaaataa

SEQ ID NO: 523176 - DNA, 792 bp, Stenotrophomonas maltophilia
atgaaacgtcaattactcagtggaatggtgttgttcatggtctcggcggccgtcatggcacagcaatcgttcagttcgccagaacaggcgaccagtgcgctggcaagcgccatcagcgagcaaaacgaaagtgcgatgaacaatttgctcggtgaaaactggcgcgatttcctgccgccagaaggcgttgatcctgatgcggtcgatcgcttcctgcgcgactggaacgttcatcataaaaccgtcatcagtggcaacgtggcgcacctggtggtgggcgataacggctggcagctaccgatcccggtggtcaaaacggcatctggctggcagtttgatatgcaggaagccgcagaagagatcctgacccgcgaaatcgggcgcaacgaactcgcagccatcgaagcgcttcacgcctatgttgatgcccagcagagctattttgcgatgaaccaaaagtacgcgcagaagatagtcagttctaaaggtaaaaaggatggactgtactggcccggcgctcccggtgaaacgcccagcccactgggtccggcgttcagtcctccacagtcgggggcgggttaccatggttaccgattccgcatcatgccggataaaaatggctttgccatggtcgcctggccggtgaactacggtcagacgggggtaatgagctttgtaattaaccaggatgacgcggtttatcaggcagatctcggcaacgattcggcgcagaaagcgcaggctcttagtgaataccagccggataagacctggcagcctgtcacaccctga

SEQ ID NO: 523177 - DNA, 1518 bp, Stenotrophomonas maltophilia
atgaagttgccttttaagccacatcttcttgttctgctttgcagtgcggggctgtttgccgcctcgggtgtcatgtacgttaaaagccgcgcaacggaacctgctacgcctgctccggttacacaacaacctggcgcaccggtagcccagcctgcgcccgtcgctgccccggtctacactgcggcgcaaatcgaccaatgggttgcccctgtcgcgctttacccggatgccctgctgtcgcaaatcttgatggcgtcgacctacccgtcaaatgttattcaggccgcgcagtggtcgaaagacaatcctaaaatgcagggtgatgccgccctgcaggcggtagccacccagccgtgggatcccagcgtaaaatccctggttgcgtttcctcagctgatgtcgttgatgggcgaaaatccgccatgggtacaaaatctgggagacgccttccttgcacagccgaaagatgtgatggattccgtacagcggctgcgcctgctggcccaacaaacgggtgcgctacaatccacaccgcagcagacggtcaccaccgtcacgaaacctgcatcgacaaaaaccacgacaaccgcaacgcctaccagcccaacggtgatcaagattgaatccgccgatccgcaggtggtgtatgttcccacgtataatccgaatacggtttatggtagctggcctaacaccgcttacccgccggtctatcttccgccctcacccggcgagcaattcacggacagtctggttaaaggattaggttttagcctcggggtcgctacaacctacgccattttcagcaatattgactgggatgatgacgactgggatcaccatcatcacgatgatgactgggacaaccacggcggttataaccgcaacggtgataacaacatcaatatcaacgtggataatttcaacagaatcagcgggcagcacctgaacggtaataaccacacctggcagcacaatcctgcctatcgtgaaggcgtgccttacccgaataaccagctggctaaccgcttccactctacacagacagccaccgggctaagcgcgacgcagcaaaaaccagtcaatcgcgacagccagcgccaggccgctctcagccagatggaaaaatcaacgggtaaaaccctcccacactcagtacatacagccacgcgagacgcacaacgtctggcctcaacgcaacagttgaagcagatctcgcagcgaaataactatcgtggatatgacaccaggccgcaggccgtaaaacggacgagcacgccgcagcgtgtacatcatcagactgacatgcacagacaggagaagcgggtttcacagacggtacagcagccagccaggctgcatcgggccaatgccctgagcggcaacgacagccgctccgcgaactggcaagcccagcagcagcgcggggcgcaaagccggcagctcgctactcgtcaacatcagccgcgccagctcactggtgaacgcgctgaacgccatgaattccgtcatcgttaa

SEQ ID NO: 523178 - DNA, 2598 bp, Stenotrophomonas maltophilia
gtgctagaagaataccgtaagcacgtagcagaacgtgccgccgagggaattgtacccaaacctttagatgcaacccaaatggccgcgctcgtcgagctgctgaagaacccgcctgagggcgaagaagaattcctgttagatctgctgatcaaccgcgtaccgcctggcgtagatgaagctgcctacgtaaaagccggattccttgctgctatcgccaaaggcgaagccacctccccactggttactcctgaaaaagccattgaactgctcggcaccatgcagggcggctataacattcatccgctgattgacgcgctggacaacgaaaagctggcaccgattgctgccaaagcgctctcttcaacgctgctgatgttcgataacttctacgatgtagaagaaaaagccaaagcaggcaacgtttacgcgaagcaggtgatgcagtcctgggccgatgccgaatggttcctgaaccgccctgcgcttgctgaaaaaattaccgtgaccgtctttaaggttaccggtgaaaccaacaccgatgacctctctccggctccggacgcgtggtctcgtcctgatatccccctgcacgccctggcgatgctgaaaaacgcccgtgaaggcatcgagccggatcagccgggtagcgttggcccgattaaacagatcgaagcgcttcaggagaaaggtttcccgctggcctacgtcggtgatgtggttggtaccggttcttcccgtaaatccgccaccaactccgtgctgtggttcatgggcgacgacattccgcacgtgccgaacaagcgcggcggcggcctgtgcctcggcggcaaaattgcgccaatcttcttcaacaccatggaagatgcgggcgctctgccaattgaagtggacgtgagcaacctgaacatgggcgacgtgattgacgtttacccgtataaaggcgaagtgcgcaaccacgaaaccaacgaactgttggcaagcttcgagctgaaaaccgacgtgctgatcgacgaagtgcgtgccggtggccgtattccgctgatcattggccgtggcctgaccaccaaagcgcgtgaagcgctgggtctgccgcacagtgacgtgttccgtcaggcgaaagacgtggcggaaagcaatcgcggcttctcgctggcacagaaaatggtcggtcgcgcctgcggcatcgctggtatccgtcctggcgcgtactgcgagccgaaaatgacctccgtgggctctcaggacaccaccggtccaatgacccgtgatgaactgaaagaccttgcgtgcctgggcttctcgtctgacctggtgatgcagtccttctgccacactgcggcatatccgaagccggttgacgtcactacgcaccacacgctgcctgacttcattatgaaccgtggcggtgtctccctgcgtccgggcgacggcgttatccactcctggctgaaccgcatgctgctgccggataccgtgggtaccggcggtgactcccatacccgtttcccgattggtatctccttccctgcgggctccggtctggtggcgtttgccgcagcgaccggcgtgatgcctctcgacatgcctgaatccgtgctggtgcgcttcaaaggcaaaatgcagccgggcatcactctgcgcgatctggtgcacgcaatcccgctgtatgccatcaaacagggtctgctgaccgttgagaagaagggcaagaaaaacatcttctctggccgcattctggaaattgaaggtctgccggatctgaaagttgagcaggcgttcgagctgaccgatgcctctgccgagcgttctgcggcgggctgtaccatcaagctgaacaaagagccgattattgagtatctgacctccaacatcgtgctgctcaagtggatgattgcggaaggctacggcgaccgccgtacgctggagcgtcgtattcagggcatggaaaaatggctggcggatccgcagctgctggaagctgacgctgacgcagagtacgcggcggtgatcgacatcgatctggcggatatcaaagagccaatcctgtgtgcgccaaacgatccggacgatgcgcgtctgctctctgacgtacagggcgataagatcgacgaagtgttcatcggctcctgtatgaccaacatcggccacttccgtgctgccggtaagctgctggatactcacaaaggccagctgccgacccgtctgtgggtggcgccgccaacccgtatggatgcggcgcagctgaccgaagagggctactacagcgtgttcggtaagagcggggcgcgtattgaaattccgggctgctccctgtgcatgggcaaccaggcgcgcgtggccgacggtgcgacagtggtttccacctccacccgtaacttcccgaaccgtttgggtaccggggcgaacgtctacctggcttctgcggagctggcagcggtagcggcgctgattggcaaactgccaacgccggaagagtaccagacctttgtggctcaggtagataagacggcggtggatacctatcgctatctgaacttcgaccagctctctcagtacaccgagaaggctgacggggtgatcttccagaccgcggtataa

SEQ ID NO: 523179 - DNA, 363 bp, Stenotrophomonas maltophilia
atggattacgaatttttgcgcgacatcaccggcgtggtgaaagtgcgaatgtcgatggggcacgaagccgttggacactggtttaacgaagaggtgaaagagaacctcgcgctgctggatgaagtcgaacaggcagcggaaacggtgaaaggcagtgaacgctcctggcaacgcgccggacacgaatacaccctgtggatggatggcgaagaggtgatggtgcgtgccaaccagcttgagttctcgggtgatgagatggaagaggggatgagctactacgacgaagaaagcctgtcgctgtgcggtgtggaagatttcctgaaagtggtgaacgcctaccgcgactttatgaaacagaagtaa

SEQ ID NO: 523180 - DNA, 795 bp, Stenotrophomonas maltophilia
ttgaaaaagcttaaactgcatggctttaacaatctgaccaaaagcctgagtttttgtatttacgatatctgctacgccaaaacagcggaagagcgcgatggttatatcgcctatatcgatgaactctacaacgccaaccgtctgaccgagatcctgacagagacctgctcgattatcggcgccaacatcctgaatatcgcgcgccaggattacgagccgcagggagcaagcgtcaccattctggtcagtgaagagccggttgacccgcagcttatcgacaaaaccgagcaccccggcccactgccagaagtggttgtcgcccacctggataaaagccatatctgcgtgcacacctacccggaaagccacccggaaggcggactgtgtaccttccgcgcggatattgaagtgtcgacctgcggcgtgatttcaccgctgaatgcgttgaattatttaatccaccagctggaatccgatatcgtcactattgattatcgcgtgcgcggttttacccgtgatatcaacggcatgaagcacttcatcgatcatgagatcaactccattcagaacttcatgtccgacgacatgaagtcgctatacgacatgatggatgtgaacgtctatcaggagaatatcttccacaccaaaatgttacttaaggaattcgaccttaagcactacatgttccacacgaagccggaagatttaagcgaagaagagcgtaaggtcattactgacctgctctggaaagagatgcgcgaaatttactacggccgtaacattccgaccgtgtaa

SEQ ID NO: 523181 - DNA, 906 bp, Stenotrophomonas maltophilia
  misc_feature (633)..(642): n is a, c, g, or t
gtgaccgaaaaaacggtatggcaagaaacgctgcatgaccagtttggtcagtattttgccgtggataacgtgctctatcatgagaaaaccgatcatcaggatctgataatctttgaaaacgccgcctttggccgcgtgatggcgctggacggcgtggtgcaaaccaccgagcgcgacgagtttatctatcacgaaatgatgacccacgtcccgctgctggcccacggccacgcgaaggacgtgctgattatcggcggcggcgacggcgcgatgctgcgtgaagtctcgcgtcatcagaatgtcgaaaccatcaccatggtggaaatcgacgccggtgtggtgtcgttctgccgccagtatctgcccaaccacaatgctggcagctatgacgatccgcggtttaatctggttatcgacgatggcgtcaattttgttaaccagaccacgcaaacgtttgatgtcattatctctgactgtaccgaccctatcggtccgggcgcgtcgctgtttacctcgtcgttttacgaaggctgcaagcgctgcctgaagcctggcgggatttttgtggcgcaaaacggcgtttgcttcctgcaacaggatgaagcgctgcgcgtcaccctcggccttggacannnnnnnnnncttgatagccaccgtaagctgagcacctattttgctgacgtcagcttctaccaggcggcgatccccacttactacggcgggatcatgacctttgcctgggcgacggataacgacgtcctgcgccatctctccaccgaaattatccaggcccgcttccaccaggccggactcaaatgccgatactacaacccggcgatccacaccgcagcctttgcgttgcctcaatatctgcaagacgcgctgtcctcaaaggaggtgaactaa

SEQ ID NO: 523182 - DNA, 348 bp, Stenotrophomonas maltophilia
atgaagacgtttttcagaacaattttgttcgccagcctgatggcgatgtgtgcgaatagttacgcgctaagtgaaaacgaagcggaagatatggccgatctgacggcagtttttgtttttctgaaaaacgattgtggttaccagaatttacccaatgggcaaattcgtcgcgcactggtcttttttgcccagcagaaccaatgggacctcagcaactacgacagcttcgacatgaaggcgctcggtgaagacagctaccgtgatttaagcggtattggcattcccactgctaaaaaatgcaaagcgctggctcgcgattcactcagcctgctcgcctacgtgaagtaa

SEQ ID NO: 523183 - DNA, 1599 bp, Stenotrophomonas maltophilia
atgctcaaaagatcgcctgctggaaataaggaaatgcacatgcaacgtcgtgattttttaaaattttctgccgcgctgggggttgccagcgcgttacctctctggagccgcgccgtttttgccgccgacagacctgctttacccatacctgaattattcgccgcagatgcccgcagccgcattcagcttgtggtgcaggccggtaaaaccacgttcggtcagcacgccgccacgacgtggggttataacggcaatttgctcggcccggcgttgcagttacgcaaagggaaggcggtgacggtagacattcataacacgcttgcgcaagagaccacgctgcactggcatgggctggaagtcccgggcgaagtggatggggggcctcagggcgtcatcaggcctggtggtaagcgcagcgtcacctttactcctgaccagcgtgcagcgacctgctggttccacccgcatcagcatggcaaaacgggccatcaggtggcgatggggctggccggtctggtgctgattgaagacgatgaaagccgcctgctgcgcctgccgaaacagtgggggatcgacgatgtcccggtgattgtgcaggacaaaaaattcagcgctgacgggcaaattgactatcagctggacgtaatgagcgcggcggtaggctggtttggcgatacgctgctgaccaacggcgcaatctacccgcagcatgccgcgccaaaaggctggctgcgtttacgcctgctaaatggctgtaacgcccgctcgctgaacttcgccaccagcgataaacgcccgctgtatgtggtggcaagcgacggtggcctgctgccggaaccggtgaaggtgagcgagctgccgatgctgatgggcgagcgcttcgaggtgctggtggatatcagcgatggcaaagcgtttgacctggtgaccctgccggtcagccagatggggatggccgttgcgccgtttgataaaccccatccggtcctgcgcattcagccgctacagatcgccgcttccggtacgctgccggacgccctcaccacgctacccgcactcccgtcgctggacgggcttacgcagcgtaaacttcagctctccatggacccgatgctcgacatgatgggcatgcaggcgctgatgaagaagtacggcaagcaggccatggcgggaatgcaccacggccagatgatgggccatatgaatatggaccacggtaaaatgggcggcatggatcacggcggccatggtttcgatttccacgacgccaaccgcatcaacggcaaagcgttcgatatgaacacgcccatgttcgccgccacgaaagggcagtttgaacgctgggtgatttcaggcgaaggcgacatgatgctgcacccgttccatatccacggcacgcagttccgtattctctctgagaacggtaaagcgccggacgcgcatcgccggggctggaaagatacggtgagggtggaaggcggtgtcagcgaggtgctggtgaagttcgatcacgaagcgccgaaagagtttgcctatatggcccactgccatctgctggagcatgaagatacggggatgatgctgggctttaccgtataa

SEQ ID NO: 523184 - DNA, 2391 bp, Stenotrophomonas maltophilia
atggctgaaacaaaaactaaacagccgcgtctactggtgacattaacagccgcgtttgccgcattctgcgcgctgtatttgttaatcggtggcgtatggctggtcgcgattggcggctcctggtactacccgattgcgggtctggttatggttggcgtaaccgtcctgcttttactcagaaaacaatctgctctgtggctgtacgcagcgttactgctcgcaaccatgatctggggcgtctgggaggtcgggttcgacttctgggcgttgacgccgcgcagcgacattctggtcttcttcggtatctggctgatcctgccgtttgtctggcgtcgtctgatcgtcccttccagtggtgctgtagccggtctgatcgttgccctgctgattagtggcggcatcctgacctgggccggattcaacgacccgcaggagatccacggtacgctgaacactgaatccacgccggctgcggctatctcgcaggtggctgacggcgactggccagcctatggtcgtaatcaggaaggtcaacgttactccccgctgaagcagatcaacgcggacaacgtgaaaaacctgaaggaagcctgggtattccgtaccggcgacctgaaaatgccaaacgatccgggtgagctgaccaacgaagtgaccccgattaaagtgggcaacatgctctacctgtgtacggcgcaccagcgtctgttcgcgctcgacgcggccaccggtaaagagaaatggcactttgatccacagctgaactccaacccgtcgttccagcacatcacctgccgcggcgtctcttaccacgaagcgcgcgctgataatgccagcccggaagtcattgccgactgtcctcgccgcattatgctgccggtgaacgatggccgcctgtttgccatcaacgctgagaccggtaagctgtgcgaaaccttcgctaacaaaggcattctgaatcttcagaccaacatgccggacactacgccgggtctgtatgagccgacctccccgccaatcattaccgataaaaccatcgtgattgccggttcggtaacggataacttctctacccgcgaaacctccggcgttatccgtggtttcgacgtgaacaccggtaaactgctgtgggccttcgacccgggcgcgaaagatcccaacgcgatcccatcggatgaacacacctttacctttaactcaccgaactcctgggcaccggcagcgtatgacgcgaagctggacctggtttacctgccgatgggcgtgaccacgccggatatctggggcggtaaccgtacgccggagcaggaacgttacgccagctccatcgtggcgctgaacgcaacgaccggtaaactggcatggagctaccagaccgttcaccacgatctgtgggatatggatatgccgtcccagccgacgctggcggacattaccgttaacggtaaaaccgttccggtgatttacgccccggccaaaaccggcaacatcttcgtgctggatcgcagcaacggtaagctggttgttcctgcgccggaaaaaccggttccgcagggtgcggccaaaggcgactacgttaccaaaacgcagccgttctctgatctgagtttccgtccggagaaagacctcagcggtgcagacatgtggggtgccacgatgtttgaccagctggtatgccgcgtgatgttccaccagctgcgctatgaaggcatcttcacgccgccgtcagagcagggcacgctggtcttcccgggtaacctggggatgttcgagtggggtgggatctccgttgaccctaaccgtcaggtcgccatcgctaacccaatggcgctgccgttcgtttcccgtctgatcccacgcggtccgggtaacccaatggagcagcctaaagatgcgaaaggcagcggtaccgaagccggtatccagccgcagtatggcgttccttatggtgtgaccctgaatccgttcctttctccgttcggtctgccgtgtaaacagcctgcctggggttacatctccggtctggatctgaagaccaacaagatcgtctggaagaaacgtattggtacgccacaggacagcatgccgttcccgatgcctgttccagtgccgttcaatatgggtatgccaatgctgggtggcccaatctccaccgccggtaacgtgctgttcatcgcggcaaccgcagataactacctgcgcgcgtacaacatgaccaacggtgaaaaactgtggcaaggccgtctgccagccggtggacaggctacgccgatgacctatgaagtgaatggcaagcagtacgttgtcatctccgcaggtggtcacggttcgtttggcacgaagatgggcgactatattgtcgcgtatgcactgcctgacgacgctaagtaa

SEQ ID NO: 523185 - DNA, 537 bp, Stenotrophomonas maltophilia
atgaaacatactgttgaagtgatgatcccggaagccgagatcaaagcgcgtatcgccgaactgggtcgtcaaatcaccgaacattacaaggacagcggcagcgaaatggtgctggtcggtctgttgcgtggttctttcatgttcatggcagacctgtgccgtgaagtgcaggtgccgcacgaggtcgattttatgaccgcctccagttacggcagcggcatgtccacaacccgtgatgtgaaaatcctgaaagatttggatgaagatattcgtggcaaagatgtgttgattgttgaggacatcatcgactccggtaacacgctctctaaagtgcgtgagatcctgagcctgcgtgaaccaaaatcactggcgatttgtactctgctggataagcctgagcgccgtgaagtgcaggtgccggtggagttcgttggtttctccatcccggacgaattcgtggtgggttacggcattgattacgcgcagcgttatcgccatctgccgtatgttgggaaagtagtgattctggacgaataa

SEQ ID NO: 523186 - DNA, 663 bp, Stenotrophomonas maltophilia
atgaacgacatagatacactcatcagcaacaatgcactatggtcaaaaatgctggtggaggaagaccccggattttttggaaaactcgcgcaagcgcagaacccgcgctttctctggattggatgttctgacagccgtgtccccgccgaacgtctgacgggtcttgaacctggcgaactgtttgttcaccgcaatgtggctaacctggttattcataccgatctcaactgcctttcggttgtgcagtacgccgttgacgttcttgaggttgagcacatcattatttgtggccactacggctgcggcggcgtgcaggcggcggtcgaaaacacagagctggggttaatcgataactggctgctgcacattcgtgatatctggttcaaacatagctcactgctgggcgaaatgccgcaggagcgccgtctcgacacgctgtgtgagctgaacgtgatggagcaggtctataacctgggccattcgacgattatgcagtctgcctggaaacgcgggcagaaggtctccatccacggctgggcgtacggtattcacgacggtctgctgcgcaatctggaagtgaccgccaccaaccgcgaaacgctggaacagcgttaccgctcgggaattgccaacctcaagcttaagcatgtgaaccataaataa

SEQ ID NO: 523187 - DNA, 927 bp, Stenotrophomonas maltophilia
atggcgattgcactggagcttgaacagctcaaaaaaacctacccggggggcgttcaggcgctgcgcgggatagatcttaaagtcgaagcgggagatttctacgcgcttctggggccgaacggggcggggaaatccaccaccatcgggatcatcagctcgctggtcaacaaaacctccggccgcgtcagcgtgtttggctacgatctgcaaaaagatgtggtcaacgccaagcgtcagctggggctggtgccgcaggagttcaacttcaacccgtttgagacggtacagcagattgttgttaaccaggcgggttactatggcgttgagcgcaaagaggcgcttgagcgcagcgaaaagtatctgaaacagctcgacctgtgggagaagcgtaacgaacgcgcgcggatgttgtccggggggatgaagcgccgcctgatgattgcccgcgcgctgatgcacgagccaaagctgcttatccttgatgagccgactgctggcgtggatattgaactgcgtcgttccatgtggggcttcctgaaagatctgaacgataaaggcaccaccatcattctgaccacgcactacctggaagaggcggaaatgctgtgccgcaatatcggcattattcagcacggtgagctggtggaaaacacctcgatgaagaatctgctctccaagctcaaatcagagacctttatcctcgatctggcggcgaaaagcgcgctgccgaaactggagggctacaactatcgcctggtcgatacctcgacgctggaggtagaagtgctgcgcgagcagggtatcaacagcgtgttctcacagttgagtgcgcagggcattcaggtattaagcatgcgtaacaaagcaaaccgactggaagagctgtttgtctctctggtgcacgacaaacaaggagacaaggcatga

SEQ ID NO: 523188 - DNA, 771 bp, Stenotrophomonas maltophilia
atgacgcatctttactgggtcgcgctgaaaagcatctgggcaaaagagattaaccgctttatgcgtatctgggtgcaaaccctggtgccgccggtgatcaccatgacgctctacttcatcattttcggtaacctgattggctcccgcattggtgagatgcacggttttacctatatgcagtttatcgtgccgggcctgatcatgatggcggtgatcaccaacgcttacgcgaacgtagcgtcgtcgttctttagcgccaagttccagcgcaacattgaagagctgctggtggcgccggtgccaacgcatgtgatcatcgccggttacgtgggcggcggcgtagcgcgcgggctgtgcgtggggattctggtgacggcgatttcgttgttcttcgtcccgttccaggtgcattcgtggctgttcgtggcgctcacattattgctgacggcgatcctgttctccctcgccgggctgctgaacgcggtgtttgctaaaacgtttgatgacatcagcctgatcccgaccttcgtgctgacgccgctgacctatctgggcggggtgttttactccctgacgctgctgccgccgttctggcaggcgctgtcgcacctgaacccgattgtctacatgatcagcggcttccgctttggcttcctcggcattgccgatgtcccgctgttcaccaccgttgtggtgctggtggtgtttatcgtggcattctatctgctgtgctggtatctgatccagcgcggacgcgggctgcgtagctaa

SEQ ID NO: 523189 - DNA, 441 bp, Stenotrophomonas maltophilia
atgctgggatgggtgatcacctgccacgatgaagaggcacaggaaatgctgcttaagctggaggcccgatttggccccctggcgcaatgtcgtgcggtaaattactggcgagggctgagcaccaatatgctcagccgaatgatgtgtgacgcgctgcatgaaaccgacaccggcgatggcgtgatttttctcactgacagatccggcgcggcgccataccgtgcggctgccctaatgagccataagcacgataactgtgaagtaatctccggtatcagcctgcctttactcgaagcgatgtatccgctgcgcgcaacgttgagcagcgctgaatttcgtcacgccattgtggcgcagggctcgccgggcgtgagcagcttgtggcaccagcagcagaagaacccgccttttgttctgcttcacgatctgtataagcattaa

SEQ ID NO: 523190 - DNA, 1299 bp, Stenotrophomonas maltophilia
atgccgcttttgttacaatggcggctgattttctgtgtcgatttatattccatgctcaagcgcgttatctttatccttctgctcgtggtttccggtggtgcgtctgccagcctgaccagccagcaaggccttcctgctcagtatatgcaaaccaccgaagatgcggccatctgggcgcaggtaggaaatgccgttgtgaatgtggggaatgtccgcgccgggcagatcctcgctgtctttccggccgcggcggattactatgaatttcgtttcggattcggtacggggtttattgataaagaccaccttgaaaaagttcagggcaaacaacgcgttgaggatagcctgggtgacttgaacaagccgctcagtaatcaaaacctcattacctggaaagacacgccggtgtataacgcccccagcagcggaagcgcgccctttggcaccttaagcgctaatcttcgctatccgattctgaataagctgaaagaccgcctgaaccagacctggttccagatccgtatcggtaatcgtctggcatgggtaagcagcctggatgcgcaggaagataacgggctaccggttctgacctaccatcatattttgcgtgatgaagagaacacccgttttcgacatacctccacgacgaccagcgtacgtgcgtttaataatcagatggcctggttacgcgatcagggctacaccacgctgacgatgtaccagcttgaagggtacgtgcgtaacaagatgaacctgcccgcgaaagcggtggtgatcacttttgatgatggcctcaaatcggtgagtcgttacgcgtaccctgttctgaaagaatatggcttcaacgcgacggcgtttattatttcatcccgaatcaaaggccatccgcagaagtgggatccaaaatcgctacagtttatgagcgttcaggaaatcaagggcatccaggatgtgttcgacattcagtctcacactcatttcctgcatcgcgtggatggctataaacaccccatcctgttgagccgtagctatcacgtgatcctgtttgattttgaacgctcacgtcgtgcactggcgcagttcaacccgcgcgtattgtatgtgtcttatccgtttggcggctatgacaataaagcgataaaggcagcgaatgacgctggttttcatctggcagtgacgacgatgaaggggaaggtgaagccgggggataatccgttcctgttgaagcgtttgtatatcttaagaacggactcactggagacgatgtcgcggctgatcagtaatcagccgcagggatag

SEQ ID NO: 523191 - DNA, 1065 bp, Stenotrophomonas maltophilia
atgctcgaaatgttaatgcagtggtatcggcgtcggtttagcgatccggaagccattgctttgctggtcattctggttgccggattcggtatcctgttcttctttagtggcctgttggcaccgcttctggtggcaattgtgctggcgtatctgctggagtggcccaccgcgcgtctggaacatatcggctgttcccgtcgctgggcgaccagcattgtcctggtgctgtttgtcggcattctgctgctgatgtccttcgtggtgatgcccatcgcctggcaacaggggatctacctgatccgcgacatgcccggcatgctgaataaactgtctgattttgccgccacgctgccgcgccgctatcctgcgctgatggacgccgggatcatcgatgcgatggccgaaaacatgcgcgcccgcatcatgaccatgggtgactcggtggtgaaatactctctggcctcgctggtggggttgctgacgctggcggtttaccttgttctcgtgccgctaatggtgtttttcctggtcaaagataaagagcagatgctgaatgcggtgcgccgcgtgctgccgcgcaatcgcggtctcgcaggacaggtctggcaggagatgaaccagcaaatcaccaactacattcgcggcaaagtgcttgagatgattgtggtgggcgtggcgacctggattggcttcgtgattttcgggctgaactactcgctgctgctggcggtgttggtcggattctcggttctgatcccgtatatcggcgcgtttgtggtgaccattccggtagtcggtgtggcgctgttccagtttggtctgggtacggagttctggagctgtttcgccgtatacctgattattcagggactggacgggaacctgctggtaccggtgctgttctcagaagcagttaacctgcatccgttggtgattatcctgtcagtggtgattttcggcgggctgtggggattctggggcgtgttcttcgccattccgctggcgacgctgattaaagccgtggtccacgcgtggccggatgtgccggcggtggaagagaagtag

SEQ ID NO: 523192 - DNA, 1464 bp, Stenotrophomonas maltophilia
atgttcaggcagttgagaaaaacactggttgcgacactgattgccgccgtgacggtgggtcaggtgttgcccgctttcgctgactcgtccgattcattgccggacatgggcaccacggcaggaagcacgctctccatcgggcaggagatgcagatgggtgattattacgtacgccagctgcgcggcagtgctccgctgattaacgaccctttgctggtgcagtacatcaacggtctggggatgcgactggtggcgcacgcagactcggtaaaaacgcccttccacttctatttaatcaataacgacgaaatcaacgccttcgccttctttggcgggaacgtggtgctgcattcggcgttgttccgttattccgataacgaaagccagctggcgtccgtcatggcgcacgaaatttcgcacgtcacccagcgccatctggcgcgtgcgatggaagatcagaagcgtaacgcccccctgacctgggtgggcgcgctgggctctattctgctggcgatggccagcccgcaggccggaatggcggcgcttaccgggacgctggcgggaacgcgtcaggggatgatcagctttacccagcagaacgagcaggaagcagaccgcatcggcattcaggttttacagcgttccggctttgacccgcaggccatgccgagcttcctggaaaaactgctcgaccaggcacgctactcgtcgcgcccgcctgaaattctgttgacccacccgttgccggaaagccgtctctcggatgcgcgtaaccgtgctaaccagatgcgtccggtcgtcgtgcagtcctcgcaggatttctacatggccaaagtgagaacgcttggcatgtacaactccggacgtaatcagctcaccagcgatctgctggacgcgctggcgaaaggcaacgtgcgcgagaagaacgccgcgcagtatggtcaggcactccaggcgatggaggccagcaagtacgatgaagcgcgtaaagcgctacagccgctgctggcgtcggcgcctgacaatccgtggtatctcgacctcgcaaccgatatcgatttaggacagaaaaaagcgaccgatgcgatcaaccgtctgaaaggggcgaaagacattcgcaacaatccggtattgcaacttaacctggcgaacgcctacttacagggcggccagcccggcgaggcggtgaccattctgaaccgctatacctttaacaataaagatgaccagaacggctgggagctgctcgcccaggcccaggggcaactgggtaatcgcgatcaggagctggccgcgcgtgcggaaggtctggcgctggcggggcgcctcgatcaggccatttccctgctaagcagcgccagctcacaggtgaagctcggcagcctgcaacaggcccgctacgatgcgcgaatcgaccagctgcgtggcctgcaacaacgctttaagccgtacgagaagatgtaa

SEQ ID NO: 523193 - DNA, 357 bp, Stenotrophomonas maltophilia
atgacagacgcggtaaaaatttaccataaccctcgctgctccaagagccgcgagactctgaatttgctgaagtctaacgacatcgatccggaagtggtgttgtatctggagacgcccccggacgcgcagacgatccgccagctgctgaagatgctgaacatgggcagcgcacgcgagctgatgcgtcagaaagaagatctgtataaatcgctcaatctgaacgataccagtctcactgaagatcggctgattcaggcgatggtcgacaatccaaagctgattgagcgcccgattgtcgtggcgaacggcaaggcgcgtatcggccgtccgccggaagacgtactcgggatcctctaa

SEQ ID NO: 523194 - DNA, 813 bp, Stenotrophomonas maltophilia
atggaaatcaaactgcatgctaacgccaccaccacaccgcgtatccgtcgctatcttcagcagtcagataaaagcgacagtgaactggggatctcggtcaccaccgtcaggcgctggcgcaaccgcgaccaggtttcggataaccacacaacgccaaaagtgatacacaaagcattgagacaagagcaggcggcactgataaatgccctgcgggatatcactggggcaccgctggatgaactgctgctgctggtgaatgacggactcgggatcgccgtttcccgcgcgaccctgaaccgctacctcaaaccggcttcggtaagacaaaagggggcgtcgttgcagggcaaaaaggcactgaaggccggtatcatgccgcagaagctacttctgcatcatcagccgctatcgctgcatatggacgacggtggggagcaacacctgctctgggcgcgtgaacccgtcagcggctggtgctacgcccggctttatgccggtgtctcgccgcagttgctgacccgctggacgaacgaggtgctggctgcatgtccggctgatattcaatctattgagacttttgggctggcagtgaacttgccggagcataacgtcaccgtaaaagtgcattcacagtattatcttgcccttcaggtcaccgtgccgttacgtgagatcattccgcgcgtgaatagtgaaccggcgggagaactgttgatccagttgtgtgaatttttcaaccggggaaaagcgcagaaaaagctgggggagagtacgccgcaggcgtttctggaagcgctgcggcgtaacgattag

SEQ ID NO: 523195 - DNA, 1320 bp, Stenotrophomonas maltophilia
atgaacaatgttctgggatttcttgaagcaaaactgatgccgctggcggcgaaaacggcccagcagcgtcatcttggggccattcgtggggcctacgtttcattcatgccgtttatcatcgtcggctccatcctgctggtgatctcctccttcccgaatcaggcctatcagcagtttatgtctcaggcctttggtgagagctggagtgcgattatagagattccattcaacgcggtattctcaaccatgtcgctgtttatcagcttcctggtggcctaccgcctggctgagcattatggcgaggaccgcatctcctgcggcatcctggcgctggttgcgtttctgatcctgacgccctttatcaaagtggcggaaaacggcggcattaccgtgatgccagtggagtggattggcagcaaagggttgtttgtggcgatgatcggttccctgctgtggacggaactgttctgctggctgaagcgcaaaaagctggtcatcaaaatgccggacggcgtaccaccggcggtgcaggagtcgttcgcggcgctgatcccggccctgctggtgatgattctggtgcttattatccgcatcatcttcgaaaacacccactaccacaccatccaccagtttatttatgaagtggttgccaccccggtgcgccactacggtacctcttatttcggtgcgctgatgaccgtattcagtatcaccattctgtggtcagtgggcattaactccggttcgatgatcaacggcattattcgcccgctgtggatggaaaaccagaccgacaacatcgccgcgattcaggcgggaacgacgccgccgcacatcatcaccgaacagttttttgacatgatctggatgggcggcgcgggcgccacgctgtcgctggtgatagcgatgctgattttcgcccgcagcaaaaacatgcgtgaggtggcgcgcctcggcgcaggagcctcggtatttaacatcaacgaaccgatcctgtttggcctgccggtgatcatgaacccgatcatgctcatcccgtttaatctggtgccgctggtgctggtcaccgtgcagtatgcggcgatgaaaattggcgcggtcgccgtcaccaccggggtgtttattccctggacgctgccgccggttatcagcggctttatcgtcaccgggcacctgagcggcagcgtgatgcagctgatcaacctgctgattggcgccatgctgtacctgcctttcatgcgtatcgtggataaacagtaccgcgccgcggagctgactaccgctacgcaacccgacaccacccttgcaaaacaggagtaa

SEQ ID NO: 523196 - DNA, 957 bp, Stenotrophomonas maltophilia
atgtggggaattatcgcaacctggcgaatggcacttgaaggggtaacggaatccgcgtctgccctggcggcgggaaaaccggtcgcttcggcggtggtcgatgccgtcgctgccgtggaagactttccgctgtataaatccgtcggctacggtggcctgccgaccgaaaacggcgaggtggagctggacgcggcctatatggacggcgacacgctggcgttcggcgccgtggggaatctggtggatatcgccaacccggtgcgcgtggcgcacgcgctcagccgtcaacgctataacagcctgctggtcggccagggcgcgcgcgaatgggcgctgagccagggctttgccgacaaaaccatgctcacggatcgcgccatgcagcactaccgcaagcgctgccgcgaaacgctggataaggggttaagcccctacgacggacatgacaccgtcggcatcattggccttgataaacagggttcgatgagcgtcgccacctccaccagtggcctgtttatgaaaaaacgtggtcgcctcggtgactcacccatcatcggctccggcttttactgcgacagcgaaaccggcgcggccaccgccacaggcgtcggtgaagacctgatgaagggctgtaccagctacgaaatcgttcgccggatggcgcaagggatgacgccgcagcaggcggcggattcagtcgtattcgaactggaagacaagctgatgtcgcgcttcggtcgcgcgggcgatctctccgtggtgtgcatgaacagcaaaggagaatttggcgccgcgaccaacataaaaaccttctcgttcgtggtggcgacggctcgccagcccctcaccgtttttcgtactgaacgcctgcgggagaaaacgcactatcacgcggtagatgaggagtggatgcaagcctatgccgcacggatccgcgcgccgattgaggaatcatga

SEQ ID NO: 523197 - DNA, 1419 bp, Stenotrophomonas maltophilia
atgatcacttaccagtttatcaacgcgctttcagacgcgaagccgaacagccatttgattgcgcgcgctgacagttccctgttactggatagcgctcttatcgctgaaatgcgccagcagagcaccgtcgcggacgcgcgctttggctgcgcgccgtttgcgcgcattactctgttgccggacacgatctggcatgacgccctgaccgaagggttgctcaccgccctgcgaccgctgcttaccgcccccgccagcgccgaactcgtgctggacgtgacggatatcgacgatgtggtgctggcgcaggtgctgcgttttctctttaatcaggcgcacaggctcagtgacctgaagctgaagaagacggacgaagcggtgcgtcttacctgcatcactgccctctgcctgccggaacagcaggcgaagctggagacgaccttccgccagcagcaggccattgcgctcggcatgatcgcggcgcgacgtctggcggatatgccgtccgaccgctgcacgccgcagtttgtggtggaagaggcgcaaaaactgtgtgccgccagccctgccctgcgctgcgaggtgctgaacgaaaaagatattgctgagcagggtcttggactgctgcacgccgttggcaaaggggcgacctgcccgccgcgtctgctggctattcattatgatggtgccaacgacggcccgatgcgctgctacgtgggaaaaggcattacctttgacaccggcggcctgtggctgaaggaaggcgtgggcatgtacaccatgaaatatgacatgtgcggcgcggccaacgtactggggctgatgctgaccgttgcggagctgaaattacccgtgcgcatcatgggcgtgctggcgctggcggaaaacgccatcggccccgacgccatgcagcccggcacggtggcaacagcctgtaacggcaccaccgttgaaatcaataataccgatgccgagggccggctggtgctggctgacgccattgcctgggccagccagcggtacccgcaggcccgctacatcattgatatggcgactttgacgggcgcagtggtgaaagcgctggggtatgagctgagcgggctgatgacccaggatgaaccgctgcgcgccgcgttgacgcaggcaggaaaacggagcggtgacgaggtgtggtctctgccgctggacgcacggctgaaaaagcagaccgacagcgcgattgccgatctgtgcaacacaccgactaacaatgcagcgataagcgcctcggcggcgtggctgctgcatcacttctgtccgccggcgatcccatgggcacatctggatatcagcgggacggcgctgtggcgtgagaacggcagaagcgtggcgtcgggaagaccgattccgctgctggttgagcacctgatgggggatctttag

SEQ ID NO: 523198 - DNA, 579 bp, Stenotrophomonas maltophilia
gtgctgcgccaggaacacagcggatacatctatatctggtcacgcgaaggcgcgggacgcagccacctgctgcatgccgcctgtgcggaactttcggcgcgcggtgacgcggtaggctatgtgccgctggataaacgcacctggtttgtgcctgaagtgctggagggcatggaacatctctccctggtctgcatcgataatattgaatgcgtggcgggagacgagccgtgggaaatggcgatctttaacctctacaaccgcattctggagtcgggcaaaacccggctgctgatcaccggcgatcgtccgccgcgtcagctcaatctggggctgccggatctggcgtctcgtctggactgggggcaaatctacaagctgcaaccgctgtcggatgaagacaaactccaggcacttcagttgcgcgccagactgcgcggatttgaactgccggaagacgtaggccgcttcctgctcaagcgtctggatcgggagatgcgcacgctctttgatacgctcgatcagctcgatcgcgcctccatcaccgcccagcgcaagctgaccattccgtttgtgagttga

SEQ ID NO: 523199 - DNA, 1290 bp, Stenotrophomonas maltophilia
atgacgcgccgtgctatcggggtgagtgaaagaccgccgcttttacagacaatcccgcttagtttgcagcacctgttcgccatgtttggcgcaaccgtgctggtgccaatcctgtttcacattaacccggctaccgtgctgctgtttaacggcatcggtacgctgctttacctcttcatctgtaaaggcaaaatcccggcctatctcgggtcgagcttcgcgtttatctccccggtactgctgttgctgccgctgggttacgaggtcgcgctgggcggctttatcatgtgcggcgtgctgttctgcctggtctccttcatcgtgaagaaagcgggtaccggctggctggacgtgatgttcccgcctgcggcaatgggggcaatcgttgccgtcatcggcctggaactggcgggtgtcgcggcgaacatggctgggctgctgcctgcggacggtcagtcaccggattctaaaaccattattatttcgctggtgacgctgggcgtgacggttttcggttccgtcctgttccgcggctttatggcgattatcccgatcctgatcggcgtgctcgcgggttacgcgctctccttcgtgatgggcgttgtggataccacaccgattgccgaggcacactggttcgcgctgccgaccttctacaccccacgcttcgaatggtttgctatcttcaccattctgcctgctgcactggtggtgattgctgagcacgttggccacctggtggtgacggcgaacatcgtgaagcgtgacctgatccgcgacccgggcctgcatcgctccatgtttgccaacggtttctccaccatcatctccggtttcttcggctccacgcctaacaccacttacggggagaacatcggcgtaatggcgatcacccgcgtctacagcacctgggttatcggcggcgcggcgatcatcgctattctgctctcctgcgtcggcaaactggcggcggcgatccagattatcccggttccggtgatgggcggcgtttccctgctgctttacggggtgatcggtgcgtccggtattcgcgtgctgattgaatccaaagtggattacagcaaggcgcagaacctgatcctgacctccgttatcctgatcatcggcgtaagcggcgcgaaggtgcacatcggcgcggcagagctgaagggtatggcgctggcgaccatcgtcggcgtgggcctgagcctgattttcaagctgatctcggtcattcgtccggaagaagaaatcctggacgctgacgatagcgaaaaagccccacattga

SEQ ID NO: 523200 - DNA, 627 bp, Stenotrophomonas maltophilia
atgaagattgtggaagtgaaacacccactcgttaaacacaagttgggcctgatgcgtgagcatgacatcagcacgaagcgttttcgcgaactggcttctgaagtgggtagcctgctgacctacgaagcgacctctgatctggaaacggaaaaagtgaccatcgaaggctggaacggcccggtgcaggttgaacagatcaaaggtaaaaaaattaccgtggtgccaatcctgcgtgcgggtctgggcatgatggaaggcgtgctggagcacgtcccaagcgcgcgtatcagcgtggtgggtatctaccgtaacgaagagacgcttgagccggtcccatacttccagaagctggtctctaacattgatgagcgtatggcgctggtagttgacccgatgctggcgaccggtggttcgatgatcgccaccattgacctgctgaaacaagcaggttgcagcagcatcaaagtgctggtgctggtcgcggcgccggaaggtatcgcggcgctggaaaaagcgcacccggacgttgaactctataccgcgtctgtcgaccagggactgaacgagcacgggtacatcatcccggggctcggcgatgccggcgataagatttttgggactaaataa

SEQ ID NO: 523201 - DNA, 1431 bp, Stenotrophomonas maltophilia
atgtcaggatttaaagcaggttttctgtggggtggggccgttgcggcgcaccagcttgaaggcggctggaaagagggcggcaagggcgtgagcgttgccgatgtcatgacggcaggcgcccacggggtaccgcgtgaaatcaccaacggcgtgctggaggggaaaaattacccaaaccacgaagccatcgacttttaccaccgctataaagaagacatcaaactctttgccgagatggggttcaaatgcttccgcacctccattgcctggacgcgtatcttcccgaaaggcgacgagctggagccgaacgaagcgggactcaaattctatgacgatcttttcgacgagtgcctgaagcacggcatcgagccggtgatcacgctttcccacttcgagatgcctttccacctcgtaacggaatacggcggctggcgtaaccgtaagctgatcgacttctttgtccgcttcgcgaaggtcgtttttgagcgctatcagcataaagtgaagtactggatgacctttaacgagatcaataaccaggccaactttcatgaagactttgcgccgtttaccaactccgggctgaaatatgcgccgggagaagatcgcgagccggtgatgttccaggcggcgcactatgagctggtggccagcgccctggcggtgaaagcggggcgcaagatcaacccatcactgcacatcggctgcatgattgccatgtgccccatctatccgctgacctgtgccccggacgacatgatgatggcgatgaacgccatgcatcgccgctactggttcaccgacgttcacgtgcgcggcaagtatccgcagcatctgctcaactactttgaacgtcgcggcttcgcgctggatatcaccgaagaagataaagtggcgctgacgcagggctgcgtggattacatcgggttcagctactatatgtcgttcgccaccaaagcgacggcggataatccgacgctggattatgacgagagcaagagcctggtttctaacccgtacgtgcagaaatcggactggggctggcagatcgatcctgtcgggctgcgctactctctgaattggttctgggatcactatcagctgccgctgtttattgtggaaaacggctttggcgcgatcgacgtgctggagagcgacggcacggtgaacgaccagtaccgcatcgactacctttccgcccacatccgcgagatgaaaaaagcggtggtggaagacggcgtggatctgatgggctataccccgtggggctgtatcgacctggtctctgccggcactggcgagatgaagaaacgctacggttttatctttgtcgataaagataacgaaggtaacggcacgctgaaccgcagcaagaagaaatcgttcgactggtataagcaggtgattgcgagcaacggcgataacctgtaa

SEQ ID NO: 523202 - DNA, 1038 bp, Stenotrophomonas maltophilia
gtgaccaacaaaacttctctcagctacaaagatgccggtgttgatattgacgcaggtaatgcgctggttgaccgaatcaaaggtgtggtgaaaaaaacccgccgcccggaagtgatgggtggcctgggtggattcggcgcactgtgcgcgctgccgcaaaaatatcgtgaacctgtgctggtctcgggtacggatggtgtcggtacaaaactgcgcctggcgatggatcttaagcatcacgatacgattggtattgatctggtggcgatgtgcgtcaacgacctggtggtacagggcgctgagccgctgttcttcctggattactacgcgaccggcaagctggatgtggataccgcagccagcgtcattaacggtatcgccgaaggctgtctgcaatccggctgtgcgctggtcggcggtgaaaccgctgaaatgccaggcatgtatcacggtgaagattatgacgtcgcaggcttctgcgtcggcgtggtagaaaaatcagaaattatcgacggcagcaaagtggctgacggcgatgtgctggttgcgctggcctccagcggtccgcactccaacggctactctctggtgcgtaagatcctcgaagtgagcggttgcgacccgctgaccaccgagctggacggcaaaccgctggccgatcacctgctggccccgacccgcatctacgtgaaaaacgtgctggagctgattgagaacgttgacgtgcacgccatcgctcaccttaccggcggcggcttctgggaaaacattccgcgcgtgctgccggacaatacccaggcggtgatcgacgcctcctcatggcagtggccgcccgtcttcaactggctgcaaaccgcaggcaacgtgagcgagcatgaaatgtaccgcacctttaactgcggcgtgggcatggttatcgccctgcccgccagcgaagcggataaagcggttaagctgctgacagaaaaaggtgaaaacgcgtggaaaatcggtacgattaaagcttccgattccgaacagtgtgtggtcattgaatga

SEQ ID NO: 523203 - DNA, 642 bp, Stenotrophomonas maltophilia
atgaaaaacatcgtggtgctcatttccggcaacggaagcaatttgcaggcaattatagacgcctgcaaacagaagaaaatcaatggcaccattcgggcagtattcagcaacaaggccgatgcgttcggccttgagcgcgcgcgggaagcgaacattcctgcgcacgcgctagaagccagccagttcgccgggcgtgaagcctttgaccgtgagctggtgcaggagattgacgcctacgcgcctgacgtggtggtgctggcgggctacatgcgtatcctgagcccggccttcgtcgcgcattacaacggacgtttgctgaatatccacccttctcttctgccgaaatatcctggcctgcatacccatcgtcaggtgctggagaacggcgatgaggagcatggtacctccgtgcatttcgttaccgacgagctggacggcggtccggtcattttgcaggcaaaagtaccggtctttgacggtgacaacgaagacgacgtgacggaacgtgtacaggctcaggaacacgccatttatccgctggtggtaagctggtttgttgacggccgtcttgagatgcgcgacggtgccgcctggctggacggcgtgaagttacccccgcagggtcatgcggctgaagagtag

SEQ ID NO: 523204 - DNA, 2061 bp, Stenotrophomonas maltophilia
atgggtcaggaaaagttatatatcgagaaagagctaagctggttagcattcaacgaacgtgtacttcaggaagcggccgataaaagcaacccgctgattgagcgtatgcgttttttaggcatctattccaacaatctggatgagttctacaaggttcgcttcgccgaactaaaacgccgaatcatcatcagcgaagaacagggcttaaactcccactcgcggcatctgcttggaaaaatccagtctcgcgtcatgaaagccgatcaggaatttgatggcctctataacgagctgctgctggaaatggcacgcaaccaaatcttcctgatcaacgaacgccagctctccgcgaatcagcaaaactggctgcgccactatttcaaacactatctgcgccagcatatcaccccgattctgatcaaccgtgaaaccgatctggtgcagttcctgaaagatgattacacctatctggcggtagaaatcattcgtggtgagaccattaactacgcgctgctggaaataccgtctgataaagtcccgcgctttgtaaatctgccgccggaaaccccgcgccgacgtaagccgatgatcctgctggataacattctgcgctactgtctggacgatatcttcaaaggcttcttcgattacgacgcgctcaacgcctactcaatgaagatgacccgtgatgccgagtacgatctggtgcatgagatggaggccagcctgatggaactgatgtcttccagcctcaagcagcgcctgacggcagagccggtgcgttttgtctatcagcgcgatatgccggacgcgatggtggagatgctgcgcgataagctgaccatctcccgctacgactccataatccccggtgggcgttaccacaactttaaagatttcattggcttcccgaacgtcggcaaagccaatctggtaaacaaaccgctgccgcgcctgcgccatatctggttcgataaattccgcaacgggttcgatgccatccgcgagcgggatgtgctgctctactatccgtatcacacctttgaacacgtgctggaattgctgcgtcaggcctcgttcgatccgaacgtgctggcgattaaaatcaacatttatcgcgtggcgaaagattcccgcatcatcgatgcgatgatccacgcggcgcacaacggcaagaaagtgaccgtggtggttgagctccaggctcgcttcgacgaagaggccaacatccactgggcacgccgactgacggaagcgggcgtgcacgtcatcttctccgcgccggggctgaaaattcacgccaagttgttcctgatctcccgtaaagagggcgacgacgtggtgcgctacgcccatatcggtaccgggaactttaacgagaaaaccgcgcgtatttacaccgactattcgctgctgactgccgatgcccgcatcaccaacgaagtgcgtcgggtgttcaacttcattgagaacccgtaccgcccggtgagcttcgattatctgctggtgtcaccgcagaactcacggcgcctgctgtacgatatgatcgacaaagagattgccaatgcgcagaacgggttgtcgtccggcatcacgctgaagctcaacaatctggtggacaaaggcctggtggatcgcctgtatgcggcctccagctccggcgttccggtaaatctgctcattcgcggcatgtgctcgctcattccggaactggaaggcatcagcgacaacatccgcgtgatcagcattgtggatcgctatcttgaacacgatcgcgtctatattttcgataacgccggtgataagcgcgtatacctctcgtccgccgactggatgacgcgtaacattgattaccgtattgaagtggcggcaccgctgctggatcctcgcctgaagcagcgtatcctggacattatcgagatcctgttcagcgatacggtgaaagcacgttatatcgacaaagaactcagtaatcgctatgtaccgcgcggcaatcgccgtaaagtgcggtcgcagctggcgatttacgattacatcaaatcacttgagcaacccgattaa

SEQ ID NO: 523205 - DNA, 1539 bp, Stenotrophomonas maltophilia
atgccaataaacgataataccccacgcccgcaggagttcgctgcggtcgatcttggctcaaacagtttccatatggtcatcgcccgcgaggtggatggcgcgatgcagatcatcggtcgtctgaagcagcgcgtgcatctggccgatgggctcgacgcgcgtaacatgctgagcgaagaggcaatggagcgcgggcttaactgcctgtcgctgttcgcagaacgtctgcaaggcttttcgccgtccagcgtctgcatcgtcgggacgcatacgctacgccaggcgctgaacgcgccggaatttcttaagcgcgcggaaaaggttatcccctacccgattgagatcatctccggtaacgaagaagcgcgcctgatttttatgggcgtggagcatacgcagccggaaaaaggccgcaagctggtgattgatatcggcggaggctcaaccgaactggtgattggcgaagatttcgagccgcgtctggttgaaagccgccgtatgggctgcgtcagcttcgcgcaaatgtattttccgggcggcgtcatcacccgcgaaaacttccagcgcgcgcgcatggccgccgtgcaaaaactggaaaatctggcctggcagtatcgtattcagggctggaacgtggcgctgggcgcatcggggtcgattaaagcggcccatgaagtgctgctggcgatgggtgaaaaggacgggtttattacgcctgagcgcctggtgaaactcaccgaagaggtgcttaagcacaagagcttcgacgccctgagtctgccgggcttgtccgacgagcgtaaagcggtgttcgtaccggggctggcgatcctctgcggcgtgtttgacgcgctggcgatcaaagagctgcgcctctctgacggcgccctgcgcgaaggtgtgctgtatgagatggaaggccgtttccgtcatcaggatattcgcagccgcaccgcgcagagccttgccaaccagtacaacatcgaccgcgaacaggcgaaacgggtgctggaaaccacggttcagatgtacgagcagtgggaggagcagaatccaaagctggcgcatccgcagctggccgcgctgttaaaatgggccgcgatgctgcatgaggtggggctgaacattaaccacagcggaatgcatcgccattcagcctatattctgcaaaatagcgatctgcctggcttcaaccaggagcagcaaaccatgatggcgacgctggtgcgctatcaccgcaaagccatcaagctcgacgatctgccgcgctttacgctatttaagaaaaagcagttcctgccactcattcagcttctgcgcctgggcgtgctgctcaataatcagcgacaggcgaccaccacgccgccgacactgaagcttaaaacggatgactatcactggacgctgagcttcccgcacgactggtttagccagaacgcgctggtgctgctggatctggaaaaagagcagcagtactgggaagcggtcaccggctggctgttgaagattgaagaagagagttctgaggcggcagcgtaa

SEQ ID NO: 523206 - DNA, 2298 bp, Stenotrophomonas maltophilia
atgaatattcaccacatcctgaagcaaaataaagaccgctggtgggcacttcctcttatattacccgtcgtgttactcccggtgcttagtgtggctaataccttaacgcagctgggcgacggtatcgttgcgctctattatctcccactctcctttctgctgacgctgatgttgttctttggcctggaagcccttcccggagtggtggtgtcgctgtttttacgttattacccgtccgttgggctgtttgaaaccgtgaccggcattctgcattttatcgtccccctggtgctcagctggggcggttaccgcgtgtttgcgccccgacgcaatatgaccgcttacggtgacatacgcctgatggggcaacgtatcttctggcaggtgttttgcccggcaacgctttttctggtgctatttcagtttgcggtttatctcggggtctatgagagccgccagagccttgcaggattgaatcccctcaatattcggacccttattaactatcaggggctgctggtgagcgggctgacgggtgtgccgctaagctacctgctgatccgcctgacacgtcatccgcgctatatcaagggactgatgtcccagctccgcacgcaaatagacaaaaaggtgacggccgttgagtttgtggtgtggtttttagctctgggtgggttgctggctatgctgctgctgcccatgaatgaaaacagttccattttcagcaccaactacactttgtcactgctgatgcccgtgatgctctggggggcgatgcgctttggctacaagctaatgtcaatcatctggacgccggtcctgctggtgtcgattcactttttttatcactacattccggtgcaggagggttatggcattcagctggcgatcagctcatccagctatctggtcttttccttcgttgtgacgtatatgtcgatgctggcgacacgtcagcggaccatcaatattcgctcccgcagtcaggcttttctcgatccggtggtgcatatgcccaacctgcgggcgctgtcgcgagagctggccagtaacccctggtcggcgctctgtttactgcgcgtgcccgagctggaagtgctggggcgtaattacggcgtactgctacggatccagtataagcagcagctggcgcaatggataaatggcacccttcagccaaaagagcaagtctatcacctcaccggatatgacatggcggtgcgactggaggcggagtcgcatcaacagcgtattgagacgctggacgagcatattaagcagtttgtttttatctgggatggtatgccggtgcagcctcaggttggcgtgagctactgctatgtacgctcacccgtcaatcacctctatctggtgctgggggaactgggcatcgtggctgacctctccctctcaacgaatcacccggaaaatcttcagcagcgcggggctgttcacttgcagcgtagcctgaaagataaggtggcgatgatgagccgtttgcagacagcgctggagcagaacgcttttagcctgttagttcagcccgttcgcggcctgcgcggcgatcattaccacgaagtgctgctgcgaatgcgtgatgataacggggcgctgatctttcccgagcagttcctgcccatagcacaggagtttggtttatcgtcgcgtgtcgatttatgggtactggagcgtacgttgagtttcctggcacagcaccgccagcgtttgccgggccagcgctttgccatcaacctcgcaccttctaccgtctaccgggcgcagttcccgcttgaagtgagccgcctgttagccagatatgccgttgaagcatggcagctgatctttgaagtgaccgaaagtagcgcctttggtcatgcggatctggcggcatccaccctcaggcaattgcaaaaaatgggaatacggatcgccattgatgattttggcaccggctacgccagctatgcgcggttaaaaagcgtggacgccgacattctcaaaatcgacggcggctttattcgcaatattgtcagcaacagcctggattaccagatcgtggcatccatttgccatctggcccggatgaagaaaatgctggtggtggcagaatgtgtggaaacagaagagatacgtagcgcggtgcacgcgctaggtatcgattatgtgcagggctacttaattggattgccagttgagcttgatacgttgctcgaaacacagccttctcaggagagcgccttagccgttacgctgccgcctcagaactctcttcttcaatcttcaacagccagccggtga

SEQ ID NO: 523207 - DNA, 189 bp, Stenotrophomonas maltophilia
gtgagtcaggctacgcgtatgcgaaaacgacatcgatttaacacccggatgacccgcatcatactgctcatcagtttcctgtttttctttggccgctttgtttattcctccattggcgcctggtatcaccatcaggacaaaattcagtcacagcaatcaggtcttgtagtggattcgcccgagcgctaa

SEQ ID NO: 523208 - DNA, 468 bp, Stenotrophomonas maltophilia
atgattcgtcgatatttcctgcttcctgtatttgcgctgacgtcctttgctggcgcactggccgcaccgttggatggcctgagcgccggtgatgttaatggcccggccgccgtagcgccgcaggaaaaaccccagccgccagcaaaactgatcgtcgacccaccgctggcgggaccgctgagtaaaggtgcggtctttattcagtaccgcgtcgaaaacctgcgcattgaacctgtatttggacccgacgcgctgaaagtcactccgcgtatcggccatattcacgtagtggtggatgacgcgccctggcactgggctgaaaccagcggcgagccggtgatcctggtcgggctgcccgccgggaaacacaaggtaaccatcatcgttgccgacccgacgcataagcccatcgaccataaaaccgttgaattcaccgtaccgccccacgcggcggttcatcacttttaa

SEQ ID NO: 523209 - DNA, 276 bp, Stenotrophomonas maltophilia; identical to SEQ ID NO: 147206

SEQ ID NO: 523210 - DNA, 276 bp, Stenotrophomonas maltophilia
gtgaaggacgttgagcgcagcgtgattgccgcgacgctgagccccattaaggccaatgcgtttggggagaaagtcgcgcatgccgcctggcatgacaaaccgagctggtatgtggtcagcaaacatgaccggatgatcaatcctgagcttgagcgcgcaatggcgaagaaaatcaacgccaacaccacggaggttgcggcaagccatgtatcgatggtcagccagccggacgttgttacccgtacgattgaacaggcgttatcgggtcaacagtga

SEQ ID NO: 523211 - DNA, 837 bp, Stenotrophomonas maltophilia
atgagaaactgcaaactgcgtcacaggttcccccgttcactcatcggtcgcagcgtgaaaagcatcctgtcgggggccgtcctggcgttactggctaccccggcgctggcggccgggcagcgccagggcaacgtgttaaccctggggggcggcgtggatgttgcgccacgctattccggttcggataagagccgcgttactgcggctcaggtggttgattacgcgatggcaaatgggttctttatcagtaccacccgcgggctcggctacggcaaccgcgttggcaacctggattacagcgctgcgctgagctatcgcgcaggacgtaaggatcgcgacgtaagcagcgattcaatcgcctccggcagcgactacctgcgggggatgggtgacatcaaaggctcggtcgtcgttgtgccggggctggggtacaggataactgactggcttaacgtgcagctgcaggctgaggtcccggtttcggaaagagacaacggtgaggctgtgcactttggcattgccagcccgctctacacctctcctgaaaactcggtgacgctggcgctgaccggcagctggggatccagcaagtacatgcaaacgtactacggggtcagcgccgcccagtcggccgcatcgggatttgcccgacatgatgccggatcgggcatatacgcctattcgctgaacctggactggacccataagctcacctcccgctggagcctgcttaccgcagctggcgttacgcagctgacgggagaggcgggcgatagccccattgttcagcgaaaaacgtctcctgtgggaagtttgaaggtgacgtatagcttctga

SEQ ID NO: 523212 - DNA, 678 bp, Stenotrophomonas maltophilia
gtgaaaattctactaattgaagacgacctggatctcggcaatggcgtacgtatcgcccttgcagatcaaggatttgatgtcatatgggtacgccggaaagaggatgcgctgcttcagcttgagctctgcgtgccggaacttattctgctcgacctggggctgcccgatggcgatggcatgagcctgatgacgcgtctgcgtcagcagctccgggggatccccgtcattatcctgacggcgcgaggcacgctgcaggaccgcctgtgcgggctggacgcgggcgcggacgactatctggtcaaaccttttgttctcgccgagctgctggcacgcgtgagagcccttgcgcgacgcagttacggttttgaaaatgaggcaatagaaattcgcggtttgtcgcttcatattccgacgcgtcgcgtaacggtgagcgcacgccacgttgagctgacggcaagcgaatatgcgctgcttgaaacgttaatgctgcgcgccgatcgcgtgcttacgcggcggtatctggaagagaggatattcggcacgaaagaaaatctcagcaacgcgctcgacgtgcatatgggtaacctgcggcgaaaaattggcgatggctttgtgcgaacggtgcggggcgtagggtacgtcattgataccgtaccggttcagaaggcggcaggttga

SEQ ID NO: 523213 - DNA, 1341 bp, Stenotrophomonas maltophilia
atgctggtcgcccagatgctgctgcttacgttgctctggtgtttctttttaaccttcattttgctggaggacctgcgcagccctccaatactcacgggcagtgagacttacgaaaccctcttttcccttgttgagagcatggaggataggccgcaggcgcgtaatgaggtgctggccgcgttcagcaaggcgctgcgggagggttatggcggcggtgaagatccggagctcgctatcaacctgatcgttcgcaagcataatgagattattttttcttcgcgtggcgcgccaacggaggtgaaaaatagcctcctgggggaaatgcagcgcgtccggaccggagaccacacctggacgagccgcacgctcaaatccgcgcgctccgacgttgaagtcacccttttcaccccggctggcagctggaatttctttatctacctgaactcgcgcggctattacgtcatgccgctgctggtatgcatcccttttcttctgtttcccgcatggctgtcaatccgcatcgcgatgcgcccctggaacagggtagtgaatgaaatttcattgcgcacgccagacgatctctctcccttaaaagccgttcccaggcacagggagctgcgccagacggtggacgcgattaatgactttctcgccagggtgcgggaaagcgccgaaagggaaagggtgtttattgccgatgccgcgcacgagctgcgtacgccgctggccgcgatgcgaatcaacgtcgaggcgctgcagtcctgggtcatcagcgaaagccagcaggagctgcttgcaggcattgttcgcagcaatagccgtgctgctcgtctcgtcaatcagcttctgctgatgaagcacagcgaagcgcacatcgacacgttaatggagcctgtgccgctgacaacgcttattcaggagcgaatggccgcactggagccgctggcatcggcacgcgggattgagtttgaattcttcggtgacgatgaaatccatgtcgcaggcattcgggaacgtctggtgtcgctgatcgacaatttaattgagaatgccgtgaagtacagccctgagggtggacgcattgaggtacaactgcaatcgcgtgataagtccgctcagctgcgcgtctcagacgccggccccggtatcccggttgaactgcgggagcgcgtgttcgacagatttttccgcgatcctaatcagacccaaagcgggagtggactggggcttgccatcgtcaaagccgttacgcagcaacacaacggcagggtcaatctgagtacgtcagccgaaggtggtcttatggtgaccgttgatttcccgaatccgtcgttcgcatga

SEQ ID NO: 523214 - DNA, 480 bp, Stenotrophomonas maltophilia
atgttagattaccgcttcccgacagctttgcagatggttctcagcgtagcgatggcggagcaatcgggtgaacgttcgacgagtgcaatcctggcttacggcctggaagcgaatccgagctttatccgcaaattaatggttcctctcgcccgcgacggcattatcgtctccacgcttggccgcaacggctctattcaccttggccgcccggctgaagagatcaccctgcgtgatatctacctttctgtcactgaagataaaaagctgtgggcgtcccgtcctgacgtcccggcccgctgtgtggtcagcgccaacgcctgctggtacttcaaatcaatcgctgatgaagcggagcaggcttcgttagcggttttagcgcgccataccgtcgccagcgcgctggaagaggtgaaaaaagccgataccagcgggtgcgatccggtgccggaactctgtacacagcataaaaaagcgccttaa

SEQ ID NO: 523215 - DNA, 3153 bp, Stenotrophomonas maltophilia
atggacttttcccgttttttcatcgacaggccgatttttgccgccgtactgtcgattctgatttttatcacaggattaatcgccatcccgctgctgccggtgagcgaatatcctgatgtcgtgccgccaagcgtgcaggtgcgcgccgagtacccgggcgccaacccgaaagtgattgccgaaaccgtggcgacgccgctggaagaggcgatcaacggcgttgaaaacatgatgtacatgaaatccgtcgcgggctccgatggcgtgctggtgactaccgtcaccttccgtccgggtaccgacccggatcaggcgcaggtacaggtgcaaaaccgcgtcgcacaggccgaggcgcgtctgccggaagacgttcggcgtctgggcatcacgactcagaaacagtcgccaacgctgacgctggtggtgcatctcttttcgcctggcggtaagtacgattcactgtatatgcgtaactacgccacgctgaaggtgaaggacgagctggcgcgtctgcccggcgtgggtcagatccagattttcggctcgggtgaatacgcgatgcgcgtctggctggatccaaacaaggtggcggcgcgcggactgacggcctcggacgtggtgacggcgatgcaggagcaaaacgtacaggtatccgccgggcagcttggcgccgagccgctgccgaaagagagcgatttcctgatctccattaacgcccagggccgtctgcataccgaagaagagtttggcaatattgtcctgaaaacaacgcaggacggtacggtcgtccgcctgcgcgacgtggcgcgtatcgagatgggttccggcagctatgcgctgcgctcccagctgaacaataaagacgcggtcgggattggtatcttccagtcgccgggggcaaacgccatcgatctgtctaacgcggtgcgcgccaaaatggacgaactgtccacccgtttcccggacgatatgaagtgggcggcaccttacgacccaacggtatttgtgcgcgactcgatccgtgcggttgtacaaacgctgctggaagcggtggtgctggtcgtgctggtggtgatcctgttcctgcaaacctggcgcgcgtcgatcatcccgctgatcgcggtgccggtatcggtcgtgggtaccttcagcattctttacctgctgggcttctcgctgaataccctgagcctgttcgggctggtgctggccatcggtatcgtggtggatgatgccatcgtggtggtggagaacgtcgagcgaaatatcgaagaggggctcgtcccgcttgcggcggcgcatcaggcgatgcgtgaagtgtccgggccgattatcgccattgcgctggtgctgtgtgcagtgtttgtgccgatggcgttcctctctggcgtgaccggccagttctacaaacagtttgcggtaacgatagccatttccacggtgatctccgcgatcaactcgctgacgctttctccggcgctggccgcgctgctgttgaagccgcatggtgccccgaaagatttcccgacccggcttatcgatcgtctgttcggctggattttccgtccgtttaaccgctttttccatcgcagctcgaccggctatcagggactggtagggaaaacgcttggccgacgcggtgcagtgtttgcggtttatttgctgctgctttgtgccgcgggtgtgatgtttaaagtcgtacccggcgggtttattccgacgcaggataagctgtacctgatcggcggcgtgaaaatgccggaaggctcgtcgctggcgcgtaccgatgcggtgatccgcaaaatgagcgaaatcgggatgaataccgaaggcgtggattatgcggtcgcgtttcctggcctgaacgcgctccagttcaccaatacgccgaacaccggaacggtcttctttggcctgaagccgttcgaccagcgtaaacatactgcggcggaaattaacgcggagatcaatgcgaaaatcgctcaaatccagcagggctttggcttctcgattctgccgccgccgattttagggctgggtcaagggtccggttattccctgtatattcaggatcgtgctggtctgggctatggcgcgctgcaaaacgcggtgaacaccatgtccggggcgattatgcagacgccgggtatgcatttccccatctcaacctaccaggctaacgttccgcagctggatgtgcaggttgaccgtgataaagcgaaagcgcagggcgtatcgcttaccgatcttttcggcacgctgcaaacctatctgggctcgtcatatgtaaacgactttaaccagtttggacggacctggcgcgtaatggcacaggccgacgggcagttccgcgacagcgtggaagatatcgcgaatttacgcacacgcaatgaccagggcgaaatggtgccgattggcagtatggtgaaaatcacgaccacctacgggccggacccggtgatccgctataatggttacccggcggcggatcttattggtgatgctgacccgcgcgtgctctcttccgcgcaggcgatgacgcagctggacgccatgtctaagcagatcctgccgaacgggatgaatattgaatggacggacctgagtttccagcaggccacccagggcaatacggcgctgatcgtcttcccggtcgcggtgctgctggcgttcctggtgctggcggcgctgtatgaaagctggacgctgccgctggcggtgatccttatcgtgccgatgacgatgctctccgcgctgttcggcgtctggctgaccgggggcgataacaacgtcttcgtgcaggtggggctggtcgtgctgatggggctggcctgtaaaaacgcgatacttatcgtggagtttgcccgcgagctggaaattcagggcaaaggcatcatggaggctgcgctggaggcgtgccgcctgcgtttacgcccgattgtaatgacctctatcgcctttattgccgggaccattccactgatccttggtcacggggcaggggcagaagtccgcggcgtcaccgggatcaccgtcttctccgggatgctgggcgtaacgctgtttggtctgttcctgacgccggtcttttacgtgacgctgcgtaagttcgtgacgcgcggcaaagcggaaagagaggtgttgcctgcgtag

SEQ ID NO: 523216 - DNA, 1176 bp, Stenotrophomonas maltophilia
atgagcctgcaaaaaacctggggttactttcatctgagcgcgacgggggtggttttactctccgcgcttctcgtcgggtgcgatgacagtgtcgcgcaaaatgctgcaccgcaagcgcccgtcgtcagcgcagctgacgtggtggtgaaatccattagccagtgggacagctttaacggtcgcattgaagcggtggaaagcgttcagctgcgcccacgcgtctccggctacattgataaagtgaattacaccgacggtcaggaggtgaaaaagggcgaggtgctgttcacgattgatgaccgaacctatcgcgcggcgctggaacaggcgcaggcgaacctggcgagagccaaaacgcaggccagcctggcgcgaagcgaggctaaccgtaccgataaattagtcaataccaacgtggtatcccgtgaagagtgggagcagcgccgttccgccgctacccaggcgcaggccgatattcgcgcggcacaggcggcggttgatgccgcgcagctcaacctcgacttcaccaaagtgaccgcgcctatcgacggtcgcgccagccgggcgctgatcaccagcggtaacctggtgactgcgggtgacagcgccagcgtgctcaccaccctggtctcacagaagacggtttacgtctacttcgacgtggacgagtccacctatcttcactatcagaacctggcccgcagcgggcagggggcgtccagtcaccacacggcgctgccagtggagattggtctgacgggtgaggagggctatccccatcagggcaaagtggatttcctggataaccagctcacgccgagtaccggtacaatccgcatgcgcgcgctgctggataactcacagcgtcagttcacgccgggactcttcgcacgcgtgcgcctgccgggcagtgcggaatttaaagccacgcttgttgacgataaggcggtgctgaccgatcaggatcgtaagtatgtttatgtcgttgataaagacgggaaagcgcagcgccgcgatattacgccggggcgtctggccgacggtttacgtatcgtacagcaggggctgaatcccggggataaagtcatcgtcgatggtttacaaaaagtgtttatgccgggtatgccggttaacgcgaaaaccgttgccatgaccgccagcgccgccctcaactga

SEQ ID NO: 523217 - DNA, 354 bp, Stenotrophomonas maltophilia
atgaacacgggtgcattcattcacgatttgctcgactggatcgacaacaaccttgatagccgcctggacattgaaaccgtctccaggcgagccggctattcgaaatggcatctccagcggatcttcaaagaacataccggctcccctctcgccgaatatattcgcgcgcaaaagctgcaaaaatcggttgagcgcttagcccaaagcgatgaaccgattctgaacgtggcgatcgcgctgggctttgactctcagcagtccttcaaccgcagctttaagcgtcagtatggtcaggcgccaggggcatggcgacgcagtatcggctgccgtggatcccgacagatgagccaataa

SEQ ID NO: 523218 - DNA, 516 bp, Stenotrophomonas maltophilia; identical to SEQ ID NO: 119039

SEQ ID NO: 523219 - DNA, 492 bp, Stenotrophomonas maltophilia
atgcctatccctccctatctttggctaaaagatgatggtggtgcagatatcaaaggctctgtagatgttcaggatcgtgagggctctatcgaggtaatcagtatgggtcatggtgttaaccttcccgtcgatactgccaatggaaagatcaccggaacacgccaacattcatcatttaattttgaaaaagaagtcgacagttccagtccctatctctacaaagcagcagctacagggcaaacattaaaaagtgcagaagtaaaattttatcatatcaatgatgcgggccaagaggtgtgttattacaccgtattaatggaaaatgtaaaaataacgggtgttaattgtggtgtgcccaatgttaaattatcaggcaatgataagttaaatcatatggaatccgtctctatgcaatatgaaaaaatcacatggcgtattgtagatgggaatatccaattctctgattcatggtacgagaggccaacagcataa

SEQ ID NO: 523220 - DNA, 1578 bp, Stenotrophomonas maltophilia
atgacggaaaacattcataaacatcgcatcctcatcctcgattttggttctcagtacactcaactggtggcgcgtcgcgtgcgtgagctgggcgtttactgtgagctgtgggcgtgggatgtcacggaagcacagattcgcgagttcaatccaagcggcatcatcctgtccggcggcccggagagcaccaccgaagagaacagcccgcgcgcgccacagtacgtattcgaagcgggcgtaccggtgttcggcgtgtgctacggcatgcagactatggcgatgcagctgggcggccacgtagaaggctctaacgagcgtgagttcggctacgcgcaggtagaagtcgtcaccgacagcgcgctggtgcgcggaatcgaagactccctgaccgcagacggcaaaccgctgctggacgtgtggatgagccacggcgacaaagtcaccgctatcccgtcggacttcgtgactgtagccagcaccgaaagctgcccgttcgcgattatggcgaacgaagaaaaacgcttctacggcgtgcagttccacccggaagtgactcacacccgtcagggtatgcgcatgctggagcgcttcgtgcgtgatatctgccagtgtgaagccctgtggaccccggcaaaaatcatcgacgacgccgtggagcgtatccgccagcaggttggtgatgacaaagtgatcctcggcctctccggcggcgtggactcctccgtgaccgcgatgctgctgcaccgcgccatcggcaaaaacctgacctgcgtcttcgtggacaacggcctgctgcgtctgaacgaagcccagcaggtcatggacatgttcggcgaccacttcggtctgaacatcgttcacgtggaaggcgaacagcgcttcctggacgcgctgaaaggcgagaacgatccggaagcgaaacgtaaaatcatcggccgcgtattcgtggaagtgttcgatgaagaagcgctgaagctggaagacgtgaaatggctggcgcagggcactatctaccctgacgtgatcgagtctgcggcctccgcaaccggtaaagcgcacgttatcaaatctcaccacaacgtgggcggcctgccgaaagagatgaagatgggcctggttgaaccactgcgtgagctattcaaagacgaagtgcgtaagatcggtctggagctggggctgccgtacgatatgctctaccgtcacccattcccgggcccgggcctcggcgtacgcgtgctgggcgaagtgaagaaagagtactgcgacctgctgcgtcgtgcggacgcgatcttcatcgaagagctgcacaaggctgacctgtacaacaaggtaagccaggcgttcaccgtgttcctgccggttcgttctgtaggcgtaatgggcgatggacgtaagtacgactgggttgtttccctgcgtgcagtggaaaccatcgacttcatgaccgcgcactgggcgcacctgccgtatgacttcttaggccgcgtgtctaaccgcatcatcaacgaagtgaacggcatttcccgcgtggtgtatgacatcagcggcaagccaccggcgacgatcgagtgggaatga

SEQ ID NO: 523221 - DNA, 1467 bp, Stenotrophomonas maltophilia
atgctacgtatcgctaaagaagcactgacgtttgacgacgtcctcctcgttcccgctcattccaccgttctgccgaatactgccgacctcagcacgcagttgacgaaaaccattcgtctgaacattcctatgctctccgcagcaatggacaccgtgactgaagcgcgtctggctatcgctttggcacaggaaggcggcattggctttatccacaaaaacatgtctatcgagcgtcaggcggaagaagttcgccgcgtgaagaaacatgaatccggtatcgtgtccgatcctcagaccgttctgccaaccaccaccctgcacgaagtgaaagcgctaaccgagcgtaacggctttgcaggttacccggttgtgaccgaagacaacgagctggtgggcatcatcaccggtcgtgatgtgcgtttcgtgactgacctgaaccagcctgtcagcgtctatatgacaccaaaagagcgcctggtgaccgttcgcgaaggcgaaacccgcgacgtggtgctggcgaaaatgcacgaaaaacgcgttgagaaagcgctggttgtggatgcgaacttccacctgcgtggcatgatcaccgttaaagatttccagaaagcagaacgtaaaccgaacgcctgtaaagacgagcatggccgtctgcgcgtcggcgctgcggttggcgcgggcgcaggtaacgaagagcgcgttgacgcgctggttgccgcgggcgttgacgtgctgctgattgactcctcacacggccactccgaaggcgttctgcaacgtattcgtgaaacccgtgctaaatacccggatctccagatcatcggcggtaacgtggctacgggcgcaggtgctcgcgcactggcggaagccggttgcagcgcggtgaaagtgggtatcggccctggctctatctgtactacccgtatcgtcaccggcgtgggcgttccgcagatcaccgcggtgtctgacgcggttgaagcgctggaaggcaccggtattccggttatcgcggacggcggtatccgcttctctggcgacatcgccaaagcgatcgccgcaggtgccgcagccgtgatggtgggctccatgctggccggtaccgaagaatccccgggcgaaatcgaactctaccagggccgttcttataaatcctaccgcggtatgggctccctgggcgcgatgtccaaaggttcctccgaccgttacttccagaccgataacgccgctgacaaactggtaccggaaggcatcgaaggccgcgtggcctataaaggccgtctgaaagagatcatccaccagcagatgggcggcctgcgttcctgtatggggctgaccggctgtggtaccattgacctgctgcgtaccaaagcggaattcgtacgcatcagcggtgcgggtatccaggagagccacgtgcacgacgtgacgatcaccaaagagtccccgaactaccgtctgggatcatga

SEQ ID NO: 523222 - DNA, 1374 bp, Stenotrophomonas maltophilia
atgttatcctctcaatccccctcaatttatactgtcagccgccttaatcagacggtgcgtttgctgcttgagcaggaaatgggacaggtctggatcagcggtgaaatctctaacttcacgcagcctgcttccggtcactggtactttacgctaaaagacgacaccgctcaggtgcgctgcgcgatgttccgcaacagcaatcgtcgcgtgacgttccgccctcagcatggccagcaggttctggttcgcgccaacattaccctgtatgagccgcgcggcgattatcagattatcgtcgagagcatgcagcccgctggtgaaggcttgttgcagcagaagtacgagcagttaaaagccatgctttcggctgagggattgtttgaccagcagtttaaaaaacccctgccctcacctgcccactgtgttggagttatcacctcgaaaaccggcgcggcgctgcacgatattttgcacgtcctgaagcgccgtgacccttccctgcccgtcattatctacccaactgccgttcagggtgacgatgcgccggggcagatcgtgcgcgcgattgagctggcgaatgcgcgtcaggagtgcgatgtcctgatcgtcgggcgcggcggcggctcgctggaagacctgtggagctttaacgacgagcgcgtggcgcgggcaatctttgccagccttatccctgtggtgagcgccgtcggccatgaaacggatgtgacgatagccgattttgtcgcggatttacgcgcgcccacgccgtccgcggcggcagaggtggtcagccgtaatcagcaggagctgctgcgccagatccagaacgggcagcagtgcctggagatggcgatggactacttcctcgccaaccgtacccgccgctttacccagcttcatcatcgtctgcaacagcagcatccgcaattgcgtctggcgcgtcagcaaaccgtactggagcgtctgcgtcagcggatgaacttcgcgctggataaccagcttaagaaagcgatatcgcgccagcagcgcacgactcagcgtctgaaccagcagaatccgcagccaaagatttatcgcgcacaaacgcggatccagcagcttgagttccgcctcgcggaaaatatccgctcacgcctgagcgccacccgcgagcgttttggcaatgcggtcacccatctggaagccgtcagtccactctccacgctggcccgcggctatagcgtgaccaccgcgacggacggcaaagtgctgaagcagacgaagcaggttaaagcaggggatgtgctcaccacccggttttctgacggctgggtcgagagtgaagtgaaagagatcaaaccggtgaaaaaaacgcgtcagcgtaaaagcggataa

SEQ ID NO: 523223 - DNA, 1020 bp, Stenotrophomonas maltophilia
atgccccatctacatagcgtcatccctccgtatattcttcgccgtattatcgaaagcggttctgagccgcagcagcgctgcgcccgtcagaccttaacccacgtccagacgctgatggcccatatgccgggcaaacccgccgcgccgcatgtgaataaagccggtcagcttgagcgtgacatctacgatgcgaaacagacccaggagctgccgggtacccaggtacgctatgaaggccagccctccaacggagatgtggcggtggatgaagcgtacgattatctgggtattacccatgatttcttctggaaggagtatcagcgcgattcgctcgataacaaagggctgatcctcaccggcaccgtgcactatggccgtgagtatcaaaacgccttctggaacggccagcagatggtctttggcgatggtgacggggaaatcttcaaccgctttaccattgccatcgacgtggtagcgcatgagcttagccacggcgtgacggagaccgaagccggactcatctactttgaacaatcgggcgcgctgaacgagtcgttatccgacgtgttcggttcgctggtgaagcaataccatcttaagcaaaccgccgataaagcagactggctgattggtgaagggctgctggcggagggcatcaacgggaaagggcttcgctccatgtctgaacccggcacggcctataacgatccgctgctcggtaaagatccgcagcccgggcatatgaaagatttcatcaaaacgcgcgaggataacggcggcgtacaccttaactccggtatccccaaccgcgcgttttacctggccgcaacggcgatcggtggctacgcttgggaaaaagcgggttatgcctggtacgacacggtttgcgatcgcaacctggcgcaggatgcggattttgatgcctttgcaaaactgacgatagcgcacggcgagaaacgctccggtagcgacgttggggcggctataaaacaagcctgggaacaggtaggagtgctgtaa

SEQ ID NO: 523224 - DNA, 351 bp, Stenotrophomonas maltophilia
atgcaggttccggaactgacggatgacgccgtggttgagctggcccgggaaggcggcgtcgcttttatccctaagctgagcggccagcgcaccattgcgctctcctcgcttaatgaggcccagcgccagcgcctggtgagcattctggagcaggctttcccgcgcggccagccgcccgggcaagcctcttcccccggcagcggtgaccagcgctatttccgcatccagattatctggaccggccaaaatcaggcgcactacgccgatatcatcgtgctggtacccgagcaggaagcacccgagtcgctggtggaactgtggcagaaaggtgaaggctgcgtgtgcgattaa

SEQ ID NO: 523225 - DNA, 222 bp, Stenotrophomonas maltophilia
atgtcgataacctgtccggattgccacgcagcgctcgagccgcaaaacggtatcgcgcactgcgacagctgcaataacgatattcccctcgaagcgcgctgccctgattgccatcaaccgcttcaggtactcaaggcctgcggtgcggtggactatttttgccagaacggccacggtcttatctcaaaaaaacgcgtggagtttgttcgggctgaggcttaa

SEQ ID NO: 523226 - DNA, 1542 bp, Stenotrophomonas maltophilia
atgcaatcctctgttaatcaaaaagagagccgaaccttcttcggccatccttatccgctcggttcgctgttcttcaccgagatgtgggagcgtttctcgttttacggtattcgcccgctattgatcctgtttatggccgccaccgtgtatgacggcggaatgggcctggcgcgtgaaaacgcctcggcgattgtcggcatcttcgcgggcaccatgtacctcgccgcactgccgggcggctggctggcggataactggctcggccagcagcgggccgtctggtacggttcgattttgattgcacttgggcacctgtcgattgccctgtcggccattatgggcgacaacctgttcttcatcggcctgatgttcatcgtgctcggctccggcctgttcaagacctgtatctcggtcatggtcggtaccctctacaaaaagggcgatgcgcgtcgtgacggcggtttctcgctgttctatatgggcatcaacatgggctcgttcattgctcctctgatttccggctggctgattaaaacccacggctggcactggggctttggtatcggcggtatcgggatgttggtcgccctgattatcttccgcgtgtttgccgttccggccatgaagcgctacgacagcgaagtcggtctggactccacctggaacagtccagtagtgaaacgtaacggcgtgggtgcctggctgctggcgctggctgtgggtgttgcaatcatcgtcacgttgattgcccagggcgtgattgtgattaatccggtcgcggtggccagcgtgctggtatatgtgattgccgcctccgtcgcgctctacttcatctacctgttcatcttcgccgggctgaatcgcaaagagcgcgcaaggctgctggtatgctttattctgctggtctccgccgcgttcttctggtccgcgttcgagcagaagccaacctccttcaacctgttcgccaacgactacactaaccgcatgatcggtgattttgagatcccggcggtgtggttccagtcgattaatgccctgttcatcattctgctggcaccggtatttagctgggcatggccgaagctggcgagcaataatattcgcccgagcagtatcaccaagttcgtgatcggtattttgtgcgcggcggcgggcttcggcctgatgatgctggcggcacagaacgtgctgagcaacggtggagcaggggtttctccgttctggctggtgggcagtatcctgatgctgacgctcggggaactgtgcctgagtccgattggtctggcaaccatgaccctgctggcgccggaaagaatgcgcggtcagatgatgggcctgtggttctgcgccagtgcgctgggtaacctggctgcgggcctgattggtggtcacgtgaaggccgaccagctggatatgctgccagacctctttgcccgttgctccatcgcgctgttgatttgtgctgcggtgctgatcgtcctcattgttccggtgcgtcgcatgctggaaaatgtgcagacaaaaccggctaccgaagcctga

SEQ ID NO: 523227 - DNA, 1473 bp, Stenotrophomonas maltophilia
atggtacctgtggtcgcgcttgtcgggcgccctaacgttggaaaatccactctttttaaccgtttaacacgcacccgtgatgcgctggttgcggatttcccggggctgacgcgtgaccgtaagtacggtcgtgcagaggtggaaggacgcgagttcatctgtatcgataccgggggtattgacggtacggaagacggcgtagaaacccgcatggcagagcaatctctgctggctatcgaagaagcggatgtggttctgtttatggtggatgcgcgcgctggcctgatgcccgcggactccgctatcgctaaacatctgcgttcacgcgaaaagccaaccttcctggtggcgaacaaaactgacggtatcgatgccgatcaggccgttgcggatttctggtctttaggccttggcgatatttatccaattgcggcctcgcatggccgtggcgtcaccagcctgctggaaaccgttctgctgccgtgggttgatgaagtaaacccgccggaagaggtggacgaagacgccgaatactgggcacagtttgaagccggagaggaaggcgaggaagagccggaagatgacttcaacccgcaggatctgccgattaagctggctatcgttggtcgcccaaacgtaggtaagtctacgcttactaaccgtattctgggcgaagagcgcgtggtggtttacgacatgccaggcacaacgcgcgacagcatttacattccaatgcagcgcgatgaacgtgagtacgtacttatcgacactgcaggggtgcgtaagcgcgggaaaatcaccgatgtagtggaaaaattctcggtgatcaaaacccttcaggcgattgaagacgccaacgtggtgctgctggttattgacgcacgtgaaggtatctccgatcaggatctctctctgctcggctttatccttaatagtgggcgctcactggttatcgtcgtcaacaagtgggatggcctgagcaatgaagtacgcgaacaggtgaaagagacgctggacttccgtctgggctttatcgactttgcccgcgttcacttcatctctgccctgcacggcagcggcgtaggcaacctgttcgaatccgttcgtgaagcctatgacagctctacccgccgccagagcacggcgatgctgacccgtatcatgaacatggctgctgaagaccaccaaccgccgctggtgcgtggccgtcgcgtgaagctgaaatatgcccacgccggggggtataacccgcctatcgtggtgatccacggtaaccaggtgaaagacctgccggactcctacaaacgctacctgatgaactacttccgtaagtcgctggacgtgatgggtacgcctatccgtattcagttcaaggaaggggaaaacccgtttgcgaataaacgtaataccctgacgccgaaccagatgcgtaagcgtaagcgtttgattaagcacattaagaaaagcaaataa

SEQ ID NO: 523228 - DNA, 1179 bp, Stenotrophomonas maltophilia
atgcaattgcgtaaattacttctgccaggactgctttctgttacgttattgagtggttgttcactgttcagtggcgaagaagacgttgtcaaaatgtccccgctaccgacggttgaaaaccagttcactccgtccaccgcctgggacacctccgtgggtgatggtattggcgatttttattccaacctgcacccggcatttgctgacggcgtggtctatgcggccgatcgcaaaggcaccgttaaagcgctgaacgctgatgacggaaaagaagtgtggtccattaacctggcggaaaaagacggctggttctcccgtaaacctgcgctgctttctggcggcctgaccgttgccggcggtcacgtgtatgtgggcagcgaaaaagcgcaggtttacgcgctgaatgccagcgacggttcggttgcatggcagaccagcgttgccggtgaatccttgtcacgtccggttgtcagcgacggcctggtgttgatccataccagcaacggccagttgcaggcgctgaacgaagccgatggtctggtaaaatggacggttaacctggatatgccagcgctgtctctgcgtggtgaatctgctccggcgactgcatttggcgccgccattgtgggtggtgacaacggtcgtgtcagcgcagtactgatgcagcagggtcagatgatctggcagcagcgtatttcccaggcgaccggttcaactgaaatcgaccgtctgagtgacgtggacaccacgccggtcatcgttgacggtgtggtttacgcgctggcgtataacggcaacctgacggcgctggacctgcgtagcggccagatcatgtggaaacgtgagctgggttccgtgaacgatttcattgtcgacggcaaccgtatttatatggtggatcagaacgaccgtctgctggcgctgagcaccgaaggtggcgtgacgctgtggacgcagagcgatctgctgcaccgtctgctgaccgcaccggcactgtataacggcagcctggtggtgggcgacagcgaaggctatatgcactggatcgatccagagaatggccgcttcgtggcgcagcagaaagtggacggctcgggcttcctgaccgacccggttgtggctgacggcaaactgctgattcaggcaaaagacggcacgctgtacgcgatcacgcgttaa

SEQ ID NO: 523229 - DNA, 615 bp, Stenotrophomonas maltophilia
atgtacgagaacgaacacgaccaggttgatgcggttaaacgcttctttgctgaaaacggcaaggcactggttgtaggggttattttaggtgttggtgcgctggttggctggcgttactggaacaatcatcaggctgactctgctcgcggttcatccctgaactacgaaaacaccgttagcgcaatccgtgccgatcagccgcaaacgctgacggctgcggagaaatttgccgctgacaacaaaaacacctacggtgcgctggctgcgctggaagtggctcagcagtatgttgataaaaacgaactggacaaagccgctgcgcaactgtctcaggggcttgctgctgccagtgacgaaaatctgaaagcggtgatcaatctgcgcctggcacgtattcaggttcagcagaaaaaagccgacgacgcgctgaaaacgcttgataccatcaaaggtgatggctttgccgctattgtcgccgatcttcgcggtgaagcactgctgagtaagggtgataaagcgggcgcgcgtaaagcgtggcaagctggcgtggatagtaaagcttcacctgcgctgagcgaaatgatgcagatgaaaataaataatttgtccgtctga

SEQ ID NO: 523230 - DNA, 1275 bp, Stenotrophomonas maltophilia
gtggcaaaaaacattcaagccatccgcggcatgaacgattatctgcctggcgaaaccgccatctggcagcgcattgaaggcacactgaagcaggtgctcggcagctacggttacagcgaaattcgtttgccgattgtagagcagaccccgttattcaaacgcgcgatcggcgaagtaaccgacgtggttgaaaaagagatgtatacctttgaggaccgcaacggcgacagcctgaccctgcgtcctgaggggacggcgggttgcgtacgcgccggcatcgaacatggtctcctgtacaatcaggagcagcgcctgtggtatatcggcccgatgttccgccacgaacgtccgcaaaaaggccgctaccgtcagttcaaccagcttggcgtggaagtgtttggtctgcaaggaccagatatcgatgccgaactgattatgctgactgcccgctggtggcgtgcgctcggtatttctgagcacgtttccctggagctgaactctatcggttctctggaagcgcgtgcgaactatcgcgatgcgctggtggcgttcctggaacaacacaaagagaagctcgacgaagactgtaaacgtcgtatgtacagcaacccgctgcgcgtactcgattccaaaaatcctgacgtacaggcgctgctgaacgatgcgccagcgctgggtgactacctggatgaggattcccgcgaacactttgctggcctgtgcaagctgcttgaagcggcgggcattgcttataccgttaaccagcgtctggtgcgcggtctggactactacaaccgcaccgtatttgagtgggtcaccaccagcctcggttcgcagggcaccgtctgtgctggcggtcgttatgacggactggtcgagcaactgggtggtcgcgcagcaccggctgtaggcttcgcgatgggccttgagcgacttgttttgctggttcaggcagttaatccggaatttaaagccgatcctgttgtcgatatatacctggtggcctcaggtgcggatacgcagtctgcggcgatgcagcttgccgaacgcgtgcgcgatgcgctgccggacgtaaagctgatgaccaaccacggcggcggcaactttaaaaaacagtttgctcgtgccgataagtggggcgcaagtattgcactggtgctgggtgagtccgaagtggccaacggcgaagtggtggttaaagacctgcgctctggtgagcaaactacggtaacgcaggatggcgttgcggcgcacttgcgcactctattgggctaa

SEQ ID NO: 523231 - DNA, 636 bp, Stenotrophomonas maltophilia
atgcgtcacgtcgatcatctggatcgccttaacttcgatcagttcaaagtgagcgtgaaagcgtctgacgttttcctggccgttgaatcgtatcgtctgctggcaaaacagatcgatcagccgctgcaccttggcatcaccgaggcgggcggtctgcgcagcggttcggtaaaatcggcaattggtctcggcctgctgctctctgaaggcatcggtgacacgttacgcgtctccctggccgccgatccggtggaagagatcaaagtcggtttcgacatcctgaaatcactgcgtatccgcgcgcgtgggatcaacttcatcgcctgcccaacctgttcacgtcaggagtttgacgtgatcggcaccgtcaatgccctggagcagagactggaagacattatcaccccgatggacgtctccatcatcggctgcgtggtgaacggtccgggtgaagcgctggtgtccacgctgggcgttaccggcggtaacaagaaaagtggtctctatgaagatggcgttcgtaaagatcgtctggataatagtgatatgatcgaccagcttgaagcccgcattcgcgcaaaagcgacgatgatggacgaagcgcagcgcatcagcgttcagcaggttgaaaaataa

SEQ ID NO: 523232 - DNA, 471 bp, Stenotrophomonas maltophilia
  misc_feature (403)..(412): n is a, c, g, or t
atgcataaccaggctcctattcaacgtagaaaatcgaaacggatttacgttgggaacgtgccaatcggcgatggggcgcctatcgccgtccagtcgatgaccaatacgcgtactacggatgtagaagcgacggttaatcaaatcaaagcattagaacgcgtcggcgcggacattgttcgcgtctcagtgccgaccatggacgccgctgaggcgttcaaactgatcaagcagcaggtgagcgttccgctggttgccgatattcacttcgattaccgtatcgcgttgaaagtcgctgaatacggtgtcgattgtctgcgtattaacccaggcaacatcggcaacgaagagcgcattcgcatggtggttgactgcgcccgcgacaaaaacattccaatccgtatcnnnnnnnnnnatccgtatcggcgtaaacgctggctctctggaaaaagatctccaggaaaagtatggtga

SEQ ID NO: 523233 - DNA, 1011 bp, Stenotrophomonas maltophilia
atgaatactgaagccactcacgatcaaaatgcagcactctccactggcgttcgtcttcgcaacgcccgtgaacaactcggactcagccagcaagccgttgcagaacgcctgtgcctgaaggtttccaccgttcgcgacattgaagaagataaggcacccgccgatctggcttcaacgtttctgcgcggttatatccgttcttacgccaaactggttcatattcctgaagacgaattactgccgatgatggagaagcaggcgcctgtgcgtgcggcaaaagttgcgccgatgcagagcttctctctgggcaaacgtcgtaaaaaacgcgatggctggctgatgagctttacctggctggtcctgttcgtggttgtcggcctgacgggcgcatggtggtggcaaaaccacaaagcgcaacaggaagagatcaccaccatggccgatcagtcctccgctgagcttaatcagtctggtactaacggcgcgcaaagcgtgccgctgagcaccgaaggggctgcgacctccagcgaacctcaggcgacagcaaccagcacgcctgcaaccgatccagcggcgacgccagaatcgacggcgaataccgcaccggctacccaggcccaggatcagaacgcggtcgtatcaccttctcaggccaatgttgataccgcccctgcggcaacggcaccggcagataacaccgcggcgtcactgccaactgacccggcgggtacggcggcacctgccgttgacccgaatgcgctggtgatgaatttcacggctgattgctggctggaagtgactgacgcgacaggtaaaaagctgttcagcggcctgcaacgtaaagatggcacgttaaatctaacgggccaggcaccatacaagcttaaaatcggcgcaccggcagcggtacagatccagtatcaaggaaaacctgtcgatctgagccgctttatcagaactaaccaggttgcgcgtcttaccgttaatgccgaacaatcagcagcacagtaa

SEQ ID NO: 523234 - DNA, 1167 bp, Stenotrophomonas maltophilia
atgtctgaattagtgaatacctccgaagtcgccattcctgcggttcccaataaaaatggaaaaattaacctgctggacctgaaccgtcagcagatgcgcgagttctttaaagagatgggcgagaagccgtttcgtgccgatcaggtcatgaaatggatgtaccactattgcagcgacaactttgatgacatgacggacatcaacaaagtgctgcgcaataagcttaaagaagtggcggaaatccgcgcaccggaagtggtggaagagcagcgctcttcagatggcactatcaagtgggccattgccgttggcgatcagcgtgttgaaaccgtgtatatcccggaagacgatcgcgccacgctgtgcgtctcttctcaggtgggctgtgcgctggagtgcaaattctgctctacggcgcagcagggctttaaccgtaacctgcgcgtatcggaaattatcggccaggtctggcgtgctgcgaaaatcgtgggtgcagcgaaagtcaccggtacacgtccaatcaccaacgtggtgatgatggggatgggtgaaccgctgctcaacctgaccaacgtcgttccggcgatggaaattatgctcgacgatttcggttttggtctgtccaagcgccgcgttacgctctctacttccggcgtggtgcctgcgctggacaaactgggcgatatgattgacgttgcgctggccatctcccttcacgcgccaaacgacgccatccgtgacgaaattgtgccgatcaacaaaaagtacaatatcgaaactttcctggctggcgtgcgccgttacctggagaaatccaatgctaaccagggccgcgtgaccattgaatacgtgatgctggatcatgttaacgacggtaccgagcatgcacatgagctggctgaactgctgaaagatacgccatgtaagatcaacctgatcccatggaacccgttcccgggcgcgccgtatggccgtagctcgaacagccgtatcgatcgcttctcaaaagtgctgatggagtatggtttcaccaccatcgtacgtaaaacgcgtggcgatgatatcgacgcagcctgtggtcagctggcgggtgacgttattgaccgtaccaaacgtacgctgcgtaagcgcatgcagggtgagtcaatcgcggtcaaaaccgtttga

SEQ ID NO: 523235 - DNA, 432 bp, Stenotrophomonas maltophilia
atggctattgaacgtactttttccatcatcaaaccaaacgcggtggcaaaaaacgttattggcagcatcttcgctcgctttgaatcagcagggtttaagatcgttggcaccaaaatgctgcacctgaccgttgaacaggctcgcggtttctacgctgagcacgaaggtcgcccattctttgacggtctggtcgagttcatgacttctggcccaatcgtggtatccgtactggaaggcgaaaacgcggtacagcgtcaccgcgatctgctgggtgcaaccaacccggacaacgcgctggcaggtactctgcgcgctgactacgcagacagcttcaccgagaacggcacccacggttccgactctgttgaatctgctgcgcgcgaaatcgcgttcttctttgcagaaggcgaagtgtgcccgcgcactcgctaa

SEQ ID NO: 523236 - DNA, 876 bp, Stenotrophomonas maltophilia
atgggcggattaacctttgccccggcgatggacgtgacgcatgcgtgcgtccgtcgccgttttcgccactcttcctgctgcgcctgcgcggacgtctgtcccgtgcaggctttttcttttaccgacaccggcgtctcggttgatgacagccgctgtattgaatgcagtgactgcctgtttgtctgccccgctgaagccatcaccggcatcacgccgcgaaaacgttttctgtgtggcgatacgcttgttgggccttttactgaccgtgcgccaggggtgaatgagcttctgctgtggcacgcgcagcaccacgttcgttttatcagtatcgacgcggagcagaatcctgaatggttgctggcgattgcccggctgaatctggcgcttcgtcgacgtggtgaagcagcgtgggcgtttaaacatatacccgtcaacgaggtaaataccgcccggcgtgcgctgatgcacgttccccgtgaggatgtccgggtctgttgcgtcgtgcccggtcagcgtgagctgcgcagggcgttttctgcatttagcgaggcagagataactctcgataccgaatcctgcgtactctgcggcgcgtgctggcggagttgtacggaaaacgcgattcggtttgagaacgctgaactggtcgtggaaaccggacgctgtacggggtgtggcggctgcgaagcggtatgccagcatgcggcgataaacgtgacgcaaacagacgggacagcgaaaagcgtgaccataccggcatatgaagccgtttgtttgacgtgccaccgtcatttctggtcatttagttctgatgaaaagcagtgtccgctctgttttcaccatcagtacggcatgcgaaatacgagctgttgctaa

SEQ ID NO: 523237 - DNA, 780 bp, Stenotrophomonas maltophilia
atgcatgagttaccgctgctgatttttacgctgttcctgcaaggatcggttggcgttacgctgtggctggccttcggaagcacgcaacgcagcgcgctgctgccggctgccggagcgtttgtgctggccagcctcggtctgctcgcctccgcgttgcacatgggctatccacttaatgcgttcaacgcgctgcgtcacgtatccagctcctggctgagccgtgagattatctttgccagtctttatcttgcggcacttggcctcgcaacgctgctgatgtttgtcaaaaaaccaggctggaagccgctgttggttgtggcaggtcttgtcgggctggtggatgtgttctgcatggcgcagatctacatgcatgcatccgtggtgacgtggcatcacattaataccctggtgctgtttatcggttcggtgggaattatcggttcagcctgcatggccgttggggcacgttcccagactcgcgtgcgaacggcgattgtcattatcacgctgctggtgattgcacgtctggtgatgcagcccgtctggctggcagatattacggctatggacaacaccgttgtgacgttcccacacgcaccgttacaaatgctggagcaactgcgaaccgtgcatctgctgagctggtgcgtttccgttgcgggtatggtgtgctttgctgcgggcggcttaaaagcggcgcgaggcacaatgctgttgggcagcgccttgctgattgtgggtgagctgatgctgcgctttgttttcttcagtattggctga

SEQ ID NO: 523238 - DNA, 630 bp, Stenotrophomonas maltophilia
atgagtcagtttaaacattacgcaccggtaagcgacaaacagctgggtttttatatcgactcttctcgctgctcgggctgcaaagcatgtcaggtagcgtgcaaagataaaaacaaccttgaggtcggacgtcgtttccgtcgcgtgtacgaagttaatggcgggagctttatcccgaccgggcagggtggcgtcagcaataacgtttttgcctacacgctctctatctcctgtaaccactgtgccgacccaatctgcaccaaaaactgtccgaccactgcgatgcataagcgtccgggggacggtattgtgcgcgtagatactgataagtgcgtcggctgcggctactgcgcgtggtcatgcccttacggcgcgccacagctcaacgagcagaccgggcagatgtccaaatgtgatttctgcgtggatctacaggcgaagggggaacagcctgtctgtgtggcaacctgtccactcgaagcgattaaattcgggccgattgatgaactgcgggcgaagtatggtgcggtctgtgatgtgaaaggcttgcctgattcctccatcaccaaaccgaacctggtgatcaaagcgcatcagggcgcagagaaagaggggaaacgtcatgcatga

SEQ ID NO: 523239 - DNA, 2379 bp, Stenotrophomonas maltophilia
atggaaaaaaataaacatcagggagaggggactattcccgccatatcccggcgtcagtttattcaggcaggatcggcgctcgccgctctgccttttgtcgtcaaaaccggcaaagtacaggcacagggcgcggcggtttcagacactacgcctgaagaaaaagtagtgcaaacctgtagtacgtttgactgcggcggcaagtgtgatattcgtgctcacgtcagtgagggcgttgtgacccgaatttctacgcgtccggataacgcgttggatccgcaaatgcccgtaatgcgcgcctgcgtgcgtggccgggcttatcggaaatttgtttaccatcccgatcgactgaaatacccaatgaaacgtgtagggaaacgtggcgaaggaaaattcgagcgtattacctgggatgaagccaccacccttattgcgaatcaattaaaaactattacgcaaaaatacggtgcggcttcacgctatgttcatgtgggcaccgctgtgtccggcgggactttttccggcgataaaatggttcgtcgtctgctcaacttaaccggcggctatctcgaaagctatcactcggtcagtatgggtaacacggcggcagcaacgccgtatacctatggcaccgctgccagcggcagttctcttgacacgctgctggacaccaaactggtcatcctctggggacataacccgacggaaacgatctttggtcacagcaaccacttctaccagaagatgaagcaaaacggcactcgctttattgttgtcgaccctcgctattccgatacggtttcctccctggccgatcagtggatcccgctgcttcccaccacggacaacgccctgatggacgcgatgatgtatgtgatcgtcacggagaacctgcacgatcgcgactttattcagcgctacaccctgggctttgacgaagacactatgccagaaggcgttccggccaatgaatccctgatggcttacctgagcggcgcaaaagatggcgtggcgaaaacgcccgagtgggcagagaaaatcactcacgtgcctgcacaaacaattcggcaactggcgcgcgactacgcaaccaccaaacccgctgcgctgatccagggctggggaccgcagcgtcataactgcggcgagcgcaccgcgcgcggctcgacgttgctggctacgctcacgggtaacgtcggggtgaaaggcggttgggcagcaggctatggcggctgcgcaaaccggaaatttgccgccggaccagaaatgccggacaacccggtcaaagccaaaatatcggtgatgaactgggtgcaggccgccgacgatgcctctcaggtcaccgcggacgtcggcctgaaggatgccgaaaagctggacagcaatatccgcatcctgttctcgctggcgggaaattatctggctaaccagaacccggatcttcatcaggcaacccgtgtcctggaagacgagtcgaaaatcgagtttatcgtcgcaagcgatctgtttatgacgccgagcgcccgatacgccgaccttcttttgccggaaaccagctttatggaacgctggaatatcggcgaaacctggggcacggcaagctatctgatcctgtcagaaaagctcattgaacctgaatttgaacgccgttcagactacgactggctgcgggaggtcgccgctaagcttggcgtcgaacccgcgttcagtgaagggcgtgacgaaaaagcgtggattgagcacatctgggagcagacgcgtctttccatgcctgacgaaaacctgccggacttcgcgacgctacagaagacgcgtcagcaccttttcaaaagcgcgccgttcgtcgcctttgaagacaacattcgcgatccgcagaatcatccgtttccgacgccgtccggaaaaattgagatcttctcgaagcgtctgtacgacatgcatcacccggaaattccggcgctgtcgcactacgtgcctgcccatgaagggccggaagacgcgctggcgaaacgcttcccgctccagctgattacatggaaaggaaaaaaccgcgctaactccacccagtacgccaacccgtggttaattgaggcgcagcagcaaaagctgtggatcaacccgcaggatgcgcaaaatcgcggcattgcgcagggagataccgtgcgtattcataacgcgcgcggcatttgcgagatcccggcggaggtcacgccgcgcatcattccaggcgttgtggccatgcaggcaggtgcctggtggcagccggacgagcagggtattgataagggcggctgcgcgaacgtgctcagttccgcacgtattaccgcgcttgcgaaagggaattcccatcaaaccatgctggtggaggtagctaaagcatga

SEQ ID NO: 523240 - DNA, 2328 bp, Stenotrophomonas maltophilia
atgcggatagcacgcctgattcgctcccgctggctgtggcttgcgggagcgcttctcttttcaggggggctgattgtcgccgctgaccgcgtgtggccgttgcccctgaaagaggtcaaccctgcgcgagtggtcgtggatgagcagggtgttccgttgtggcgttttgccgacagcgaaggcatctggcgctatccggttaccattgaagaggtttccccacgctatcttgaggcgctgatccagtatgaagatcgctggttctgggatcaccctggcgtcaatccgctttctgtactgcgtgccgcctggcaggatctcaccgccgggagagtggtttctggcgggagcacgcttaccatgcaggtggcacgcctgctggatccgcatccgcgtacctttggcggtaaaattcgtcagctgtggcgggcgatgcagctggagtggcatctctccaagcgtgaaatcctgacgctgtatctcaaccgtgccccgtttggcggcacgttgcagggcgtgggcgcggcaagctggacttatcttggcaaaccgccgtctcagctgagctattccgacgcggcgctgctggctgtactgccacaggcacccagccgtctgcgccccgaccgctggccggaacgtgccgaagcggcgcggaacaaagtgctcgaccgcatgctgactcagggcgtctggtctgagaagcaggtgaaagagtcccgtgaagagccggtctggctggccccccggcagatgccgcagctggcgccgctcttttcccgcatgatgttgagtaaaagccgcgacacaaaaatagtcaccacgctggatgcagctttgcaacgacagcttgaagagctggcaatgaactggaaatcgcgcctgcctgcccgcagttcactggcgatgatcgtcgtggatcatacatccatgaaagtgcgtggctgggtaggctcggtagatatcaatgatgacagtcgctttagtcacgtggatatggtcaatgcgatccgatcaccgggatcggtcctcaagccattcatctatggcatggcgctggacgatggcctgatccatcccgcttcgttattacaggatgttccaagaaaaacgggggattatcgccccggcaactttgacagcggtttccatgggccggtcagcatgagcgaagccctggtgcgttccctcaacctgcctgcggtgcaggtactggaagcgtacggcccaaaacgttttgcaggcatgctgagcaacgcgggattaccgctcatactccccgcgggtgcgcagcccaacctctccctgatcctgggtggcgctggggcacgcctggctgatatcgctgccgcctacagtgcctttgcgcggcaggggcaggcgggccggttgcgtttacagccgggagatccgctgatcgaacgtccgctgctgtcgcagggggcggcgtggatcattcgtcgcattctcgccagtgaagcacagcccctgccggacagtgcgctgccccaggttgcgccgctggcgtggaaaacgggcaccagttacggctaccgggatgcctgggccatcgggctgaacgcccggtatgtcattggaatctggaccggacgtccggacggcacgcccgttgccgggcagtttggtttcgccagcgcagttccgctcctgcatcaggtcaataacatgcttcagtcccgctcgatggtggatgaagcccgtctgccgcgcgatccgcgtcctgcaagcgtaggacggggcgtgatttgctggccggggggccagtccctgcctgaagggaacgaaaactgtcggcgtcggctgtcaacctggctgctggaaggcagtgaaccgcctacgctgctgctgccggaacaagagggtattcgcgggatccgtttcccggtctggctggataaagaaggcaaacgcgtcgcagcggattgtcctgatgcgacagaaaaagtgctggatgtctggccgctgccgctggagccctggctgcctgctgccgaaaaacgggctgctcgtctccccgcccgttcagcgatttgccctccgctggataaccataatgcggcgccgctgatgttgtcaggcgtcagagaaggggcggtaattaaacgtcttccgggtgagaaaaacatgaccctgttcgtttcaaccagcggcggggaggggcaacgatggtggtttttgaatggcgaaccgctggacggacatcagaagaattattcactgcaattatatttgtcgggtaaatatcagttagttgtattagatgaaacaggacaaacggcgactgtcaattttgagttagatcgctaa

SEQ ID NO: 523241 - DNA, 4953 bp, Stenotrophomonas maltophilia
atgaaaccgtttcgcttagctgcgatctctctcgcgctgctcgccacctttacgcttgtcggctgtgataacagcgatgacaaacctcaggccgctgcccccgcagcgtctactacatcagaacagaaaaccccggcaaaaccggatcctgaaaagctggctaagctggccgcgcagagtcagggtaaggcgttgacgctgctggatgcctctgaagtgcaactcgacggtgctgcgacactggttctgaccttctctgtaccgctggatcccagccaggattttgcgaaaacggtgcatgtggtggataaaaaaagtggcaaagtggacggcgcctgggaactggcccccaatctgaaagagctgcgcctgcgccatctggagccgaatcgtaatctggtcgtcaccgtcgagcgtaatttgctggcgctgaacaaagcgacattcggcattgactatgaaaaagcgatcaccacccgggatgttgaaccgacggtcggattcgccagccgcggatcgctgctgccgggtaaagtggtggaagggttgccggtgatggcgctcaacgtcaacaatgtggacgtgaacttctaccgcgttaagccggagtcgctggcctcgtttgtcagccagtgggagtaccgtaactcgctgaccaactgggaatctgacaacctgctgaagatggcggaactggtctacaccggccgtttcgacctcaacccggcgcgcaacacgcgtgaaaaactgctcctgccgctcaaagatattaagccgctccagcagtctggcgtctatatcgccgtgatgaatcaggctggtcactataactacagtaacgccgcgacgctctttaccttaagtgatattgggctgtccgctcaccgttatcataaccgcctggacatcttcacccagagtcttgaaaacggtgcggcgcagtcaggcgtgaccattacccttctgaacgataaaggacagaccctggccgaggcgaacagcgacgccgatggtcatgcgaaactggaaaccgataaagaagccgcgctgatcctggccagtaaagatggccagaccacgcttcttgacctcaaacttccggcactggatctggcggagtttgatatcgccggtaacccgggttacagcaaacagttctttatgtttggcccgcgcgatctctatcgtccgggtgaaacggtgatccttaacggcctgcttcgcgacagcgatggcaaaccgcttcccgagcagcctgtaaaacttgacgtgctgcgtccggacggccaggtagcgcgtacggtcgttgtgcaacctgagaacggcctttatcgcttcaactattcgcttgatagcggcgcccagaccggcatgtggcatattcgcgcgaatacgggggataaccagcagcgcatgtgggatttccacgtcgaagattttatgcctgagcgtatggcgctgaatctgaccgggcaaaaaacgccggtttccccgcaggaggatgtggactttaacgttgtgggctattacctgtacggcgcgccggctaacggtaattctctgcaaggccagcttttcctgcgtccgctgcgtgacgcggtgcctgcactgcctggcttccagttcggtgatattgccgaggagaacctgagccgcagcctggatgaagtgcagcttacgctggacgaacaggggcgcggacaggttaccaccgaaagtcagtggaaagaggtgcactcgccgctgcaactgattttgcaggccagcctgttggaatcaggcgggcgtccggtaacgcgacgcgccgagcaggctatctggcctgcggctgaacttccggggatccgcccacagttcgccagcaaggccgtgtacgactaccgcaccgataccaccgtcaaccagccgattgttgatgagaacggcaacgccagctttgacatcgtctatgccgatgccagcggggcgaaaaaagcggtatctggtctgcaggtgcgtctggtccgcgagcgtcgcgactacttctggaactggtccgagagcgagggctggcagtctcagtttgatcaaaaagatctggttgagggcgagcaggaacttaacctcaaggccgatgaaaccggtaaagtcaccttcccggtggagtggggctcataccgtctggaagtgaaagcccctgatagcatggtcagcagcgtgcgcttctgggcggggtacagctggcaggataacagcgatggcacgggtgctgcacgcccggatcgtgtgacgctgaaactggacaagccatcctatcagccaggcgataccatcaacctgcatattgcagcgccggccgcaggcaagggctatgcaatgatcgaatccagcgaagggccactgtggtggaaagagatcgacgtaccggttaacggtctggatctcgccattccggtggataaggcctggaaacgtcacgatctctacctcagcacgctggtggttcgtcctggcgataaatctaaatccgccacgccaaaacgcgcggttggtctgctgcatctgccaatgggggacgaaaatcgtcgcctgagcatcgcacttgataacccacaaaaaatgcgtccgaaccagacgctttctgtgaaagtgaaagccagcgtaaaagagggggctgtgccacagaaggtgaacgtgctggtctcggctgttgatagcggcgtgctgaacattaccgactacgtcacgccggatccgtgggaagccttcttcggtcagaagcgctatggcgcggacatctatgatgtttacggccaggtgattgaaggtcagggacgtcttgccgcactgcgctttggcggagacggcgatgaactgaaacgcggcggtaagccaccggtgaaccatgtcaccattattgctcagcaggcgcagccggttacgcttgatgccaacggtgaaggcaccatcacgctgccgattggcgattttaacggcgaactgcgtctgatggcgcaggcctggacggaagacgatttcggcagcagcgaaagcaaaatcattgtggcggctccgattatcaccgagcttaacacgccgcgattcctcgcaagtggcgatacctctcgcctgacgctggacctgaccaaccttactgaccagccgcaaacgctgaacattgcgttaaccgcaaccggtaaggtgtcgctcgaaggtgctcagccagagccggttaagctgccgcctggcgctcgtagcactctgtttattccggtgcgcgcgctggaaggctatggcgatggtgaagtaactgctcaggtgacggggcttcagctccctggtgagacgtttgcgccgcagcataagagctggaaaattggtgtacgccccgcattcccggcgcaaacggtgaatacgggcacgatgctgaaccctggcgaatcctggagcgcgccagcacagcatatcgacggtttctcgcctgccacgctacagggacagctgttgctcagcggtaaaccacctttgaacctggcgcgctacattcgtgaacttcaggcctatccatacggatgtcttgagcagaccaccagcggcctgttcccgtccctctacaccaacgcggcacagcttacggcgttgggcattaaaggcgacaccgacgataaacgccgtgcggccattgatatcggcatctcccgtctgctgcaaatgcagcgtgacgatggcggttttgccttgtgggataaaaacggcccggaagagtactggctgaccgcctatgttacggacttcctggtgcgggcaggggagcagggttacagcgtgcctgccgaggcggtgaataacgccaacagccgactgctgcgctatttacaggatccggggatgatgtccatccgctacagcgacgacacccaggccagcaaatttgctgtccaggcgtatgcttcgctggtgctggctcgtcagcaaaaagcgccgctcggtgcactgcgtgaaatctgggagcgtcacgctcaggccgcttccgggcttccgttgatgcagctgggcatggcactcaaactgatgggggatacaccgcgcagccagcaggcgctggatctggctctcaaaactccccgtaacgacagccgaaactggatggcggattacggcagccagctgcgtgataatgccctgatgctcttcctgctggaagagaacaagctgctgccggatgcgcaaaacaggctgttgaacgcgttatctgaagacgcgttcagccagcgctggctgtcaacccaggagagcaatgctctgttcctggctggacgttcactgcaaaccttgtcaggcgcgtggcaggcaacgaccaccctctctgaacagacccagagcagtgataaagcgcaggtagaaaacctgaacggcgaccagcctggtgccttgcaggtgacgaataccggcacgacgccgctgtgggtacgactggacactactggctatccggagtatgcgccccagccatcttctcacgtcttgcagattgaacgtcatatcctggcgacagacggcagcagcaagtcgctctcttcacttaagagcggtgagctggttctggtgtggctggaagtgaaggccagccagaacgtaccggatgcgctggtggtggatctgctcccggcaggtctggagctggaaaaccagaatctggcgagcagcagcgccagcttgcaggacagcggcagtgaagtgcaaaacctgctgaatcagatgcaacagtctgatattcagcacatggaattccgggacgatcgctttgtggccgccgtgccggtcaatgaaggtcagccggtcacgctggtttacctggcccgtgccgttacgccgggaacctatcaggtgcctgttccgatggtcgagtccatgtacgttccgcagtggcgggcaacggggtcggccagtggcccgctgatcgttgttccgtaa

SEQ ID NO: 523242 - DNA, 1545 bp, Stenotrophomonas maltophilia
atgaaacgagccgtgaacgccctacaaaatttcggaaaatcactttacggacctgtacttatcttacctatcgtcggtctgtttatcgcctttgggaatgtgctgggtaacggcaatctggccgagtacctgccgtttctcggccatccgctgatccagagtgtcggccagctgatcgccaaatctgccgtgtcggtgctggtcaacctggcgctgctgtttgccgtcgggatccccattggcctggcaacccgagacaaaggctacgcggcgctgattgggctggtgacttttatcgtgtttatcaatgccatgaacgtgacgttacagcttcagggagaactggcccctgcagagcagatgaaagccgccggacaaagcatggttctgggcgtccaggtgctggagatgggcgttttcgccgggatcctgaccggggcgctctccggttatctgtacaacaaatattccggtgtccagtttaacggcgcgatggcgatatactccggccactgctttgtcgcgattgtgatgttgccagtctctatgctgctcggcgtggtcatgagcgaactctggccgtacgcacagcatggaataagcgccctggcgctggcgatcaaagggtccggtccgtttggggtggcgatctacggtttccttgaacgcattctggtgccgacgggcctgcatcatctggtctatacgccgttcctgtataccgaactgggcggtacgcaggaggtgtgcggtacggcttaccatggcgcgcgcaatatctacttcgccgagatggcctgcccggacgtgaagcagctcagcagcaccgtggtgtgggatgctcgcggcatcagcaagatgttcggccttcccgccgccgcgctggcgatgtacatgaccgcgaagccagagcgtaaagcgattgcgaaagccattctgatcccggcggcgctgacctcgctgctggtcggcgtaaccgagccgatcgagttctctttcctgtttgtcgccccgctgttgttcgtggtgcatgcggtgctgaccggcattggcatgatgctgttcaccctgtttggcgttcacgccatcggcgccaacggaattatcgattttatcctctacaacctgccgctcggcacggaaaagtccaactggcccatgtacatcgtggtcgggctgatcatgttcgctctttatttcgtggtgttccgcttcctgatcctgcgtttcaacatgaaaacgcccggtcgtgaagatgacgatcgggagacgcgcctctacagcaaacaggaataccaggcgaagggaaataatgacgggctgggcgaatcgatcgtcgtcggtctgggcggtcgggaaaacattcaggtggttgataactgctacacccgcttacgcgtcacggtgaaggacgtcgccatcatcgacgaaccgcgcctgaaagcgaccggcgcgaaagggattatcaaacaaggtaacaacgttcaggtggtctacgggctgcatgtcaaaaaaatgcgagaagccgttgagacgtttctctga

SEQ ID NO: 523243 - DNA, 1368 bp, Stenotrophomonas maltophilia
atgttaacacccccattcattctgtcgattgccggcggcggcagcacctacacgccaggtatagtgaaaagcctgatggtacgcctgcacgatttccccctggcagagattcgcctgtatgacatcgacgaggcgcgccagaacaccattgcgcccgtggtggaaaaggtcattcgcgaccacagccagagcatcaaattcaccgtcaccagcgatccggaggtggccttcagcggcgcgcattttgtttttgctcagatgcgcgtcggacagtacaaaatgcgcgagcaggatgaaaaaattccgctgcgccacggggtggtcggccaggaaacctgcggacccggcgggctggcatatggcctgcgtacgatcctgccgatggtagagctgatcgatagggtggaacgctacgcgcacgaaaaggcgtggatcgtgaactactccaacccggcggcgatcgtcgctgagggcgtgcgtcgcctgcgccccaacgcacgcgtgctgaacatctgcgatatgcctgtcgccgcgatgcgcaatatgggcgccattctgggcgtggaccgtcataaactggaggtggactattttggcctcaaccacttcggctggtttacccgcgtgctggtggacggcgaggacaagctgccggagctgcgtaaacatatcgcgaagtttggcctgctgacggaagacgcggccaaaaccgacccgcagcactcggatccgtcatgggtgaaaacctggcgcaacatcaagccgattatggataactttccggagtacctgccgaacccgtatctacagtactacctgatgccgaaccagattgtggagcatcagaacccggactatacccgtgccaacgaagtgatgaacggacgtgagaaaaagctgtttgccgccgccgaagagtaccagcgcagcgggatcttaccggacgccttccacgtaggtgttcacggcgaatttatcgtcgatgtcgcctgctcgctggcattcaacctgcgccagcgtcacctggtgatggtggaaaaccgcggggcgattaccaacctgccttatgatgcggtggtggaagtgcctgcctatattacctccgaaggaccagagcccgtccgcgtgggtcgggtgccgctgttccaccagacgctcctgcaacagcagctcgcttctgaacagctgctggtggaggcaaccatcgaaggcagctacgagaaagcgttgcaggcgtttaccctgaaccgcaccgtgccgaccatggagcacgcgaaagcgattctggatgagatgatcgaagccaaccgcgactactggccagcgctgcaaaaggcatggcaggacggtgaagcggtgaaaaaatag

SEQ ID NO: 523244 - DNA, 645 bp, Stenotrophomonas maltophilia
atgctgcctcgtccggaagcgttttccgtggcgatgcgcgagctcggcatcagcaaagacaaacacctcgttgtttacgatgagggtaacctcttctccgccccgcgggcgtggtggatgctgaaaaacttcggcgtggaaaaagtgtcgattctggcgggcgggcttgcgggctggaagcgcgacgagctgccgcttcagcagggcgacgtgacgctgccggaaggcgaattcgatgccacgttcgacgcacacgtggtgaaacgcctgaccgacgtgctggtcgtgagccacgaaaacacggcgcaaatcgtcgatgcccgtcctgctccgcgcttcaacgctgaagcggatgagccgcgtccggggctgaagcgcggacatatcccgggggcgctgaacgtgccgtggggcgatctggtgtttgaaggcgagctgaaaaccaccgatgaattgcgtgccatttttgaacgtcagggcgtggatttgcatcgtccggttattgccagctgcggctccggcgtgacggcctgcgtggtgatcctggcgctggcaacccttggcgcaaatgacgtgatgctgtatgacggtgcctggagtgaatggggtgcacgggacgatctgccggtagaaccggctaaataa

SEQ ID NO: 523245 - DNA, 771 bp, Stenotrophomonas maltophilia
atggataaccgcctggcaacgctgttaacacgcgggtcgtcactgacccgcgcggagtatcgcgttctcgcccacctcactgagcatccgctgctggtgggcaatatcacggtgcgcgagctggcgctggcgacatttgtctccaccgcgacgattatgcggctgtgccagaagctgggcttcagcggctttagcgagtttatctggcactgcaagcagctgctttctgacacgccgcatatcaccgtacagtctgcgcaacatgcagaaatgcccgcgctttttgcccggtttattgccaactatcagcagaccttccagtgggttacccaggacaaacgccagcagtttgccagcctgctgcgccagaaagagagcttctttctctacggcgccgggttttcatatctttttgccgagtacttgaccaagaagttgcaggtgctgggaaaaaccgcgttcatctccggaccgggggacagccggaatatttttctcagcaacgccgcacgctatcaggtatttattgccgtttcgcgcagcggcgaaacggagcaggtgctggataaagcgcggatcgccaaaaacgtcggcatgacgatcgtcgcgtttacccgcgcgtcggccaatacgctggcaggtatggccgacgtgcattttgccctctatgacgaagcggtacatttcgccgccgaagccgcaggggtgacgtcgtttgagtcgaatctggtgctgctgatggatttactgttgctggaagcaacggggtga

SEQ ID NO: 523246 - DNA, 777 bp, Stenotrophomonas maltophilia
atgtcagaaaccaaaaacgaattagaaaccctgctggagcaggcggcgaccgagcccgcccaccgtccggcctttttccgcacgctgctggaatccaccgtctgggtgccgggcaccgcagcagaaggggagcaggttgtcgaagacagcgccctggatctgctgcactgggagaaagacgacggcacgtcggtgatcccgttctttacctcgctcgaggccttgcaggaagcggtagaagacgaacaggcgttcgtggtgatgccggtgcgcacgctgttcgaaatgaccctggggcagacgctgttcctcaacgccaaactgccgacagggaaagagttcactccgcgtgaaatcagccatctgattggtgacgagggcaacccgctcagcacccaggaggtgctggaagggggcgaaacgctgctgctgtctgaagtggccgagccgcccgcgcagatgattgactccctgaccacgctgtttaaaaccatcaagccggtaaaacgcgcgttcctctgctccatcaaagagagcgctgacgaaaagcctgttctgctgattggaattgaggccgacggcgatgttgacgagatcatccaggcggcgggaagcgtagcgaccgacacgctcccgggcgatgagccgattgatatctgtcaggtgaagaaaggtgagcagggcatcagccactttattaccgagcacatcaccccattctacgagcgtcgctggggcggcttcctgcgcgatctcaagaccaaccgcattatctga

SEQ ID NO: 523247 - DNA, 1287 bp, Stenotrophomonas maltophilia
atgaccgaagcgatgaagattacgctctccacgcagccagccgacgcacgctggggcgagaaagccacctggagcatcaataacgacggtattaccctgcacctgacgggtaacgatgatttgggcctgatccagcgcgccgcgcgtaaaattgacggcctgggcattaagcatgtcactctgactggcgaaggctgggacaccgaccgcagctgggctttctgggcgggttacaaagggccgaaaggcacccgtaaaattgagtgggcgaacctcgatgaagccggtcagaaagagctggaaagccgcctgaaaattatcgactgggtgcgcgacaccatcaacgccccggcggaagagttggggcctgagcagctggcgcagcgcgcggttgacctgctgtgcggcgtggcggacgacaagatgtcctaccgcatcaccaaaggtgaagacctgcgcgaacaaaattacatgggtatccacaccgtgggtcgtggctccgagcgtcctccggtcctgctggcgctggattacaacccaaccggcgataaagaagcgcccgtctttgcctgtctggtcgggaaaggtatcaccttcgataccggcggttacagcctgaagcagagcgcgttcatggattccatgaagtccgacatgggcggcgcggcgaccattaccggcgcgctggcgttcgccatcacccgtggtctgaacaagcgcgtgaagctctacctgtgctgcgcggataacatggtgagtggcaacgccttcaagctgggcgacatcattcgctaccgcaacggtaaaaatgttgaggtgatgaacaccgatgccgaaggccgtctggtgctggccgatggcctgatcgacgcctctgcgcagaagccggagctgattatcgacatggcgaccctgaccggcgcggcgaaaactgcccttggcaacgattaccatgcgctgttcagcttcgacgacaagctggccgctcgcctgctggccagcgcggcggcggaaaacgagccgttctggcgtctgccgctggccgagttccaccgcagccagctgccgtctaacttcgccgagctgaacaacaccgcgagcgcggcgtacccggcgggagccagcacagcagcaggcttcctgtctcacttcgttgagaactaccatgaaggctggctgcacattgactgctccgcaacctaccgtaaagcggcggttgagcagtggtcagcaggcgcaaccggtctgggtgtgcgtaccgtggcgaacctgctgacggctgagtga

SEQ ID NO: 523248 - DNA, 201 bp, Stenotrophomonas maltophilia
atgggactgaagtggactgacagccgtgaaatcggcgaagcgctctacgacgcgaacccggatctcgatccgaagaccgtacgattcaccgacatgcatcagtggatctgcgatttagaggattttgacgacgatccaaacgcatccaatgaaaaaattctggaggcgattctgttagtctggttagatgaagcagagtaa

SEQ ID NO: 523249 - DNA, 336 bp, Stenotrophomonas maltophilia
atgccaaagattgttattttgcctcatgcggacctctgtccggatggcgctgttctggaagcgaagaccggtgaaaccattctcgatgtagccctgcgtgcaggtatcgaagtggaacacgcctgtgaaaaatcctgtgcctgcaccacctgccactgcatcgtgcgtgaaggttttgattctctcgccgagagcaccgaagacgaagacgacatgctggataaagcatggggtctggagccagacagccgcttaagctgccaggccgcggtgaccgatgaagatctggtcgtggaattcccacgctacaccatcaaccacgcacgcgagcattaa

SEQ ID NO: 523250 - DNA, 1851 bp, Stenotrophomonas maltophilia
atggccttattacaaattagtgagccaggcttaagcgccgcaccgcaccagcgtcgtctggcggtcggtattgacctgggcaccaccaattctctcgtggcgaccgtgcgtagcggccaggcggaaacgctggctgacgagcagggccgccatctgctgccttccgtggtccactaccagcagcagggtcacgctgtcggctttgatgcccgcgccaatgccgcgcgcgatccggctaacaccatcagctcggttaagcgcatgatgggccgctcgctggcggatatccagacccgttatccgcatctgccgtaccagttacaggccagcgaaaacggcctgccgatgattgcgacatctgccggtctgctgaacccgattcgtgtttctgctgacatcctcaaagcgctggcggcgcgcgcgacggcgacgctcggtggcgatctggacggcgtggtaatcaccgttccggcctacttcgacgatgcacagcgtcagggcaccaaagacgccgcgcgtctggcgggcctgcacgtgctgcgtctgctgaacgaaccgacagcggcagccattgcctacggcctcgattccggtcaggaaggggtgattgcggtttacgatctcggcggcgggacgtttgatatctctatcctgcgcttaagccgcggtgtgttcgaagtgctggccaccggcggggattccgcgctcggcggcgatgacttcgaccatctgctggcggactacatccgcgagcaggcgggcatcagcgatcgcagcgatgcgcgcgtccagcgtgaactgctggatgcggccatcgacgccaaaatcgccctgagcgatgcgcagtccgtcagcgtgaacgtcgcaggctggcagggtgagatcacccgcgaccagttcagcgaactgattgcgcctctggttaagcgtaccctactggcctgccgtcgcgtattgaaagatgcgggtgttgaggctaacgaggtgctggaagtggtcatggttggcggctcaacccgcgtgccgctggtacgtgagcgcgtaggggaattctttggccgcacgccgctgacctctatcgacccggacaaagtggttgccgtgggtgccgctatccaggccgatatcctggtcggcaacaagccggacagcgaaatgctgctgctggacgtcatcccgctgtctctgggtttagaaaccatgggcggcctggtggagaaagttattccccgtaacaccaccattccggtggcgcgcgcgcaggagttcaccaccttcaaagacggccagaccgcgatgtccatccacgtgatgcagggcgagcgcgagctggtgcaggactgccgctctctggcgcgctttgcgctgcgcggaattccggcgctgccggcgggcggggcgcatattcgcgtcaccttccaggtggatgcggacggtctcctgagcgtgacggcgatggaaaaatccaccggcgtcgaatcgtccattcaggtgaagccgtcctacggcctgaccgatggcgaaatcgcctccatgattcaggactcaatgagctacgccgagcaggatgtgaaggcgcgtatgctggcggaacaaaaagtggaagccgcacgcgtgctggaaagcctgaacggcgcgcttgctgccgatgccgcgctgttaagcgccgctgagcgccaggtgattgacgaggctgctgcgcgcttaagcgccgtggccgaaggcaatgacgctgacgcaatagaagaagccattaaaaacgttgataaacaaacccaggacttcgctgctcgccgcatggacaaatctgtccgcgtcgcgctgaaaggccagtccgtggacgaggtttaa

SEQ ID NO: 523251 - DNA, 516 bp, Stenotrophomonas maltophilia
atggattacttcactctcttcggactacccgctcaatacccgattgatctccaggcgctgacgatccgttttcaggatctccagcgtcagtaccatccggataaattcgccagcgggacgcaggcagagcagctggctgcggtatcacactccgcaaccatcaaccaggcctggcaaacgctgcgtcatccgctggcgcgtgcagaatatctgctctcgctccacggttttgatctggcgagcgaacagcataccgtgcgcgacaccgcgtttctgatggagcagctggagcttcgcgaagagctggatgaaattgaacagactaaagacgaagcgcgtctggaacgttttctccagcgcgtaaagggcatgttcgatacccgccatcagcagatggttgagcaactgaacaacgagacctgggacgtggcggcagacactgtgcgcaaactccgttttctcgataaactgcgaagcagtgctgaacaactcgaagaaaagctgctcgatttttaa

SEQ ID NO: 523252 - DNA, 324 bp, Stenotrophomonas maltophilia
atgtcgattacccttagcgacagcgctgccgcgcgagtaagctcttttctggcgaaccgtggtaaaggctttggcctgcgactgggcgtacgtacctccggctgttctggtatggcttacgtactggagtttgttgacgaaccggcgtctgatgacaccgtgtttgaagacaagggcgtgaaggtggtggtcgatggcaaaagcctgcaatttctcaacggcactcagctggactttgtaaaagaaggcctgaacgaagggttcaaatttacgaacccgaacgtcaaagacgagtgtggttgcggcgaaagcttccacgtttaa

SEQ ID NO: 523253 - DNA, 387 bp, Stenotrophomonas maltophilia
atggcatacagcgaaaaagttatcgatcattacgagaacccgcgcaacgttggctcttttgacaacagcgacgaatctgtcggtagcggtatggttggcgcgccagcgtgtggcgacgtgatgaagttgcagattaaagtcaacaatgaaggtatcattgaagacgcgcgcttcaagacctacggctgcggttctgctatcgcctccagctccctggtcaccgagtgggtgaagggcaagtctctggacgaagcacaggcaatcaaaaacacggacattgctgaagaactcgaactgccgccggtgaaaattcactgttcaattctggcagaagacgcgatcaaagccgccattgcggattacaaaagcaaacgtgaagcaaaataa

SEQ ID NO: 523254 - DNA, 1215 bp, Stenotrophomonas maltophilia
atgaaattaccgatttatctcgactactccgcaaccacgccggtggacccgcgtgttgccgagaaaatgatgcagtgtctgaccctggacggaaactttggtaacccagcttcccgttcacaccgttttggctggcatgctgaagaggcggttgatatcgcccgtaatcagattgctgacctggtcggtgccgacccgcgtgaaattgttttcacctccggtgcgaccgaatccgacaacctggcgatcaaaggtgcagccaacttttatcagaaaaaaggcaagcacatcatcaccagcaaaaccgaacacaaagccgtgctggacacctgccgtcagctggagcgtgaagggttcgaagtgacttacctggcgccgcagagcaacgggatcatcgacctgaaagagctcgaagcggcgatgcgtgatgacaccattctggtttccatcatgcacgttaacaacgaaatcggtgttgtgcaggacatcgccaccatcggcgaaatgtgccgtgcgcgcggcatcatctaccacgtggatgcgacccagagcgtgggcaaactgcctatcgacctgagccagctgaaagtggacctgatgtccttctccggtcacaaaatctatggccctaaaggcatcggcgcgctgtacgttcgtcgcaagccacgtatccgcatcgaagcacagatgcacggcggcggtcacgagcgcggcatgcgttccggtactttgcctgttcaccagatcgtggggatgggcgaagcgtatcgcatcgcgaaagaagagatggaaagcgagatggcacgcctgcgtacgctgcgtaaccgtctttgggacggcgtgaaggatatggaagaagtctatctgaacggcgatctcgagcagggcgcgcccaacatcctcaacgtcagcttcaactatgttgaaggcgagtcgctgatcatggcgctgaaagacctggccgtttcttccggttctgcctgtacgtctgcaagcctggagccatcctacgtgctgcgtgcgctgggcatgactgacgagctggcgcacagctctatccgtttctctttaggtcgtttcactaccgaagaagagattgactacaccatcaaactggttcgtaactccatcggccgtctgcgcgacctttctccactgtgggaaatgttcaagcagggcgtggatctgaacagcattgaatggtcacatcactaa

SEQ ID NO: 523255 - DNA, 492 bp, Stenotrophomonas maltophilia
atgagactgacatctaaagggcgttatgccgtgaccgcgatgctggacgttgcgctcaactccgaagcgggcccggttccgttggctgatatttctgaacgacaggggatctccctctcttatctggaacagctgttctccagactgcgtaaaaatggactggtgtccagcgttcgtggcccgggcggcggttatctgctgggtaaagacgcgggcagtattgcggttggcgaagtgattagcgcagttgacgaatccgttgacgcgacccgttgccagggcaaaggcggctgtcagggcggcgataaatgcctgacccacgcgctgtggcgcgatctgagcgaccgtctgaccggcttcctgaataacatcaccctgggtgagctggttaataaccaggaagttctggatgtttctggtcgtcagcacagtcaggattcacaacgcagcacccgctcgcaggacgccatcgacgttaaactgcgcgcgtaa

SEQ ID NO: 523256 - DNA, 792 bp, Stenotrophomonas maltophilia
atgtctctcgtttatgataatatgcccgaatattcttcagacactgaatccagacatctaaaaattatgctgcaaaacattcgaatcgtgctggtcgaaacatcgcacaccggcaacatgggctctgtggcccgcgctatgaaaaccatgggcttaacgaacctgtggctggttaatccgctggtgaaaccagactctcaggctattgcgctggcggccggcgccagcgacgtgatcgggaatgcacagattgtggacaccctggacgaagccctggccggttgcagtctggtggtggggaccagcgcgcgctcccgtacgctgccctggccgatgctggacccgcgcgaatgcggcctgaaaagtatctcagaagcggaacaggcgccggttgcgctggtgtttggtcgcgaacgcgttggcctgaccaacgaggaactacagaagtgccactaccacgtggcgattgccgccaacccggaatacagctcgctgaacctggcgatggcggtgcaggtaatcgcctacgaagtgcgcatggcatggctggcgacgcaggagaaacaggtcgaacctaaagaagagacggcctacccgctggtggacgatcttgagcgcttctacggccacctggagcagacgctgctctctactggctttatccgcgaaggtcacccgggacaggtgatgaacaagctgcgccgtatgttcacccgcgcgcgtccggaaagccaggagctgaacatcctgcgcgggatcctggcgtcgattgagcagaagaataaagagtag

SEQ ID NO: 523257 - DNA, 804 bp, Stenotrophomonas maltophilia
atgcatccgatgctgaccatcgccgtgcgcgcagcgcgcaaggcgggtaatgtaattgccaaacactacgaaaccccagactccgtagaaaccagccagaaaggcagcaatgatttcgtgactaacgtcgataaagccgccgaagcgattattatcgaaacgatccgcaaatcttacccgcagcacaccatcatcaccgaagaaagcggtgaacatgaaggtaccgatcaggatgttcaatgggttatcgatccactggatggcaccaccaacttcgttaagcgcctgccacacttctctgtgtctatcgcagtacgcatcaaaggccgtactgaagtcgccgttgtttacgatccaatgcgtaacgaactgttcaccgcgacccgcggtcagggcgcgcagctgaacggctaccgtctgcgctgcagcaatgcacgcgatctggacggcacgattctggcgaccggcttcccgttcaaggcgaagcagcacgcaaccacttatatgaatatcctcggcaaactgttcaccgaatgcgcggacttccgtcgcaccggctctgctgcactggatctggcctacgtggcgaccggccgcgttgacggttactttgagctgtcactgaagccgtgggacttcgcggcgggcgagctgatcgcacgtgaagctggcgcgattgtttgtgacttcaccggcggccataactatatgtctaccggcaacatcgttgcaggtaacccgcgcgttgttaaagccatgctggcaaacatgcgtgaagaactgagcgatgcgctgaagcgttaa

SEQ ID NO: 523258 - DNA, 981 bp, Stenotrophomonas maltophilia
atgtcagtgatctcctcccccgtcagtaagccgcgtcgctggctgcacctctggcctctggcgctctttttgctgttagcgtctggcggcgcgctctggctgtggcaggcatggccgcaggtgatgatgaaaagtatcctctggcagcgggaagttaatcagcagatgagcgggctgctgaaagccgtggcggaaaatccgtccaaagcgggcggctctcttctggcgttcagctttatctatggcgtgctgcatgccctggggccggggcacggcaaaatcgtcatcacgacctggcttgccacccatccgtcgaagctgaaatcgagtatcggcctgacgctggcttcctcgttacttcagggcggtgtggcaattgcgctggtcgtggtcgtcctttcgctgctacagctcccggcccgccagctgcatatgagcagcttctggctggagaagggaagttacgcgctggtaggcttactggggctgattctctgctggcgggcgctgaaaaaattgcgcgcgttgctgcaaaaaccaaaattcaaagcctttacgccgcatcaccttcaccatgaaaactgcgggtgcgggcatcagcatctcccgacgcaggaacaattacagaatggtgacgactggcgtgcgcgcctgatgattgttctctcaatggggatgcgtccgtgctcgggcgcaatcatggtgctgttgttcagcaaagtgataggtgtatttggctggggcatgatctcggcgctggcgatggcggcgggaacatctctgactatctcttcgttagccttgctggtgcacagcttccgtcagctggcggtaaaactcagcggcaataaaacgccggtattgtggcgacaggttggctggacgacgcttgcgctggcgggcggggtgattctgctggtggctgcggtcacgatgtggatgagcgcggtgccggtgggaagggggttgcggcctttttag

SEQ ID NO: 523259 - DNA, 639 bp, Stenotrophomonas maltophilia
atgcaaacagttaaacaaagcgtgacagcgttatttttggcggttatcacctccgccgccagcgcacatcctcacagctttatcagcctgaaaaccgaactggtgacggacggcacacagctcagcggcctgaagatgcgctggacgatggatgaaatcacctccgccgacctgctgtacgatgccggaaacgcaaagcccggcgacgagatctggaaaaagctggcggcggaagtcatggccaacgtgctgggtcagcactacttcaccgagttctggcacaacggacaaaaggtgaaatttcttaaccgtcccacggagtacggtatgacccgcgacggccatcaggcggtgctgacgtttatccttccgctggcgcaccctcagccgctggccgggcagaagtacaggttttccacgtttgacccaacctactatgtcgatatgcattacgcccaggacagcgacgtgcagttgccagaaatattgcaaaaaagctgcaaaattgccgtgcacacgccgacgcccagtgaagagacgctgaactttgccgtttcccttgataaagaagatgcgcctccagaagacatggaattaggaaaacagtttgcgcaggaggtgacgttacaatgtcagtga

SEQ ID NO: 523260 - DNA, 1278 bp, Stenotrophomonas maltophilia
atgatgacgacgcttgaaattccatctgtgctttccagttcgcagcgccgttgccaggtgcttttgatgctttacctgcccgatgctgccgtcaccgcacagagcataatcgctgccaatggcgtggacgacgtcctggcacggcaagatatagccgagacgcgcgatgaaatccagcgctatcatcggcttgatatcgtcacgcaccatgacggttgctaccgtattgagggctccgccctgaatcagcgtttgtgcctgctgcactggctgcgcagggcgcttcggctgtgtccacattttgtcgcccaacagtttacccctgccttaaaaaccgcgctcaaacagcacggcattgcccgcccgctttatgacgatgcgaaccttcgggcgcttatcaacttttgcgcgcgcaagcttcagcgccagtttgagtcccgcgacgtacagtttttacagctttatctgcaatattgtcttattcagcatcatctgggcaatacgccggagttttcacccgttcagcgcagctggacgcaatcgagaggggaatactttacggcgcaggaaattgtccgtcactggaaacggcgcgtcccgcagggaacgcacagtgatgaacagctgttcctggcgctgctgtttatgatgctccgcacacccgacccggtactggataaacaccagcaggatcagcgcctgcgtcgggccatcgtgcgtatgattgcccgtttccgggcgcaaaccgggatgaacttcagcgatgagcaagggctgaccgatcagctgtatattcatctggctcaggcgctggaccgctccttatttgacatcggcatcgacaacagtctgccggaagagatccaccgtctatacccccggctgctgcgcaccactaaagaggcgctgtttgagctggaagccgaatttggcctgcgattctccggtgaagagatggctctggtggcggtgatttttggtgcctggctgatgcaggaaaccgatcttcatgaaaaacagctggtcctgttaacgggggaagataaagcctgcgaggagttaattgagcagcagcttcgcgagctaacgctgctgccgctcaatattcgttatcttagcctggaagtgtttaagaaggagggcgccccccgcgaagcggcgctggtcattacgccttatccaaccgccctgccgctgttctcgccgccgctcattcatgccgttgagaccctgaacacgcagcagcaggaacatattcgcgttatgctcgaatcctag

SEQ ID NO: 523261 - DNA, 1140 bp, Stenotrophomonas maltophilia
atggtcttgcattccacgcgctggctggcgctcagctatttcacctatttctttagttacggtatttttttgcctttctggagcgtctggctcaagggaattggtctgacgcctgagaccatcggcatcctgctgggcgcggggctggtggcacgtttcctgggtagcctgctgatagcgccccgcgtcagcgatccctctctgttgattaaagccgtgcgtattctggccctgctgacgctggtctttgcggcctgcttctgggtcagccaccagtttgcctggctgatggtggtgatggttggctttaatctgttcttctccccgctggtgccgctgacggatgccctggcgaacacctggcaaaagcagatcaccatggactatggccgcgtgcgcctgtggggatcggttgccttcgtgattggctctgcgctggtcgggaaactggtcagcctctatgactatcgcgccattctggccctgttaacgctcggcatcgcctcgatgctgctcggtatgttgctgcgtccgtcggtgatgccgcagggcgaaagccgccatcaggagagcgctggctggcccgcctggcgctcgctggtggcgcaaagctggcgtttcctggcctgcgtctgtctgcttcagggggcgcatgcggcctattacggcttcagcgccatctactggcagggggcgggctactcggcttctgcggtaggctacctgtggtcactcggcgtggtagcggaggtcattatcttcgcgctgagccaaaaactgttccgtcgtttcggggcgcgtgacctgctgctgctttccgccgtttgcggcgtagcgcgctggggcatcatgggctggacgacggatctgccgtggctgattgtggcgcaaattctgcactgcggaaccttcaccgtctgccatttggcggcgatgcgctatatcgcggcgcgagagggtggggacgttattcgtcttcaggcagtctattcagcggtggcgatgggcggcagtattgcggtgatgaccgtatttgccggtttcctctatcagcacctgggccacggtgtgttctgggtgatggcgctggtcgctttaccggccatcgtcatccgccctaaagtcgctgctcgcacgtaa

SEQ ID NO: 523262 - DNA, 423 bp, Stenotrophomonas maltophilia
atgaacagcttacgttatttcgatttcggatcctctcgttctctcctgcttttaattgcccgcattgctatcgtggtcctgtttattattttcggttatcccaagctgacggggtttagcggcaccgttcagtacatgacgtcgctcggcgcccccatgcccatgctggccgcgattattgcggtggtaatggaaatccccgccgcgattctgatcgttctgggcttttttacccgccccctggcggtgatctttgtcttctatacgctgggaacggcggtgattggacaccactactgggatatgacgggcgatgcggtcctgccaaatatgattaacttctataaaaatgtgagtatcgctggcgcctttattttgctggcgattaccgggccgggggccatctccctcgaccgactttag

SEQ ID NO: 523263 - DNA, 1254 bp, Stenotrophomonas maltophilia
atgttaaagcgtgaaatgaacattgccgattatgatgccgaactgtggcaggctatggagcaggaaaaagtacgtcaggaagagcacatcgaactgatcgcctccgaaaactacaccagcccgcgcgtgatgcaggcgcagggttctcagctgaccaacaaatatgctgaaggttatccgggcaagcgctactacggcggttgcgaatacgttgatatcgttgagcaactggcgattgaccgtgcgaaagaactctttggcgctgactacgcgaacgtccagccgcactctggctctcaggctaacttcgctgtttacaccgcgctgttgcagccgggcgataccgttctgggtatgaacctggcgcagggcggccacctgactcacggctctccggttaacttctctggcaaactgtacaacatcatcccttacggtattgatgagtccggtaaaattgactacgaagacatggcgaagcaggccaaagagcacaagccgaagatgatcatcggtggcttctctgcttactccggcatcgttgactgggcaaaaatgcgtgaaatcgctgacagcatcggcgcgtacctgttcgtcgacatggcgcacgttgccggtctgattgccgctggcgtttacccgaacccggttccacatgcgcacgttgtgaccaccaccacccacaaaaccctggcgggtccacgcggtggcctgatcctggcgaaaggcggtgatgaagagctgtacaaaaagctgaactccgccgtgttcccaagcgcccagggcggcccgctgatgcacgttatcgccgcgaaagccgtcgcgctgaaagaagcgatggagccagagttcaaggtttatcagcagcaggttgctaaaaacgccaaagcgatggtggaagtgttcctgaaccgtggttacaaagtggtgtccggcgggactgaaaaccacctgttcctgctggctcttgtcgacaagaacctgaccggtaaagaagctgacgcagccctcggccgcgccaacatcaccgtgaacaaaaacagcgtgccaaacgatccgaagagcccgttcgtgacttccggtatccgtatcggttctccggccgtaactcgccgtggctttaaagaagcggaagtgaaagagctggcgggctggatgtgtgacgttctggacaacatcaatgacgacgcggttatcgagcgagttaaaggtaaagttctggacatctgcgcacgcttcccggtgtacgcataa

SEQ ID NO: 523264 - DNA, 1191 bp, Stenotrophomonas maltophilia
atgctcgacgcccaaaccatcgctaccgtgaaagccacaatccccctgctggttgaaacgggtcctaaactgaccgctcatttctacgatcgcatgttcgcgcataacccggagctcaaagagattttcaacatgagcaaccagcgtaacggcgatcagcgcgaagcgctgtttaacgctattgccgcctatgccagcaacatcgaaaacctgccggctctgctgcctgcggtggaaaaaatcgcgcagaagcacaccagcttccagatcaaacctgagcagtacaacatcgtgggcagtcacctgctggcaaccctggacgaaatgttcagcccgggccaggaagtgctggatgcatggggtaaggcatacggcgtgctggcaaacgtgttcatcaaccgtgaagcgcagatctacagcgaaaacgccagcaagaatggcggctgggaaggcacgcgcgctttccgcatcgttgagaaaaccccgcgcagcgcactgatcaccagctttgagtttgagccggtggacggccagccagttgccgattaccagccggggcagtatctgggcgtctggctgaagcctgaaggcttcccgcaccaggagattcgccagtactccctgacccgcaagccagacggcaaaggctatcgcattgcggttaaacgtgaggaaggcggtcaggtatccagctggctgcataacgtcgccagcgtgggtgatatcgttcatctggccgcgccagcgggtgatttctttatggcggtggaatcgggtaccccggtgacgctgatttccgcaggtgttggtcaaacgccaatgctggcgatgctggatacgctggcaaaatcaaaccacagcgcgcaggttaactggttccacgcggccgaaaacggtgatgtgcacgcctttgcagatgaagtgaaagcgctcggagcgggtctgccacactttaccgcgcatacctggtatcgtttacctactgaagctgaccgcgcagcggcacgttttgacagtgaaggcctgatgaatttagggcagcacgaaggggcgtttagcgcaccggggatgcagttctacgtgtgtgggccggtagcgtttatgcagtatgccgcgaagcagctggtagacctgggcgtgaacaaagacaacattcattacgaatgtttcggcccgcataaagtgctgtaa

SEQ ID NO: 523265 - DNA, 339 bp, Stenotrophomonas maltophilia
atgaaaaaaattgatgcgattattaaacctttcaaactggatgatgtacgtgaagcgctggcagaagtaggcatcaccgggatgaccgtaactgaagtgaaaggttttggtcgtcagaagggccacaccgagctataccgtggcgcagagtacatggtggactttctgccgaaagtgaaaatcgagatcgtggtgagcgatgatatcgtcgatacctgtgtggataccatcatccgcacggcgcagaccggtaaaattggcgacgggaaaatcttcgtctttgacgtggcgcgcgtgatccgtatccgtaccggcgaagaagacgacgcggcgatttaa

SEQ ID NO: 523266 - DNA, 1338 bp, Stenotrophomonas maltophilia
atgacaagccgtaaacctgcccatctgttactggtggatgacgatcccgggctgttaaagctgctggggatgcgtctggtcagcgaaggctacagcgtggtcaccgctgaaagcgggcaggaggggctgaaggtgctcagccgtgagaaaatcgatctggtgatcagcgatttgcgcatggatgaaatggatggcctgcaactgttcacggagatccagaagcagcagcccgggatgccggtgattatcctcaccgctcacggatctattcctgatgcggtggccgcgacgcagcagggggtattcagcttcctcaccaaaccggtggataaagacgccctctataaagcgatcgacagcgcccttgagcacgcggcgccatccggagacgacgcctggcgtgaatccatcgtgacgcgtagccctgtaatgctgcgcctgctggaacaggcgcggatggtggcgcaatccgacgttagcgtgctgatcaacggccagagcgggaccgggaaagagatcctcgcccaggcgatccacaacgccagcccgcgcagtaaaaatgcttttattgccattaactgtggcgcgttgccggaacagctgctcgaatcagagctcttcggccatgcccgcggcgcctttaccggcgcggtgagcagccgtgaagggctgttccaggcggctgaggggggcacgctgttccttgatgaaattggcgatatgcccgcgccgctgcaggtcaaattgctgcgcgtgttgcaggagcggaaagtgcgtccgcttggcagcaaccgcgatatcgatatcaacgtgcgtattatttccgccacccaccgtgatttacccaaggtgatggcgcgcaacgagttccgcgaagatctctactatcgactgaatgtcgtcaacctgaaaatcccggcgctggccgagcgtgcggaagatatcccgctgctggcaaatcaccttttgcgccaggccgctgaccgccacaaaccatttgtgcgcgcgttctccaccgatgcgatgaaacgcctgatgaccgcaagctggccgggtaacgtacgccagctggtgaacgtgattgagcagtgcgtggcgttgacgtcatcgccggtgatcagcgatgcgctggtggagcaggcgctcgagggggaaaacacggccttaccgacatttgcggaagcgcgaaatcagttcgagctgaactatctgcgcaagctgctgcaaatcaccaaaggcaacgtgacccacgcggcgcgcatggccgggcgtaaccgtaccgagttctataaattgctctcacgccacgagctggaagcgaacgattttaaagagtaa

SEQ ID NO: 523267 - DNA, 753 bp, Stenotrophomonas maltophilia
atgaataacaacctggtgagtatgtcacacgtcttttaccgcgcactgcgcgcggtgttttccagcaaaaatgtgcgcctcagcctgccctgcttactgctggcaggctgtgtaacccatgcaccgaaaagtgcaattagccacaaacaggaagataaatggccgcaaaaacagctggctgatttcctttcgacacgttgcgatgatatctggagcctgtcggggcgtgatgttgaatccaatccgctgttctggctgcgcggaatagactgcgcccagcggctggcgcccgccgaggcccgtgcccaggcggcgatgctggtggacgatacctggcaggacgcatttaaacgcgggatcgtgatggcggatgccagaatcacgcctgtcgaacgccgcgccaacgtgacgcggctggatacttacgtgatcaatattcccccgcaggtgcgcccggtctatcagctctggcgggacggacaaaccctgcaattacagctgtctgaagagcgtttccgctacagcaaattgcagcagtcaagcgacagcgagcttgatgcgcttcgccagcagcaggagtcgctgcgcgagcagctggaaaccaccacccgcaagctcgaaaatctgaccgatatcgaaagacagctctcgacgcgtaagccggcaggcagctatctgcccgatgggtcgaaaggcaactctgccacgacgccagacagtgagatgccgaaacaagaggatgtgaagccatga

SEQ ID NO: 523268 - DNA, 1269 bp, Stenotrophomonas maltophilia
atgatggccttcctgctgatcctgctacctttgctggttctggcctggcaggcctggcaaagcctgaacgcgttaagtgctcaggcggccctgactaaccgcaccacgcttattgatgctcgccgtagcgaggcgatgaccaacgccgcgcttgagatggagcgtagctatcgccagtactgcgtgctggacgatcgcacgctggagagggtctatcagaaccagcgtaaacgctacagcgaaatgctggacgcccacgccggggtgctgccagatgacaaactctatcaggcgctgcgtcaggatctgaacgatctggcgcagctccagtgcaaaaacagcggtcctgatgccgccgccgccgcccgacttgaagccttcgcgaacgccaatacggagatggttcagtccacccgtacggttatcttttcccgtggtcagcagctccagcaggagattgccgagcgcggccagttcttcggctggcaggcgctggtgctgttcctcgtcagcctggggctggtgctgctctttacccgcatgatcatcggccccgtgaaggggatccagcggatgattaaccgcctgggggagggtaaatctctcggggatacggtcgtatttaaaggcccgcgcgagctgcgctcggtcggtcaacgcatcatctggctttcagagcgcctggcatggctggaatcgcagcgccaccagttcctgcgccatatctcacacaatttacaaaagcttattgaacaactgctggaatataaccgcaagctggcggatggtgctgtggtgcttgaaagcgttgagattgaaccgctggtggacatggtgatctccgcccatagcctgccagcaagagctaaaatgatgcatacccaggtggaactcaacgcgccagcctgtcttgcagaaccgatgctgttaatgagcgtactggataatctttattccaatgcggtgcactatggtactgaatccggtaccatttatatcagaagcaataacaacggttcgcgggtatttattgacgtagcgaataccggaagcccgattccggatgatgaaaaaacgatgatctttgaacccttcttccaggggagtcatcagcgaaaaggtgcggtaaaaggaagtggtctggggctgagtattgcccgcgactgcatacgacgcatgcagggtgagcttaacatcgtgagtgatgaacgcgccgatgtctgttttcgtatcgaactgcctcttgagccggaaaaatcaatgaaatga

SEQ ID NO: 523269 - DNA, 3885 bp, Stenotrophomonas maltophilia
  misc_feature (1102)..(1111): n is a, c, g, or t
atgatggaaattctgcgtggttcgcctgcactgtctgccttccgtattaataaactgctggcacgttttcaggcggccgaccttccggtaagcaatatttacgctgagtatgtccattttgctgacctgaatgcccccctgaatgcagaggagcgcgtacagctggaacgtctgcttaaatatggcccaagcctgagcagccatacgccgaccggcaaattaatcctcgccacgccacgtcctggcaccatctccccctggtcttccaaagccaccgacatcgctcacaactgcggcctgagccagattaaccgtctggagcgcggcgtggcgtactatgtggaagcgtcaaccctgagcgacgcgcagtggcaggccgtcacagcggagctgcacgaccgcatgatggagagcgtgtttgactctctggatgatgcgcagaaactgttctcccaccatcagcctgcgccggtacagagcgtggatctgctggggcaggggcgtcaggcgctgatcgacgcaaacctgcgtcttggtctggcactcgcagatgatgaaatcgactaccttcaggatgcattcgttaagctgaatcgcaacccgaacgacatcgaactgtatatgttcgcgcaggccaactccgagcactgccgccacaaaattttcaacgccgactggattatcgacggcgaacagcagccgaagtcgctgttcaaaatgatcaaaaacaccatggagcaaacgcctgaccacgtgctgtctgcctataaagacaacgccgcggtgatggaaggttccgaggtgggccgcttcttcgccgaccgcgaagcagggcgctatgacttccaccaggagcctgcgcatatcctgatgaaagtggaaacccacaaccacccgacggccatctctccgtggccgggtgcggcgaccggctccggcggtgaaatccgtgacgaaggtgcgaccggtcgcggcgcgaaaccaaaagcgggtctggtcggtttctccgtttccaacctgcgtatcccgggctttgaacagccgtgggaagaagatttcggcaagccagagcgcattgtgaccgcgctggatatcatgaccnnnnnnnnnngcggcgcggcgttcaacaatgaatttggtcgtccggcgctgaacggttacttccgtacctacgaagagaaagtggacagccacaacggcgaagagctgcgcggctaccacaaacccatcatgctggcgggcgggatcggcaacattcgcgccgatcacgtgcaaaaaggtgagatcgtcgtgggcgcgaagctgatcgtgctcggcggcccggccatgaacattggtctgggcggtggtgcagcctcgtctatggcttccggccagtctgatgcggatctcgacttcgcgtccgtgcagcgcgacaacccggaaatggagcgccgctgtcaggaagtgatcgaccgctgctggcagctcggcgatgccaacccgattctgtttatccacgacgtgggcgcgggtgggctctctaacgccatgcctgagctggtgagcgacggcggtcgcggcgggcgcttcaacctgcgcgatatcctgagcgatgagccaggcatgagcccgctggaaatctggtgtaacgaatcccaggagcgctacgtgctggcggttgctgccgatcagctgccgctgtttgacgagctgtgccgccgcgagcgcgcgccgtatgccgtcatcggtgaagcgaccgaagagcagcacctgactctcagtgatacccatttcgacaaccagccgatcgatctgccgctcgacgtgcttctcggcaaaacgccgaagatgacccgcgacgttacaacccgcaaagcggcgggtaaagcgctggatcgtcagggcattattgtggcggaagcggttaaccgcgtgctgcacctgcctgcggtggcggagaaaaccttcctggtcaccatcggcgaccgtaccgtgaccggtatggtgtcacgcgatcagatggtcggcccgtggcagatcccggtcgctaactgcgccgtgaccaccgcgagcctcgacagctactacggcgaagcgatggcgctgggtgaacgcaccccggtggctctgctggacttcgccgcttctgcccgtctggcggtcggtgaagcgctgaccaatatcgccgcgacgcagatcggcgacatcaaacgcatcaaactttccgcgaactggatggccgctgccggtcaccctggcgaagacgcgggcctgtacgaagcggtaaaagcggtgggtgaagagctgtgtcctgcgctcggcctgaccattccggtgggtaaagactccatgtcgatgaaaacccgctggcaggaaggcagcgagcagcgcgagatgacttcgcctctgtcgctggtgatcactgcgtttgcgcgcgtggaagacgtgcgtcataccgttacgccgcagctttccactgaagataacgccctgctgctgattgacctcggcaaaggccataacgcgctgggtgccaccgcgctggcacaggtttatcgccagctcggcgaaaagccagccgacgtgcgggacgtcgcacagttaaaaggcttctacgacgcaattcaggcgctggtggcgcagcgtaagctgctggcctaccacgatcgttccgatggcggcctgctggtgacgctggcagagatggccttcaccggccactgcggcgttgaagcaaacattgcaacgcttggtgaagaccgcctggcggcgctgtttaacgaagagctgggtgccgtcattcaggtacgcgccgcagatcgcgacgcggtggaagcgattctggcgcagcacggtctggcagactgcgtgcactatctcggtaaagcggtgcagggcgaccgtttcgtgattgaagccgactgccacgcggtgttcagcgaaagccgcaccacgctgcgtatgtggtgggcggaaaccacctggcagatgcagcgcctgcgtgacaatccggaatgcgccgatcaggaacacaacgcgaaggcgaacgacaacgatcctggcctgaacgtgaagctcaccttcgacatcaacgaagacattgccgcgccgtacattgcgaccggtgcgcgtcctaaagtggccgtgctgcgcgagcagggcgttaactcccacgttgagatggcagcggccttccaccgggcgggctttgacgccatcgacgtccacatgagcgacctgctggcagggcgtaccgggctggatgatttccaggcactggtagcctgcggggggttctcctacggtgacgtgctgggcgcgggcgaaggctgggcgaagtccatcctgttcaacagccgcgtacgtgacgagtttgaaaccttcttccaccgtccgcagacgctggcgctgggggtgtgtaacggctgccagatgatgtctaccctgcgcgagctgatcccgggcagcgaagcctggccgcgctttgtgcgtaaccagtctgaccgctttgaagcgcgcttcagcctggtagaagtaacccaaagcccgtccctgctgttgcaggggatggtcggttcgcagatgccaatcgcggtttcgcacggtgaaggtcaggttgaagtccgtgatgcggcgcacctggctcagcttgaaagcaaaggactggtggcgctgcgctttgttgataactttggcaaggtcaccgaaacctatccggctaacccgaacggttcggcaaatggcattaccgcggtcaccagcgaaagcggtcgggtgacgattatgatgccgcacccggagcgtgtcttccgtaccgtgagcaactcctggcacccggaaaactggggcgaggacagcccgtggatgcgcattttccgcaacgcacgtaaacagctaggttaa

SEQ ID NO: 523270 - DNA, 1551 bp, Stenotrophomonas maltophilia
ttgaaaaaattaaagattaattatctgctcatcggcattgttacgttgctgctggcagtggccctctggccgtctatcccctggttcggcaaagccgaaaaccgtatcgccgccattcaggagcggggggagttgcgcgtcagtaccctctcctctccgcttatatacgacgatatcaacggtaaaaccattggtcttgattacgaactggcacagctgtttgcggactatctgggcgtgaagctgaaagtcaccgtgcggcagaacatcaaccagctgtttgatgatttagaccatgaccgtgccgatattctcgccgcaggtctggtgtacaatagcgaacgcagcaaaaattatcagccgggcccgacttattactctgtgtcgcagcaggttgtttatcgtgtgggtagcttgcgcccgcgctcactggccgacattaccgaccagcaattgaccatcgcgccaggccatgtggtgattgacgatctgcgggcgttgaaagagaacaaatacccgaacctcagctggacggtcgatcctaaactcggcactaccgaattgctggagcaggtaaaagataaaaagctggcctataccattgctgattcggtggcgatcagccttttccagcgcgttcatcctgaaatcgccgtggcgctggatgtgaccgatgaacagccggtaacctggtttacccagttagacgacgatcaaaccgtctctgcggctatgctcgatttctttaattccatcaatgaagacggcaccctggcgcgtctggaagagaaatatctcggtcacggtgacgattttgattacgttgacacccgctccttcctgcgcgcggtggatagcgtgctgccggacctgcaaccgctgttcgagaagtacgctcaggagattgactggaagttactggcggcaatttcctaccaggaatcgcactgggatgctcaggccacctcccccacgggcgttcgcgggttgatgatgctgaccaaaaataccgcgcagagcctcggcattagcgatcgaaccgatgcggaacagagcatcagcggcggcgcgcaatatttacaggatatgatggcgaaagtgccggagacggtccctgaaggggagcggatctggtttgcgctggccgcctataacatgggttatgcccatatgctcgacgcgcggacgctgacggcaaaaaccaaaggtaacccggacagctggtcagatgtaaaacagcgcctgccgctgcttagccagaaacagtggtaccagaagctgacgtacggctatgcgcgcgggcatgaagcgtatgcctacgtggaaaatattcgtaagtatcagataagcctggtgggatatctgctggagaaagaaaaagaggcggccgaggcgcaacagctggctgaaagctatccggtggtcgcaccggacgagcttaatcaccctgcggtttcaattctgccttttgttgctttttctgcagccgacgcattcgaaaaaagtcacttaacagacccgaacattctggtgcaagtaccccgccgatag

SEQ ID NO: 523271 - DNA, 507 bp, Stenotrophomonas maltophilia
ttgtccaaccctgaacacaatcatgaatactggatgcgccacgcgctggcgctggctcagcgcgcctgggaagagggcgaagttcccgtgggcgcggtgctggtccataacaatcaggtaattggtgaagggtggaaccgtccgattggccgtcacgatcctaccgcgcatgctgaaattatggcgctgcgtcagggcggactggtgctgcaaaactatcgtctgcttgataccaccctgtacgtcacccttgaaccgtgcgtgatgtgctccggggcgatggtgcacagccgaatcggtacgctggtgtttggcgcgcgggatgaaaaaacgggcgctgctggttcactgatggacgtgcttgggcatccggggatgaaccaccaggtgaaaactatcggcggggtacttgcaccagaatgttcgggtctgttaagtgacttttttcgaatgcgtcggctgcagaaaaagcaacaaaaggcagaattgaaaccgcagggtgattaa

SEQ ID NO: 523272 - DNA, 636 bp, Stenotrophomonas maltophilia
ttggcaaatcacgagcgtcgcgttgtcttttttgatctggatggaacgctgcatcagcaggatatgttcggcacctttatgcgctatctgctgcggcgccagccccttaacgcgttgctggtattgcccctgttacccgttattggcatcgcgctaatggtgaaaggccgttcagcgcgctggccgatgagcctgctgctctggggatgcacgtttggtcatagcgaagcgcgtcttaagcagcttgagcaggattttgcccactggtttcgcgggcacgtcgccgcgtttcccgtggtccaggcgcgcctgaccagctatctcgacgccaacgatgccgatatctggctgattaccggctccccgcagacgctggtggagcaggtctattatgatacgccctggctgccgcgcgtaaaccttatcgccacgcagatcgcgcgcggctacggcggctgggtgctcaccctgcgttgcctcggacatgaaaaagtggtgcagctggagaaacgcatcggtacgccgctgcgtctgtacagcggctacagcgacagcaagcaggacaacccgctgctctatttttgccagcaccgctggcgcgtcacgcctctgggcgaacttcagcaactcgaatag

SEQ ID NO: 523273 - DNA, 1365 bp, Stenotrophomonas maltophilia
atggacaaaacagcagcgctcgccagcgacatcctgctcgggatcggtggggaaaaaaatattcagcgtcttgagaactgtatgacgcgtgttcgcgtcgaggtgcataacgacgaacagcttgatttgacgcgccttaagcagcttcccggcgtgagcgggtacgttaagcaggggcaacagcaccagttgattgtcggtccgggcaaagcggcgcaggtggtagatgccatgcgcgccctgatgacgggcggtgaaacggctcccgcctttgacgatgcggaacgcaccaaagcgcaggcgaaagccaaatacaaagcccctatgagcgatgcgctgcgccaactggctaacgtctttattccgctgatcccggcgtttatcgcgtcggggctgatcaccgggattatcaatattcttaagcgtccggatattgtcggggattttgccacgcagtatccgaacctgctgggtattctggcgattttcggcagcgcggtgtttgccatcatgaacattctggtgggggtgaacacggccaaagtgtttggcggctcgctggcgatgggcggcgttatggcgggtatcctctccagcccgcagctggcgcagattacgctgtttggcgaggcgcttcagcctggccgcggcggggtgattgccgtgttgctggtggtcattctgatgtgctggatcgagaaaaagctgcgcgcggtgctgccaggctcgattgagctgatcctcaacccgctgctgaccacattgattaccgggagcgtggcgattgtggcgctgcaaccgttaggcggcgcaatctctgaagccatcgcccacggcgcgtctctggctatcgatcgcggtgggttattggtgggggctgtgctgtccggaaccttcctgccgttagtgctgaccggtttgcatcaggggctagtgccgattcacgtcgaactggtacaggcgcacggctataacgccctgctgccgatcctgtcgatggcgggcgttgggcaggtcggcgcggccatcgcggtgctgatgaaaacccgcaacgcacgtctgaaaaaggtcattaaaggggcgttgccggtcgggttgctcggtatcggcgagccgctgattttcggcgttacgctgccgctgggcaagccgttcctggccgcctgtctcggtggcgcggtgggcggggcgttgattagctactggaaagtggcgaccgttatcaccttcgggatttccggtttaccgctggcattaaccatcgtgaccggaaaagtgatgctctatctgttaggctatctggtagcggtgatcgccgggttcctgtttacctggctattaggattcaacgacccagaggagtaa

SEQ ID NO: 523274 - DNA, 897 bp, Stenotrophomonas maltophilia
atgaatcttggctctcttgtttctgaaacgcgtaacccgcaaaccatggatcttgatgcactgtccacgctggagctggtaaaccgctttaatcaacaggataccctcgtcgcgctggcagtcaaagagacattgcctgaggtagcaaaagccgtagacgccgctgccgacgctctgaaagcaggagggcgcattatttatatgggagcgggaaccagtgggcgcctcggtgtgctggatgcctcagaatgtccgccgacttttggcgttccgcacgggctggtcgttggcctgattgccggtggccccggcgcgctgctgaaagcggtagaaggggcagaagacaataaacagcttggggaagatgatctcagggcgctgaacctgaccgcgcaggatctggtggtcgggctggcggcttctggtcgtacgccgtacgtcattggtggactggaatatgccagacagaccgggtgcaccacagtggccatctcctgtaacccgggctcgccgattgcgcaggtggccgccattgccatctctccggtcgtcgggccggaagcgctcaccggctccacacggctgaagtcgggtaccgcgcagaagctggtgctcaatatgatctccaccggcgcgatggtgaaatttggcaaggtctaccaaaacctgatggtggatatgcaggccactaacatcaagctggtggacagagcgtgtcgcatggtgatggaagcgacaggcgccagtcgtgaagaggcggaaaaggtgcttcagcagaccgatcacgatgtaaaacccgccattctgatgatattaaccgggctggatgcagccgcggccagagccagactcgaagcccatcacgggtttttacgggcggcattagaacaccaataa

SEQ ID NO: 523275 - DNA, 849 bp, Stenotrophomonas maltophilia
atgaactgtttaattcgtattcgtcagcgctacgcagggtttgcccagagtgataaaaagctggcggattttttactttctcagcccgatcgcgcgcgacacctcagctcccagcagctggcaggcgaagccggggtgagccagtcgagcgtggtgaaattcgcccagaaaataggctataagggctttccggcgctaaagctggcgatcagtgaagcactggtgagcaacccgaatccgcagtcaatgccggtgcataaccagatccgtggcgacgatccgatgcgtctggtgggcgaaaagctgatcaaggagaacgtggcggcaatgcatgccacgctggatgtgaacacagaagagaaactgctggaaagcgtagccatgcttcgcgacgcgcggcgtattgtgttgaccgggatcggcgcctccggactggttgcgcgtaactttggctggaagctgacaaaaatcggctataacgccatcgttgaacaggatatgcacgcgctgctggcgaccgtgcaggccatggatcctgacgatttactgctggccatctcctattccggcgagcgacgtgaaattaatatggccactgacgaagccctgcgcgtaggaggaaaaattctggcgattaccggttttagcccgaatgcgcttcagcagcgggccacccgctgtctgtataccattgccgaggaacaggccactcgcagcgcggcgatttcgtcgacgagtgcgcagatgatgctgacggacctgttgtttatggcgctggttcagcaggatctggagcgtgcgccagagcgtattcggcacagcgaagagctggtaaaaaaactggtttga

SEQ ID NO: 523276 - DNA, 261 bp, Stenotrophomonas maltophilia
atggcgctgttaatcaccaaaaaatgcatcaactgcgatatgtgcgaacccgaatgcccgaaccaggcgatttcgatgggcgacagcatttatgagattaacagcgaccgctgcaccgaatgcatcggccactatgaaacgccgacctgccagaaggtgtgcccaattcccaatacgatcttaaaagatccggcacacgtcgagaacgaagaacagttgtgggataagtttgtcctgatgcaccatgcggacaaaatttaa

SEQ ID NO: 523277 - DNA, 1542 bp, Stenotrophomonas maltophilia
gtggttaacgccctgtcaaagcgcgtggaagtgaacgtccgtcgcgacggccaggtgtataacatcgcgtttgaaaacggcgaaaaagtgcaggatttgcaggtcgtcgggacgtgcggtaaacgcaacaccggcaccagcgtccatttctggcctgacgaaagcttcttcgacagcccacgcttttctgtttcccgcctgacgcacctgctgaaagccaaagcggtgctgtgcccaggtgtagaaatcacctttaaagatcacgttaacaacaccgaacagagctggcgctacgaaaagggtctgaacgactacctgtgcgaagcggttaacggcctgccgaccctgccggaaaaaccgttcgtcgggaatttcgaaggtgataccgaggcggtggactgggcgctgctgtggctacctgaaggcggtgagctgctgacggaaagctacgtcaacctgatcccaacgctgctcggggggacgcacgtcaacggcctgcgtcagggtctgctggatgcgatgcgcgagttctgcgaataccgcaacattctgccgcgcggcgtgaagctttccgcagaagatatctgggaccgctgcgcctacgtgctttccgtgaaaatgcaggatccgcagtttgccggtcagactaaagagcgcctgtcgtcacgccagtgtgcggcgtttgtttccggcgtggtgaaagatgcgtttaccctgtggctgaaccagaacgttcaggccgcagaaatgctggctgaaatggcgatctccagcgcccagcgtcgtctgcgcgcggcgaagaaagtggtgcgtaaaaaactgaccagcggccccgcgctgccgggcaagctggcggattgtaccgcgcaggatctcaaccgcaccgagctgttcctggtggaaggggactcggcgggcggatcggccaagcaggcgcgcgatcgtgagtatcaggcgatcatgccgctcaagggtaagatcctcaacacctgggaagtctcgtctgatgaagtgctggcctcgcaggaagtacacgacatctccgtggcgatcggcatcgatccggacagcgacgatctgagccagctgcgctacggcaagatctgcattctcgcggatgcggactccgatggtctgcacatcgccacgctgctgtgcgcgctgttcgtgaagcacttccgcacgctggtgaaaaacggtcacgtccacgtggcgctgccgccgctgtaccgtatcgaccttggcaaagaagtctactatgcgctgacggaagaagagaaagcgggcgtgctggaacagctgaagcgcaagaagggcaaaccgaacgtgcagcgctttaaagggctgggcgagatgaacccgatgcagcttcgcgaaacgacgttggatccgaacacgcgccgtctggtgcagctgacgatcagcgacgaagacgaacagcaaaccaacgccatgatggatatgctccttgccaagaaacgttcggaagaccgacgtaactggctgcaggagaaaggcgatatggcggatattgaggcctga

SEQ ID NO: 523278 - DNA, 309 bp, Stenotrophomonas maltophilia
  misc_feature (285)..(294): n is a, c, g, or t
atgacgcaaacctataacgctgatgccattgaggtactcaccgggcttgagccggttcgccgccgcccggggatgtacaccgatacgacgcgcccaaaccacctgggccaggaagtaattgataacagtgtggacgaagcgctggcaggtcatgccaaacgcgtggacgttatcctgcacgccgatcagtcgctggaagtcatcgacgatggccgcggcatgccggtggatattcacccggaagagggggttcctgccgttgagctgatcctctgccgtctgcannnnnnnnnnggttcctgccgttga

SEQ ID NO: 523279 - DNA, 582 bp, Stenotrophomonas maltophilia
atgtcgacgctcctctatctgcacgggttcaacagttctccgcgttccgcaaaggcgacgcagtttcgccagtggctgagcgaacatcatccgcacgtggagatgattattccgcagctgcccccttatccggcggacgcggcagaaatgctggaatcgattgtgcttgaacacggcggcgaatcgtttggcgttgtcggctcgtccctcggcggctactacgccacctggctgtcgcaatgctttatgttgcccgctgtcgtcgttaacccggcggtccggccatttgagctgttaagggactttcttggcgaaaacgagaacccctacaccggccaacaatatgtgctagagtcacgccatatttacgatctcaaagttatgcaggtcgacccgcttgaagcgcccgatcttatctggctgctgcaacagacgggagatgaagtgctggattaccgccaggcagtggcgtattacgcatcctgccgccagactgtagaagagggcggaaaccatgctttcacgggctttgaagatcatttcacccagattgtcgattttcttggactgcacagccactga

SEQ ID NO: 523280 - DNA, 828 bp, Stenotrophomonas maltophilia
ttggaaagcctgttgaacctgactgttgctggtggggcgccagtcaggatattacaaatcaccgacacccacctttttgccgaaaagcatgagacgcttctgggcgtgaacacctgggagagttatcaggcggttcttgacgcgatccatgctgaaaagcggccatgcgatctgatcgtcgcgacaggcgatctggcgcaggatcaatcctccgcagcctatcagcatttcgccgaaggaattgcgagctttagtgtgccttgcgtctggctaccgggcaatcacgattttcagcccgccatgtacagttcgcttcaggaggcggggatttcgccggcaaaatgtgtctttacgggggaccagtggcaaattctgctcctcgacagtcaggtgtttggcgttccgcacggtgagttgagcgactatcagcttgactggctggagacaaaactggccgccgaaccgaatcgtaatacgctgctgttactgcatcatcatccgctgccggcgggctgtagctggcttgatcagcacagcttacgcaactctgcggcgctggatagcgtgctggcgaaattcccgcgcgtgaaaaatttgctgtgtgggcacattcaccaggaacaggatctcgactggaacggtcgccgcctgctcgcgacgccgtccacctgcgtgcagttcaagccccattgcgctaacttcacgctggacaccatcgcaccgggctggcgctggctggacctgcatgccgacggctcgctgaccaccgaagtgtgccgtctggctggcgcgcagttccgcccggataccgcttcagaaggctattga

SEQ ID NO: 523281 - DNA, 423 bp, Stenotrophomonas maltophilia
atgaagcgctatacacctgacttcccagaaatgatgcgcctgtgcgaaaccaatttcgcccagctgcgccgcctgctgccgcgaaacgacgcgcccggcgaaacggtaagctatcaggtgagcaacgcgcagtatcggttaacgataacagaatcaacgcgctacactacgctggtggagattgagcaaacggcgccgagcatcagctactggagcctgccgtcaatgacggtacgtctttatcatgatgcgatggtcgctgaagtgtgttcaagccagcagatctttcgcttcaaagcgcggtatgattatccgaataaaaagttgcatcaacgcgacgaaaagcatcaaattaaccagtttttagccgactggctaagatattgtttagcacatggagcaatggcgattccggtttgttag

SEQ ID NO: 523282 - DNA, 633 bp, Stenotrophomonas maltophilia
atgcaaaaaccagaaaacgtgcctgtcaccttcgccaaaaacgatgtagaaattattgcacgagaaacgctttatagcggttttttttcaatggaactttaccgtttcaggcatcgcctgtttaacggtgaaatgagcggtgaaatcaaacgcgaaatttttgagcgcgggcatgcggcagtcttgctaccctttgacccagtgcgtgatgaagtcgtgctggtcgagcaggtccgtattgcggcgtatgataccagcgaaacgccgtggttgctggagatggtggccgggatgatcgaggagggtgagtcggtcgaagacgtcgctcgccgtgaggcgctggaagaggcaggcctggcgatcggtcggacgaaaccggtgttgagctacctggcaagtccggggggaacaacggaacgctcatctattatggtgggcgaagtggacgccacgacagcgaaagggatccacggtctggcagatgaaaacgaagatattcgggttcatgtggtgagtcgggagcaggcttaccaatgggtagaagagggtttaatcgacaacgcagcgtctgtcatcgccttgcaatggctgcaactgcatcatcagaatttacgaaacgagtggaaaaaatga

SEQ ID NO: 523283 - DNA, 1479 bp, Stenotrophomonas maltophilia
atgaagaaattgctccccatccttatcggcctgagcctgacgggcttcagtgcaatgagccaggcagagaacctgttacaggtctaccagcaggcacgtctgggcaaccctgatttacgtaaatcagcggccgatcgtgatgctgcgtttgaaaagattaacgaagcacgtagtccactgctgccgcagttaggcttaggtgcagattatacctacactaacggttttcgcgataacaatggcatcgactcgaatgccaccagcgcctctttacagcttacacagaccctgttcgacatgtccaaatggcgtgaactgagtttgcaggaaaagagcgcaggcattcaggatgtcacctatcagaccgatcagcagacgctgatcctgaataccgcgaccgcctatttccaggtactgagcgcgattgacgcgctctcctatacggaagcgcagaaacaggcgatttaccgtcagttagatcaaaccacccagcgttttaatgtgggtctggttgcgatcactgacgtgcagaacgcccgttcacagtacgataccgtactggctaacgaagtgaccgcacgtaacaacctcgacaacgcactggaagcactgcgtcaggtcaccggtaactactatcctgagctggcctctctgaacgtggacagtttcaaaacggataaaccacaggcggttaatgctctgctgaaagaagcggaaaaccgtaacctgaccttattgcaggcgcgcctgagccaggatctggcacgcgagcagatccgccttgcacaggatggtcacctgccaaccctgagcctgagcgcctctaccggcgtatcggataccagctacagcgggtctaaaacgacgtctcaggcctatgacgacagcaacgttggccagaacaaagtgggccttagcttctctctgccgctgtaccagggcgggatggttaactctcaggtgaaacaggcgcaatacaactttgtgggtgccagcgagcagctggaaagcgcgcaccgcaacgtggtgcagaccgtgcgttcttcctttaacaacgtcaatgcctctatcagtagcatcaacgcttacaaacaggccgttgtctctgcgcaaagctctctggacgcgatggaagcaggctactccgtcggtacgcgtaccatcgttgacgtgttagacgcaacgaccacgctgtataacgcgaaacagcagctttccagcgcacgttaccagtacctgattaaccagctgaacatcaagcaggcgctgggtacgctgaacgagcaggatctgcaaatgctgaacagtacgctgggtaaaccggtatccacgtcgcctgacagcgtggcgccggaaaatccagagcaggatgccgcggttgataacttcaacgctaacggcagcgccccggctgcacagccagcggcagcgcgcagcacctcacctgcgagcagcggcacgaatccgttccgtaactaa

SEQ ID NO: 523284 - DNA, 648 bp, Stenotrophomonas maltophilia
atgaatcacgcgtcgttccgcaaaagctggaacgcacgccacctgacacctgtcgcgctggcggtcaccgccgtctttatgctggcaggctgtgagcaaagcgacgaaacggtgtcgctctatcaaaacgctgacgattgtgcgagcgcaaccggtaaagccgccgagtgtacgacggcctataacaacgccctgaaagaggcagaacgtaccgcgccgaaatatgcctcacgcgaagactgtgtagccgaattcggcgaaggccagtgccagcaggctcctgctcaggcaggtatggcgccggaaaaccaggcgcaggcacagtccagcggtagcttctggatgcctctgatggcgggttatatgatgggccgtctgatgagcggcggcgcgggctaccagcagcaaccgctgtttagttctaaaaacccaaacagcccggcgtacggtaaatacaccgatgccaccggcaagggttacggtgctgcaacgcctggccgtacgatgaccgtaccgaaaaccgcgatggcaccgaaaccagccactaccagcaccattacccgtggcggcttcggtgagtctgtggcgaaacaaaccaccatgcagcgtagtgcgaccggctcttcgactcgctcaatgggcggctga

SEQ ID NO: 523285 - DNA, 1161 bp, Stenotrophomonas maltophilia
atggaacgagtcagtattgtcgagcgcccggactggcgcgaaaaagccaccgaatacggtttcaactttcacaccatgtacggcgagccgtactggtgtgaagacgcttactataagctcacgctcgcgcaggtcgaaaagcttgaagaggtgaccgcagaactgcaccagatgtgcctgaaggtggtagagaaagtcatcgacagcgatgagctgatgaccaaattccgcattccgaagcacacctggagctttgttcgtcagtcctggaaaacgaaccagccttctctctactctcgcctcgatttggcatgggatggcgtgggtgaaccgaagcttttagaaaacaacgcagatacgccaacctccctgtacgaagccgcgttcttccagtggatctggctggaagatcaggcgaatgccggaaacttgccggaaggcagcgaccagttcaacagccttcaggaaaaactgattgagcgtttcgccgaactgcgtgaacagcacggtttcaacctgttgcacctcgcctgctgtcgcgataccgaagaagatcgcggtacggttcagtatttgcaggactgcgcagccgaagcggaagtggcgacggaattcctctatatcgaagagatcggtttaggtgaaaaaggtcagtttacggacacgcaggatcaggtgatcagcaacctgttcaagctctacccgtgggaatacatgctgcgcgaaatgttttctaccaagctggaagacgccggtgtgcgctggctggaaccagcctggaagagcattatctccaataaagccctgctgccaatgctgtgggagatgttcccgaaccacccgaacctgctgcctgcttactttgccgaagatgatttcccgccgatggagaaatacgtcgttaagccaatcttctcccgtgaaggcgcgaacgtctcgattatcgaaaacggtaaaacgctggaagcggttgaagggccgtacggtgaggaagggatgatcgtccaggcgttttatcaactgccgaagtttggcgacagctatacgctgatcggcagctggcttattaacgatcagcctgccgggattggtattcgcgaagatcgcgcgctgattacgcaggatctgtcgcgtttctacccgcatatttttattgaataa

SEQ ID NO: 523286 - DNA, 789 bp, Stenotrophomonas maltophilia
atgtctccttctcgtatgccagcactgtttttaggccatggcagccccatgaacgttctggaagataacgtctatacccgcgcctggtgtcaactgggtaagacgttaccgcgtccgaaggcaattgtggtggtctctgcgcactggtttacccggggtaccggcgtgacggccatggaagcgccaaaaacgatccatgattttggcggttttccgcaggcgctgtacgatacgcattatccggcccccggttcgcctgagctggcgcaaacgctggtggatttgctggcacctttcccggtcaccctggataaagaggcctggggctttgaccatggctcgtggggcgtgctgattaagatgtatcctgatgcggatatcccgatggtgcaactgagtatcgacagcaccaaaccggctgcctggcacatggagatggggcgtaagctggcttcgcttcgtgatgagggcatcatgctgattgccagtggcaacgtggtacacaatctgcgtacggtacgctggcacggtgaaaatacgccgtacccttgggcaacagcctttaatgactatgtaaaagacaacctgacctggcaagggccggtcgaacggcaccctttggtgaactatctggatcacgacggcggttcgctctctaacccgacgccggaacacttcttgccattgctgtatgtattaggcgcatgggacggtcaggaggttattacaacaccggtcgacggtattgagatggggagcttgagtatgctgtcggtgcaggtggggtaa

SEQ ID NO: 523287 - DNA, 774 bp, Stenotrophomonas maltophilia
atgtcagtacctttgattttgaccttacttgcgggcgccgcgacctttatcggtgcgttccttggggtactcggtcaaaaaccctctaatcgcctgctggccttctcgctgggtttcgccgccgggattatgctgcttatctcgctgatggagatgctgcccgccgcgcttcacgccgaagggatgtcgcctgttctgggctatggcatgtttatcattggcctgctgggttattttgcactcgaccgtatccttcctcacgcgcacccgcaggatctaatgcaaaaaagcgttgcccccatccctggcaatatcaaacgcacggccattctgctgacgctgggtatcagcctgcataactttccggaaggtatcgccacctatgtcacggccagcagcaacctggaaatgggttttggtgtcgcgctggccgttgctttgcacaatgttcctgaaggacttgccgttgccgggcccgtttatgccgccacgggttcaaaacgtacagctgtcttttgggcgggtatctccgggatggctgaaattctcggcggcgtgctggcgtggctgatcctcggtagcctcgtatccccggttgtaatggctgcaattatggctgccgtggccggaattatggtcgcgctctctgtcgatgagctgatgccgctggcaaaagagatcgatcccaacaataacccaagctacggcgtgctgtgtggaatgtcagtgatggggatgagtctggttctgctacaaacggcaggtattggttaa

SEQ ID NO: 523288 - DNA, 531 bp, Stenotrophomonas maltophilia
atgtatatgggtaagaaattactgttagcagcggctatggctggcattgtgtcgggttctgcttttgctgaagatcaaggctctggcaaaatcaaattcaaaggtgttgttattgacgcaccgtgcagcatcgcaccagacagcgttgataaagaagtcgatctgggtgaagtgactacggccgttatcgtcgatattaatctggaaaactgccagcttgacgatccggcagacgaaaccgacacgccaattaccaaagtggatgtcaccttcaccagcgcagcgacagacgcgacagacaccagcctgatgagtaacacctatgcaagtggtgcgcagaacgtgggtgtacgtctgctggataatgcggaggctgctatcacgctgggagaatccaacgaggttgagttgctggcaggatcaaccacccagacgctgcatttcaaagcggttatggaagtccccacgggtaaaactgcgacggcaggccaggttgaagccacggctaactacgtcctgttgtacaaatag

SEQ ID NO: 523289 - DNA, 2448 bp, Stenotrophomonas maltophilia
atgatgacatacaaattacaatggataatcatcattgcatccctgttaatgacgagacttacctctgccactgaatttaatataaatgccattgataaagatcagcgcggcagcgtcgatttatcacgttttaaagatcaaatatcggttacgccgggaagctatttcgttaccgtttcagttaatgatattccgctggcaaatggctggctccttcgctggagagaaataaataatgcagttcaagtgtgtattcctcacgaactggccgatacatttgcgttacaggatgaggttcgtcacgctttgccagaaaaagagggatgcgttgatttcgccgccagaccagacatcagatttacgtttgagcaagatagccaatccctgaatgtgacgatcccccaggcatggctgcaataccgtgcggtggactggatgccgccatccacctgggacaacggcgtgccgggcgtactgctggattacaatctttttgccagccattatcagcccaatagcggcagcagcaataacaacgccaatacctatggcaccgtcggtgcgaacatgggcgcgtggcgcctgcgaagcgattaccagtacacgcgaagcgatactgaagcaggctcagagcaggatggccgtttttcacgcgtatatatgttccgccctctgccctcaatcggagcgaaactgacgctgggtgaaacggatttccagtccgcaatttttgacgcctttacctataccggcgcatcgctaatcagcgaagaacgtatgctgccatggtcgctgcgcggctatgccccgcagattaccgggatagcgcaaaccaacgccacggtgactgtaagccttgccgatcgcgtgatttaccaaagtaaagtgccaccaggcccgtttgttattcaggatcttaaccagtcggttcagggcacgctggacgtcaaagtcacggaagaggacggccgcgtcagcaccttccaggtctctgccgagtccgtgccgtttttaacgcgcaagggtcaggttcgctacaagttcgcggcgggtaaagcgcgccagggtgcctcccatgacgttgaagataacgccttcatgagcggcgaattttcctggggcatgctgtcacatacctccctgtatggcggcacgctgactgatggcgacggttatcgttccgtcgctgccgggatcggccagaatatggcctggctgggggcgctctcttttgacgtcacgcaggccaccagccagctgccacaccagcgcagtcagacgggttacagctatcgcattaactacagcaagcgtttcgataccaccggcagtcagcttacgcttgccagctaccgctactcagacccccagtttttgagctacgcccgctaccttgattatgacgacggtgaccgccagtcggagaaacaaaccctgagcatgacggcaagccagtacatttcagcgttatccctgaacctgtacgtcaacatgctgcgtcagacatggtggaatgattcaccttccacgaccggcagcatcacggcgggctacaactttgatatgggccgctggaagaacctcggcgtaaccctgtcctggagtaaaacgcattacgatgaggaagacgaaagtgacgatactcagttctatctctcgctcagcgtaccgctcgatcccgatcatcgtcttaactatgacctgcgtaacagcgacacgctgagtcataacgtgtcgtggtatgacacgtcggatcgcaataatacctggggcgtttccgcaggcgcggagagcggaaagccagattccggcgcgcaggtcagcgggaattatcagcattattctacgtacggcgatctcaatctctcaggcagctataaagctgacgaatataactccctcagcgcgagctggagtggttccttcacctcaacggcgaaaggcgccgcgctgcaccggcgaagctacggtaatgaacctcgtgtgatggtcagcaccgacggggtaggcaatatcccgctgaacatgtcgcgagatgagaccaaccgttttggcatcggcgttttaccgtcattctccagctattccccctccagcgtgcaggtcaatctgaacaacctccctgatggcgtggacgtagacaaccgcgtcgtgacctcaacctggactgagggagccattggttatcgtcagattgccacgcgcgcaggtaaggacgtgacaggcgttctgcgaatgtcatcaggagcgccacctctcggggcgattgttcgcctggaagcaagcaatttgcaggttgggatggtggccgatgaaggccgcgtctggctggccgccgttgagccagaacagcagtttcgcgtgacatggggcgacaaccaacagtgtcgcttctcgttaccttctcacttagaaaacagtatgcagttgatactgccgtgtcagtaa

SEQ ID NO: 523290 - DNA, 762 bp, Stenotrophomonas maltophilia
atgaaattaacgccgtttaaaagcctgtgcctgatgctaaccagcacagcatttgctacccacgcagccattaatctggaccgcacgcgcattgtttttccagaaagcgacaaggccagcagcctgaaagtggacaatcagagcaaggtgctgccttatctggcgctctcctggattgaagatgaaaagggacaaaaagaagatacgcactttatggcgcttccccccattcaacgtatcgaagcgggcacctcgtcgcagataaggattgttaaacaagccactactcgccagctgccaggagacagggaatcgctgttttatttcaacctgcgtgaagtaccgccaaaaaacaccagcgccagcgaggagcgcagcgtgatgcaggtagcaatgcagagccgaattaagctgttctggcgtccagaagcgattagcaaaaaatccggcgaactgactgaaatgcgaatggaaatttccgccaacgcggatgggctcacggtccacaaccctacgccgtactacatcacgctggcgtggctgagcaaaaatgctaaaaccatgctgccgggttttgacagtctgatgattgcgcctttcgccacggcaaccgcgtctaccggcgattaccacggtagttattacagcatcggctatatcgacgattacggtgccctgaaaaaagtcgacgtgcagtgcaccggaacggcgcaatgtaaacttaccgaacggaaaatcgataaagatgcgaaagctcgctag

SEQ ID NO: 523291 - DNA, 999 bp, Stenotrophomonas maltophilia
atggcgcttaactgttatctgggtggctctggcggttccgtcgaggagacaaaaacgatctccccctttgccatacccagcaacgcccaaattggccaaaaaatatgggagtctgatgacattaggattccggtgacgtgtgacaacaacgtctcgagcaattttaagccggaagatgtctttgcctgggtaaatccttatcctgtcgcaaccgatccctattatgagctgggcgtcacctatgaaggtatagattacgatgctacaggtcagcccaacggcgtggatacccgccagtgtctggacaacaataacatcactatttacacccctgctcaaatccgccagatggggtgggagaatcgcatttgctctggtaatccggatgatatccatatttcgcgcacgttcgtcgcccgattacgacttttcgtgagaataaaggctgtgccgccgcatggctatgtcagttcgctcagcgattacatcgttgtgcaatttgacggtaagggtggcgttaatcagatggccgacgcgaagaacctgaagtatcacatcaacgggctgcaaaacattacggtactggattgcggggcgacgtttagcatttaccctgagaatcaggagatcgacttcggcaccttcagtgcgcgcgacattgtgaatcagcagaagcgtattcgcacgttttcaattcgaaccaccaaagtgcaggatgcccagtgctcggacggatttaagatggactcgtcattttacacaaccgaaacgctcagcgcagacgacaccgcggtactgatagggaatgggttaaagctgcgtattcttaacggaacggagccttacacattcaaccagtacaaggaatacgccgattttacgggcgatatgatgaatcttgagcaaaactacacggctgaactttcgcgggatgaaggaaaagcgattcagtccgggccgtttgaaaccgtggtactgttcaaaattaactaccactag

SEQ ID NO: 523292 - DNA, 654 bp, Stenotrophomonas maltophilia
atgaatcagacgctactttcctcttttggcacttcaactcaacgtgttgaacatgcactggatgcactgcgcgaaggccgcggtgtgatggtgcttgacgatgaaaaccgtgaaaacgaaggcgacatgatttttgccgccgagaacatgaccgttgagcagatggcgctgaccatccgtcacggtagcggcatcgtatgcctgtgcatcaccgaagaccgtcgccagcagcttgatctgccgatgatggttgaaaacaacacaagcgcctttggtaccggcttcaccgtgaccattgaagcggcacatggcgtcaccaccggggtgtcggcggctgaccgcctgactaccgtgcgtgcagcgattgctgatggtgcaaaaccctccgatctgcaccgccctggtcatgtcttcccgctgcgcgcgcagccgggcggcgtgctgacccgtggtggtcataccgaagcgaccatcgatctggtgacgctggctggcttcaaacccgcaggcgtgctgtgcgaactgaccaacgatgatggcaccatggcgcgcgcgccggagtgcatcacctttgcgcgtctgcacaatatgccagtggtgacgattgaagatctggttgaataccgccgggcgcatgagcgtaaagccagctga

SEQ ID NO: 523293 - DNA, 297 bp, Stenotrophomonas maltophilia
atgattgacccaaagaaaattgagcagatcgcgcgtcaggttcatgagtccatgccgaaaggtattcgtgagtttggtgatgacgttgagaagaaaattcgccagacgttgcaggcacagttggttcgccttgatttagtcagccgcgaagagtttgacgtgcagacgcaggtgctgctgcgcacccgcgagaagctggcgctgctggaacagcgtctgagcgagctggagagccgcaatgcgccggaagaggtgaagccagcgccagctattccaccggtggatgaccaggcatag

SEQ ID NO: 523294 - DNA, 1431 bp, Stenotrophomonas maltophilia
atgaaagtaacactgccagagtttgaacgtgctggagttatggttgtcggggatgtgatgctggatcgctactggtatgggccgaccagccgtatctctccggaagcgccggtgccggtagttaaggtcgacaccattgaagaacgtccaggcggcgcggcaaacgtggcgatgaacatagcctcgctgggcgcgcattcgcgtctggtgggcctgaccggcattgacgatgcggcgcgtgcgctgagccagtcgctggcggacgtgaacgtgaagtgcgacttcgtttctgttccgacccacccaaccatcaccaagctgcgcgtgctgtcgcgtaaccagcagctgatccgcctcgactttgaagaagggttcgaaggcgttgatcctgagccgctgcatgagcgcattagccaggcgctgggcaatatcggcgcgctggtgctgtctgattatgccaaaggtgcgctggcgagcgtgcagaccatgatccagctggcgcgcaaagccagcgttccggtgctgatcgacccgaaaggcaccgatttcgagcgctatcgcggcgcaaccctgctgacgcccaacctctctgagttcgaagcggtggcgggcaagtgcaaaactgaagaagagctggttgagcgcggcatgaatatcatcgctgatttcgagctgtctgcgctgctggtgacccgttccgaacagggcatgacgctgctgcaaccgggcaaggcgccgctgcatatgccaactcaggcgcaggaagtgtacgacgtgaccggtgccggtgatacggtgatcggcgtgctggcagcgacgctggcggcggggaactccctggaagaagcgtgctacttcgcgaacgccgcggcgggcgtggtcgtcggtaaactcgggacctccaccgtttcgccaatcgagctggaaaatgctgtgcgtgggcgtgcggataccggctttggcgtcatgaccgaagacgagctgaaagtggccgttgccgccgcgcgcaaacgcggtgaaaaagtggtgatgacgaacggcgtgttcgacatcctgcatgcgggtcatgtctcgtatctggcgaatgcgcgcaagctgggcgaccgcctgattgtggcggtcaacagcgatgcctcaaccaaacgtctgaagggtgaaacgcgtccggtgaacccgctggagcagcgcatgatagtgctcggcgcgctggaagcggtggactgggtggtctcatttgaagaagacaccccgcagcgcctgattgccggaattctgcctgacctgctggtgaagggcggtgattacaagccagagcaaatcgcaggtagcgaagaggtctgggcgaatggcggtgaagtgatggtgctcaactttgaggacgggtgttcaaccaccaacatcattaagaagatccagaaagacagtcagtaa

SEQ ID NO: 523295 - DNA, 2856 bp, Stenotrophomonas maltophilia
atgccgctttcttcgcagttacagcagcactggcagaccgtttgcgaacgcctgcctgagtcgttacccgcgtcatcgttaagcgagcaggcgaaaagcgtgctcacgttcagtgattttgtgcaggagagcgtcagcgctaacccggactggctggcagcgctggaaagcgcgccgccgcaggctgacgagtggcggcattatgctggctggctgcaaaccgcgctggcagaggtggcagatgaacccacgctgatgcgcgttctgcgtcagttccgccgccgggtgatggtacgcattgcctgggcgcaggcgctggagctggtgagtgaagagagcaccttgcagcagttgagcgagctggcgcagacgctgatcgtcgccgcgcgggactggctctacgccgcctgctgtaaagagtggggcacgccgtgcagcgaagacggggttccgcaaccgctgttgattctggggatgggcaagctgggcggctgcgagctcaatttttcctcagacatcgacctgatttttgcctggccggagaacggcaccacgcgcggcggtcgtcgcgagctggacaacgcccagttctttacccgcctggggcaacggctgattaaggcgctggatcagcccacccaggatggttttgtctaccgcgtggacatgcgtctgcgtccgtttggcgacagcgggccactggtgctgagctttgccgcgctggaagattattaccaggagcaggggcgcgactgggagcgttacgcgatggtcaaagcgcggatcatgggcgacagcgacgatgcctacgccaacgagctgcgcgccatgctgcgcccgttcgtgttccgccgctacatcgactttagcgtgatccagtccctgcgaaatatgaaagggatgattgcccgcgaggtgcgtcgccgtggcctgaaggacaacatcaagctcggcgcgggcggcattcgtgagatcgaatttatcgtccaggtcttccagctgatacgcggcgggcgcgaaccttctctgcaatcccgctcgctgctgccaacgctaagcgctatcgatcagctgcatctgctgccggaaggcgatgcgcaaacgctgcgtgacgcttatctcttcctgcgtcgtctggaaaatttgctgcaaagtatcaacgacgaacagacccagacgttaccgggcgatgagctgaaccgggcgcgtctggcctgggggatgcgggtggatgactgggcggcgctgacggaacggctggaagcgcatatggcgggcgtgcgccgcatctttaacgatctgatcggcgacgacgaaagtgaatcgcaggacgatgcgctctccgagcactggcgcgaactgtggcaggacgcgcttcaggaagatgacaccacgccggtgctggcgcacttaagcgacgatgcccgccatcgcgtggtggcgttgattgctgatttccgtctcgaactgaacaaacgcgccattggcccgcgcggtcgtcaggtgctggatcatctgatgccgcatctgctgagcgatgtctgctcccgcgaggatgcgccggtgccgctgtcgcgcatgatgccgctcctgagcgggatcgtcacgcgtaccacctaccttgaactattaagtgagtttcccggcgcgctgaagcatctgatttccctttgcgccgcctccccgatggtggcgaacaagctggcgcgttatccgctgctgctcgacgaactgctcgacccgaatacgctctatcagccgacggcgacggatgcttaccgcgacgagctgcgtcagtatctgctgcgcgtgccggaagaggacgaagagcaacagcttgaggcgctgcgtcagtttaagcaggcacagatgttgcgcgtggcggcggcagatatcgccggtactctgccggtaatgaaagtgagcgatcacttaacctggctggcggaagcgatcatcgacgcggtagtccaccaggcgtgggtgcagatggtggcccgctacgggcagccgaagcaccttgctgaccgtgaaggccgcggttttgcggtggttggttacggcaagctgggcggctgggagctgggctacagctccgatctggatctgattttcctccacgactgtccggttgacgtgatgaccgacggcgagcgcgaaatcgacgggcggcagttctacctgcgcctggcccagcgcatcatgcacctgttcagcactcgcacctcatccggcattctgtatgaagtggatgcgcgtctgcgcccgtccggcgcggcaggcatgctggttacctccacggaggcttttgccgactatcagaagaacgaagcctggacgtgggagcatcaggcgctggtgcgcgcccgcgtggtgtacggcgatccgcagctcaaaacgcagttcgatgcgatccgcaaggcggtcatgacgaccccgcgcgaaggctgtacgctgcaaaccgaagtgcgggaaatgcgtgagaaaatgcgcgcgcaccttggcaacaaacatcgcgatcgctttgatatcaaagctgatgagggcgggattaccgatattgagtttatcactcagtatctggtgctgttgcacgcgcacgataagccgaagctgacccgctggtcggataacgtgcgcatactggaactactggcgcagaacgacattatggatgagcaggaggcgcaggcattaacccgcgcctacaccacgctgcgtgacgagctgcaccatctggccttacaggaacagccgggccatgtggcgctggacggtttcaccgatgaacgcgcgcaggtgaccgcaagctggcagaagtggctggtggaaccgtgcgtaacaaaacaagtgtga

SEQ ID NO: 523296 - DNA, 1302 bp, Stenotrophomonas maltophilia
atggcacaagagatcgaattaaagtttatcgtcgaaaaagacagcgctgacgcgctccgccagcatctgaacacgctgtccggcgagcaccatgaacccgtacagctgctcaacatctattacgaaacgccggacaactggctgcgcaaccacgatatgggcctgcgcatccgtggtgcgaacgggcgctacgagatgacgatgaaaatcgccggtcgcgtgatgggcggtttgcaccagcgtccggaatacaatatcgacatcagtaagccagaacttgagctggatcgttttccggcggaagtgtggccggaagggacgctgcccgcaacgctgtcggcagaggcgcaaccgctgttcagcaccgatttctggcgcgagaaatggctggtgacggaaggcaagagccgtattgagatcgcgtttgatcggggtgaaattaaggctggtgaagagcaggagccgatctgcgagctggagcttgaactgctggaaggcgacgcgagcgacgtgctgaagctggcgcgcaagctggtaaaccagcctggcctgcgtcagggcagcctgagtaaagcggcgcgcggctatcacctggccgccgggaatgcgccgcgcgtgctgcgagaaaccccgattctgcgcgttgtgccgaaagcctccgttgagcagggcatggaagcggcgctggagctggcgctctctcagtggcagtaccacgaggagctgtgggcgcgtaacgtgaaaaatgccaaaaaacaggtgctcgctgctatggggctggtgcgtcacaccctggcgctgttcggcggtattgtaccgcgtaaagccagcgctcacttacgtgatctgctcactcaaaccgaaacgctgatgctttctgacgtgtcggcacaaacggcgatctacagcccgcaaaacgccagcgcgaaactggcgttgaccgaatttctggtgacgcgcggctggcgcattttcctcgatgcgaaagggcagactaaaatcgcggaaaacttcaaacgttttgcggatatccacctctcccgtcacgcggccgagctgcgaaccaccttcgcgcatccgctgggcgatcagtatggcgatcagcttccccgcctggcgcgtaacatcgacagcatgttgctgctgtcaggtgcgtatgagggcgtgaaggcgcaggcctggctggagaactggcaggggcttaagcatgccatcgagacccgtcagcagattgagatcgagcatttccgcaacgaggccatttcgcaggatccgtactggctgcacagcggaaaacgttaa

SEQ ID NO: 523297 - DNA, 639 bp, Stenotrophomonas maltophilia
atgaaaataacgactgatatgcttaaattacgcctgattggacttactttactcgcttttagcgccgcaaccgcggtccacgctgaagagaaacgttacgtttctgatgaactgaatacctgggtacgcagcggccctggagacaattatcgcctcgtgggtacggtaaatgccggcgaggaagtgactctgctgcaaactaacgcagacaccaattacggtcaggttcgtgacagctctggccgcacctcatggatcccgctgaaagagctaagcacagtgccaagcctgcgcacccgcgtgccggatctggaaaatcaggtgaaaactctgaccgataagctgaacaacattgacggtacctggaaccagcgcaccgcagagatgcagcagaaagtggcgcaaagcgacagcgtgatcgccggcctgaaagacgaaaatcagaagctgaaaaatgagctgatcgtcgcacagaagaaagtaaacgccgcgaatctacagctggatgacaaacaacgcaccatcatcatgcagtggtttatgtatggcggcggcgtactgggcgtcggtctggtgctgggtctggtgcttcctcaccttatcccaagccgtaaacgtaaagaccgctggatgaactaa

SEQ ID NO: 523298 - DNA, 1242 bp, Stenotrophomonas maltophilia
gtgaagagttatctggtcggtggtgcggtacgtgatgcgttattaggtctgccggtcaaagataaagattgggtcgtggtcggtgccacgcccgaagcgatgattgacgcgggctaccagcaggtaggccgcgattttcctgtgttcctccatccgaaaagccgggaagagtacgccctggcgcgtaccgaacggaaatccggttccggttataccggcttcacctgttatgccgcgccggatgtgacgctggagcaggacttactgcgccgcgatctcaccattaatgccctggcgcaggacgaaaacggccatattatcgatgtctacggcggccagaacgatctgcgtgaccgtcttttacgccatatctcccccgccttttctgaagatccgcttcgcgtactgcgcgtggcgcgttttgccgcccgttatgcccatctcagcttccgcatcgccgacgagacgatggcgctgatgacggccatgaccgacgcgggcgagctggaacacctgacgccagaacgcgtctggaaagagaccgaaaacgccctgactacccgtaatccgcaggtctttttcctggttctgcgcgactgcggggcgctgaaagtgctgttcccggaaatagatgcgctgtttggcgtgcccgccccggcgaaatggcacccggaaattgataccggcattcacaccctgatgacgctgagcatggccgccatgctcagcccggaggtggacgtgcgcttttctaccctctgccatgacctcggcaaagggttaacgccaaaggagttgtggccacgccaccacgggcacggtccggctggcgtgaagctggttgaagggctttgtcagcgcctgcgcgtgccgaatgacattcgcgatctggcaaaactggtcgccgagttccacgacctgatccacaccttcccgatcctgaaacccgccaccatcgtcaggctgttcgataacatcgacgcctggcgcaagccgcagcgcgtggagcaaattgcgctgaccagcgaagcggacgtgcgcggccgtaccgggtttgaagcgtccgattatccgcagggtcgtttgctgcgcgaggcgtgggaaatcgcaaaagcggtgccaacgaaagaggtggtggaggcagggtttaaaggcccggagatccgcgaagagctgacgaaacggcggattgatgcggtcgcggcgtggaaggaaaaacgttgccctcagccgaaagactga

SEQ ID NO: 523299 - DNA, 822 bp, Stenotrophomonas maltophilia
atgagcgatatgcactcgctgctggtggcggcaattctgggtgtggtcgaaggattgacggagtttttgccggtgtccagtacgggccatatgattatcgttggccatctcctgggctttgaaggcgataccgcaaagacgtttgaggtggtgattcagctgggctctattctggcggtggtcgtcatgttctggcgtcgtctgtttggtctgatcggcatccacttcgggcgtttaccgcagcgtgaaggagagggcaaggggcgcctgacgctgattcatattctgctggggatgatcccggcggtggtgctggggctggtgttccatgacaccataaaatcgcttttcaacccgattaacgtgatgtacgcgctggttgtcggcggcttcctgctgattgccgccgaagtgctgaagccaaaaaccccgcgtgcagaaggtctggacgatatgacgtatcgccaggcgtttatgattggctgcttccagtgtctggcgctgtggccgggcttctcccgttcaggggcaaccatttccggcgggatgctgatgggcgtgagccgttacgcggcgtctgagttctcgttcctgctggcggtaccgatgatgatgggcgccaccgcactggatctctacaaaagcattggcttcctgaccgtaggcgacattccgatgttcgccgtgggctttatcaccgcctttatcgtggcgctgattgccatcaaaaccttcctgcaactgattaagcgtatctcgtttattccgttcgcgatctaccgctttatcgtcgcggctgccgtgtacgtggtcttcttctga

SEQ ID NO: 523300 - DNA, 378 bp, Stenotrophomonas maltophilia
atggatattgtatttatagagcaactttcggtaatcaccacaattggtgtttacgactgggaacagaccatcgagcagaaactggtgttcgatatcgaaatgggctgggataaccgtaagtcagcaaaaagcgatgatgtgaatgactgtctgagctacgccgacatcagtgaagcggtcatcggccacgtggaagggcaacgatttgcgctggtggaacgcgtggcggaagaggtagcggacctgctactgagcaaatttaactccccgtgggtgcgcatcaaactaagcaagccgggcgcggtggcgcgcgccgccaacgtgggcgtgattatcgagcgtggcacaaatctgaaaggaaaagatttaacgtcataa

SEQ ID NO: 523301 - DNA, 615 bp, Stenotrophomonas maltophilia
atgagtgcaatcgcgcctggaatgattatcctcgcctacctttgcggctcaatctccagcgccattctggtctgccgcatcgccgggttgcctgacccgcgtgaaagtggttccgggaatccgggggcgaccaatgtactacgaattggcggcaagggagcagccgtagcggttttgatttttgatgttctgaaaggaatgctccccgtctggggtgcgtatgcgctgggcgtcacacccttctggctggggctgattgctatcgccgcctgcgtcggccatatctggcccgttttctttggttttaaaggcggtaaaggcgttgcaaccgcgtttggcgcgattgcgccgatcggctgggatctcactggcgtgatggcgggcacctggctgctgaccatcctgctgagcggctattcatcgctgggcgccatcgtcagcgcgctgatcgctccgttttatgtctggtggttcaaaccgcagtttaccttcccggtatcgatgctctcgtgcctgatcctgctgcgtcatcatgacaacattcagcgcctgtggcgtcgccaggaaaccaaaatctggacgaagctcaagcgtaaaaagaaagacgctcagtaa

SEQ ID NO: 523302 - DNA, 1467 bp, Stenotrophomonas maltophilia
atggcagaaatcacagacacaactcccctcccaacggcaggaaacaccccggatggcgacatcaagtgggtacgcagcgcatcggacgtttcacgtctcgttaatgacggctctcagggccgggccaatgcccgcatcgtggtcggtatcgcgctcgggggaatttttctcgatgcctacgatctcggcgcgctggcattcggcatcaaagacatcacccgcgaatttaacctgacgcccgctggtaccggcatggtggcttcagccattacctttggtgccattgtcggggcgctgctcggcggctatcttacggataaaatcgggcgctaccgcgtctttatggccgacatggtgttctttgtcgtcgccgccatcgcctgtgcgctggctccgaacgaatatgtgctggcgggcgcacgctttgtgatgggtcttggcgtcgggatcgaccttcccgtggcgatggcgtttctcagcgagttcgccaggctgaaaggcccggggaataaagcctccagcgtggcaatgtggtgccccacctggtatgcggccatcagcatctcttatcttctggtgctcttcttctacgccgtgctgccggaaggccacagcgactggctctggcgtctgatccttggcttcggcgcggtgcccgcgctggtgattatcgccatccgcagccgctatatgagcgaatccccggtctgggcggcgaatcagggcaatctgaaggaggcggcgtccatcctgcgacagtcgtacaacattaatgcccacgtgccgcaggatgcgcttgaccagcccgcgccggtggtcaataaggcaaaatggtcgaactacctgaatctgttccgcggtatctacctgcggcgtaccacgctcgccacgctgctgtcggttgtctcctcgttcgcctataacgccgtagcctttggcctgccggtgatcatttccagcttctttgtgcagtcgatgctgaccaccattctgatctcgctggcgcttaacctgctgtttgcgtttgtcggcgggctgctggcagtgcgctatgttccgcgcttcggcgcgtggcgaatgtcactggcgggttacgcctgccagctggtggcgctgctcggtctggcgctgattggccgccctgacggggccacggaaggcgtggtcgccgtcgcgatgctggcgctgttcctgtttggccagggttttggtccgggtgcgcataccatgacgtttgcctccttgagctacccgacctcgctgcgcggcgtgggcgtggggcttaaccagacgctgatgcgcagcagttcaacgctgtcactgtttctgttcccgctactggtcgcgtcgctggataccgccgtgttctgggtgattgcgctggcgccgtttatcggcctggtatcgctgctggcgatccgctgggagccgtcggggtatgatgtggatgcagaggattatcgctag

SEQ ID NO: 523303 - DNA, 828 bp, Stenotrophomonas maltophilia
atgttagcaactcaggtcactgataattcatacaaaggctggcaggccacgcttgccctccagttttgttatacccctgaaaaaaccctcctccattccgcgcgtcacaccgggccgctcaccgttcagcgcccgttttaccctgaaggcgagacctgccatctttacctgctgcatccgccaggcgggattgtgggcggggatacgctggatatttccgtgcggctcgacgccaaaagccatgccctcatcaccatgcccggcgccagcaagttctatcgcagcagcggcccgcaggcctgtctgaatcagcatttttacctcgacgaagaggccacgctggagtggctgccgcaggacaccataattttccccggcgctaacgccgcgctgcgttccgtcttccaccttaaggccaccagcacgctgctggcgtgggagctgtactgtctgggccgtccggtgataaacgaaaccttcagccacggcacgctggagagccgccttgaggtgtgggtggatggcgagccgcgtttgattgagcgactgcatcttaacgatggcgatctgtcgcccgtcgcaggccatccgtgggtcggcacgctgctgttctacccggcccgggaagctcatcttgatacagtgcgcgagcggctcgccccgctggaaaactttggcggggcgacgctcaccgacgacctgctgtcggtgcgttttctctcccacgacaacctcatttgccagcgggtgatgcgcgatatctggcagtcgcttcgcccgcttttaacccccaaaaccgcctgttcgccgcgtatctggcagacataa

SEQ ID NO: 523304 - DNA, 303 bp, Stenotrophomonas maltophilia
atggaactgactcccagagaaaaagacaagctgttgctgttcaccgccgcgctggttgccgaacgccgcctcgcgcgcggggtaaagctcaactacccggaatcggtcgcgctgatcagcgcctttattatggaaggcgcgcgcgatggcgaaaccgtcgcctcgctgatggaagccggccgccacgtcctgacgcgcgatcaggtgatggagggcgtgccggagatgatcccggatatacaggtggaagccaccttcccggacggatccaagctcgtcaccgtccacaatccgatcgtgtaa

SEQ ID NO: 523305 - DNA, 315 bp, Stenotrophomonas maltophilia
atgatcccaggcgaataccggatccagtccggcaacattgcactcaacgtcgggcgcgaaacccgaagtgtgatcgtggaaaaccacggcgacaggccgatccaggtcggctcgcattaccacttttacgaggtcaacccggcgttgaaattcgatcgcgaagccacccgaggttaccgactcaacatcccggccggtactgccgtgcgcttcgaacccggccagaagcgggaagtgacgctggtgcaggtgacgggcgcgcagcgcattttcggttttcgcggcgaggtcatgggcgaggtgaaacatggctga

SEQ ID NO: 523306 - DNA, 1704 bp, Stenotrophomonas maltophilia
atggctgagatttcacgccaggcgtatgccgatatgttcggccccactaccggggataaagtgcggctggccgacagcgagctgtggatcgaagtggaagacgatctcacgatctacggcgaagaggttaaattcggcggcggaaaagtgatccgcgacggcatgggacaggggcagatgaccgccgacgactgcgtggatctggtgctcaccaacgcgctgattgtcgatcactgggggattgtgaaagcggatatcggcataaaagatgggcggatcttcgccgtcggcaaagccggaaacccggacattcagcccggcgtgacgatcccgattggcgcggcaacggaagtgatcgccgccgaagggaagatcgtcacccctggcgggatcgacacccacatccactggatctgtccgcagcaggcggaagaggcgctggtctctggcgtcaccaccatgatcggcggcggcaccggccctgcggcaggtacaaacgccaccacctgcacgccggggccgtggtatatcgcccgcatgttgcaggccgccgatacgctgccggtgaatattggcctgctgggcaaagggaacggttcaaacccggacgcgctgcgcgagcagatcgcggctggcgccatcgggcttaagatccacgaagactggggcgcgacgcctgcggcaatcaactgctcgctggaggtcgctgaagagatggatattcaggtggcgctgcacagcgacacgctgaacgagtccggttttgtcgaagacacgctggctgccatcgccgggcgcaccatccacaccttccacaccgaaggggcgggcggcggccatgcgccggatatcatcaccgcctgcgcgcacccgaatattttgccctcctccaccaacccgacgctgccctacacggtgaataccatcgacgagcacctggacatgctgatggtctgtcaccatctcgacccggatatcgccgaggacgtggcgtttgcagaatcccgtattcgtcgggaaaccatcgccgccgaagacgtgctgcacgatatcggcgcgttctcgctcacctcgtcagattcacaggccatgggccgcgtgggggaagtgattatccgcacctggcaggtggcgcaccgcatgaaggtgcagcgcggcgcactgccggaagagacaggcgagaacgacaactttcgcgtgaagcgctatgtcgccaaatacaccattaatccggctcttacccacggcatcgcccatgaggtcggttctattgaggcgggcaagctggcggatctggtggtctggtcccccgctttctttggcgtcaaaccggccaccatcgtcaaaggcgggatgatcgcctgcgcgccgatgggcgacatcaacgcctcgatccccacgccgcagccggtgcattaccgcccgatgtttggtgcacttggtgccgcacgccacgccacgcggctgacgtttgtctcgcaggccgctgatgccagcggcattccgcagcggctcggattgcaaagcgccactgcggtggtgaaaggctgccggacggtgaaaaaggccgacatgatccacaacgatttacagccgaatatcaccgttgactcgcaaacctatgaggttcgcgtcgacggcgaattgatcaccagcgaaccggcagaagttttgccgatggcgcaacgctattttctgttttga

SEQ ID NO: 523307 - DNA, 465 bp, Stenotrophomonas maltophilia
atgatttatttaacccaacgcctggaccacgcgcacccgattaccgccagcgtcacgctgccgattgacgtgcgggtgaaaagccgcgcccgcgtggcgctgaacgacggtcgcgaagccgggctaatgctgccgcgcggcctgttgctgcgcgggggcgacctgctgactaccgacgacggcagcgaagtgatcgaagtgatcgccgccccggagtcggtttccgtggtgcgctgcgccgaccctttcctgctcgcccgcgcctgttatcacctgggcaaccgccacgtaccgctgcaaatcatgcccggcgaactgcgctaccaccacgatcacgttctcgacgacatgctacgtcagttcgggctggaggtgaccttcgccagcctgccctttgaaccggaagcgggcgcttacaccagcgatgcccacagccatggccactcccacgctcattcacattaa

SEQ ID NO: 523308 - DNA, 540 bp, Stenotrophomonas maltophilia
atgcgtaagtatttaccgctgtttctgctggccttttccgttccggcgcttgcccatcccgggcacggaaccgacagctttcaggcaggttttctccatccgctgaccgggctggatcacctgctgatgctgacgggggctggcgtgctgtccgccctgagcggccgcaagctgctgctgccgttagcaacgctcggcatgatgcttgctggcgccgttgcgggcagcctgctcggcggctttagcggcatggagatgctgattatcgcctcgctggcggtctgcggcgtgatgatgtttaagactgaaaatcgcctgctgctggcggttccagccctggcgatgttccatggctgggcgcacggcgtggagatgtccggccacagcttctggctctttaccagcggatttatgttagccagtgccacggtgctgtgcgccagcttcgcggcagggctgctgctgcgccgtcacgacggcctgcgtaaaaccttcggcggcgggctgatcgtctctgccctgctggcgttgatgagctga

SEQ ID NO: 523309 - DNA, 675 bp, Stenotrophomonas maltophilia
atggagcacgcccgccagcggctgcgcctgatgcagctctccagcagtagcctgccggtcggttcgtttacctggtcacaggggctggagtgggctgtcgaggccgggtggatcacggacgctgaggccttcaggcgctggcagatccagcagatggagcagagctttttctgcgtcgacctgccgctgtttatccgcctgtatcatgcctgcgagaagcaggaggtcgcgacagcaaaacgctggacggcatacctgctcgcctgtcgggaaacgcgcgaactgcgcgaggaagaacgcaaccgcggcgcggcctttacgcgcctggttaaaagctgggaacccgcctgcccggcagaatggctgccgctgttgatgcagagccagctcggcggtatggcgtggctcggcgtgcgctggggcattagcgtgcgcgagctggcgctgagcctcggctacagctggattgagagcgcggtgatggcgggcgtcaagctggtgccgtttgggcagcaggccgcacaacagctgattatcgacctgagcgaccattttgccgccgagtttgaacaggcatttttacgtggcgacgacgcgctgggggcagctacgccgctgtccgccatcgcctccgcacgccacgaaacccaatattcacgactattccgttcctga

SEQ ID NO: 523310 - DNA, 618 bp, Stenotrophomonas maltophilia
atggctgattacaaacatcccctgcgcgttggcgtgggcggcccggtagggtcgggcaaaaccgccctgctggaagcgctctgcaaggcgatgcgcgacacctatcatcttgcggtggtgactaacgatatctacaccaaagaggatcagcgcatcctgaccgaggcgggtgcgcttgagccagagcgcatcgtaggggtggaaacgggcggctgtccgcacaccgccatccgcgaagatgcctcaatgaacctggcggcggtggaagccttgagcgagaagttcggcaatctggatctgatcttcgtcgaaagcggcggggataacctgagcgcgaccttcagcccggagctggcggacctcaccatctacgtgatcgacgtggccgagggggaaaaaatcccgcgcaagggcgggccggggatcaccaaatccgattttctggtgatcaataaaaccgacctcgcgccgtacgtgggggcgtcgctggaggtaatggagcgcgacactaatcgcatgcgcggcgagcgtccgtggacctttaccaacctgaaggcgggtgacgggctggcgacgattattgcgtttctggaagagaaagggatgctgcggatgtag

SEQ ID NO: 523311 - DNA, 1014 bp, Stenotrophomonas maltophilia
atgcgtgtactgggtattgaaacatcctgcgatgaaaccggcatcgcgatttacgacgacgaaaaagggcttctggccaaccaactgtatagtcaggtgaaattgcacgctgactacggcggcgtcgtgcctgaactggcctctcgtgaccacgtgcgtaaaacggttcccctgattcaggcggcactgaaagaggccgggttaagtgcaaaagatattgatgccgtggcctatactgcaggaccgggcctggttggcgcgctgctggtcggcgcaacggtagggcgttcgctggccttcgcgtgggacgttccggccattccggttcaccatatggaaggacatcttctggctccgatgctggaagccaatccgccagcgttcccgtttgtggcgctgctggtctccggcggtcatacgcagctgattagcgtaacgggcattggcaagtatgagttgctgggcgaatcgatcgacgacgcggccggtgaagccttcgacaaaaccgccaagctgctgggcctggattatcctggcggcccgatgctgtcgaaaatggccgcacagggaacggaagggcgctttgtcttcccgcgtccgatgaccgatcgtccggggctggattttagtttctccggtctgaaaaccttcgcggcgaacaccattcgcaataacgacgacagcgagcagacgcgtgccgacatcgcccgcgcgttcgaagatgcggtggtggatacgctgatgatcaagtgcaagcgtgcgctggatcagacgggctttaagcgcctggtgatggccggtggcgtgagcgccaaccgtacgctgcgcgcgaagcttgccgaaatgatgcaaaagcgtcgtggggaagtgttctacgcgcgtccggaattttgtaccgataacggggcgatgatcgcctacgccgggatggtgcgcctgaacgctggcgccacggctgacctgagcgtgtccgtgcgtccgcgctggccgctggcggagctgcctgaggcgtaa

SEQ ID NO: 523312 - DNA, 216 bp, Stenotrophomonas maltophilia; identical to SEQ ID NO: 115346

SEQ ID NO: 523313 - DNA, 1746 bp, Stenotrophomonas maltophilia
atggccggaagaatcccacgcgttttcatcaatgacctgcttgccagaaccgacatcgtcgatctcatcgacgcgcgggtgaagctaaaaaagcagggcaagaactaccatgcgtgctgtccgttccataacgaaaaaaccccctctttcaccgtaaacggtgaaaagcagttctaccattgcttcggctgtggcgcacacggtaatgccgtcgattttttgatgaactacgataagctcgagttcgttgaaaccgtcgaagagctggcggcgatgcataaccttgaagtgccatatgaagcaggcagtggaccaagtcagatcgagcgccatcagcggcaaacgctatatcagttgatggatggcctgaattcgttttaccaacagtctcttaagcactctgcggctgagcctgcgcgtcagtatctgaacaagcgcggactgagcgacgatgtgattgcgcgtttcgctattggttacgccccgcccggctgggacaacgtgttaaagcgttttggcggcaatagcgaagatcgtaaatccctcatcgacgcaggcatgctggtcaccaacgaccagggacgaagctacgaccgcttccgtgaacgggtgatgttcccgatccgcgacaagcgtggccgggtgataggttttggtggtcgcgtgctgggtgatgccctgccgaaataccttaactccccggaaaccgatattttccataagggccgccagctttacggtctttatgaggcacagcaggataatgcggaacctccgcgtcttctggtcgtcgaaggctatatggatgttgttgcgctggcgcagtacgacattaactatgccgttgcgtcgctgggaacgtccaccacggcggaccatatccagttgctgttccgcgtcaccaacaacgtgatttgctgttacgacggtgaccgcgcaggacgcgacgccgcctggcgagcgctggaaaccgcgttgccgtatatgaccgacgggcgtcagctacgctttatgttcctgcccgacggtgaagacccggatacgctggtgcgtaaagagggcaaagcggcatttgaagcgcggatggagcaggcacagccgctctccacgtttctgtttaacagcctgatgccgcaggttgatttgagtacccctgacgggcgcgcgcagctcagcacgctggcgctgccgttaatcagccaggtgcccggcgaaacgctgcgcatctatctgcgtcaggagttaggcaacaagctcggcattctggatgacagccagcttgaacgtttaatgcctaaacaggctgaaaacggcacggtacgccccgcgcctcagctaaaacgcacaaccatgcgtatactgatagggttgctggtgcaaaaccccgaacttgctccgcaagtgccgtcactggcgggtttgaaccacgaaaaattgcccggacttggcttattttcagaattggtcaacacttgtttgtctcagccaggtctgaccaccggacaacttttagagcattatcgcggcacaaaagaggccgctacccttgaaaaactgtcgatgtgggacgatatagcagataaggatatcgcagaaaaaacgttcaccgactcactcaaccatatgtttgattcgatgcttgagttgcgccaggaagagttgatagctcgcgagcgcacccatggcttaagcagcgaagaacgccgggagctctggatgattaaccaggaactggcgaagaaataa

SEQ ID NO: 523314 - DNA, 1845 bp, Stenotrophomonas maltophilia
atggagcaaaacccgcagtcacagctgaaacttcttgtccaacgcggtaaggagcaaggctatctgacctatgccgaggtcaatgaccatctgccggaagatatcgtcgattcagatcagatcgaagatatcatccaaatgatcaatgacatgggcattcaggtgatggaagaagcaccggatgccgatgatctgttgctggctgaaacctccaacaacactgacgaagatgcggaagaagctgctgcacaggtactgtccagcgtggaatctgaaatcgggcgtaccactgacccggtccgcatgtacatgcgtgaaatgggtaccgttgaactgttgacccgcgaaggcgaaattgacatcgcaaaacgcatcgaagacgggatcaaccaggttcagtgctctgttgccgaatacccggaagcgattacctatctgctggagcagtacgatcgcgttgaagcggaagaagcgcgtctgtccgatctgatcactggctttgtcgacccgaacgctgaagaagatatggcgccaaccgccactcacgtcggttctgagctgtctcaggaagagatggatgacgacgaagacgaagatgaagaagaagacgacgacagcagcgacgacgacaacagcatcgaccctgaactggcgcgcgagaagtttgccgagctgcgtactcagtacgaagtgacgcgtgacaccatcaaagcgaaaggccgcagccatgctgccgctcaggaagagatcctgaagctgtcggaagtgttcaaacagttccgcctggtgccaaaacagttcgactacctggtgaacagcatgcgcgtgatgatggatcgcgtacgtacccaggaacgtatcatcatgaagctgtgtgttgaacagtgcaaaatgccgaagaagaatttcatcaccctcttcaccggcaatgaaaccagcgaaacctggttcaacgccgctatcgcgatgaacaagccgtggtctgaaaagctgcacgacgtgaaagaagacgtacagcgcggcctgcaaaagctgcatcagattgaagaagagaccggcctgaccatcgagcaggtgaaagacatcaaccgtcgtatgtctatcggtgaagcgaaagcccgccgtgctaagaaagagatggttgaagcgaacttacgtctggttatctctatcgccaagaaatacaccaaccgtggcctgcagttcctggatctgattcaggaaggcaacatcggtctgatgaaagcggtagataagtttgaataccgtcgtggttacaagttctccacctatgctacctggtggatccgtcaggcgatcacccgctctatcgcagaccaggcgcgcaccatccgtattccggtgcatatgattgagaccatcaacaagctcaaccgtatttctcgccagatgttgcaggagatgggtcgcgagccgacgccggaagagctggctgaacgcatgctgatgccggaagacaagatccgtaaagtgctgaaaatcgctaaagagccaatctccatggaaacaccaattggtgatgatgaagattcgcatctgggtgatttcatcgaggataccaccctcgagctgccgctggactctgccaccaccgagagcctgcgtgccgctacgcacgacgtgctggctggcctgaccgcccgtgaagcgaaagtgctgcgtatgcgtttcggtatcgatatgaacaccgaccacacgctggaagaagtgggtaaacagtttgacgtgacccgcgaacgtatccgtcagatcgaagcgaaggcgctgcgtaagctgcgccatccgagccgctctgaagtactgcgtagcttcctggacgactaa

SEQ ID NO: 523315 - DNA, 507 bp, Stenotrophomonas maltophilia
atgatcaatgatattctggcccctggcctgcgggtggtgttctgcggaatcaacccgggcaagtcctcggcgcacaccggttttcactttgctcatccgggaaatcgcttctggaaggtgatccaccaggccggttttaccgacaaacagcttaagccggaagaagagcagcagctgctggatacgcgctgtggcatcaccatgctggtcgagcgtccaacggtgcaggcgagcgaagtaaatctgcatgagctgcgtactggcgggcgggaactggtgaagaagattgaagactaccagcccgcggcgctggcgatcctcggcaagcaggcctacgagcaggcgttcagccagcgcggtgcgaagtggggtaagcagaacattaccattggcataacgcaggtttgggtgttgccgaatccgagcgggctgaacagggcgacgctggacaagctggtggaggcgtatcgggaacttgatgaggcgctggtggtgagggggctttag

SEQ ID NO: 523316 - DNA, 573 bp, Stenotrophomonas maltophilia
atggataaaaaattacaattagaacatttgcatgaatgcttgcgccgggaagtaatgatgagttcaaaaacattttcatggttcagggtgctgcataaagctatcaaatgccccaatcgccgtttccacttctggtggcgcattgcttcgtactggcatcattcagacagtaacttcctgaaaaaacgagctgcgaagataaacagaaacctcattttcaaatatggaactgagattcagttaggggcacacatcggacccggactggtgatttcccaccatcacgggatagtgataaacggctccgctgtcatcggccactctttgcgtatcagacagaacacaacgattggcattaccggtgctagtattcataaagagccgatatccattgttattggcaacaatgtcagcattggcgcgaattcctgtatcatctcagataagattcgcatcggtgacaacgttgtaatcggcgctatgtcatttgtgaacaaagacattcccagtaacaccaccgtctacagcgaaaagactttgcatgtcataccgaacaaattacatgcagcatga

SEQ ID NO: 523317 - DNA, 741 bp, Stenotrophomonas maltophilia
atggcgggtaatgattcggggatgttccagtttccgcccgaagggacgctggttgagatcgctttcactggcggacggccggataagccttttgtgcggcagaccgtgccggacggaaccagtctcccggatatccagccaggcgagcagctgcaacagcagcgtgcggaagtgtcgcagcgcgtcacccaggcgggtgactgggtgaggcagacagaccagacgatcagtgaaacctctatggcgcgggtggttaaggccgatacagaacagcgggagctggtcagccgcgaaaccacggttaaggccacggataaaattaccgtgctgggcacgtccacactactggccggagccattcagcaggtgtgtacgggggattacagccaggcagtcaataatcgcgtggcgagtatcggcggcaatgatgaaacagacatagccgggagcaagacagtcacaacgggtaaagacctggttgagaaaattggccagatacctaaaagcgtggcggccgtgcaacagcagattattgccccggtggtgtggattggctctggcactatcaacgtggcacagctgatgctcgacacgctcgacgtggttaaagagctggcagagcaaacggcaagccacacgcacagcaatacgggagcaccgaccaacgcgggagccatccggaacacgggaacgaaagcggacacgctgaacggcaaatattccccggtgattggcaagtaa

SEQ ID NO: 523318 - DNA, 465 bp, Stenotrophomonas maltophilia
atgttaaacagcatcacttttaggacgctgcactggatcgccactattcttatggccctggcggtcgcgggatactgttatttccaacatatacagcgtttaactgttagtgatcggctatatcaagttcgccagctcacgccccggacctggttatacattactgagtatgacggctcgaacatgaccaccggggaagtgtatcgttattttttagcgagtaagattgacggtgatccgctggtggctctcgaaaaacaacatatcgcgcccacgcttacagcgaataccgcccgcgcaaaagttgaaggcataggcaacaatatctcatttactgttcacggcacagtgtacagctttacaacgtccgcatttttttatgatgctgagggaatagcggccgtgccgtcaattgacttaacggcccgcggcgagagctgggacaaggggaaatttagtcgatag

SEQ ID NO: 523319 - DNA, 351 bp, Stenotrophomonas maltophilia
atggcatgtataccgatttatccaccccgcgggctggagatattgcgcgaacacataaggctcgcgcgggcgcgtcacgaagtccagaatatggccgccccgcttacgtatacgtggttttatgagcgagtaagaaacggcgggccgtgggattacaaacaacaaaaacgggcttatgctgacttcgggaatttccattacggcgctgtgggttatgcagcgtgcatccctgcaaagattttgcttattgctgccggcgcggcgcagtggaaagccggcacatcaagacccgaatggggtaatttcatgggggccccgccgtttggtgatgatccgattgaccaattttga

SEQ ID NO: 523320 - DNA, 492 bp, Stenotrophomonas maltophilia
atggctattcctgcttatctatggcttaaggatgatggcggcaacccgattaagggatctgtggatgttcaaaatagagaaggtagtatagagatactctcttttagtcacggcttgttagttccgaccgatagtaacacaggcaagatcaccggcacgcgcttacacgcgccgctcgtaattgaaaaagagtttgatagctccagcccgtatctctacaaagcggtagccaccggccaaacgctgaaaagcgcagagatcaagtggtataaaatcaacgatgcgggccaggaggttgaatatttcaatatgctgcttgaaaacgtccgggtagtcagcattaaccccgtcatgcataactgtaaagagccagcgttacagatacacaatcataatgagggaatacagctccgctatgagcggatcacctggaagtattgcgatgggaacatccaatactcggacgcgtggaacgagcgggttacagcgtaa

SEQ ID NO: 523321 - DNA, 1170 bp, Stenotrophomonas maltophilia
atgagcacaccgatcaaacggctagaaatcattaaaaatgccattgagctggaagatgacgacatcatccggagccagttgaaacgtctcaaagaggaagcctttgacgataatctcctgtccatcgtcgcggcgcttgagcagaaaaattacaccgcagcccttcgcgctatcaccgcctggctgcaaagccagcgcgccgttaccccgtggcgtgacccgcaactggcggccagcaagctggagctgaaggctctggaagagcgcttgcgcgatctgattgatcgccgtaacgcccgggtacagcagcttgatgagttcaacgatctctatttctcccgcctcgggccgttgatgcagcagatcctcaccctgcgtaaaacgttggcggagcttaacctgcgtcgtcagcaggcggagacgcgtcgtcgggaagaggattaccgccgctgccagcgctatatggcgcaggccgtagaggttctgacaacgctcacccggcgctggcgagatctgcctgcggattccgttcaggcggcagaggcgcgcaagcatcttcagcagcaaagtaatctgattgccaacctgctggccgaagcgatggagctggagaccggtttaacgcgtgaagaagagccagctcgtcaggcgcgcgatgaggccaacgaagaatacaaaaagtatcgcgaacagcatcatgatgccgaagtgcgcctgcgtaaaggcaaggatctctctgaagaggatcggaacgagctgaagcggctctggcgtcaggcgagcaagctatgccacccggatctggttgccgatgatttaaaagaggaagccaacaggatgatggtgcaactcaaccaggccaaacagcgcggcgacgtgaaggccattcgctcgctggtcgcccgtctgcaacaagggtttgagccgatgatggcgagcgacaggctgaacgacctggaacgtattcgcaaaaaaatggcgcaggtgcgtgagcaaatcgacaccctggtgaacgagctggcagagctggagaaggaagagtcctggctgctcgtctcgtcgctcagcaatatggaagcctactttgcccagcaggagaaagcgctgagagaggtatgcgcctcgctcgaacatcaggtgagcgaagcgcagctggatcccgcagcctga

SEQ ID NO: 523322 - DNA, 765 bp, Stenotrophomonas maltophilia
atggcatctacccgttaccctcaacgtgtccgcaatgacctgcgttttcgtgagctgaacgtgatgcgcactgagcgagtcagcgcaggatttcagcgcattgtactaggcggcgaggcgctggagggctttagctctcgcggctttgacgaccataccaaagtctttttcccggcaccgggcacccctttcgtgccgcctgtggtgaccgatgaaggcatcgactggggcgacggggtgcgtccgcaggcgcgtgactacaccccgctgtacgatgacgaaaaacacgagctggcgctcgattttttcgtgcatgatggcggcattgccagcaaatgggcggtagaggcgaaggtgggcgacaagctgaccatcggcggtccgcgtggttcgctggtggtgccggaagattacgcctggcagttgtacgtgtgcgacgagtcgggtatgcccgcgctgcgccgccgtttagaaagcatcgcaaaactgcctgttcccccggcgatccacgccatcgtcaccgtgggcgatgcggcgtaccaggactatctggcgcacctgagcgggttcaacatcacctgggttatcggccacaacgagcaggcggtagccgaccatcttgcagcgctggccgtgccggaagaggattactttatctggctgaccggagaggggaaggtggtgaaacgcctgagccgtcagtttgaaaccgacgcaattgacccacagctggtacgtgccagtgcgtactggcacgccaaataa

SEQ ID NO: 523323 - DNA, 495 bp, Stenotrophomonas maltophilia
atgcgacacgaacacgacggcggcggacgccggccacgattttttggccatggtgatttgcggctggtgatcctggatatcctgacccgcaacgcgagccatggttatgagctgattaaagagatcgagaacctgacgcagggacattacacgccaagccctggcgtgatctacccgacgctggattacttgcaggatcaggcgctgatcaccattaccgaagaagagaacggccgtaagcggattgcgattaacgccgccgggcagcaatggctggatgacaatcgggaacagctggagcagatccagacgcgtatcaaggcgcgctccgtcgggttccagctgcgcaaaaacccacagatgaagcgggcgctggataacttcaaagcggttctggatctgaaggttaatcagggagaactcagcgacgcgcagttaaaacagattatcggcgtgattgaccgcgcggcactggagatctcccagctggattaa

SEQ ID NO: 523324 - DNA, 1560 bp, Stenotrophomonas maltophilia
atgttcatacatgacgtaaagatcggcacgaaattatttctggcgtttggattatttattgtcctgatggtcgtcagcgcaagcttgtctctgatgagcctgaatcgggcaaacaatggaatgcaaaccattcttaccagcgactatccaactacggtaaaagcgaaccagttaatcgacaacttccaggaatttatcagcacgcagcagctcatgctgctggacgaacagggaatgtacacgacgcaatcagaacagcgtctgaaggcgataagcgagcgcatcaccgcaatcctgagcgagctggacaacgctctcaaggataaaaaatcccaacaggtgctggcggacatccacggcgtacgccagcaatatcttgactcgcgctaccgcattttgcaggccgtgcagaataacgaccgtgcaggcgcgataaacgagatgatgaccaacaccctggacctgcaacagtcttataaagcgaaagtgcaggcgctgattgcgatccaggatcatgaaatgcagagtgcgggcgagcaggtggaaggcgatttccgcactaatcgtctgctgctgatcctgattacgcttttcagcgtcgcggcagccagcctgactggctggttcattgtgcgatccattacccgcccgctgaacgacgcggtgaattttgcggaggccatcgccgatggcgatctcaccggcagcattacctcgcacggtaaagatgaaactggactgctcctcaccgcactgatggagatgaaaacgcgcctgctggagattgtgcagcaggtgcaaaccggatcggaaaacatctccagcgccgccgcgcagattgtcgcaggcaaccaggatctggctgcccgcactgaggagcaggccagttccgttgaacagacggccgcgtcgatggagcagattaccgccacggtgaagaacaccgcgtcccacaccggagaagcgacgaacctgtctgccgatgcggctgccgtggtcaaaaacaacggcgagatgatgaagcaggtcaccagcaaaatgcgcctgattaacgaaacatcgaacaggatgtccgacattatcgacctgatcgacgccattgccttccagaccaacattctggcgctgaacgcggcggtcgaagcggcgcgcgcaggtgagcatggtcgcggctttgcggtggtggcgggtgaggtacgccagctcgcgcagaaaagtgcaacatctgcgagtgagatccgccagctgattgaaagctccacaagccagacgcaggacggcatgaaccttgtggagaaagccagcgggcttatcaacggcatggtcggcaacgtggaagagatggacgacatcctgcgtgaaattcgccaggccagccatgaacagacggaaggtatctcgcagatcaacagcgcgattggcctgatagacgccaccacccagcagaactccgcgctggtggaggagtccgttgcggcggcggcatcccttaacgaacaggcgatgcacctcaaagagctggtccgcgtgttccgcgtgagcgacggcgtgctggcttaa

SEQ ID NO: 523325 - DNA, 1521 bp, Stenotrophomonas maltophilia
atgtcctctcctgactatgtcacccagaatgaatatccgctggacgatgacaccacgcttatgtcgaccaccgacctccacagctacatgacccacactaacgacacctttgtgcaagtgagtggctttacgcttcaggagttgctcgggcagccgcacaacattgtgcgccacccggatatgccgaaagcggcttttgccgacatgtggtacacgctgaaaaagggcgagccctggagcgggattgtcaaaaaccgacgtaaaaatggcgatcactattgggtacgcgccaatgcggtaccaatggtgcgtaacggtcagatgacgggctatatgtccattcgtacccgcgccaccgaggacgaggtcgccgcggtggagccgctttataaggcgctcaatgaaggacgtagcaaaaaacgcattcataaagggctggtggtgcgcaaaggctggctcggcaaattaccggcgatgccgctgcgctggcgcgtgcgtagcgtaatggcggtactttttgcggtgatggccgcaacgctggttgccagtgccgcaggctgggcttcgctggtggcggcagccgtggtgatgctgcttggcaccctggtgtttgagcaacagattgtccgcccggtggaaaacgtcgcacggcaggcgctcagggtcgctaccggcgagcgtaacagcgtgcagcatcttaaccgcagcgatgaactggggctgacgctgcgggccgtcggacaactggggctgatgtgccgctggcttatcaacgacgtctccagccaggtggtgagcgtgcgcgacggcagcgacaggctggcgcagggtaatgaagatctcaacgaccgcacgcgccagaccgtggctaacgtgcagcagaccgtggcaacaatgaaccagatggcggcgtcggtgcagagtaactctgagaccgcagccgaagtcgacaagctgtcgatggctgccagcagcgcggccacgcagggcggcaccgtgatgcagaccgtggtgaaaaccatggatgacattgccgacagtacccagcgcattggctctattacctcgcttatcaatgacatcgccttccagaccaatattctggcgctgaacgccgcggttgaggcggcacgcgcgggcgaacaggggaaaggctttgcggtggtggcgggcgaagtgcgtcatcttgccagccgcagcgcgaacgcggctaacgatattcgcaagctgatcgacgccagcgccagcaaagtgcagtcgggcgccgatcaggtccacgccgcgggacgtaccatggatgatattgtcgagcaggtgaaaaacgtcacgcagcttatcgcgcagatcagccactccacctccgagcaggcgacaggcctgacagagctgacccgtgccgtggcagaactggacagcattacgcagaaaaatgctgacctggtcgaagagagcgcgcagatttccgcgatggttaagcaccgggccggacgtcttgaagatgcggttaccgtgctgcattaa

SEQ ID NO: 523326 - DNA, 936 bp, Stenotrophomonas maltophilia
  misc_feature (871)..(880): n is a, c, g, or t
ttgaacaggttaccttccagcgcctcggctcttgcctgtaccgcgcacgcactgaatctcattgaaaagcgaacgcttgatcatgaggagatgaaacaacttaaccgtgaggtcattgattactttaaagagcatgtgaatcctggttttctggagtatcgcaaatctgttaccgccggcggggattacggagccgtagagtggcaagcggggagtctgaatacgcttgtcgacacccagggacaggagtttatcgattgcctgggtggttttggtattttcaacgtggggcaccgtaatccagttgtggtttccgccgtacagaatcaacttgcgaaacaacctctccatagccaggaactgctcgatccgcttcgcgccatgctcgcgaaaacgctggcagccttaacgcccggtaagctgaaatacagcttcttcagcaacagcggcaccgaatcggtcgaagcggcgattaaactcgccaaagcgtaccagtcgccgcgcgggaaattcacctttatcgccaccagcggcgcgttccacgggaaatccctgggcgcactgtctgctaccgccaaatccaccttccgcaaaccgtttatgccgctgctgccgggcttccgccacgtaccgttcggcgacatcaacgccatgcgcaccatgctgagtgaatgccgtaaaaccggcgacgacgtggcggcggtgatcctggagccgattcagggcgaaggaggcgtgatcctcccgccgcagggctatctgcccgccgtgcgtcagctgtgcgatgagtttggcgcgctgctgatcttcgacgaagtgcagaccgggatggggcgtaccggcaggatgttcgcctgcgagcatgagaacnnnnnnnnnntgagaacgttcagccagacattttatgcctggcgaaagcgctcggcggcggcgtga

SEQ ID NO: 523327 - DNA, 462 bp, Stenotrophomonas maltophilia
atgccgattggcgcaacggtcgccactgaggaggtcttctcggtgctattcgacaacccgttcttacataccaccacctttggcggtaacccgctggcctgtgcggcagcgctggccaccatcaacgtgctgctggagcaaaacctgcctgcgcaggcggagcagaaaggcgacatgctgctggacggcttccgtcagctgggccgggaatacccggatttggtacaggatgcacgcgggaaagggatgctgatggcgattgagttcgttgataacgaaaccggttatagcttcgcaagcgagatgttccgccagcgggtactggtggcgggaacgctcaacaactcgaaaaccatccgcattgagccaccgttgacgctcaccattgagcagtgtgagcaggtgctgaaggcggcgcgtaaggcgctggcggcgctgcgggtgagcgtggaagaggcgtaa

SEQ ID NO: 523328 - DNA, 294 bp, Stenotrophomonas maltophilia
atgaacgtgacgctggtggaaatcaacatcaaacccgagcgggtggatgagtttctggaggtatttcgcgccaaccacgagggggcgatccaggagccgggaaacctgcgctttgacgtcttgcaggacccgagggtgaaaacccggttctttatctatgaggcctataaagacgaagaggcagtgttggcgcataagcaaacgccacactatctggcgtgcgtggacaagcttgaagagttgatgtcagagccgcgcaaaaaacgctgctttgtggggttgttgccggagtag

SEQ ID NO: 523329 - DNA, 888 bp, Stenotrophomonas maltophilia
atggctgatttagacgacatcaaagacggcaaggattttggcatcggtacgccgcagcagaatgtgccgtacaccctgaagggctgcggttcgctcgactggggcatgcagtcccggctttcgcgcattttcaacccgcagagcaaccgcacggtgatgctggcctttgaccacggttactttcagggaccgaccaccggccttgagcgtatcgatctctccatcgcgccgctgtttggcgaaaccgacgtgctgatgtgtacccgcggcatcctcaggagccaggtacctgccgcgacgaacaaaccggtggtgctgcgcgcctccggcggtaacacgattctgggcgagctgtctaacgagtgcgtggcggttgcgatggaagacgcgctgcgcctgaacgtctgcgcggtggcggcgcaggtctatatcggaagcccgtttgaacatcagtcgatcaacaacatcatcaagctggtggatgcgggggcacgttacggcatgccgacgctggcggtgacgggcgtgggtaaagagatggcgcgcgacgcgcgctatttctcgctcgccagccgcatcgctgccgaaatgggggcccagttcgtcaaaacctactacgtggacgagggctttgaaaaagtgaccgccagctgtccggtgccgattgttatcgcgggcggcaaaaagctgccggagcatgaggcgcttgagatgtgctggcgggcgattgaccagggcgcgtccggcgtggatatggggcgcaacatcttccagtccagcgcgccgctcgccatgctgaaggcggtgaagaaagtggttcacgagaatatgagcgcccgtgaggcgttccagttctggcaggaagagaaacagggagaagcaaaatga

SEQ ID NO: 523330 - DNA, 1002 bp, Stenotrophomonas maltophilia
atgaaaacaaaactgctcgtcctggcaatggccctcagcttcgcttcggcgcaggcggcggaccgcattgcctttatcccgaaactggtgggtgtgggattcttcaccagcggcggcaacggcgcgaaagaggcggggaaagaacttggcgtggacgtgacttacgacggcccgaccgagccgagcgtctccggccaggtgcagttgatcaataacttcgtcaaccagggctataacgccatcatcgtctctgccgtgtcgccggacggtctctgcccggcgctgaagcgcgcgatgcagcgcggcgtgaaggtcctgacctgggattccgacaccaaaccggagtgccgcagcatttacatcaaccagggcacgccggaacagctgggcggcctgctggtggagatggcaggcaagcaggtcaccaaaccgaacgcgaaagtggcgttcttctactccagccccaccgtcaccgaccagaaccagtgggtgaaagaggcgaaggccaaaatcgagaaagaccatccccagtggcaggtcgtcaccacgcagtttggctataacgacgccaccaaatccctgcaaactgccgaggggatcttaaaagcctatccggatctggatgcgatcatcgccccggacgccaacgccctgccggcggcggcacaggcggcggaaaacctgaagcgggaaggggtggcgattgtcggcttcagcacgccaaacgtgatgcgtccgtacgttgagcgcggcacggtgaaagccttcggcctgtgggacgtggtgcagcagggcaaaattgcggtcaatgtcgccgatcgtttgctgaaaaagggcgatcttaaccctggcgacagcgtggaggtgaaagatatcgggacgctgaaggtcgagccgaacagcgtgcagggctaccagtatgaggcgaagggcaacggcatcgtgctgctgccggagcgggtggtgttcaccaaagagaacatcaacaaatacgatttctga

SEQ ID NO: 523331 - DNA, 978 bp, Stenotrophomonas maltophilia
atgaggcttaactgggaaagcgcgctgctgtttttactggtgctggagatcctgctcttcggcgccatcaacccgcgcatgctcgacatcaatatgctgctgttcagcaccagcgactttatctgcattggtatcgtggcgctaccgctcacgctggtgattatcagcggcgggatcgacatctccctcggctcaaccatcggcctgtgcgctatcgcgctgggggtgatgatgcaggcggggtggccgatggcggtcgccatcccgctgacgctgctgctcggcctgctgtgcggactgttgaatgcggcgctgatccactacaccggcatcagccctttagtgatcaccctcggcacgctttacctctacggcggcggggcgctgctgctctccggcatggcgggcgcgacgggctacgaggggatcggcggctttccggacagcttcacggcgttcgctaacctcacggtgttgggcctgccgatcccgctggtgctgttcgcggtgattaccgctttcttctggctgattacccatcgcgggcgctttggtcgacatctgtttttaattggccagaatccgcgcgcggcgcgctatgcggcgctgtcggtgaacggtatgccgtatgcgctgtacggcctggtgggcgtggcctcggcgattgccgcgctggtgatggtctcctatttcggctccgcgcgttcggatctggggcgcgatttactgatgcctgcgctcaccgccgccgtgctcggcggagcgaatatctacggcggctcaggttcggttgtcggtacggcgctggcggcgctgctggtggggtacctgcaacagggtttacagatggttggcatccccaaccaggtgtcgagcgcgctgtcaggggcgctgctggttgtggtggtgatggggcgttcgctgagtctgcaccgtgaatgggtgcgttctctcttcagaaaactatccggagcgtaa

SEQ ID NO: 523332 - DNA, 1032 bp, Stenotrophomonas maltophilia
atgaagatcttactgaaaaaccgcgagctgagcgcgtttctcgccattctggccctgttcgccgtgctggtggcgctgaacccgtcctaccttagtttacagaccctggggatgatcttcgccagttcgcagatcctgattttgctggccatcggcgcggcgctggtgatgctgacccgtaatatcgacgtctccgtcggctccaccgtcgggctgtccgccattgccgtcggcgtggcgctcaacagcggctacagtctgcccgtttccattctcttcgcgctgtcgattggcgcgctggcgggggcgttcaacggttttctggtggtggggctgcgcattccagcgattgtcgccaccctcggcacgctggggctgtatcgcggagcgatgctgctctggaccggcgggaagtggattgaagggctgccgccggggctgaaatccctctctgagcctgccgccgtcggcatttcgccgctcggcattgtggtgttgataatcgtggtcacaggcgcgtggatactgtcgcgcaccgcctttggccgtgatttctacgccgtgggggataacctcgccgccgcgcgtcagctgggcgtggcggtgaaccgtacccgcatgatcgcctttaccctcaacggcatactcgcggcctgcgccgggatcgtctttgccgcgcagattggctttgtgcccaaccagaccggcagcgggctggagatgaaggccatcgccgcctgcgtgctcggcggcatctcgctgctgggcggcaccggcacgctgataggcgccttcctcggcgcgttcttcctcacccaaatcgacaccgtgctggtgctgttcaggctgccggcctggtggaatgactttatcgccgggctggtgctgctgggcgtgctggtgctcgacgggcggctgcgtcaggcgctctcacggcatcagcgggcgctgaaatacagccgtttccagccgggtaacagagggggaaagcacgtcaccccgtttcccaaacgcaacaaagaggtggcgtaa

SEQ ID NO: 523333 - DNA, 1488 bp, Stenotrophomonas maltophilia
atgacaccacttctcgaggcacgtgacatctgcaaacagttctctggcgtgcctgtgttaaaaggcattgatttcacgctgcttgctgggcaggtgcatgcgctgatgggcggtaacggcgcgggaaaatcgacgttgatgaaaatcatcgccggggttgaaacgccggatcgcggtgagctttcggttgcgggcgagtcttttgcacggcttaccccgtcgcaggcgcaccggttaggcatttatctggtgccacaggagccgctgcttttccccaacctgacggtgcgggaaaacatcctgtttcgtctgccgcgcgaacgagatcgggaaaagcggctggcggagaaactccagcagctgcaatgtcagcttaatctcgatgccgctgccagcactctggaagtcgcggatcagcagatggtggagatcctgcgcgggctgatgcgcaacgccagaattctgatcctcgacgaacccacggcatcgctcacgccgggcgaaaccgaacgcctgtttcgccagatccgcgcgctgcaggatctcggcgttggcattgtttttatctcgcacaagctgccggaaattcgcatgctttcgagccacgtctcggtgatgcgcgacggcgcggtggtgctgagcggcgaaaccgcgcactttgacgataacgccctgatcgccgcgatgacgccggtcagccgggaaaagtcgctaagcgatacgcaaaagctgtggctggcgctgccgggcaaccgccgaacccaggcgcaggatttcccggtgctgcgggtggaggatctcaccggggaagggtttatcgatctcagccttgagatttacgccggggagatcgtcggtctggccgggctggtggggtccgggcgtaccgagtttgccgaaacgctttacggcctgcgtccggtacgcggcgggcgagtgtggctggagaaccaggagatcaccgccgatccggtcagttcccgtctggaaaaagggctggtttatctgccggaagacaggcaggtgtccggcctgtttctcgacgcgcctgtccgctggaacaccgtgacgctgaacgagccgtcgctctggcagcagcgaaagcgggagtctgcggtagtggagcgttaccaccgggcgctggggatcaagctcaaccatgcggatcaaaccgtgcgcacgctctccggtggtaatcagcagaaggtgctgctggcgcgctgcctggaggctaatcctttattgctgatcgtcgatgaaccgacgcgcggcgtggacgtatcggcgcgcgccgatatctaccagctgctgaaaagcgtggcggcgcagaacgtggcagtgctgatgatctcaagcgatctcgatgaatttcccggcctcgcggatcgggtgctggtaatgcatcagggcgtgctcagcggcgaactgccgcgccaggccgtcagcctcgatcggatgatgacgctggcgtttggagggcaatcatga

SEQ ID NO: 523334 - DNA, 972 bp, Stenotrophomonas maltophilia
atgagcgataaacgcactgcggaagaaggacggtttgccgggctggcactggcggaagaggagctggtggcgcgcgtggcctggtgctactaccacgacgggctgacccagaacgacatcggcgagcggctcgggctgccgcgcctgaagatctcccgcctgctggagaaaggccgtcagtccggggtgatccgcgtgcagataaactcccgctacgagggctgcctggcgctggaaaccgagttgcaacaacgatttggcctgaagctggtgcgcgtgatgcccgccctgaatacgccgccgatgaacgtgcggttaggcattggcgcggcccagtcgctgatgggcgtgctggagcccggccagctgttagcggtgggcttcggtgaaaccaccatgagcagcctgcaacacctgagcggctttattagctcacagcagatccgcctggtgacgctctccggcggcgtggggccgtatatgaccggtatcggccagctggatgcggcctgtagcgtcagcatgatccctgccccgcttcgcgtgtcatccgctgaagtcgccgggatcttaaagcgcgaaaccagcgtgcgggacgtgatcctcgccgccaccgccgctgacgtggcggtggtcggcattggctcggtgaaccagcgccgtgacgcgacgatactgcgctccggctatatcagcgaaggtgaacagttgatgtacgcccgcaagggcgcggtcggcgatatccttggctatttcctcaatgccgaaggggaatgcgtcgaggagctggagatccacaaagaactactgggcgtcacgctcgatgaactggcacagctgcccaccatcgtaggcgtggccgggggtgaagagaaagccgatgcgatttatgccgcactgaagggccgccgtattaatggcctggtgacggaagagacgacagcccgcgcggtgctggctctggccatttaa

SEQ ID NO: 523335 - DNA, 1587 bp, Stenotrophomonas maltophilia
atgagttaccttttagcgttagatgcagggacaggcagcgttcgcgccgttattttcgatttgcagggcaaccagattgccgttggccaggccgagtggaaacacctgagcgtcgagaacgtgccgggctcgatggagttcgacctcgacaccaactggcagctggcctgccggtgtattcatcaggcgctggagcgcgcgcgcctgagcgcggcggatattcagtccgtcgcctgctgttcgatgcgcgaagggattgtgctgtacgaccgcaacggcgaggctatctgggcctgcgccaacgtcgacgcccgcgccagccgcgaggtagctgaactcaaagagatccacgactaccggtttgaatccgaagtgtatgacgtttccggccagacgcttgccctcagcgccatgccgcgcctgctgtggctggcgcaccatcgtccggatatttatcgtaaagccgccaccattactatgatcagcgactggctggcggcgaagctctccggcgagctggcggtggacccgtccaatgcgggcacgacgggcatgctggatctcttctcccgcgactggcgtccggcgctgctcgacatggccgggctgcgcgccgatatcctctccccggtaaaagagaccggcaccgtgctgggggccatcaccaaagcagccgcacaacagagcggcctgcgcgagggcaccccggtggtgatgggcggcggcgacgtgcagctgggctgtctggggctgggcgtggtgcgcgccggacaaacggcggtgctgggcggcaccttctggcaacaggtggtgaacctgccgcaggtgcgcaccgaccctgagattaacatccgcgtaaacccgcacgttatccccggcatggcgcaggcagagtcgatcagcttctttaccgggctgaccatgcgctggttccgcgacgccttctgcgccgaagagaagctgattgccgaacgcatgggaatggacccctactccctgctcgaagagatggcgagccgcgtcccgccgggctcccacggggtgatgccgatcttctccgacgcgatgcattttaagcagtggtaccacgcggcaccgtcgtttattaacctctccattgacccggaaaagtgcaacaaagcgacgctgttccgcgcgctggaggagaacgcggcgatcgtctcggcctgcaacctggcgcagatttcgcgcttctccggcgtgacgtttgagagcctggtgtttgcgggcggcggcgcaaagggcgccctgtggagccagattttaagcgacgtcaccggcctgccggtgcgcgtgccagaagtcaaagaggcaacggcgctcggctgcgccattgccgcaggagctggcgcggggctgttcgcggatatggcttcgacgggcgagcggctggtgaagtggagccgcgagttcacgccaaacccgcagcaccgcgagctgtacgacggcatgatgcagaaatggcaggcggtatacgcggaccagctcgggctggtggacagcgggctgaccacgtcgatgtggcaggcgccgggcctgatgcgcgacacacgcccctcaccctaa

SEQ ID NO: 523336 - DNA, 2022 bp, Stenotrophomonas maltophilia
atgagccgctacccgtcgttattcgcccctctcgatctggggttcactaccctcaaaaaccgcgtgttaatgggctcaatgcacaccgggctggaggagcgtccggacggggctgaacgtctggcagccttctatgccgagcgcgcgcgccacggggtggcgctgattgtcactggcggcgtagcccctgccccttccggggtgacgatggagggcggcgcggtgttgaacgatgcgacacagctgccgcaccaccgcatggtgaccgacgcggttcacaacgagggcggcaaaatcgccctgcaaattctgcataccgggcgctacagctatcagccgaacctggttgccccctcggctattcaggcgccgattaaccgctttactccccatgccctcagccatgacgagatcctggcgctgatagatgactttgctcgctgcgccgcgctcgcgcgagaagcgggttacgacggcgtggaggtgatgggctccgagggctatctgatcaacgaatttctcgccgcgcgcaccaaccagcgcgacgacgaatggggtggtgactatgcccgccgcatgcgttttgccgtggaggtggtgcgtgcggtgcgtgaacgtgcgggtgcggattttattatcatcttccgcctgtcgatgctcgacctggtggaaggcggcggcaccttcgacgaaaccgtgcagctggcgcaggcgattgaagccgccggtgccaccattatcaacaccgggattggctggcacgaagcgcgcatccccaccatcgccacgccggtgccgcgtgcggcgttcagctgggtaacgcgcaagctgaaaggcaaagtctccgttccgctggtgaccactaaccgcattaacgatccgcaggtggcggacgatgtgatctcccgcggcgacgccgatatggtgtcgatggcgcgtccgttcctcgcggatgccgaactgctctccaaagcgcaaagcggccgtgcggatgagatcaacacctgtatcggctgtaaccaggcgtgtctggatcagatcttcgtcggcaaggtcacctcctgcctggtgaatccccgcgcctgccatgaaaccaaaatgccgatcgttcctgcgaccaacaagaagcgtctggccgtggtgggcgcaggacccgctggcctggcgtttgcggtcaatgccgcctcgcgtgggcacagcgtgacgctgtttgatgcgctggcggaaatcggcgggcagtttactatcgccagacagatccccggcaaagaggagttctatgaaacgctgcgctattaccgccggatgatcgaggtgacgggcgtcgatctgcggctcaatcaggttgtcagcgcggcggatctgatcggtttcgacgaggtgatcctcgcgagtgggatcgccccgcgcacccctgcgatcgaaggcatcgatcatccgaaggtattgagctatctggacgtgctgcgcgacaaagcgccggttggcgagaaggtggcgatcatcggctgcggcgggatcggttttgataccgcgatgtatttaagccagccgggcgaagccaccagccagaacatcgctgagttctgcgtggaatggggcattgataccagtctcagtcagtccggtggtttacgcccggaaggtccgcaactgccgaaaagcccgcgtcagatcgtgatgctccagcgtaaagccagcaagccgggtgaagggctggggaaaaccacaggctggatccaccgcgccaccctgctctcgcgcggggtaaagatgatcccgggggtgagctaccagaagatcgacgacgacgggctgcatgtgctgatcggtggtgaaccgcagctgctgcgcgtggatcatgtgattttgtgcgccgggcaggagccaaagcgcgatctggccgatccgctgcgcgaagcgggtaaaacggtgcatttgatcggcgggtgcgacgtggcgatggaactggatgcgcggcgggcgattgcgcaggggacaaaactggcgctgagtatttaa

SEQ ID NO: 523337 - DNA, 1137 bp, Stenotrophomonas maltophilia
atgagccacttagacaacggtttccgttcactcaaccttaaacgtttcccggaaacggacgacgtgaacccgcttcaggcgtgggaagcggcggatgaatatctgctgcagcagttggatgagactgaaatccgcggcccggttctgatcctgaatgacgcgtttggcgcgctgggctgtgcgctggcggaacatgcgccttacagtatcggcgattcttacttaagcgagctggcgacgcgtgaaaacctgcgtcacaacgatatcgacgaatccagcgtgaagttcctcgacagcaccgcggactacccgcaggcgccaggggtggtgctgattaaagtgcccaaaaccatggcgctgctggagcagcaactgcgcgcgctgcgtaaagtcgtgacgccagaaacgcgcatcatcgcgggcgccaaggcgcgtgatattcacacctcgacgctggaactgttcgagaaagtgctcggcccgaccactacgacgctggcctggaaaaaagcgcgcctgatcaactgtaccttcagcgcgccggaactggccgacgcgccagagaccctgagctggaagctggaagggaccgactggaccatccacaaccacgcgaacgtcttctcccgtaccggtctggatatcggcgcacgcttctttatggaacatctgccggaaaacctggaaggggagattgtcgatctcggctgcggtaacggcgtgattggcctgacgctgctggcgaagaacccggaggccagcgtggtgttcagcgacgaatcgccaatggcggtggcttcaagccgtctgaacgtggaaaccaatctgccggaggcgctggatcgctgcgagtttatgatcaataacgcgctgtccggcgtagagcctttccgcttcaacgcggtgttttgcaatcctccgttccaccagaagcacgccctgacggataacgtcgcgtgggagatgttccaccacgcgcgccgctgcctgaaaatcaacggcgaactgtacatcgtggcgaaccgccatctggactacttccacaagctgaagaagattttcggtaactgcgtcaccattgccaccaataacaaattcgtggtgctgaaatcggtgaagctggggcgtcgtcggtaa

SEQ ID NO: 523338 - DNA, 504 bp, Stenotrophomonas maltophilia
atgaaccagctgacttatctccagggctacccggagcaattactatcccaggttcgcgacctgatcgccgcgggaaagctcggcgcggtgctggaaaaacgctacccgggcacgcatgatttcgcgactgacaaagccctctggcagtatacgcaggatctgaaaagccagtatctgaagagcgccccgccgatcaacaaggtgatgtacgacaacaagatccacgtgctgaaaaacgcgctcggcctgcataccgccatctcccgcgtgcagggcggcaagctgaaggctaaggcggagatccgcgtcgcgaccgtctttcgcaatgcgccggaagcctttctgcggatgatcgtggtgcacgagctggcgcacctgaaagagaaagatcacgacaaagcgttctattccctgtgctgccatatggagccgcagtaccaccagctggagtttgatacccgtttgtggctgacgcatttatcgttaaagagtaatgcgcagtag

SEQ ID NO: 523339 - DNA, 999 bp, Stenotrophomonas maltophilia
atgatacgtttcgcagtcatcggtacgaactggatcacgcgccagttcgtcgacgccgcccacgaaaccggcaaatataagctcaccgcagtctattcccgcagccttgagcaggcgcaaagttttgcaaatgactacctggttgaacatctgttcacctcactcgatgagatggcgcaaagcgacgccattgacgcggtctatatcgccagcccgaatgctctgcacttcccgcaaacgaagctgttcctcagccataaaaagcatgtgatctgcgagaagccgctggcgtcgaatatccacgaagtggaagccgccattgcgcttgcccgcgaaaaccaggtggtgctgtttgaagcgttcaaaaccgccagcctgcccaacttcctgctgttgcagcagtccctgccgaaaattggcaaagtgcgtaaagcctttatcaactactgccagtattcctcgcgctaccagcgctatctggacggcgaaaacccgaacacctttaacccggccttctcgaatggctcgattatggatatcggtttttactgcctggcctctgcggttgcgctgtggggggaaccacacggcgtgacagccaccgccagcctgctggagagcggcgtggatgcacacggcgttgtggtgctggactacggtgatttcagcgtgacgttgcagcactcgaaggtcagcgactccgtgctgccaagcgaaattcagggcgaagacggctcgctggtgatcgaaaaaatctccgaatgccagaagctcagcatcgtcccgcgcggcggaaaagcgcaggagctgacacagcctcagcatattaacactatgctttatgaggcagaggtcttcgcccgtctggtagaagacaacgaagtgaaccacccgggactggcgatcagccgcaccacggcgaagctgcaaacggagatccgccgacagaccggcgtaatcttccccgcagacggcgtgaatgtggaagccgtcgcgtaa

SEQ ID NO: 523340 - DNA, 966 bp, Stenotrophomonas maltophilia
atgcattctgtcggcactccaatgctgtggggcggattcgcggttgtcgtgctcatcatgctggcgatcgacctctttttgcagggtcgtcgcggcgaacacggcatgagcgttaagcaagccgccgtctggtcgctggtatgggttaccctctcacttcttttctgcgccgccttctggtggtatctggcctcaaccgaaggtcgcgcggtggccgatcctcaggcactcgccttcctcaccggctatctgattgaaaaagcgctggcggttgataacgtcttcgtctggctgatgctgttcagttacttcgccgtgcctgcggccctgcaacgccgcgtgctggtatacggcgtgctaggcgccatcatcctgcgtaccatcatgatcttcgccggtagctggctgattacccagttcgaatggctgctgtacgtgtttggtgcgttcctgctgttcaccggggtcaaaatggcgctggcgaaagaagacgataccggtatcggtgataagccgctggtgaagtggatccggggtcatctgcgcatgacggacaagatcgagagcgagcatttcttcgtgcgtaagaacggcctgctgttcgccaccccgctgctgctggtgctgattctggtcgagctgagcgacgtgattttcgcggtggacagtatcccggctatcttcgcggttaccaccgacccgttcatcgtcctgacctcgaacctgttcgcgatcctcggcctgcgtgcgatgtacttcctgctggcgggcgcggcagagcgcttctcaatgctgaagtacggtctgtcggtgattctggtctttatcggtatcaagatgctgattgttgatttctaccatatcccgatcgccatttcgctcggcgtggtgtttggcattctgctggtgacgctgattatcaatacctgggttaaccgccagcacgataagaagcagcaggcttag

SEQ ID NO: 523341 - DNA, 1242 bp, Stenotrophomonas maltophilia
atgagcacacaatctaagggcctgcttgcgcgcctggcgcagggcagtcttgtaaaacaaattctggtcgggttggtactgggtattctgctggcgatggtgtcaaaacctgcggcggaagcgacgggactgctcggcacccttttcgttggcgcactgaaggccgtcgccccggtactggtgctgatgctggtgatggcgtcgattgccaaccatcagcacggacaaaaaaccaacattcgccctattctgttcctgtatctgctgggaaccttctctgctgccttaacggccgttgtgtttagcttcctgttcccgtccacgctgcacctgaccagcgcggccggtgatatcaccccgccgtccgggattgtggaagtccttcgcggcctgctgatgagcatggtctctaaccccatcaccgcactgatgaacggaaactacattggcatcctggtctgggcgattggtctgggcttcgcgctgcgtcatggcaacgagaccacgaaaaacctggttaacgatttgtccaatgcagtgaccttcatggtgaagctggtgattcgctttgcaccagtcggtatctttggtctggtttcttcgacgctggccaccaccggtttcgacgcactgtggggctacgcgcagctgctggtcgtcctggtcggctgtatgctgctggtggcgctggtgatcaacccgctgctggtgttctggcagatccgccgcaacccgtatccgctggtgctgacctgcctgcgcgagagcggcgtgtatgccttcttcacccgcagctcagcggcgaacataccggtgaacatggcgctggcggagaagctgaacctggaccgcgatacctattcggtgtcgattcccttgggtgcaaccgtgaacatggccggtgcggcgattaccatcaccgtgctgacgctggcggcggtgcatacgctgggtattccggtagatctgccaaccgcgctgctgctgagcgtcgttgcatcactgtgtgcctgtggcgcatccggcgtggcgggcggctctctgctgctgatcccgctggcctgtaacatgttcggtattccgaacgagattgccatgcaggttgtcgcggtcggtttcattatcggcgtattgcaggattcctgcgaaaccgcgctgaactcctctaccgacgtgctgtttaccgccgcagcctgtcaggcggaagatgcgcgtttagcgaagaacgccctgcgcagttaa

SEQ ID NO: 523342 - DNA, 1488 bp, Stenotrophomonas maltophilia
atgcaatacatcaaaatccattcgctggataacgttgccgtcgcgctggcagatttagccgaagggatggaagtgaccttcgacaaccagtcggtgacgttacgccaggccattggacgtggacataagtttgccctgatccccatcgcgaaaggggagaacgtggtgaagtacggtttgcccatcggtcatgcgctggcggatattgcgccgggtgaattcattcattcccacaatacccgcaccaatctcagcgatctggacgagtacagctatcaacctgacttccagccagaagaaggacaggcggccgatcgtgaggtacagatttaccgccgcgccagcggcgaggtggggatccgcaatgagctgtggatcctcccgactgtcggctgcgtgaacgggatcgcgcgtcaaattcagacgcgtttcctgaaagagactaatgatgctgaaggcaccgacggtgtgcatctgttcagtcacacctatggatgctcccagctgggtgacgaccacatcaatactcgtaccatgctgcaaaacatggtgcgccacccgaacgcgggcgcggtgctggtgatcggcctcggctgcgagaacaatcaggtcgacgccttccgcgacacgctgggcgaatttgaccctgagcgcgtgcactttatggtgtgtcagcaccaggacgacgaagtggaagcgggcgttgaacagctgcaccagctgtacgaggtgatgcgtcacgacaagcgcgagccgggcaagctgagcgaactgaagtttggcctggagtgcggcggatctgatggcctttccggcattaccgctaacccaatgctcggtcgcttctcggattacgtgattgctaacggcggcactacggtgctgaccgaagtgccggagatgttcggcgcagagcgcattctgatgagccactgccgcgacgaagagacctttgagaagaccgtcaccatggtgaacgacttcaaacagtacttcatcgcccataaccagccgatatacgagaacccctcgccggggaacaaagcgggcgggatcaccacgcttgaagagaaatccctgggctgcacccaaaaagcgggcgccagtcaggtggtagacgtgctgcgctatggtgaacggctgaaaacgcacggcctgaacctgctcagcgcaccgggcaacgatgcggtcgccaccagcgcgctagcgggagcgggctgtcatatggtgctgttcagtaccgggcgcggtacgccgtacggcgggtttgtgccgacggtgaaaatcgccactaacagcgaactggcggcgaagaaaaagcactggatcgactttgacgcgggccagctgatccacggcaaagcgatgccgcagctgttgagcgaattcgtggacacgattgtggaatttgccagcggcaggcagacctgcaacgagaagaacgacttccgcgagctggcgatctttaagagtggtgtaacgctataa

SEQ ID NO: 523343 - DNA, 1413 bp, Stenotrophomonas maltophilia
atgacaccgtttatgaccgaagatttcctgttagataccgaatttgctcgccgcctgtaccacgactacgcaaaagatcagccgattttcgactaccactgccatttaccgccgcaacaggttgccgaaaattaccgtttcaaaaacctgtatgatatctggctgaagggtgaccattataaatggcgcgcgatgcgcaccaacggcgtggccgagcgcctgtgtaccggcgacgcgaccgatcgcgagaagtttgacgcctgggccgctaccgttccccacaccatcggtaacccgttataccactggacgcacctcgaactgcgtcgtccgtttggcatcaccggcaagctgctctctcccgccacggcggatgaaatctgggatcagtgcaacgaactgctggcgcaggatagcttctcggcgcgcggcatcatgcagcagatgaacgtgaagatggtgggcacaaccgacgatccgatcgactccctggagcaccacgcggttgtcgcgaaggacagcacctttgacatcaaagtgctgccaagctggcgtccggataaagccttcaacattgagctgccgacctttaatgactacatgacgaagctggcggaagtatcggataccgatatccgtcgtttcgccgatctgcaatccgcgctgaccaaacgtctggatcactttgccgcacacggctgtaaagtgtctgaccacgcgctggacgtggtgctgttcgcggattccagcgaagccgagctggacagcatcctggcgcgtcgtctctcaggcgaagccctgagcgagcatgaagtcgcccagttcaaaaccgcggtgctggtgttcctcggtgcggaatatgcccgtcgcggctgggttcagcagtaccatatcggcgcgctgcgtaataacaaccagcgtcagttcaaactgctgggcgcggacgtaggctttgactccatcaacgaccgccctctggcggaagagctgtcaaaactgctgagcaaacagaacgagcaaaacctgctgccgaaaaccattctctactgcctgaatccgcgcgataacgaagtactgggcaccatgatcggcaacttccagggcgaagggatgccgggcaagatgcagttcggttccggctggtggtttaacgatcaaaaagacggcatggagcgtcagatgacgcagctggcgcagctcggcctgttgagccgcttcgttggcatgctgactgacagccgcagtttcctctcctatacccgccatgaatatttccgccgcattctgtgccagatgattggccgctgggtgcacgcgggtgaagcgccagcggatatccagctgctgggcgaaatggtgagaaacatctgctttaacaatgcgcgtgactacttcgccattgaactgaactaa

SEQ ID NO: 523344 - DNA, 1299 bp, Stenotrophomonas maltophilia
atgcgtaaaattaaagggttacgttggtacatgatcgcactggtgacgctcggcaccgtgctgggctacctgacacgtaacaccgtggcagcagcggcgccaacgttgatggaagagttacatatctccacgcagcaatactcttacatcattgcggcttactctgccgcttacaccgtaatgcagcctgttgcaggttatgttcttgatattctgggtacaaaaattggttatgccttcttcgctgtagcctgggccgtcttctgtggggcgaccgcgctggccggcagctggggcggactggcgctggcgcgtggtgcggtaggtgctgccgaagcggcgatgatccccgcgggtctgaaagccagctctgaatggttcccggcaaaagagcgttcaatcgctgtcggttacttcaacgtgggctcctccatcggggcgatgattgctccgccactggtggtgtgggcgattgtgatgcacagctggcagatggcgttcatcatctccggtgtgctgagctttgcctgggccatggcgtggctgatcttctataaacacccgtgcgaccagaaaaagctgtctaccgaagaacgtgactacattatcaatggtcaggaatctcatcatcagaccgacaacggcaagaaaatgtccgtctggcagatcctgggtacccgtcagttctggggtatcgccctgccacgcttcctggcggaaccggcctggggtacgttcaacgcctggatcccgctgttcatgttcaaagtctacggctttaacctgaaagagatcgcgatgttcgcctggatgccaatgctgtttgcagacctgggctgtatcgtcggcggctacctgccaccgctgttccagcgctggtttggcgtgaacctgattgtgtcccgtaagatggtggtcaccatgggcgccctgctgatgattggccctggcatgattggcctgttcaccagtccttacgtggctatcgccctgctgtgtatcgggggctttgctcaccagtctctgtctggcgcgctgattacgctctcgtccgacgtgtttggtcgtaacgaagttgccaccgccaacggtctgaccgggatggccgcctggaccgcaagtaccctgttcgccctcgtggtcggcgcgctggcagacaccatcggcttcagcccgctgttcgcggtactggccatcttcgacctgctgggtgcagtggttatctggacggtgctgaagagtaaatccgccgaggaactggcgaaagagtcccttgggggaccggcgacgcagagttag

SEQ ID NO: 523345 - DNA, 777 bp, Stenotrophomonas maltophilia
atggaaatcaccgaatcacgtcgtttatatcaacaacttgccgccgagctgaaagatcgcatcgagcaaggggtctatcttgtcggtgataaacttcccgctgagcgttttattgcggatgaaaaaagcgtcagccgcacggtggtccgcgaagccatcatcatgctggaagttgaagggtatgttgaggtacgcaaaggttccggtattcacgtgatttccagccaggcgaaacactcccccacgccggacgaaagtctggaatttgccagctacggtccgtttgagcttctccaggctcgccagctgattgaaagcaatatcgcagaattcgcagcgacgcaggtcaccaagcaggacatcatgaagctgatggaaatccaggatcatgcgcgtaaagaaaaatgtttccgcgattccgaatgggacctgcaattccacgttcaggtcgcccttgcgactcagaacacagcgctggcggcaatcgttgaaaaaatgtggactcagcgcgttcacaacccgtactggaagaaactgcatgatcacattgattcccgcacggtagataactggtgtgacgaccacgaccagattcttaaggccctgattcgtaaagatccgcatgcggcgaaactggcaatgtggcagcatctggagaacaccaagcagatgctttttaatgaaacgagtgatgactttgaatttaacgctgaccgctatctttttgctgataatccggtggttcacctcgataccgcgaccaatgtcgcaaaataa

SEQ ID NO: 523346 - DNA, 663 bp, Stenotrophomonas maltophilia
atggaacttttgacccaactactgaacgccctctgggctcaggatttcgaaacgctggccaacccgtccatgattggcatgctctactttgtgttatttatgatcctgttccttgagaacggtctgctgcctgctgcctttttaccgggcgacagcctgctggtgctggttggggtgctctgtgcaaaaggggcgatggctttcccacaaacggttctgctgttgaccattgccgccagcctgggttgctgggtgagttatattcaggggcgatggctgggcaacacgcgaatcgttcagaactggctttcgcatcttccggcacattatcaccagcgagcgcaccaccttttccataagcacgggctctccgccttgctgattggccgctttatcgcattcgtacgcaccctgctgccgaccattgcgggcttgtccggcctgagcagcgcgcgcttccagttctttaactggatgagcggcctgctatgggttctgatcctgaccacgctcggctacgcgctcggtaaaacgccggtctttatgaaatatgaagaccagctgatgtcttgcctgatgctgctgcccgtcgtcctgctggtgtttggcctggtcggttcactggtcgtactgtggaaaaagaaatacggagccaggggttaa

SEQ ID NO: 523347 - DNA, 384 bp, Stenotrophomonas maltophilia
atggttatctccccgctcgcgctgcgccgcttctcttacgccatcgtcgcgctaatgatgttcagcgctctcatcctgctatggtctgccctacagcaccaggagtcgacgctgactatccgtcctgtgagtcaaggaaccagcgtgccggatggtttttccatctggcatcatctggacgctaacgggatccgctttaagagcatcacgccgcaagacgatgtgctgctgataaaatttgactccagtgcgcaaagcgccgcggcgaaagcggtgctggaccgcacgttgccgcagggttacatcatcgcgcaacaggatgatgacagccacgtagcctcctggatgtcacggttacgcgacacgtcgcatcgatttggctaa

SEQ ID NO: 523348 - DNA, 369 bp, Stenotrophomonas maltophilia
atgaaataccgcatcaccctggctctggcccttttttctttaagcacagcttccttcgctatgtctctttgtcaggagaaagaacaggatattcaacgcgaaatcagttatgccgaaaagcataacaatcagcaccggatcgacggactgaaaaaagcgctgagcgaagtgaaagacaattgtacggacagcaagctgcgtgccgatcatcaggaaaaaatcgctgaacagaaggacgagatagccgagcgccgtcaagacctgcaagaagcgaaagagaaaggtgatgcggaaaaaattgccaagcgcgagaggaagttgcaagaggcgcaggacgaactgaaagcgctggaagctcgcgattattga

SEQ ID NO: 523349 - DNA, 306 bp, Stenotrophomonas maltophilia
atgtcaaaagatacaacttcagaacatctgcgcgctgagctgaaatccctggcggacaccctggaagaggtgctgaactcttctgccgataaatcgaaagaagaagtcagcaaactgcgcagcaaagcggagcaggcactgaaagagagccgttaccgtctgggtgaaaccggtgatgcactggcgaaacagacccgcgaagcggctgcgcgcgcagacgaatatgtacgtgacaatccatggacaggcgttggtattggtgccgcagtgggtgtggtgctgggtgtcctgctgacgcgtcgttga

SEQ ID NO: 523350 - DNA, 399 bp, Stenotrophomonas maltophilia
atggaagatccacgtcacgcacaagggcctgctaaaaacgtcctcggcatcggccagcgtattcttacgacgctggtcgggattgccgaaacgcgcgtccggcttgcggtagtggaactggaagaggagaaagccaatctcttccagatgctgctcatgcttgggcttacgatgctctttgccgcgtttggtctgatgagcctgatggtgttaatcatctgggctatcgatccacagtatcgactgaacgcgatgattgcgactaccgtggttctgctggtggcggcgctgataggcggtatctggaccctgcataaagcgcgcacgtcgaccttcctgcgccatactcgccaggagctggccaacgaccgcgccctgctggaggatgataagtcgtga

SEQ ID NO: 523351 - DNA, 297 bp, Stenotrophomonas maltophilia
gtgagcgacaaagccgaacgtcaaaagcggaaagcgtatctgctgagccagatccagcagcagcggctggacctgtccgccagccgtcgcgactggctggagctgacccagcgttacgatcgcggctggaatactcttctgagcctgcgttcgtgggctctggtgggtagcagcgtgatggcgatctggacgattcgtcatccaaacatgctgattcgctgggcacgccgtggctttggtgtctggagcgcatggcgtctggtgaaagcaacgattcgtcagcagcagctgcgctag

SEQ ID NO: 523352 - DNA, 393 bp, Stenotrophomonas maltophilia
atgaaaaaattagaagatgttggtgtattggtagcgcgtattctgatgcctgtgctgttcatcaccgcaggctggggcaaaattaccggctatgcgggcactcagcagtatatggaagcgatgggcgtaccgggtttcctgctgccactgaccatcctgcttgagttcggcggcggcctggcagtgctgttcggtttcctgacccgcaccacggcgctgttcaccgcaggctttaccctgctgaccgcgttcatcttccacagcaactttgcggaaggcgtgaactccctgatgttcatgaaaaacctgaccatcgcgggtggcttcctgctgctggctatcacgggtccgggcgcctacagcatcgaccgtcttctgaataagaagtggtaa

SEQ ID NO: 523353 - DNA, 987 bp, Stenotrophomonas maltophilia
atgggacaactcgtagacggcgtctggcaggatgtctggtatgacaccaaatccaccggtggacgctttaagcgctctgtttcggccttccgtaactggctgaccgccgacggcgcacccggcccgagtggcgaagggggctttgcggcggagaaagatcgttatcatctgtatgtttctctcgcctgtccgtgggcgcaccgcacgctgattgtgcgcaaacttaaaggtctcgaatcgctaattccggtttcggtggtcaacccgctgatgctggaaaacggctggacgttcgacagtgacttcccggccgcgacgggtgatgagctttatcatcacgatttcctgtatcagctctatctgcgcgccgatccgcactacaccggacgcgtaacggtgcctgtgctgtgggacaagaaaaaccagacgatcgtcagcaatgaatccgctgaaatcattcgcatgttcaataccgcgtttgatgcgcacggcgcccgcgccggggattactatccggttgagctgcgcgagaaaattgacgagctgaacggctggatctacgacaacgtcaacaacggcgtctataaagccggttttgccaccagtcaggaagcgtacgacgaagcggtcggcaacgtgtttggatccctggaacgtctggagcagatcctcggccagcatcgttatttagcgggcgatcgcctcaccgaagcagacatccgcctgtggacgacgctgatccgcttcgatccggtgtatgtcacccacttcaagtgcgacaagcatcgcatcagcgattatctgaacctgcacggtttcctgcgcgacatctatcagatgccgggtattgcggagacggtcaattttgaccatattcgcacccattatttccgcagtcataagaccatcaacccaacgggcattatctccattggtccgtggcaggatctggatgaaccacacgggcgcgacgtgcgtttcggataa

SEQ ID NO: 523354 - DNA, 366 bp, Stenotrophomonas maltophilia
atggactggtatttaaaagtactgcgcaactacgttggatttggtggccgtgcccgccgtaaagagtactggatgttcgttctggtgaacttcgtcctgattatggtgctgggtattgtggacaaaatcctcggctgggaacgcgaggggggcgaaggcattctcaccaccatttatggtgtgttggttctgctgccttcatgggccgtactgtttcgtcgtcttcacgacaccgatcgttcggcgtggtggctgctgttgctgttgatcccgcttgtcggctggattgtgattttgattttcaactgtcagagcggaacgccgggagaaaaccgctttggtccggatccgaagatctgcgcataa

SEQ ID NO: 523355 - DNA, 903 bp, Stenotrophomonas maltophilia
atggctaaagagagagcattgacgcttgaggcgcttcgcgtcatggacgcgattgacaggcgcggcagttttgccgcggcggcagatgaactggggcgcgttccgtctgcgctgagctataccatgcaaaagctggaggaggagctggatgttgtgctcttcgatcgctctggtcatcgaacaaaattcaccaacgttgggcggatgctgttggagcgcggccgcgtattgctggaagcggcggataaactgacgaccgatgccgaagcgctggcccgcggctgggaaacccatctgacgttagtgaccgaagcgctggtgcccaccgaggcgctgttcccgctggtggacagactggccgcgaaagccaatacccagctgtcgatcatcaccgaggtactggccggggcgtgggagcgtcttgagacgggcagggcggatatcgtcattgcgccggatatgcatttccgctcatcgtcagaaattaactcgcgcaaactgtacagcgtgatgaacgtttacgtcgctgcgccgggtcacccgatccatcaggagccggaaccgctctctgaggtcacgcgcgtgaaataccgcggcgtggcggtggcggataccgcgcgcgagcgcccggtgctaacggtgcagttgctggataaacagccgcgtctgacggtgacgtcgctggaagataagcgtcaggcgctgctggcggggctgggcgtggcgaccatgccgtatccgttcgtcgaaaaggacattgcagagggacggctgcgcgttgtcagcccggaatacaccagcgaagtggatattattatggcgtggcgtcgtgacagcatgggcgaagccaaatcatggtgtttacgcgaaattccgaagcttttcacgcaatataataaataa

SEQ ID NO: 523356 - DNA, 702 bp, Stenotrophomonas maltophilia
atgattacgacaagaacagcgaaacagtgcggacaagccgatttcggttggttgcaggcccgctacaccttttcctttggacactactttgaccctaaacttctcggttacgcttcactgcgcgtattgaaccaggaagtgctcgccccgggcgcgtccttccagccgcgcacgtacccgaaagtcgatatcctgaacctaatcctggaaggcgaggcagaataccgcgatagcgagggcaatcatgtccaggcgaaggctggcgaggcgctgttaatttccacgcagccgggtattagctatagcgagcataacctcagcaaagacaaaacgctgacccgcatgcagctgtggctggatgcctgtccggagcgggaaaatccgctggtgcaaaaaatcgatctgaaggacgataaacagcagctgattgcctcccctgatggcagcaaaggcagcctgcagctgcgccagcaggtgtggctgcatcatatcgagctgaagaaaggtgaacaggcgagcttccagcttcatggtccgcgcgcctatctgcagtccattcacggtacggtgcatgcggtgacgcacgcggaagaaaaagaggcgctcatctgcggcgacggcgcgtttattcgtgatgaagcgaatatcaccctggtggcggatacgccgctgcgcgcgctgctgattgatttgccggtttaa

SEQ ID NO: 523357 - DNA, 402 bp, Stenotrophomonas maltophilia
atgctctcgcacctgtcggcgatctatatccattaccagcttccgcgcttgtccgcgctgtgtgcggcgacaacagccggaatgggggctgcggcggggatggcgtggctgatgggcggatcttaccagactattgccatggcgatcggcagtatgatcggcgacgtcagcgggatgatctgtgacggggcgtctaacagttgcgcaatgaaggtctcgaccagcgtcaccagcgcctggaaagccgtgatgatggcgttggatgatactgccgtgacgggtaatgaggggattgtggcgcacgacgtggagcagtcgattgcgaacctgtgcgcgctggcgtgccgctcgatgcaggcaacggaccggcagattattgagattatggcgagtaaggtgtaa

SEQ ID NO: 523358 - DNA, 414 bp, Stenotrophomonas maltophilia
atgccgtaccgccgatggctgccgctgctgctgatggccgtgctcctcttcgaaggcatcttcggagcctgggcggggacgcgcatggccctgcatggcgcaggcggccagcattcatctgctcgcgcggcagtgggatgccaggttacgcctcgcacgacagtggaggcacctgcggcggcacatgcctcccatgagcaggccccggctgccgccggctccgggcatgaagatcactgcacctgcgttgacgccagcagttgtgactgtcgttgcctgttgagcctgtatccgccgatgccaccgttgctgttggcgacggcccatccgcgcatcacgttggatctggcgttgccatcgctgatcctgcccgccagcaaactctcacgggtattccgacctcccatcgcctga

SEQ ID NO: 523359 - DNA, 576 bp, Stenotrophomonas maltophilia
atgtggggcctgtttatctttgctccgctgtttgcgacgtacttccaggagccggtgggtaatgttctctccgccgttccgtttgtgggggccctgttctctggcccggcattcggtatcggtattctggcggctggcgtgatactcgccatcatgattattccgtacattgcggcggtcatgcgcgatgtcttcgaacaaaccccggtgatgatgaaagagtcggcttacggcatcggctgcaccacctgggaggttatctggcgcatcgtccttccgttcaccaaaaatggggtgatcggcggcatcatgctgggcttaggccgcgcgctgggtgaaaccatggcggtgacctttatcatcggcaacacctaccagctcgacagcgtgtcgctctacatgccggggaacagtattacctctgcgctggcgaacgaatttgccgaagcggaatccgggctgcacgtcgcagcgctgatggaactaggcctgatcctgtttgttattacctttattgtgctggctatctccaagctgatgattatgcgtctggctaaaaacgagggggcacgctaa

SEQ ID NO: 523360 - DNA, 891 bp, Stenotrophomonas maltophilia
atggcgactctcgacatgcaaaacaccgctcagcttgcggaatctcgtcgtaaaatgcagtcaaagcgccggattaaaaaccgcattgctctgacgctttccatggccacgatggcgttcggcctgttctggctgatctggatcctgatgtccaccatcacccgtggtattgatggaatgtccctggcgctgttcaccgagatgacgccgccgccaaacacggcgggtggtggtctggcaaacgccctggcgggcagcggcctgctgatcctgtgggcgaccgttttcggtacgccgttgggcatcatggcgggtatctatctggcggagtatggccgcaagtcctggatcgctgaagtcatccgctttattaacgacattctgctttctgccccgtcgattgtggtaggtctgtttgtttacaccatcgtggtggcgcaaatggaacacttctccggctgggcgggtgtgattgcgctggcgctgttgcaggtgcctatcgttattcgtaccactgaaaacatgctgaaactggtgccggacagcctgcgtgaagcggcttacgcgctgggcacgccgaaatggaaaatgatttcggcgatcaccctgaaagcgtccgtctcggggatcatgaccggtatcctgctggctatcgcccgtatcgccggtgaaaccgcaccgctgctgtttaccgccctctccaaccagttctggagtacggacatgatgcagccgatcgccaacctgccggtgacgatctttaaatttgcgatgagcccattcgcggaatggcagcagctggcctgggccggggtgctgatcatcaccctttgcgtactgttgctgaacattctggcgcgcgtcattttcgcgaagcagaaacacggttaa

SEQ ID NO: 523361 - DNA, 774 bp, Stenotrophomonas maltophilia
atgagtatggttgatactgccccgggtaagattcaggttcgtgatttgaacttctactacggcaaattccatgccctgaagaatatcaacctggatatcgcgaagaaccaggtcacggcatttatcggtccgtctggctgtggtaaatccacgctgctgcgcacctttaacaaaatgtattcgctctatccggagcagcgcgcagaaggtgaaattctgctggacggtgacaacatcctgaccaatacccaggatatcgccctgctgcgtgcgaaagtggggatggtgttccagaaacccacgccgttcccgatgtcgatctatgacaacatcgcctttggtgtgcgtctgtttgagaagctctcccgtgcggatatggacgagcgcgtgcagtgggcattgaccaaggccgcattatggaacgaaaccaaagataaacttcaccagagcgggtactctctctccggtggtcagcagcagcgtctgtgcattgcgcgcggtatcgccattcgcccggaagtcttgctgctggatgagccgtgctcagccctggacccgatctcaaccgggcgtatcgaagagctgatcaccgagctgaagcaggattacaccgtggtgatcgtcactcacaacatgcagcaggcagcccgttgttctgaccacacggcgtttatgtacctgggcgagttgattgagttcagcgatacggacgcgctgttcacccgtcctgcgaagaaacaaaccgaagattatattactggccgctacggttga

SEQ ID NO: 523362 - DNA, 726 bp, Stenotrophomonas maltophilia
atggacaacctcaatcttaataaacacatttccggccagtttaacgcagagctggaaagcattcgcacccaggtgatgaccatgggcggcatggtcgagcagcagctttctgatgcgattacggcaatgcacaaccaggacagcgagctggcgaagcgcgttatcgaaggcgatcacaacgtcaatatgatggaagtcgccatcgacgaagcgtgcgtgcgcatcattgccaagcgtcagccaaccgcgagcgacctgcgtctggtaatggcgatcatcaaaactatcgccgagctggagcgtattggtgacgtggcggataaaatctgccgcacagcgctggagaaattctcccagcagcaccagccgctgctggtgagcctggagtctctgggtcgccacaccgtgcagatgctgcacgatgtgctggacgctttcgcgcgcatggatctggacgaagcggtccgtatctaccgtgaagataagaaagttgaccaggaatacgaaggcatagtgcgtcagctaatgacctacatgatggaagattcccgtaccattccaagcgtgctgaccgcgctgttctgcgcgcgctcaattgagcgtattggcgaccgctgccagaacatttgcgaatacatcttctacttcgtgaagggacaggatttccgtcacgtgggcggcgacgagctggacaagctgctggcgggtaaagatccgaaagagtga

SEQ ID NO: 523363 - DNA, 666 bp, Stenotrophomonas maltophilia
atgtccggaattgaagcggtatttttcgactgtgacggtacgctggtcgacagtgaggtcatttgttcccgcgcgtatgtcgccatgttccaggaatttggcattacgctcgatctcgaagaggtgtttaaacgctttaagggcgtgaagctgtacgagatcatcgacatcattaacgaagagcacggggtggatctggcgaaagcggatctggaaccggtgtaccgcgccgaggtcgcacgcctcttcgacgccgagctggaagttatcgccggcgctaacgcgctgctggatgcgatgacggtgccgatctgcgtggtctctaacggcccggtcagcaaaatgcagcactcactcggcaagctggacatgttgcaccacttcccggaaaaactgttcagcggctacgatatccagcgctggaagccggatccggcattgatgttccacgcggcgaaggcgatgaacgtcaacgtggagaactgcatcctggtggatgactcgtctgcgggcgcgcagtcggggattgatgcggggatggaggtgttttacttctgcgccgatccgcacaacaagccgatcgatcatccaaaagtgacgacctttacagacctggcgcagctgccggaactgtggaaggcgcgcgggtgggatattactcgctga

SEQ ID NO: 523364 - DNA, 1341 bp, Stenotrophomonas maltophilia
atgatgagtcaacaacacactacccagacatctggtcaggggctgcttgagcgcgtgttcaaactgcgcgagcacggcacaacggcacgcaccgaagtgatcgccggttttactaccttcctgacgatggtctatatcgttttcgttaacccgcaaattctgggcgtggctggcatggacaccagcgccgtctttgttaccacctgtctgatcgcggcccttggcagcatcctgatgggcgttttcgctaatctgcccgtggcgctggccccggcaatgggtctgaatgcgttctttgcgttcgtggtggttcaggcgatgggcctgccgtggcaggtcgggatgggcgctattttctggggcgcggtcggcctgctgctgctgaccatcttccgtgtgcgctactggatgattgcgaacattcccgtgagcctgcgcgtgggcatcaccagcggtatcggtctgtttatcggcatgatggggctgaaaaacgctggcgtaatcgtggcgaacccggaaacgctggtgagcattggtaacctgacctctcacagcgtgctgctgggcgtgctgggcttctttattatcgcgatcctggcgtcgcgtaacatccacgctgcggtgctggtctctatcatcgtgaccacgctgctgggctggatgctgggtgacgtgcattacagcggtattgtctctgcgccaccgagcgtttctaccgtgattggtcacgttgatctggcgggctcgctgaacctgggtctggccggagtgattttctccttcatgctggtcaacctgtttgactcctccggtacgctgattggcgtgacggacaaagcgggtctggcggacgagaaaggcaaattcccgcgcatgaagcaggcgctgtatgtggatagcatctcgtccgttgcgggttctttcatcggcacctcgtctgttaccgcttacattgaatcctcttccggcgtgtccgtgggcggccgtactggcctgacggcggtagtcgtgggtctgctgttcctgctggtgatcttcctctctccgctggcggggatggtgccaccgtacgcggcagctggcgcgctgatctacgtcggcgtgctgatgacctcgagcctggcgcgcgtgaagtgggatgatctgacggaagccgttccggcgtttattaccgcggtgatgatgccgttcagcttctcgatcaccgaaggtatcgcgctgggctttatctcgtactgtgtgatgaagatcggtaccggccgtttccgcgaactcagcccgtgcgtgatgattgtggcgctgctgtttgtgctcaagattgtgtttattgacgcgcactaa

SEQ ID NO: 523365 - DNA, 567 bp, Stenotrophomonas maltophilia
atgtctgatacgttgaaagttgttacgttactgggaagcctgcgcaaaagttcgtttaacgggatggtagcgcgcacgctgccacagctggcgcctgcgggaatggagatcagcgccctgccgtctattggcgacatcccgctttatgatgctgacgttcagcaggaagaagggttcccgcacagcgtggaggcgatagccgagcagatccgtcaggctgatggtgtagtgattgtaacgccagaatataactactcggttccggggggtctgaagaacgcgattgactggttatcccgtttaccggagcagccgctgtcaggcaaaccggtgctgatccagaccagctcaatgggcgccatcggcggtgcgcgctgccagtatcacctgcgacagatcctggtgttcctggatgcgatggtgatgaacaagccggaatttatgggcggcgtgattcagaacaaagtcgacccgcagacgggtgaagtggtggatcagagtacgcgtgatcatctctctggtcagttgactgcgtttggggattatattaagcgggttaaaagctga

SEQ ID NO: 523366 - DNA, 747 bp, Stenotrophomonas maltophilia
atggctacgcactttgcacgaggaacattaacggaagggcatctcgtatcggccagaatttcttcagcctgtcacagtgaggcgctcaaactacctgaacaccgcaggacgcggtttttagcttccagagcgctcctcgcagaactgctttttatgctgtacggcaccagcgaattaccggacatactcacccagccagaaggtcgcccggtttttgcggacccggcactcccccatttttccattgcgtataccggcaacattgttggcgtcgcgctgacgactgaaggtgattgcggcctggatatggagctgcaacgcgtcacgcgcagcttccatggtgctaacgcgctcgatgaatacccgctctccagcaatgaaaagctgtggatacgtaaccagaacgatcccgttgaagccagagcgcagcttatcacccttcgccagagcatccgtaaactgagcggcgcggcatcagacgacgccagcctgttgcagctgcttcccggctccggacgcctgcgtgccgcgaaagcctcgctggtagaggcgctcagcgacgctgaggacgtactgatctggtccgttgcggtgagccccgccatcgaacggctgaaaatctgggagtttgacagtattcgcggttggcgtagtcttccggatgtacctgagcgcgccaacgagcccgccgcgcgcctgatgcgattaaccagtttaccggcagaaaaagcatacacccatagctga

SEQ ID NO: 523367 - DNA, 972 bp, Stenotrophomonas maltophilia
atgaagaagcccatcagcagtctcgatcttaatcttttactttgcctacagttgttgttgcaggagcgcagcgtcaccaaagccgcgaagcgaatgaacgtgacgccgtccgcagtgagtaaatcgctggcgaagctgcgcgactggttcgacgatccgctgtttgtgaaaacgcctttagggctactgcccacgccgctaacggtgagtctggaacaggatctggccgactggatgcagattggcaatcagatcgtcgataaattccaccatagctctccaggcgggctcaagtttgtgctcgccgccgaaacgccgctgatgctgattcgcttcaacaccctgctggagcaggtgaatgagcgctacccacaggcgacggtgaagttgcgccagtgggattatgattcgctggacgctattacacgcggggaggtcgatctcggttttaccggccgcgaaacgcacccgcgctcccgcgagctgctaaagctgatgccgtggtttattgactacgaaatcctgttcagcgaccgtccgtgcgtctatctgcgagaagatcatccggcacttcacgaagcgtggaaccttgagacgtttctgcgctacccgcatatcagcatcttctgggagcgcagcgatacctgggcgcttgatgaagtgctaaaagagatgggccgggagcgcaacgtcgccatgagcctgcccggctttgaacagtcgatgtttatggcggctcagccggaccacaactacattgccactgcgccctactactgccatcactacaatcaactccaccagcgtaatctggtctgccttcccattcccatcgatgaggcgcaggcagaaaagctgaccgtacccttcacgctaatctggcataagcggaacagccataatccgaaaattatctggctgcgcgaaactataaaagccctgtataccgcgccaggtcaggtttttgcctaa

SEQ ID NO: 523368 - DNA, 1215 bp, Stenotrophomonas maltophilia
atgccccctatcctgcttgcctgcatctatgggggatttatggctcgttttctgttttgtagttttgcattagttctgctgtatccgtccggcattgatatgtatctggtggggctaccgcatattgcacgcgatctgggtgccagcgaggcgcaactgcacatcgcgttttcggcctaccttgcggggatggcatcctcaatggtgtttgcgggaaaaatcgcggataaggccgggcgtcagcccgtcgccattaccggtgcgatcgtcttcgcgctggcatctatactctgctctgtcgcgcagggaagtcccctgttcctgaccggacgttttatccagggcattggcgcgggcggctgttacgtggtggcgtttgctattctgcgcgataccttgagcgcccagcgccgcgccagggtgctgtcgatgctgaacggcattacctgcatcatcccggtgctggcaccggttgtaggctacctgatcatgctgaaatttccatggcagagccttttctggactatggccacaatgggcgccatcgtctttatactgtccgtgacggtgttgaaagagacccatcccggttcgcagcagacgcaccacgctgctaccattcatccggctgaaaagcttctgaatcgctttttcctgagccgcctggccatcatcacgctcagcgtggcggtgatcctcacctatgtaaacgtttccccggtgttactgatggagacgataggcttcgatcgcggtgagtattcgacggtgatggcgctcaatgcgatggtcagcatggcggtttcattctcgatgccctttgcgctcaatatcttccgccagcgcacgctgatgctcgcttcacagacgctgtttctcgccgcaggcgtaattctggcgaccgccacctcacatgcgctgatgctggtgggtatgaccctgatctgcgccggattctccggcggcttcggcgtggcgatgagtcaggcgcttggcccgttctcactgcgggcaggcgtggcaagctcggtgctgggcattgcgcaggtatgcggttcgtcgctgtggatttggctggcggcggtgatcggccttaacgcgctgaatatgctgatcggggttctgattggctgtagcatactctgcattaccttacttatggtcatccagcccgcggcgcactatgaagaagcccatcagcagtctcgatcttaa

SEQ ID NO: 523369 - DNA, 1365 bp, Stenotrophomonas maltophilia
atgagccataacgacactatcgtcgcccaggcaaccccaccgggacgcggtggtgtaggcattctgcgcatctccggcctgaaggcgcgtgaggtggccgaagcggtgctgggtaaactgccaaagccgcgctacgctgattatctgccatttaaagatgccgacggcacctcgctggaccagggcattgcgctgtggttccccggcccaaactcttttactggcgaagacgtgctggagcttcagggtcacggcggcccggtgatcctcgacctgctgttaaaacgtattctgaccctgcctggcctgcgcattgcgaagccgggtgagttctccgagcgtgccttcctgaacgataagctcgacctggcccaggccgaagcgattgccgacctgatcgacgccagttccgaacaggcagcccgctccgcgctgaactcgttgcagggggcattttccgcacgcgtgaatcaccttgtggaagcacttactcacctgcgaatctatgttgaagcggctatcgacttcccggacgaggagattgacttcctttctgacggcaaaatcgaagcccagctcaaccaggtgatgaacgatctggatgccgttcgcgccgaagcgcgccagggcagcctgctgcgtgagggcatgaaggtggtgattgctggtcgccccaacgccgggaaatcaagcctgctgaacgccctggcgggccgtgaagcggcgatcgtgaccgacatagccggtaccacccgcgatgttctgcgcgagcatatccatatcgacggcatgccgctgcacatcatcgataccgctggcctgcgcgatgcgagcgatgaagtcgagcgtatcggtatcgaacgcgcctggcaggagatcgagcaggccgaccgcgtgctgtttatggtggacggcaccacgaccgacgccgttgacccggctgaaatctggccagactttatcgcccgtctcccggccaaactgccgatcaccgtggtgcgcaataaggccgacgttaccggcgaaacgctgggcatcagcgatgtgaatggtcactcacttattcgtctgtcggcccgtaccggggaaggcgtggaagccctgcgtaaccacctcaaacagagcatgggttttgacaccagtatggagggcggcttcctggcgcgtcgtcgtcacttgcaggcgctggaagaggcggctcgccaccttgagcagggcaaagcccagctgatcggcgcttgggccggcgagctgctggcggaggaactgcgtctggcgcagcagaacctgagcgagatcaccggggagtttacgtcagacgatctgcttggacgaattttctcaagcttctgtattggtaagtaa

SEQ ID NO: 523370 - DNA, 1644 bp, Stenotrophomonas maltophilia
atggattcgcaacgcaatcttcttatcatcgctttgttgttcgtgtctttcatgatctggcaggcatgggagcaggataaaaatcctcaaccccagcagcagaccacgcagaccacgaccaccgcagcgggtagcgccgccgaccagggcgtaccggccagtggccaggggaaacagattacggttaagaccgatgtgcttgagctgactatcaacacccgtggtggtgatgttgagcaggcgctgctgttgacctacccgaaagagctgaagtctaccgaaccgttccagttactggaaaccacgcctgagtttatctaccaggcacagagcggcctgaccggtcgtgatggcccggataacccggcgaacggtgcgcgtccactgtataacgtcgagaatgacacctttgtgctggctgatggtcagaacgaactggttattccgatgacctacaccgacgcggcaggcaacaccttcaccaaaaccttcaccctgaaacgcggtgaatatgcggtgaacgtgggctacagcgtacagaacaccggtgcgaaaccgctggaaatctctacctttggtcagctgaagcagtccatcaatctgccgtctcaccgtgacaccggaagcagcaactttgcgctgcataccttccgtggcgcggcctactccacgccagataccaagtacgagaaatacaaattcgacaccattgccgataacgaaaacctgaacgtcagctctaaaggcggttgggtcgcaatgctgcaacagtatttcgcgacggcgtgggtaccgaataacgacggtacgaacaacttctacaccgcgaacctcggcaacggtattgcagccatcggctacaaatctcagccggttctggtgcagccgggtcaaaccggtaagctggcaagcaccctgtgggtcggcccggaaatccaggacaaaatggctgccgttgcgccgcacctggatctgaccgttgattacggttggttgtggttcatctctcagccgctgtttaagctgctgaagttcatccacagcttcctgggtaactggggcttctccatcatcgttatcacctttatcgttcgtggcatcatgtacccgctgactaaagcgcagtacacctccatggcgaagatgcgtatgctacagccgaagattcaggctatgcgtgagcgtctgggcgatgacaaacagcgtcagagccaggagatgatggccctgtataaagcagagaaagtgaacccactgggtggttgcttcccgctgctgattcagatgccaatcttccttgcgctgtactacatgctgatgggttccgttgagctgcgccacgcgccgttcgccctgtggatccatgacctgtccgcacaggacccgtactacatcctgccgatcctgatgggcgtgacgatgttcttcatccagaagatgtctccgaccaccgtgactgacccgatgcagcagaagatcatgacctttatgccggtcatcttcaccgtgttcttcctgtggttcccgtcaggtctggtgctgtactatatcgtcagcaacctggtgaccatcatccagcagcagctgatttaccgtggtctggaaaaacgtggcctgcatagccgcgaaaagaaaaagtcctga

SEQ ID NO: 523371 - DNA, 327 bp, Stenotrophomonas maltophilia
ttgttaactcccactcatttcactttcgtcttccagcagccactacgggctggcacgccgcaaatcaccatcctcggccgccaaaattcgctggggcatccccgcatcggtctcacagtcgccaagaaaaacgttaagcgtgcgcatgaacgcaaccggattaaacgtctgacgcgtgaaagcttccgtttacgtcagcacgaactgccttcaatggatttcgtggtggtggctaaaaaaggggttgccgacctcgataaccgtgctctctcggaagcgttggaaaaattatggcgccgccactgtcgcctggctcgcgggtcctga

SEQ ID NO: 523372 - DNA, 1395 bp, Stenotrophomonas maltophilia
gtgtcactttcgctttggcagcagtgtcttgcccgattgcaggatgagttaccagccacagaattcagtatgtggatccgcccattgcaggcggaactgagcgataacacgctggctttgtacgcgccaaaccgtttcgtgctcgattgggtaagggataaataccttaataacatcaatggactgctgaacgatttctgcgggtcagatgccccacagctgcgttttgaagtgggcacaaagccggtcacccaaaccgttcgtgaagttgtcaatgtggcagcccctgcacaggcggcgcccgctccagcgcctcgcgttgcaccggctcgtcagggctgggataacgttccagcccccgctgagcctacctaccgctctaatgttaacgtgaaacacacgttcgataacttcgttgaaggtaagtcgaaccagctggcgcgcgcggcggcccgccaggttgccgataatcccggtggtgcttacaacccgctgttcctttatggcggcacgggtctcggtaaaacgcacctgctgcatgcggtgggcaacggcattatggcgcgtaagcccaatgccaaagtagtgtatatgcactccgaacgcttcgttcaggacatggtaaaagccctgcaaaacaatgcgatcgaagagtttaaacgctactaccgttccgttgatgcgctgctgatcgatgacatccagttctttgccaataaagaacgatcgcaggaagagtttttccacacctttaacgccctgctggaaggcaatcagcagatcattttgacctcggatcgttatccaaaagagatcaacggcgttgaagatcgtctcaaatcccgcttcggctggggcctgaccgtggcgatcgagccgccggagctggaaacccgcgtcgcgatcctgatgaaaaaagccgacgagaacgacattcgcctgccgggtgaagtggcgttctttattgccaagcgcctgcgttccaacgttcgtgagctggaaggggcactgaaccgcgttatcgccaacgccaattttaccggtcgtgcgatcaccatcgattttgtgcgtgaagcgctgcgcgatttgttggcattgcaggaaaaactggtcaccatcgacaatattcagaagacggtggctgagtactacaagatcaaagtggcagatttactgtctaaacgtcgttcccgctcggtggcgcgtccgcgtcagatggcgatggcgctggcaaaagagctcaccaaccacagcctgccggaaatcggtgatgcgtttggtggccgtgaccatacgaccgtgctgcacgcctgtcgcaagattgagcagttacgcgaagaaagccacgacataaaagaagatttttccaatttaatcagaacattatcatcgtga

SEQ ID NO: 523373 - DNA, 1101 bp, Stenotrophomonas maltophilia
atgaaatttaccgttgaacgtgaacatttattaaaaccgctgcaacaggtgagtggcccattaggcggccgccctacgctgcctattcttggaaacctgctgcttcaggtcgctgacggtacgctgtcgctgaccggcacagatctggaaatggaaatgatcgcgcgcgttacgctgactcagccgcacgacgcgggcgcgaccacggttccggcacgtaaattctttgatatttgccgtgggttgccggaaggcgctgaaatcgccgtgcagctggagggcgaccgcatgctggtgcgctctggccgcagccgtttctccctctccacgctgcccgctgcggacttcccgaacctggatgactggcagagcgaagttgaatttaccctgccgcaggcgacgatgaagcgtctgattgaagccacgcagttctccatggcgcatcaggacgttcgttactacttaaacggcatgctgttcgaaaccgaaggtgaagagctgcgtaccgtggctacagacggtcaccgtctggcggtctgttccatgccgattggcgattcactgccaaaccattcggtgatcgtaccgcgtaaaggcgtaattgaactgatgcgtatgctcgacggcggcgacaccccgctgcgcgtgcagatcggtagcaacaatattcgtgcccacgtgggcgattttgtcttcacatcgaagctggtagacggacgtttcccggattatcgccgcgtattgccgaagaacccggacaaaacgctggaggcaggttgcgacatcctcaagcaggcgttcgcgcgcgccgctattctctccaacgagaaattccgcggcgtacgtctgtacgtgagtgaaaaccagatcaaaatcaccgccaacaacccggagcaggaagaggcagaagagattctggacgtcacctacgccggggctgagatggaaatcggcttcaacgtcagctatgtgctggatgtgctgaatgcactgaaatgcgagaacgttcgcatcctgctgactgactccgtttcgagcgtacagattgaagatgccgcatcacagtcggctgcttatgttgtcatgccaatgagactgtaa

SEQ ID NO: 523374 - DNA, 1074 bp, Stenotrophomonas maltophilia
atgtcgctcacccgtctgttgatccgcgactttcgcaacatcgagagcgcggatctcgctttatcccctggctttaatttcctggttggcgcgaacggcagcggcaaaaccagcgtgctggaagccatctatacgctcggtcatggccgggcgtttcgcagtttgcagattggtcgcgtgattcgccacgagcaggatgcgtttgtgctgcatgggcgcttgcagggtgccgagcgggaaaccgccatcggcctgaccaaagacaagcagggcgacagcaaggtgcgcatcgacggcaccgacggccacaaggtggcggagctggcactgctgatgccgatgcagctgattacgccggaggggtttactttactcaacggcggccccaaatacagaagagcgttcctcgactggggatgctttcacaatgaagccggtttctttaacgcctggagcaatctgaagcgtctgcttaaacagcgtaacgccgcattgcgccaggtcacgcgctacgcccagctgcgtccgtgggacatggaattaattcctcttgcggaacaaatcagccgctggcgtgccgaatacagcgcaggtatcgccgaagacatggccgatacctgcaaacagtttttacccgagttctctctcaccttctctttccagcgtggctgggaaaaagagacggattatgccgaggtgttagagagaagcttcgagcgcgatcgcatgttgacctacaccgcgcacggcccgcacaaggcggatttccgcattcgtgccgacggtgcgccggtggaagacacgctgtcgcgcgggcagctgaagctcctgatgtgcgcgctacgcctggcgcagggggagttcctcacccgcgaaagtgggcgacgctgcctgtacctgatagatgattttgcctcggaacttgacgacgcgcggcgcgggctacttgccagccgcttaaaagccacgcagtcgcaggttttcgtcagcgccattagcgctgaacacgttatggacatgtcggacgaaaattcgaagatgtttaccgtggaaaagggtaaaataacggattaa

SEQ ID NO: 523375 - DNA, 1368 bp, Stenotrophomonas maltophilia
  misc_feature (1188)..(1197): n is a, c, g, or t
atgtcgaattcttatgactcctccagtatcaaagtcctgaaaggactggatgcggtgcgtaagcgcccgggtatgtatatcggcgacacggatgacggcaccggtctgcaccacatggtattcgaggtggtagataacgctatcgacgaagcgctcgcgggtcactgtaaagacatcgtggtcacgatccatgcggacaactccgtgtccgttaccgatgatggtcgtggcatcccaaccggtattcacccggaagagggcgtatctgctgcggaagtgatcatgaccgttctgcacgcaggcggtaagttcgatgataactcctataaagtttccggcggtctgcacggcgtaggcgtatccgtagtaaacgccctgtcgcagaagctggagctggttatccagcgcgaaggcaaaattcaccgccagatttacacccatggtgtgccgcaggcaccgctggccgttaccggtgataccgacaaaaccggtaccatggtgcgtttctggccgagccttgaaaccttcaccaacgtcaccgaattcgagtacgagatcctggcgaaacgcctgcgtgaactgtcgttcctgaactccggcgtgtcgattcgactgcgcgacaaacgcgacaacaaagaagaccacttccactacgaaggcggtatcaaggcgttcgttgagtatctgaacaagaacaaaacgccaattcacccgaatatcttctacttctctactgaaaaagacggtatcggcgtggaagtggcactgcagtggaacgatggtttccaggaaaacatctactgctttaccaacaacattccacagcgcgacggcggtactcaccttgcgggcttccgcgcggcgatgacccgtactctgaacgcctacatggacaaagaaggctacagcaaaaaagcgaaagtcagtgccaccggtgacgatgcccgtgaaggcctgattgccgtggtctccgtgaaggtgccggatccgaaattctcctcacagaccaaagacaagctggtctcttctgaggtgaaatcggcggttgaacagcagatgaacgaactgctgagcgaatacctgctggaaaacccgtccgacgcgaaaatcgtggtgggtaaaattatcgatgcggcgcgtgcccgtgaagcggcgcgtaaagcccgtgaaatgacccgccgtaaaggnnnnnnnnnnaaatgccccgccgtaaaggcgcgctggacctggcaggcctgccgggcaaactggctgactgccaggaacgcgatccggcgctgtctgaactgtacctcgtggaaggggactccgcgggcggttctgcaaagcagggccgtaaccgcaagaaccaggcgattctgccgctga

SEQ ID NO: 523376 - DNA, 1032 bp, Stenotrophomonas maltophilia
atgctctcttctcaggaagtggcgacgctcatcaccgcgctcggctgcggcatcggtcgcgacgagtacaacccggacaaactgcgctatcacagcatcatcatcatgaccgatgcggacgtcgacggctcgcacattcgtacgctgctgttgaccttcttctatcgtcagatgccggaaatcgttgagcgcggccacgtctacattgcccagccgccgctgtataaagtgaagaaaggcaagcaggaacagtacattaaagatgacgaggcgatggatcagtaccaaatcgcgatcgcccttgatggtgcgaccctgcacgcaaactccagcgcgccagcgctggccggtgaaccgctggagcgtctggtctccgagttcaacgccacgcagaaaatgattggccgtatggagcgtcgctatccgaaagcgctgctgaaagagctgatttatcagccgaccctgaccgaagccgatctgagcaacgagcagaccgtcacccgctgggtgaacaccctggtgagcgagctgaacgagaaagagcagcacggcagccagtggaagtttgacgttcagcagaacgctgagcaacagttcgagccgattgttcgcgtgcgtacccacggcgtcgataccgactacccgctggagcacgagtttgttaccggtccggaataccgccgtatctgcaccctcggcgagaagctgcgtggtctgatcgaagacgacgcgttcatcgaacgtggcgagcgtcgtcagccggtagccagcttcgaacaggcgctggagtggctggtgaaagagtcccgtcgtggcctctctattcagcgttataaaggcctgggcgaaatgaacccggatcagctgtgggaaaccaccatggatccggaaagccgtcgcatgctgcgcgtcaccgttaaagacgcaatcgcagcggatcagctgttcactaccctgatgggtgacgcggttgaaccacgtcgcgccttcatcgaagagaacgccctgaaagcggcgaatatcgatatttaa

SEQ ID NO: 523377 - DNA, 705 bp, Stenotrophomonas maltophilia
atgagcagcaggagcgatattatcggggccgatgaatggcaggtaacgacccgcagcggcctcgtctacagtgaggtcctcggttggatcgacctggggcatgccaggggcgaagatatttccctgcttctggctgatttcagcagcggcgaagccagtggcagaccttattacacgattgcatacaatcagagaatgaatatcgggaaaggactggccggaacgggtaagtttgttcgctgggaaataaaacgtgggcgctcgatgtcagaaattaacagcattgccctggctatgatgatggataccgcgagaaattttgaaaattaccagtcccgcgcttttttcagttggtacaccgatagcgggttcagcggagaagacctggtgtcggatctgctcggtttttacagggcgctgattccttcggattaccgggttcagttgcggcctgtcagtcgtgaaagcgcactacgccgctgggatcattacggaccgatcggtaatttcaagaaccggggttttcttccattgatttttcccgaccctgatgaccttaatatccggcatgaaccctataaaggcccgcttccccgctttatgaggtgggtaacgccgtttgataacttcagctcagacattgttcgtattcttaacgataacggcacatatcattccttctttacccactcaggacgacgttga

SEQ ID NO: 523378 - DNA, 939 bp, Stenotrophomonas maltophilia
atgaccgatacgctgaaggatatacctgtatttgtggccgccgttgaggcgggaagttttgcgcaggccgccgtccgtctgcatttgtcgcgctcggcggtaggaaaaagcattgctcgtcttgaagagcggctgggcgtacgtcttttccagcgtaccacccgcagccagaggctgaccgacaacggcgctctgttttatgaacgctgccttcgcgcgctggaggagattcggggcgcggagtcgctgcttgaaacagggaagcagcaggtcagcggccgcctgcgcgtcgccatgccggttctgtttggtcgccagtgcgtcgcgccactgctgatagaactgacgcaggaacatcctgggcttgagcttgaaatgtcattcagcgaccgcgtggtggatctggtagaggaaggctttgatatggcggtacgtaacggcacgctgcaggacagcagcctgctggtcgccagaaggctgggcgagcatcgcatggtgctgtgtgccgccccggattacctgatgaagaacggccagccagaaaacgttgctgatttaccccaccacactgccattaactatctgcgatcaggcagagtgctgccctggcagctaatggatagcgaagggagatcgcacacctttactccccgctcatcgctcaatatggatgatttacaggcaatctgcgacgctgcgctggccggacacggccttgcgtggttgccctgctggatggcccgcagagaaatacatcagggaaaactcatcccgcttttaaagcaggcaccggacgtgcgcttcgacgttcatgcagtctggcagcagacgccgcatctgccgctgagggttagaattgctgtcgatacgcttgccagccgtttaccgtcagtgctgtcgctggactttcctgcaagccgcgtcgaaggtgcaagttaa

SEQ ID NO: 523379 - DNA, 1026 bp, Stenotrophomonas maltophilia
atgacagaaacaatgcagcgctggtcaatgaacgcccttgggcgcgagagccttcagcttgttcaggtgcctgtgccacagcccggcccgggtgagatccgcgtgcgtgtgagtgccgttgcgctcaactaccgggataaaatggtgattgaaggcacgatgccgattccgctttccttcccgtttaccccagcatctgacatggcaggcgtggtggacagcattggcgaaggcgttacgcgtttcaaacccggcgcacgcgtcatctcaactttcttcccggaatggatcgacggcaagccgcaggcagacgcgcgcaatttgccctataaaacgtccggtggatacttccagggcatgctggccgaatatgtgattgtgagtgaaaacgcgctggtggcgtccccggaaagcctggatgacgctgaggccagcacgcttccttgcgcggggcttaccgcatggttcgcgctggtggagcgcggtcatttacgcgccgggcaatcggtgctggtacaaggcacgggcggtgtgtcgctattcgctttgcagatagcaaaagcgcacggcgcagaagttattgttacgtcggggagtgatgaaaaactggctctggccaaaaagctgggagccagccagggcatcaaccgactgaaaggcgactgggctgaaaatacgctggcactgacgcaggatcgcggcatcgaccatattatcgaaaccgtgggtggggagaaccttagacattcccttcgcgcggtagccgttcacgggcgtatctccgttattggcgtgctggccggaacggacatttccctgcctgctggcgagctgctgctgaaatcccccgtcattcagggaattggggttggacaccgccgggcgctggaagattttgtccgtgctgttgatgtcacggagttaaaaccggtgattgaacatcgctatcgttttgacgaactggaacaggcgcttgagcatctggatcgcggtgcgtttggcaaaatcgttctcacccgcgagtga

SEQ ID NO: 523380 - DNA, 813 bp, Stenotrophomonas maltophilia
atggctatcaaactcattgcaatcgatatggacggcacgctgctgctgccagaccacactatctctcctgccgttaaaaatgcgatcgccgccgcacgcgaaaaaggcgtgaacgtggtgctcaccaccggacgcccgtatgccggggtgcacagctacctgaaagagctgcacatgaatcagcctggcgattactgcatcacctataacggcgctctggtgcaaaaggcagcagatggcagcacggtggcgcaaactgcactgagctatgatgactaccgtttcctggaaaaactctcccgcgaagtgggctctcacttccacgcgctcgatcgcaatacgctttacaccgccaaccgcgatatcagctactacacggtgcacgagtcctacgttgcaaccattccactggtgttctgcgaagcggaaaacatggacccggcaacccagttcctgaaagtgatgatgattgatgaacctgcggttctcgacaaagccatctcacgcattccggctgaggtaaaagagaaatacaccgtgctgaaaagtgcgccgtacttcctcgaaatccttgataaacgcgtcaataaaggcacgggcgtcaaatcgcttgccgatgcgctgggcatcaagcctgaggagatcatggcgctgggcgaccaggaaaacgatattgcgatgatcgaatatgcaggcatgggcgtggcgatggataacgcgatcccgtcggtgaaagaagtggcgaacttcgtcaccaaatctaacctggaagacggcgtggcttatgcgattgagaaatttgtcctgtcctaa

SEQ ID NO: 523381 - DNA, 690 bp, Stenotrophomonas maltophilia
atgacactcaataaaaccgatcgcattgtcatcacgctgggcactcagattgtgggtggcaaatacgttcccggttcgccgctgccagcagaggcggaactgtgcgaggagtttgaaacctcgcgcaatatcatccgggaagtgttccgctcgcttatggcgaagcggctgattgaaatgaagcgctatcgcggcgcgtttgttgcgccgcgtaaccagtggaactacctcgataccgatgttctgcaatgggtactggaaaacgactacgacccacggcttatcggcgcgatgagcgaagtccgaaatctggtggaaccggccatcgcccgctgggcggcagagcgcgcaacgtcaggtgacctggcacagattgagtcggcgttaaacgacatgatcgccaataaccagaatcgggaggcgttcaacgaggcggacattcgctaccacgaggcggtactgcagtcggtgcataacccggtgttacagcagcttagcgtggcgatcagctcgctacagcgagcagtttttgaacgtacctggatgggcgatgaggccaacatgccgaaaacgcttcaggaacataaagcgctgttcgatgcgatacggcatcaggacggcgatgcggcagagcaggcggcgctgaccatgatcgccagctcgacacgaaggttgaaggaaatcacatga

SEQ ID NO: 523382 - DNA, 879 bp, Stenotrophomonas maltophilia
atgacatcacgctacatcgcaattgactggggatcgaccaatctgcgcgcctggctctaccagggggagcagtgtctggaaagcaggcaatcagaagcaggtgtgacgcgcctgaacggtaaatcccccgaagcggtgttagcagaggtgacacaaaactggcgcgacggtactacgccagtggtgatggccggaatggtcggcagtaacgtgggctggaaggttgcgccttacctgtcggttccggtgcatttcaccgccgttggcgagcagttaacgtccgttggcgacaatgtctggattattcccggtttatgcgtctctcgcgacgataaccataacgtgatgcgcggcgaagagacgcagctgctcggggcgcgcaccctttctccttcttctgtctacgtcatgcccgggacgcactgcaaatgggtccaggcggatgctgagcaaattcatgatttccgcacggtgatgaccggcgaactgcaccacttgctgcttaagcattcgctggtgggggccggtttgccggagcaaaccccttcgccggaagcgtttgccgccgggcttgagcgcgggatcgcatcccctgccgttttgccgcaactttttgaggttcgcgcctcgcacgtgctgggaaatcttccgcgcgagcaggtcagcgaatttctgtccggcctgctgattggcgccgaagtcgccaccctgagcgacgcattcgccgggcagcaggccatcacgctcgtcgcgggttcatcgctgacgtctcgttaccgccaggcgttccacgctatcggacgggatgttgctgcggtggaaggcgacacggcatttcaggcaggcataaggagcatcgctcatgcagtggcaaactga

SEQ ID NO: 523383 - DNA, 618 bp, Stenotrophomonas maltophilia
atgcagtggcaaactgaacttcccctgatcgcgattttgcgcggtatcacgcccggtgaggccttagcgcacgttggcgcggtgatcgacgccgggttcgacgcggtggaaatcccgctcaactccccggaatgggaaaaaagcattccggcagttgttaaggcgttcggtgataaggcgctgattggcgctggtaccgtattacagccggagcaggtggatgagctggcgaagatgggctgcaagcttatcgtcacaccgaatatcaaccccgaggtgatccgccgggcggtggattacggcatgaccgtatgtccgggctgcgccacggccacagaagccttttccgccctcgatgcgggcgcacagtctctcaaaattttcccgtcgtcggcctttggtccggattacatcaaagcgctgaaagcggtcttacccgccagcgtgccggtctttgccgtgggcggcgtcacgccggaaaacctggtgcagtggataaaagcaggttgtgcgggcgcggggctgggcagcgatctctatcgtgccggacagcccgttgagcgtaccgcacagcaggcggcagcatttgtgaaagcgtatcgagaggcagtgcaatga

SEQ ID NO: 523384 - DNA, 1149 bp, Stenotrophomonas maltophilia
atgaaaataaccaaacttaccacgtaccgtttacccccgcgttggatgttcctgaaaatcgaaaccgacgaaggcgtggttggctggggcgagccggtgattgaaggccgtgcgcgtacggttgaagccgcggttcacgagctgggtgaatacctgattggccaggatccggcgcgcatcaacgacctgtggcaggtcatgtaccgggcgggattttaccgtggcggtccgatcctgatgagcgccatcgccggtatcgatcaggcgctgtgggatatcaaaggcaaagtgctgaatgccccggtctggcaattaatgggcggcctggtgcgagacaaaatcaaagcctacagctgggtgggcggtgaccgccctgcggaagtgatcgacggtatccggcagctgcgcaacatcggttttgacaccttcaaactcaacggctgcgaagagatgggcgttatcgacaactcgcgcgcggtagaccgggcggtgaacaccgtggcgcaaatccgcgaggctttcggcaacgagattgagtttggcctggatttccacggccgcgtcagcgcgccaatggccaaagtgctgattaaagagctggagctgtatcgcccgctgtttattgaagagcctgttctggccgagcaggcggaatactatccaaaactggctgaacagacgcacattcccatcgcggcgggggagcgtatgttctcgcgcttcgagtttaagcgcgtgctggaagcgggcggcattgcgatcctgcaaccggacctctcccacgcgggtggcatcaccgaatgctacaaaattgccggcatggcagaagcctacgatgtggcgctggcaccgcactgtccgcttgggccgattgcgctggcagcctgtctgcatgtggacttcgtctcccgtaatgcagtgttccaggaacaaagcatgggcattcactataacaagggcgcggagctgctcgactttgtgaaaaacaaagaagacttcagcatggaaggtggtttctttaaaccgttaacgaagccgggccttggcgtggagatcgacgaagccaaagtcattgagctgagtaaaagtgcgccggactggcgtaacccactgtggcgtcatgaagacggttccgtagccgagtggtaa

SEQ ID NO: 523385 - DNA, 1293 bp, Stenotrophomonas maltophilia
atggatattccagttactgctgcaaaaaccgggcgtcgtcgttacctgacgctgatcatgatctttattaccgtggtcatttgctatgtagaccgcgccaacctcgccgtggcctcggcccatattcaggaagagtttggcatcaccaaagcggaaatgggctacgtcttctcggcgtttgcctggctgtatacgctctgccagatccccggcggctggttccttgaccgcgtggggtcacgtctgacctactttatcgctattttgggctggtccgtggcgaccctgttccagggcttcgccaccgggctgatgtcgctgataggcctgcgcgccatcaccggggtgtttgaagcgcccgcgttcccgaccaacaaccgcatggtgaccagctggttccctgaacacgaacgtgcttccgctgttggtttttacacctccgggcagtttgttggtctggcgtttctgacgccgctgttaatctggatccaggagctgctgagctggcactgggtgttcatcgtcaccggcgggatcggcattatctggtcgttaatctggtttaaggtctatcagccgccgcgtctgaccaaaagcatcaccaaagccgaactggactacatccgcgacggcggcggtctggtggacggcgatgcgccagtgaaaaaagaggcgcgccagccgctgaccagagcggactggaagctggtcttccaccgtaagctggtgggcgtatatctgggccagttcgcggtgacctccacgctgtggttcttcctcacctggttcccgaactatctgacccaggaaaaagggataaccgcgctgaaggcgggctttatgaccaccgtacccttccttgcggcgtttttcggcgtcctgctctcgggctggctggcggataagctggtgaaaaaaggcttctcactgggcgttgcgcgtaaaacgccgattatctgcggactgctgatctctacctgcatcatgggagcgaactacaccaacgatccagtgtggatcatgaccctgatggcggtagcgttcttcgggaacggttttgcctccatcacctggtcgctggtgtcgtccctggcacccatgcggctgattggcctgactggtggcgtattcaacttcgttggcggcctgggcgggatcaccgtgccgctggtcatcggttacctggcgcaggactacggctttggtccggcgctggtgtatatctctgccgtggcgctgatcggcgcgctctcctacatcctgctggtaggtgacgtgaaacgagtaggctaa

SEQ ID NO: 523386 - DNA, 1230 bp, Stenotrophomonas maltophilia
atgaaacaaatcaccttcgcttcccgcaaccaccagctcaccaacatcaacatctggacgccagacagccagtggcttgtctatgatgtccgcccgtccggcgcgtcgtttaccggtaaaaccattgagcgggtcaacgtcggtacgggcgaggttgaggtgatctaccgtgcgactgacggcgcgcatgtcggcgtggtgaccgttcatcctgccggggagaaatatgtttttatccacggcccgaaaaacccggatgcagactggcagtatgattttcaccatcgtcagggagtgattgcgcacaacggccaggtgagcaatcttgatgcgatggatatcaccgcgccttacacggcgggggcgctgcgtggcggcagccacgttcacgtttttagcccgaacgggcagttcgtcagctttacctacaacgaccatgtactgcacgcgcgcgatccgcagctggatttgcgtaacgtcggggtggcggcgccttttggtccggtaaacccacaggggaaccatccgcgggaatatgctggcaccttctggagcgtgctggtaagccggacaacgccgaacccgcaaccgggcagcgatgagatcaaccgcgcctatgaagagggctgggtggacaacgacaggctggcgtttatcggcgatacggtgtctgcgaaaggcgagaaagtgcccgaactgtttattgtggaccttcccaaggacgagcagggctggaaacgggcgggcgatgcgccgttgcaggggacgccggatacaatgcccgcgccgcctgcgggcgtcatgcaacgccgccttaccttcacccatcagaaggcgtatccggggctggtgaacgtgccgcgccactgggtgcgcagcaatccacaggggacgcagattgcgtttttaatgcgggacgataacggcattgtgcagctgtggcttatctcccctgaaggcggtgagccgcgtcagttgacccacgctgagagcgatattcagtcggcctttaactggcatccttccggcaacgggctggggtttgtgcttgcaggccgcattgcctgctgcgatgcgcagaccggagaggtgacgtttttgacatccgatcacggcaatccgccgtctgctgacgctgtggtgttttccccggacggactttttgttgcgtggatggaagagaaggacggtttccgccagctgtggctaacggaaaccgcacagaattag

SEQ ID NO: 523387 - DNA, 330 bp, Stenotrophomonas maltophilia
atgagaaatgttctgattaagctggcgacgttcagcggggttgttttactttgcgggtgttcgagcgtgatgtcgcacaccggcggtaaagaaggaacatatccggggacgcgcgccagtgccgccatgatctctgatgatgagacaaactggggtaccaaatccctggcgattcttgatatgccgtttacggcggttgccgatacgcttctgctgccgtgggatatgttccgcaccgacagctcagtgcgttcgcgcgttgagaaaagcgagcaggagacgctggcgactaactccgtcatcccacccgcagagatgaccccgcgctaa

SEQ ID NO: 523388 - DNA, 411 bp, Stenotrophomonas maltophilia
atgcgtaatttcgatctctctccgctataccgttctgccattggttttgatcgtctgttcaaccacttagaaaacaaccagagccagagcaacggctatcctccttacaacgttgaattggttgacgaaaaccactatcgcattgcgattgctgtcgccggtttcgcagagagcgaactggagatcaccgcgcaggacaatctgctggtggtgaaaggctcccatgcgggcgagcagaaagaacgaacctacctctaccagggcatcgcagagcgcaactttgaacgcaagttccagctggctgagaacatccacgtcaagggcgcgaacctggtgaacggcctgctgtttatcgagctggaacgtgtgattccggaagagaaaaaaccgcgtcgtatcgaaatcaattaa

SEQ ID NO: 523389 - DNA, 429 bp, Stenotrophomonas maltophilia
atgcgtaactatgatttttcccccctgctgcgtcagtggatcggttttgacaaactggctaacgcgctgcaaagcgcaaccgaacagcagacgtttccgccgtacaacatcgaaaaaagcgatgataaccactaccgcatcacgcttgcgctggccgggttccgtcaggaagatctcgacatccagcttgagggtacgcgcctgaccgttaaagggtcaccggaaaaacctgacaccgagaccaaatggttgcatcaggggcttgtcactcagccgtttagcctgagctttaccctggcagaccatatggaagtttctggcgcgacgttcactaacgggctgctgaatattgacctcacccgtaacgtgccggaagctatcgcgccgcagcgcatcgccattagcgacaggccggcgttaaacagttaa

SEQ ID NO: 523390 - DNA, 1662 bp, Stenotrophomonas maltophilia
atgagtgatatcgcgttaaccgtcagcgtgttggcccttgtcgcggtagtggggctatggctggggaatatcaaaatccgcggcgtcgggtttgggattggcggagtgcttttcggcgggatttttgtcggccattttgccgaccagcttgggtgggtgctcagcgccgatatgctgcatttcatccaggagttcggcctgatcctctttgtgtataccatcggtattcaggtggggccgggcttcttcgcttccctgcgcgtctccggtttacgccttaatctctttgccttcggcatcgtcgtgatgggtgggctggtcaccgccattctgcacaaactcttcgctattccgctgcccgtcgtgctgggcatcttctccggcgccgtaaccaatacgcccgcgctcggggcgggccagcaaattctgcgcgatctgggtatccctgctgatgtcgtcgatcagatggggatgagctacgccatggcctatccgtttggcatttgcggtattttgctctccatgtggctggtgcgcgtgctgttccgcattaacgtcgagcaggaggcgaaagagcatgaaagcacgctgaccaacggccatgcgctcattaaaaccatcaacattcgcgtcgaaaaccctaacctgaataatatggcgatacaggatgttcccattctgaacagcgcgaccattatctgttcacgcctgaaacgtgacgacacgctgatggtgccttcacctgacaccctcattcagcacggcgatctcctgcatctggtagggcaaccggcggatttaaacaatgcccggctggtgattggtcaggaggtggatacctcgctctcaacccgtggaacggacatgcgcgtggagcgcgtggtagtgaccaatgagaaggttctgggcaagaaaatacgcgatttgcaggtaaaagagcgttatgacgtggtgatctcccggcttaaccgcgccggtgtcgagctggtggccagccaggatgccagcctgcaattcggtgatattctcaacctcgtcgggcgtccttcatctattgatgccgtagcgaacatggtgggcaacgcccagcaaaaactccagcaggtgcagatgctgccggtctttatcggcgtcgggcttggcgtcatgcttggctccatccccctgtacgtgcccggcttcccggtagcactgaagctggggctggcaggcgggccgctcattatggcgctgatcctcgggcgtatcggctccatcggtaagctctactggtttatgccgccgagcgctaacctggcgctgcgggagttgggcatcgtgctgtttctggcggtggtggggctgaaatccggcggcgattttgtcgatactctggtgaacggcgaagggatgagctgggtaggctacggcgtattcattaccgccatcccgctgataacggtcggattactggcgcgtatgttcgctaaaatgaactatctcacgctgtgcggcatgctggccggttccatgaccgatccgcccgcgctggcgttcgccaataacctgcacgccaccagcggcgcggcggcgttgtcctacgccacggtctatccgctggtgatgtttttgcgcattatcaccccgcaactactggcggtgctgttctgggggatgggctaa

SEQ ID NO: 523391 - DNA, 747 bp, Stenotrophomonas maltophilia
gtgatctacaaatctattgccgacagattgcggctacggctcaattcgtcggactacaacattggcagcccgttacccggcgaaaaagcgctggcaaaggagtttggcgtagcccggatgaccatccgcaaggcgctggatctgctggtaagctgggggctggttgaacgtcgacacggcagcgggacgttcgtggcgcgcaaagacgttcatcatgaaacgactaacctgaccgggctggtggaggtactgcgccagcaggggaaagaagtgcagagcaaggtgttgcagtttgaagtgatgcccgcgccgcccgccatcgccagccagctgcggattcaggttgatgagcggatctatttttcaaggcgggtgcgttacgtggacggaaaaccgctgatgctggaggacagctttatgccggtgaagctgttccgcaatctttccctggcgcatctcgaagggtctaagtttgattacatcgagaaggagtgcgggatcaccattagcggcaactacgagagcctgacgccagtgctggcagataaacagctggccggttatatgaatctgccggaacagacgccgctgctgcgcatcacctctctttcctacagcgacagcggcgagttcctcaactattccgtgatgttccggaacaccagcgattaccaggtggactaccatctgcggcgtatccacccggaagacttattagcccatcccccagaacagcaccgccagtag

SEQ ID NO: 523392 - DNA, 1623 bp, Stenotrophomonas maltophilia
atgctcagtcaaatacaacgttttggcggcgccatgttcaccccggttttactgtttccctttgccgggatcgtggtcgggatcgccatcatgcttcgcaacccgctgtttgtcggcgaagctttaacggcccccgatcatctgttcgcgcagattgttcacatcatcgaagagggcggctgggcggtgttccgcaatatgccgctgatttttgctgtcggcttaccgattggcctggcaaagcaggcgcagggccgcgcctgtctggcggtgctgattagctttctgacctggaactactttatcaacgcgatggggatgacctggggtcacttctttggcgtcgacttctctgttgaacccactgctggcagcgggctggcgatgattgccggaatcaaaacgcttgataccagcatcatcggggcgattatcatttccgggctcgtcaccgccatccacaaccgatttttcgacaagccgttgccggtctttctggggattttccagggcacctcgtttgtcgttatcctcgcgttcttcgtcatgatcccctgcgcctggctgacgctgctggggtggccgaaagtgcagatgggcattgagtccctgcaggcgttcctgcgctctgccggtgcgctcggcgtatgggtttataccttcctggaacgcattctgatcccaaccggattacaccactttgtctacggtccgtttatcttcggcccggcggcggtagaaggcggcattcaggtctactgggcacagcaccttcaggaattcagccagagcactgtgccgctgaaaacgctgttcccggagggcggattcgcgctgcacggcaactctaaggtgtttggctcggtcgggattgcgctggctatctggtataccgcgtcgccggaaaaccgcgtcaaggttgcggggctgctggttccggccacgcttaccgccgtgctggtgggtattaccgaaccgctggagttcaccttcctgtttatctcgccgttgctgtttgccatccacgccgtgttggccgcaacgatggcgacggtgatgtataccttcggggtggtggggaacatggggggcggtctgctggaccagttcctgccgcaaaactggatcccgatgttccataaccacgcctcgacggtattcacccagattggcatcggcctctgcttcaccgctctctatttcgtggtcttcaggacgcttatcgaacgtctgaatctaaaaacgccgggccgggaagagagcgaaatcaagctctacagcaaggccgactataaggcggcgcgcgggcaaaccaccgccccggcagcagccagccagcaggtcggacaggccgctgggttcttacaggcgctcggcggcgcagcaaatatcgaaagtatcaacaactgcgccacccgcctgcgtatcgccctggtggatatgacgaaaacccaaagcgacgacgtcttcaaagccctgggcgcacacggtgtggtgcggcgcggcaacggcatacaggtgattgtcggtctgcacgttcctcaggtgcgcgaccagctggaatcgctgatgaaaacccctttaacaaacgaacaaaccactctgacagaggctatatcatga

SEQ ID NO: 523393 - DNA, 1323 bp, Stenotrophomonas maltophilia
atgaaaaaattctcagttgttattgcaggcggcggcagtacattcacgcctggtatcgtcctgatgctgttagccaaccgtgaccgtttcccgctgcgtgcgctgaagttctatgacaatgacggagcacgtcaggaggttatcgcggaggcgtgcaaaatcatcctcagggagcaggcgcctgagattgaatttagttacaccaccgatccgaaagcagcctttaccgatgtggatttcgtgatggcgcatattcgcgtgggcaaatacccgatgcgtgaaaaagatgaaaaaatcccgctgcgccacggcgtgctgggccaggaaacgtgcgggccgggtggcatctcctacggcatgcgctccatcggcggcgtgcttgagctggtagattatatggaacagtactccccgaaagcgtggatgctgaactactccaacccggcggcgattgtcgcggaagccacgcgccgcctgcgtccgaacgcgaaaatcctcaacatctgcgacatgccgatcggcattgaaggccgtatggcgcaaatcgtcggcctgaaagaccgcaaagagatgcgcgtgcgctactacggtctgaaccacttcggctggtggacgtcgattgaagatctgaacggcaacgatctgatgccgaaactgcgcgaatacgtggcgaaaaacggttatgttccaccttcggaagatgcgcatactgaagcgagctggaacgataccttcgccaaggccaaagacgtacaggcgctggatccggacaccatgccgaacacctacctgaagtattacctgttcccggactatgtggtcgcccattccaacccggagcgtacccgcgccaatgaagtgatggatcaccgtgagaagcatgtattcagttcatgccgggcgattatcgaagccggtcattcttctgccggtgaactggaaatcgacgaacatgcatcgtacatcgtcgatctggcgaccgcgattgcctttaatacccaggaacgcatgttgctgattgtgcctaacaatggggctatccataattttgacgccgacgcgatggtagaaattccgtgtctggtcggccacaacggaccggagccgctgaccgtgggtgatattcctcacttccagaaagggctcatgagccaacaggtggcggtggaaaaactggtggtggacgcctgggagcagcgctcgtatcagaaactctggcaggcgattaccctgtcgaaaaccgtaccgagcgcatcggtggcgaaggcgattctggacgatctgattgaagctaataaggattactggccagagctgcactaa

SEQ ID NO: 523394 - DNA, 348 bp, Stenotrophomonas maltophilia
atgaacatttcccgcctcggtgaagcgccggactaccgcttctcactggctaacgaacgcacgttcttagcgtggatccgcaccgccctgggctttctggccgcaggcgtcggccttgatcagctcgcccccgattttgccactccgttgattcgcgaagtgctggccctgctgctgtgcctgattgccggcgtgctggcgatttatggctatctgcgctggctgagaaatgaaaaggcgatgcgtctgaagcaggatctcccctacacgcgcggtttgctcatcatcagtacgattttgctgatggttgcgggcgtagtgatgttactggtgctgtatgccggatag

SEQ ID NO: 523395 - DNA, 348 bp, Stenotrophomonas maltophilia
atgccggatagccgcaaagcgcggcgggaagcggaccccgggcttcagccggagcgaacctcgctggcctggctgcgcacgctgctggggtatggtgcgttgatcgcgcttgccattaagcacaactggcaccgcacgggggcgccattctggatctccattgttgtgctggcgctggtagccatcattttatggcgctacacccgcagccgtaacctgatggacgtggcgcagagcgactttgtacagccgaaggcggtgcgggataaattccttatcgccctggccgtgctgtcgctgtcactgctgtttgcggtcacccacattcaacaaattttgcacctgtag

SEQ ID NO: 523396 - DNA, 1287 bp, Stenotrophomonas maltophilia
atgaaaacgactgacctgaccggcctcattgaccggtttccgctgctggcggatttgattgccctgaaagagatcacctggcttaatccgaacaccacgacgctggcggaagggttgccatatgtcgggctgaccaaagccgacgtggacgacgcgcatgcgcgcctgaaacgcttcgcgccgtatctggcgaaagccttcccggaaacggcggcaacgggcgggattatcgaatccgaactggtcgcgatcccggcgatgaaaacgcgtctggaacaggagtttggcacaacgatccccggcacgctgctgctgaaaaaagacagccatctgccgatttccggctccattaaagcgcgcggcggtatctatgaggtgctggcccatgcggaaaaactggcgctggcctctggtttactcaagctggatgacgattacagtatcctgctggagccacgctttaaagccttcttcagccagtacagcatcgcggtgggttcaaccggcaacctgggggtgtccatcggcattatgagcgcgcgcatcggctttaaggtcacggtgcatatgtccgccgacgcccgcgagtggaagaaagccaaactgcgcagccacggcgcgatcgtcgtggaatatgagcaggattatggcgtggccgtggagcaagggcgcaaagcggcggaaagcgatccaaactgtttctttattgacgatgagaactcacgcacgctgttcctgggctatgcagttgcaggtgagcgcctgaaagcgcagtttgccgcgcaggggcacatggtggacgctgcacatcctctgaacgtttatctgccgtgcggcgtcggcggcgggcctggcggcgtagcgtttggcctgaagctggcctttggcgataacgtccactgtttcttcgccgagcccacgcactccccgtgcatgctgctgggcgtttacaccgggctgcacgatgaaatcgcggtgcaggatctgggtattgataacgtgacggcggcggacggtctggcggtaggtcgcgcgtctggcttcgtgggccgcgcgatggagcgtctgcttgacgggttctataccctctccgatcaaagcatgtacgacctgctcggctggctggcgcaggaagaaggcatttgtctggagccgtcggcgctggcggggatggccgggccggtacgcataacggcgaatgctaacactacacatctggtctgggcgaccggcggcggcatggtgccggaagacgagatggcgaaatatttagcgaaagggaagtaa

SEQ ID NO: 523397 - DNA, 1113 bp, Stenotrophomonas maltophilia
gtgttaaagccgttaattgtcaccgtgttagcgctcgcttccggctgggcctgtgccgctgagccacccctgacggctgcccgttacgcgcagatgttgggcgtcggaatggatgtcgactgggcccgcaccgagcgcggtatccgcgaattcgacccgctggtggtccgtgatttccaggcgaaaggcatacatcatatccgtattcgggtggcgggcgaaccgacggaagcgcggctgattcacctgcgtaagctggtggaggcttgcgagcaatacggcgtcatccccatcatcgcctatcaggccgatgaatataaaaacgatccgaaagcggataccgaaaaagcggtgatcaactggtggattgccgtggcgcactattttggtcagcgctcgccgttgctagggtttgacctgatctacgaaccggcggacaagctcaaccacaacgttgcttcgctcaaccgggtgtatgagaaagcgatcaaagacatccacgtcattgatgccagccgcatgatttttatcgcccctcgtctgcgcgccgcgccggaggatttatccagcctgaagctgcccgcacacagccagaattacctgctggcggaatggcatattttcccctggggtccgctgaaaacgaacggcagatacccgtggacgtccggaaccgcggctgagaaagcggctatccgtaaccgaatcaatgccgcgctgcactggcagcaaaaaaccgggcacgttagctgggtcgggggctggggcgtgggggagtcaaaccacctcacgccaaccgcttcgcaaatggccttcgccaactttatggcctgcgagctgcaaaaggcgaaaatcccgtatgcgcttaacgcggacttccagttttacgacggggaagagggcgcctggcggcctgcgccagagccgttattacaggcgatgattgcgcccgtgtgtgaaaagcccggcgagaagccgggccatcatgcggttaaaccggctgttcgtgatgcgggacgcgcgacgccagcggcagccagcacagcaaaatcagcagccccatcagggtcatcagcaggcccaaactcgcctgcccggtctgcggcatcatag

SEQ ID NO: 523398 - DNA, 1185 bp, Stenotrophomonas maltophilia
atgaaaaagcaacggaacgtgaacttattgttgatgctggtgttactggtggccgtcgggcagatggcgcaaaccatctacattccggcgattgccgatatggcaaaagatctgagcgtccgcgaaggtgcggtacagagcgtgatggcagcctacctgctgacctatggcgtttcacagctggtttatggtcccctgtccgatcgcgtcgggcgtcgtccggtcattctggtgggcatgagcattttcatggtggcgacggtgattgccattactacgcatagcctgaccgtcctgattgccgccagcgccctccagggcgtgggcaccggcgtcggcggggtcatggcgcgtaccctgccgcgtgatatgtaccagggcacccaacttcgccacgccaacagtctgttaaatatgggcattctggtcagcccgctgctcgccccgctgattgggggtctgctggacaccgtctggtcctggcgcgcctgttacgcctttctgctggtgctgtgcattattgtcaccttcagcatggcgcgctggatgccggaaacacgtccgcaggacgcgccgcgcacgaagctcatcgccagctacaaaacgctgttcggtaatgggtcgtttacctgttatctgttgatgctaatcggcggtctggcgggcattgcggtgtttgaagcctgttccggcgtgctgctgggcgcaggccttggcctgagcagcatggtggtgagcattttgtttattctgccgatcccggcggcgttcttcggcgcatggttcgccggacgtccgaacaaacgcttctctacgctgatgtggcagtcggtgatcagctgtctgctggccgggctgatgatgtggatcccggggctgtttgacgtgatgtcggtctggacgttgctcatcccggcggcgctgttcttcttcggcgcaggcatgctgttcccgctcgccaccagcggcgcaatggagccgttcccgttcctcgcgggcaccgctggtgccctggtcggcggtttacagaatatcggttccggcgcgctggcctggctttcggctatgatgccgcagaccgggcaggcgagtttgggcctgctgatgaccctgatggggctgctgattttgctgtgctggctgccgctggcgtcgcgcgtcccgcatcacgaacagccggtttaa

SEQ ID NO: 523399 - DNA, 834 bp, Stenotrophomonas maltophilia
atgtccatcaccgttttctgcattttactgttcgccgcactgctgcatgccagctggaacgccatcgttaaagccggaacggacaagctctactcggcgatcggggtcagcggttcagccgcgcttattgcgctgattttactccccttctcgccccagccgactgccgcaagctggccatatttgttcgtctcctgtgcgttacaggtggtgtatacggtactggtggcaaaaacctatcaggtctccgacatgagccagacctatccgctgatgcgcggtaccgccccgctgctggtggcgctgatcagtgtgctggcgcttggcgaccacctctcctggcttgcctggtccggtatcggcgtcatttgcctgtcaattctggccatggcgatgaatggccgcatgcagtcgcgcaaggggatctggctggcgctgctgaacgcctgttttatcgccgggtatacgctggtggacggcaccggcgtgcggttatcagactcggcgctgggctacacgctctggaccttcttcatgaacggcttctgcctgctgagctgggcgatggtagcccgccgccgcgaagcgtcagcctatctgcgcttgcactggaaaaaagggctgctcggcggcgtcgggacgatgggatcttacggtctggcactctgggcgatgacccaggcgccgctggcggtggtcgccgcactacgtgaaacctctattctcttcggcgcattcatcgcatttgtgcttttaaaagagaaggttgtgggcctgcgcatcgcggcggcgctgggtattgcagccggtgcggtcctgctgcgcctggcgtaa

SEQ ID NO: 523400 - DNA, 447 bp, Stenotrophomonas maltophilia
atgtcgcgtctgttaattgagcctgttacgcctgatgaaccgggctatatcgccctgaaggccgagagtatcgcgttaaatttcaatatgctgcgcaggctggaagagaactggcagcgcggtgagaatcgctttaacgcgccgggtgaaaagctgctgggtgcgtttcttaacggcaggctggtgggcgtgtgcggtctaaatcgcgatccattcagccagcagccgcgcgccggacgtattcgtcatctctacgtcagcgaaaagtgccgtgggctggggattggaaaacaacttttgaccgtggtgatggcggatgccagcatctggtttgattttcttaatacccatgcgccggaaaccgcgtacggattttatcatcgggcgggcttcaggttggtgtcagacgagccccgggtgacgcaccgccttttttgcgcagtgtaa

SEQ ID NO: 523401 - DNA, 315 bp, Stenotrophomonas maltophilia; identical to SEQ ID NO: 116911

SEQ ID NO: 523402 - DNA, 420 bp, Stenotrophomonas maltophilia
atgatgatcgtcgctgatgcaatgaaagctacgcacgcccttgttgcggccgttcctttactgggtgaacagccgagcgagaaagattataaggatgcgcttgagctggttgagtatctccttatgaacgagcccaatagccccttgctggatattgtttgcgccagaattagccattacgaagctaatcggccagagatagtcgcattacgcaaggagatggagtctgttcccgtcggaattgcagttttgagaaccttgatggatcaatacaatctgacgatatcggattttaaggatgaaattggtagtaaatcgatggtttcacgggttctgaatggtcagagacagcttactctgaaccatattaaaaagctggcggtcagatttggggtatcacctgcgctatttattgagtga

SEQ ID NO: 523403 - DNA, 1689 bp, Stenotrophomonas maltophilia
atggcaagttcgggcacaacatccacaaaaacgcgtttcaccggcgcgcagctgattgttcatttactggaacgacagggcatcaccaccgttgcgggcatcccgggtgggaccgtgctgccgctgtatgatgcgttaagccaaagcacacagatccgccacgtgctggcgcgccacgagcagggcgcaggctttatcgctcagggcatggcgcgtacccagggtaaaccggcggtctgtatggcctgcagcgggccgggcgccactaacctggtgaccgccatcgccgatgcgcgcctcgactccattccgctgatctgcattaccggccaggtgccgtcctcgatgatcggtaccgatgcgttccaggaagtggacacctacggcatctctatccccatcaccaaacataactatttagttcgcgatatcagcgagctgcctcaggtgatcagcgatgcgtttcgcattgcccagtctggccgcccgggtccggtgtggatagacattcctaaggatgtccagaccgcagatattgagatcgacgtgctgccggagccgggcgagcgtgccccggcgccggaattcagcgctgagagcgtgcgcgatgccgccgccatgattaacgcggcgaaacgcccggtgctctatctgggcggcggggcgatcaacgccgcggatgaaatccgtcagttcgctgaaaaagccagcctgcctaccaccatgaccctgatggcgctcggcatgctgccaaaagcgcacccattgtctttagggatgctgggcatgcacggcgcgcgcagcaccaactacatcctgcaagaggcggatttgctgattgttatgggggcgcgttttgatgaccgggcgattggcaaaaccgaggagttctgcccgaacgccaaaatcattcatgtggatatcgaccgcgccgagctgggtaaaatcaagcagccgcacgtggcgattcagggcgacgttaccgaggtgctggcacagctgatcccacagacggaggcaaacgaccgcgccgactggcgccagctggtagccgatctgcaacgcgagttcccgggcgctatcccaaccgagggcgacccgctgagccactatggtcttatcaacgccgttgcggcctgcgtggatgacagcgcgattatcactaccgacgtcggccagcatcagatgtggaccgcacaggcgtatccgcttaaccgcccgcgccagtggctgacctccggcggccttggcaccatgggcttcggcctgccagcagcggttggcgcggcgctcgccaacccggaccgtaaggtgatctgcttctccggtgacggcagcctgatgatgaacattcaggagatggcgacggcagccgaaaaccagttagacgtcaaaatcattctgatgaacaacgaggcgctgggcctggtacaccagcagcagagcctgttctacaagcagggcgtgtttgcggcgacctatccggggatgatcaacttcatgcagattgccgctggttttggcctgcacacctgcgatctgaacgccgaagaagatgcccacgcggcgttgcaggatgcgatttctcgccctggcccggcgctgatccacgtgcgtatcgacgcgcaacaaaaagtgtatccgatggtgccgccgggtgcggccaatactgagatggtgggggaataa

SEQ ID NO: 523404 - DNA, 288 bp, Stenotrophomonas maltophilia
atgcagaaacaacatgataacgtcattctggaactcaccgtccgcaaccaccctggcgtcatgacccacgtctgcgggctgtttgcccgacgggcgtttaacgtggaaggcattctgtgcctgccgattcagggcagcgagcacagccgcatctggctactggtgaacgacgaccagcgtctggagcagatgatggcgcagatcgacaagctggaagatgtcaccaaagtggcacgcaaccagtccgatcccaccatgtttaacaaaattgcggtgtttttcgagtaa

SEQ ID NO: 523405 - DNA, 594 bp, Stenotrophomonas maltophilia
atgaccaccatcgcccttatcgacgaccaccttatcgtccgctccggctttgcccagcttttaaacctcgaaccggattttcaggtcgtggccgagtttggctccggtcgcgaggcgctggcgggcctgccgggacgcggggtgcaggtctgtatctgcgacatctcaatgccggatctctccgggctggagctgttaagccagctgccgaaagggatggcgaccattatgctctcggtccacgacagcccggcgctggtcgagcaggcgctcaacgcgggcgcgcgcggcttcctctctaaacgctgtagccccgacgagctgattgccgccgtgcgcaccgtatccaccggcggctgctacctgacgcccgatatcgccatcaagctggcggcgggacggcaggatccgctcaccagacgcgagcgtcaggtggcagagaaacttgcccagggcatgtcggtgaaagagattgccgcggagctggatctgtccccgaaaaccgtgcatgttcatcgcgccaacctgatggaaaaactcaacgtcagtaacgatgtcgagctggcgcgccgtatgtttgacagctggcaatga

SEQ ID NO: 523406 - DNA, 1506 bp, Stenotrophomonas maltophilia
atgagtcccgttttttcacggctgatcgccgtcgtcgccagcttttttatcttctccgccgcatggttctgcctgtggagcatcagcctgcatctggtggaacgcccggagctggcggtgctgcttttcccctttggcctgcgtctgggactgatgcttcagtgcccgcgcggatactggcccgttttgctcggtgcagagtggctgatgctgatctggctggcgcaggaagtggcgctggcgcatctgcctttattgatgaccggaagcctgctcacgcttatcccggtcgccctgatttcccgctaccgtcaccagcgcgactggcgcacgctgctgcgccagggggcggcgctgattgccgccgcgctgctgcagtccctgccgtgggttggcgacaaggagatgctcaacgcgctgctgctcaccctcaccggcggcctgacgctggcgccgacctgtctggttttctggcactatctctccagtaccgtctggcagccgcttggtccggggctcgtgtcccaaccggtgaactggcgcgcccggcatctcatctggtatctgctgctgttcgtggtgagcctctggcttcagctcggtctgcccgccgagctttcacgcttcacgccgttttgcctggcgctgccgattatcgccctggcctggcactacggctggcagggggcgctgatcgcgaccctgatgaacgccatcgcgctgatcgccagccagacctggcacgaccatccggtggatctgctgctctcgctgctggcccagagcctgaccgggctgctgctgggggcgggcattcagcgcctgcgcgagctgaaccagtccctgcaaaccgagctggcgcgcaaccgccgtctggcggagcgtctgctggagacggaagagagcgtgcggcaggaagttgcccgcgagctgcacgacgacatcggccagaccattaccgccatccgcacccaggcgggcattgttcagcgcctggcggcagaaaacgcgggcgtgaagcagggcggggcgcatatcgaacagctttcgctgggagtctatgactccgttcgtcgcctgttagggcggctgcgcccgcgccagcttgacgatctctcgctggagcaggcgatacgctctctgatgcgcgagatggagctggaaagccgcggcattgtcagccatctcgactggcgaattaacgaatctgccctgagcgaaggccagcgcgtaaccctgttccgcgtctgtcaggaggggctgaacaatatcgtcaagcacgccagtgccagcgcggtcacgatccagggctggcagcaggacgagcgcctgatgctggtgattgaagacgacggctgcggcctgccgccgggctccgggcagcagggctttggcctggcgggcatgcgcgagcgcgtgaaggcgctgggcggcacgctgagcctctcctgcacccacgggacgcgcgtcagcgtcagcctgccgctacggagttatcatgtttaa

SEQ ID NO: 523407 - DNA, 1311 bp, Stenotrophomonas maltophilia
atgtttaaaacccctgccagcgtcgcgccgattggcgacaaagcggaaatcgacgcccgctaccgctactggcgtcgccatattctgatcgccatctggctcggctacgcgctgttctacttcacccgcaaaagcttcaacgccgccgcgccggaaattctcgccagcggcgtgatgacgcgcaccgatatcggcctgctggcgacgctgttttacatcacctacggtctgtcgaagttcttctccggcatcgtcagcgaccgctccaatgcgcgctatttcatgggcgttgggctgatcgccaccggcgtggtgaacatcctgtttggcttctccacctcgctctgggccttcgccctgctgtgggcgctgaacgccttcttccagggctggggcgcgccggtctgcgcccgcctgctcaccgcctggtactcacgcaacgagcgcggcggctggtgggcgatatggaataccgcgcataacgtcggcggggcgctgatcccgatggtggtgggggctgccgcgctgcactacggctggcgcgcggggatgatgattgcgggtggcctggcgattgttgccgggctgttcctctgctggcgtctgcgcgacaggccgcaaaccgtcggccttccaccagtgggcgactggcggcacgacgagatggagatcgcccagcagcaggagggggccgggctgtcccgccagcagatcctcaccaaatacgtgctgaaaaacccctacatctggctgctgtcgctctgctacgtgctggtctacgtggtgcgcgcggccatcaacgactggggcaacctgtacatgtccgagacgctcggtgtggatctggtgaccgccaactcggcagtgaccatgtttgaactgggcgggtttatcggcgcgctggtggcgggctggggctcggacaagctcttcaacggcaaccgcgggccgatgaacctgattttcgccgccggaattttgctctccgtcggctcgctgtggctgatgccgttcgccagctacgtgatgcaggcggcgtgcttcttcaccatcggttttttcgtctttggcccgcagatgctgatcggcatggcggcggcagagtgctcccacaaagaggcggcaggcgcggcgacgggctttgtcgggctgtttgcctacctcggcgcatcgctctccggctggccgctggcgcgggtgatcgacatctggcactggagcgggttcttcgcggtgatcgccatcgcggcgggcatctccgccctgctgttgctgccgtttttgcacgcgcaggcaccgcgcgaagcgtga

SEQ ID NO: 523408 - DNA, 1392 bp, Stenotrophomonas maltophilia
atgctggccttcttaaatcaggtgcgcaagccgaccctggatctgccgctcgatgtgcggcgcaaaatgtggttcaaaccgttcatgcagtcctatctggtggtcttcatcggctacctgaccatgtacctgatccgcaaaaactttaacatcgcgcagaacgacatgatctccacctacgggctgagcatgacgcagttggggatgattggcctgggcttctccatcacctatggcgtgggtaaaaccgtcgtttcctactatgcggacggcaaaaacaccaagcagttcctgccgtttatgctgatcctctctgccatctgtatgctcggcttcagcgccagcatgggtgcgggctccgtcagcctgttcctgatgatcgccttttacgccctgagcggtttcttccagagcaccggcgggtcgtgcagctactccaccatcaccaaatggacgccgcgccgcaagcgggggtcgtacctcggcatgtggaatatctcccacaacctcggcggagctggtgcggcaggcgtggcgctgttcggcgcgaactacctgttcgacggccacgtcatcggcatgtttatcttcccgtcgattattgccctgattgttggctttatcggcctgcgctacggcagcgattccccggagtcgtacggcctcggcaaagccgaagagctgttcggggaagagatcagcgaagaggacaaagagaccgaagaaaacgagatgtccaaatggcagatctttgttgagtacgtgctgaaaaacaaagtgatttggctgctctgtttctcgaacatcttcctgtacgtggtgcgtatcggcattgaccagtggtccacagtgtatgccttccaggagctgaagctttctaaagaagtggcgattcagggcttcaccctgtttgaagtgggcgcgctggtcggcacgctgctgtggggatggctctccgacctcgccaatggccgccgcgcgctggtggcctgcgtcgcgctggcgttgattatcgccacccttggcgtctaccagcacgccagcaaccagtacatttacctggcgtccctgttcgcgctcggcttcctggtgtttggtccgcaattactgatcggtgtggcggcagtgggcttcgtcccgaaaaaagcgatcggcgccgccgatgggattaagggcaccttcgcctacctgatcggcgacagcttcgccaagctgggtctggggatgatcgccgacggcacgccgattttcggccttaccggctgggcgggcaccttcgccgcgctggatgccgctgcgattggctgtatcgtcctgatggcgatggttgcggtgctggaagagcgtaagatccgccgtgagaatcgtgcgcagaaattaaaagtagcctga

SEQ ID NO: 523409 - DNA, 1005 bp, Stenotrophomonas maltophilia
atgttaacccgacgattgtcctgcctggcgctgctgatagcgctggcgtcccccgcaatggccgcagatgcccccacctacggcgagaagctggaaggttttgactacggctggccggtaaaacactttacctttacctcgcagaaccagcctctggatatggcttacctggacgtgaaaccggaaaaacccaacggccgcaccgtggtgctgatgcacggcaaaaacttctgtgctggcacctgggacggcactatccgcgcgctgtcggccggtgggtatcgcgtgatcgcccctgaccagattggtttttgtaaatccaccaagccggagcattaccagtacaccttccagcagctggcggataacacccacgcgctgctgaaaacgctgggcgtcgagcgcgtgacggttataggacattcgaccggcggcatgctggcaacccgctatgcgttgatgtggccgcagcaggtggagcagctggtgatggtgaacccgattggtctggaagactggaaagcgcgcggcgtgccgcatattacggtcgaccagtggtaccagcgcgagctgaaagttagcgccgacggtattcgtcagtacgagaaaaacacctactacgccggggagtggaaaccggagtacgagcgctgggtcactatgctcgccgggctgaacaacgggccgggcaaagctcgcgtggcgtggaactcggcgctgctctacgacatgatttatacccagccggttgtctatgaatttagcgagctgaagatgccggtattattgatgatcggcacgaaggacaataccgccatcgggaaagatctcgccccaccggagatccgcaagacgctcggcaattacgcggtgctgggcaaagagacggcgaagcgcattccgcacgcgacgctggtcgagtttaacgacatgggccacgcgccgcagatgcaggatcctgaacgtttccacgacgcgctgctgaaagggcttcaggcgcgctga

SEQ ID NO: 523410 - DNA, 453 bp, Stenotrophomonas maltophilia
atggtctggataatgctggcaacgcttgccgtggtatttgtggttggatttcgtgtcctgacctcagactcccgccgcgccatcaaacgtttaagcgagcggctgggcatcaccctgatgccagtcgagtcgatgatcgatcagttcggtaaaacgccgggcaatgagtttatccgctaccttgagcgccccgacgaggcacatctgcaaaatgcggcgcaggtgctgctcatctggcaggtctgcattgtcgacggcagtgaagagaatttgcatacctggcaccgtatgctgcgtaaagcccgccttgccgcacccattaccgatgcgcaaattcgactggcacttggctttatgcgcgaaatggagcccgatccgcaggagctgaacgccttccagctgcgctataaccagctatttctgccggaagaaggtgtgttttatctgcactga

SEQ ID NO: 523411 - DNA, 1191 bp, Stenotrophomonas maltophilia
atgacagaacatatccagcccacgactccgccgcaggccaaagaggtgtctcgccccaactggtcggcggttttctccgtggcgttctgcgtcgcctgcctgatcaccgttgagtttctgccggtcagcctgctgacgccgatggcgcaggatctgggcatttccgagggcgttgccgggcagtccgtgaccgtcaccgcctttgtggcgatgttcgccagcctgtttatcacccaggcgattggcaccattgaccgtcgtaaagtggtcattctgttcagcgtgctgctgacgctctcctgcctgctggtctctttcgctgaaagcttcaccctgctgctgctgggtcgcgcctgcctggggctggggttaggcggcttctgggcgatgtcggcctcgctgaccatgcgcctggtgcccgcgcgcaccgtgccaaaagcgctgtccgttatcttcggcgcggtctctattgcgctggtgattgccgcgccgctgggcagcttccttggtgggattatcggctggcgtaacgtctttaacgcggcggcagtgatgggcgtgctgtgcattatctgggtgtggaaagcgctaccgtctctgccgggtgaagcggcgcaccacaaacagaacatgttcgcgctgctcaagcgtccgggcgtgctggcggggatgaccgccatcttcatggcctttgccgggcagtttgccttctttacctatattcgcccggtgtatatgaccatggcgggctttgacgtggatggcctgacgctggtgctgctgagcttcggtatcgccagcttcgtcggcacctcactgtcgtctcagttcctgaaacgctccctgaaggtggcgctggcgggtgcgccgctggtgctggcgatcagtgccgcggtgctggtgctgtggggcagcgacaagtgggtcgcatcggcgattgcgattgtctggggctttgcctttgcgctggtgccggtgggctggtcgacgtggatcacccgctcgcttgccgatcaggcggaaaaagccgggtcgattcaggtggcggtgatccagctggcgaacacctgcggcgcggcggtgggcggcgtagcgctcgaccatctggggctgacgtcaccgctggtgatctccggtacgctgatgctgctgaccgcgctgctggtggcggggaaggttaaggcgaagtaa

SEQ ID NO: 523412 - DNA, 906 bp, Stenotrophomonas maltophilia
atgggttccacacgcaaagggatgctgaacgtcctgattgccgccgttttatggggcagttccggcgtttgtgcgcagtacatcatggagaaaagccacatttcttcgccttacctgaccatggttcgcctgctgtttaccggcgtgatcctgctgacgctctccttcgttcacggcgacaagattttctcggtcatcaaaaaccgcaaggacgccctcagcctgctgtttttctcactggttggcgcgctcaccgtgcagctcaccttcctgctgacgattgaaaaatccaacgccgctacggccaccgtgcttcagttcctgtcgccaaccatcatcgtggcgtggttcgccctggcgcggaaaacgcgtcccggcatatttgtcttatccgcgattttgacatcgcttgtgggtaccttcctgctggtgacccacggcgacccgacgtcgctctccatctcgcctgccgcactgttcttcggtatcgcctcggcgtttgctgcggcgttttacaccacctatccatcaacgcttatcgcccgctacggcacgctgccgattgtcggctggagtatgttgattgcgggactaatgctgacgccgttctacgccggacgcggcaccaccttcgccattgacggcggcctgctgctggcgtttttctacctggtggtgattggcaccgcgctgacgttcagcctgtatctgaagggcgcgcagatgatcggcgggccgaaggcaagcattttgagctgcgccgaacccctgagcagcgcgctgctgtcggtggttttgctgggggtggcattcaccctgccggactggctgggaacgctgctgattgtgtcgtcggtggtgctgatttcgatggattcacgcagaagggttaaggcatcggcgtaa

SEQ ID NO: 523413 - DNA, 1380 bp, Stenotrophomonas maltophilia
atgaatacgattaaaaaacttccattaaccatggcggttatcgccgcgctttgtccaatttccgtgctcgcgcaagaatttacgcaggagcaaattgacgccattgtggcgaaagcggtggataaagccctggccgagcgtcaggcgaaaatggatgcggcggtcgcgaaaaaagcggacgtcatcaccgagccgcagagcgcagcgcaatccccggacatggcgattccgtttggcatcaaatttaccggctacgcccgctacggcgcgcacttccaggccgctgaccagaagtatgtggcggtggacggctcctacaacggcgcgtccgcgattggtcgtctgggtaacgaaggcaacggcggggaattccagctctccaaggccttcaagggtgataacggcgccatctgggacatcaacgtgatgatcgaccactggggcgacgaagttaacctcaaaaaagcttacgccggggtgaccaacattatggcctccaacccgaacgcctacttttgggccggtcgtgacttccaccagcgtccgcagcagggcatcaacgattacttctggatgaaccacgatggccagggcgccggggtgaagaacttcgacatcggcggtgtgcagttcgacgtggctgccgtggcggcggtggaatcctgtagcccggaagtgatggaagatgaagccaacccgtcgcgcatcacctgtaccggcggttccggcacgggcgacaagggcaactacgctgccacctcaaaaatccacggcatgaagctcggcccgatcgacctggagctgtacgccaactacggctttgattcgaaagcggttgaaagcgacgaacgcctgaacgcctggcagggcggcgtggtgctgagccataccaacgacagcggcgtgaacaaggtgatcgcccgctactccgataattcggacaacagcgtgttcaacaaaaccgaagatctgaccacggtctacgccagcttcgaagggctgtataaattcacccaggccacgcaggtggagtacatcctcgccttccacgactatgacaacagccgcgatgacgtcgacaaccgcaagaactacaatgccatcgtgcgcccgatgcactggtggaacgacgttcactccacctggctggaagcgggctggcagcacgttgattacgacaacggcggcgacaacaagggctggaagctgaccctgtcgcagaacatgtctatcgccatggggccggagttccgtccgatgctgcgcttctacgtcaccggcggcaaagtggacaacgaacgcaccgcgcgcgtgaacaacaccaaagatgagacgctggacgacttcaacgtcggcgcgatgtgggaggcgtggttctaa

SEQ ID NO: 523414 - DNA, 306 bp, Stenotrophomonas maltophilia
atgatgatcgcattagaagaagccgtaatggaaattatcgtcaacgccggtcagtcccgcagcctgtgcttcgaagcgctgcatgcggcgcgccagggcaaccttgacgaagccaaaagcctgctgcgtgaagccgatggctacgcgcgccaggcacacaagatgcagaccaaactgatcgagcaggacgcgggcgaagcccgccagccgatgaccttaattatggtgcacgcgcaggatcatttaatgaattcgctattagcgcgtgaattatctgaagagattattcatttatatcagagatag

SEQ ID NO: 523415 - DNA, 1377 bp, Stenotrophomonas maltophilia
atgaaatacgcatttcccgataacttctggtggggcagcgcaagctccgctctccagacggaagggacacgagagggtgaaaccacgtgggactactggttttcccgcgagccgaaccgttttcacaacggcgtgggaccgcagcatacctccacgttttatcagcactggaaaacggacattcagctgttgaagcagctgaaccacaacagctttcgcacctcgattagctgggcgcgcctgatccccgacggtatcggtgaagtgaacccggacgcggtcgatttttataatcaggtcattgatgagctgaatgaacagggcatcacgccgtttatcaccctgttccatttcgacatgccgatggcgatgcaggagatcggcggctgggaaaaccgtgacgtagtggacgcctacgcccgctatgcgcagatctgcttcgagctgtttggcgaccgcgtgctgcactggtttaccttcaacgagccgattgttccggtggaaggcggttatctgtacgatttccattacccgaacgtggtggattttcgtcgggcggccaccgtggcatatcacacggtgctggcccatgcaaaggccgttcaggcttaccgcgccgggcattacgcgggggagatcggcatcgtgctgaacctgacgccgtcatacccgcgttcgcagaacccggcggacgtgaaggcggcgcatatcgcggatctgatgtttaaccgtagcttcctcgacccggtgctgcgcggggagtatccggccgacctggtggcattgctgaaatcttacgatcagctacccgcctgcaagccggaagacggtttcctgattgcggaagggaaaatcgacctgctcggcgttaactactatcaaccgcgccgcgtgaagtgtcgcgacagcgcggtgaacccgcaggcgccgtttatgccggagtggttctttgatagctacgagatgccgggccgcaagatgaatccgtaccgcggctgggaaatttacgagccgggtatttacgatattctggttaacctgcgcgacaattacggtaacccccgctgttttatttctgaaaacgggatgggtgtcgaaaacgagcagcgctttattgaaaacggccagataaacgatcggtaccgcatcgaatttatttctgagcatttagcgtggctgcataaaggtattagcgaaggctgcaattgccttggctaccatatgtggacgtttattgataactggtcgtggtgcaatgcctataaaaaccgctacggttttattcagctcgatttggagacgcagcagcgcaccattaaaaaaagcggagagtggtttgccgctaccgccttaaataattgctttgataaagagtaa

SEQ ID NO: 523416 - DNA, 1326 bp, Stenotrophomonas maltophilia
atgagttcgttatatcaatccatggtcgcggtgattgaacagtcaattacgccgctggccgcgaagctcggtcagcaaaagtatgtgattgccatccgcgacggctttaccgccgcgctgccgtttatgatcatcggctcgtttatgctggtgtttatcttcccgccgttttcggcggataccaccaacagcttcgcccgcggctggctggatttctccgagacctaccgcgaacagctgatgctgccctttaacctcagcatgggcgtcatgaccttcttcatctcggtggggattggggcgagcctggggcgtcagtttaacctcgatccggtgatgtccggtctgctggcctttatggccttcctgctggtcgccgcgccgtatgccgacggcaaaatttcgacgcagtatctgtcgggtcagggcatcttcactgcgcttatcaccgcgatctactccacccgtgtgtacgcgtggctgaagcagaacaacgtcaccatccgcctgccgaaagaggtgccgaccggcgtggcgcgttcgtttgagatcctgatcccggtgatggtggtgattggtaccctgcatccgctgaacctgttcattgaagcgcagaccgggatgatcatcccgcaggcgattatgcacctgctggagccgctggtgtccgcgtctgactcgctgcccgcgattctgctctccgttctgctgtgccagatcttctggtttgccggtatccacgggtcgctgattgtcaccggcatcatgaacccgttctggatggcgaacctctctgcaaaccaggcggcgctggcggcgggcgcggcgctgccgcacgtttatctgcaaggtttctgggatcactacctgctgattggcggggtaggctcgaccctgccgctggcgttcctgctgctgcgcagccgcgccactcacctgcgcaccatcggcaaaatgggcgttgtgccaagcttctttaacatcaacgaaccgattctgttcggcgcgccgatcatcatgaacccgatgctgtttatcccgttcgtgtttgttccgctggtcaacgcctgcctggcgtacggcgcaaccaaactcggctggctggcccaggtggtttcgttaaccccgtggaccacgcccgcgccgattggcgcctcgtgggcggcgaactgggcgctgagcccggtggtgatgtgcctggtctgcatggtgatgtcggcgctgatgtacctgccgttcctgcgcgcctatgagcgtacgctcatcaaaaatgaagagcagaaagcccaggcaaccgtcggcaccgctgaaacagttagcaattaa

SEQ ID NO: 523417 - DNA, 315 bp, Stenotrophomonas maltophilia
atgttcaagattatgctgtgctgctctgccgggatgtccaccagcctgctggtcagcaaaatgatcgatgttgcaaaagaacgggggttgcccgtgaagatagatgcgtatggcgtatccgaatttgatacgcagtttccgcactatcaggtggtgcttctcggaccgcaagtgaaatacatgttaaagacactctcagacaaggcagcgacgcaaggcataccggtgcagcccatcgacatgatggattacggcatgcagcgtggcgataaagtactggactatgctctgtcgctcatcgaagcggcacactaa

SEQ ID NO: 523418 - DNA, 951 bp, Stenotrophomonas maltophilia
atgtctacaatcaacgatgtatcgcgtctggccggggtgtccaaagccacggtatcacgggtgttgagcgggtcgcgtggcgttaaagaagccagtcgacaggctgttctgagagcggtggatgagctgaactatcgtccgaacgtgatcgcccagtcgctgctcagccagtcgacgggctgcattggggtgatttgcgcgcaggagaacattaaccagaccaccggttacctgtacgcgctggaaaaacacctcagccagcatcaaaaacatctgctgctgcgtttcgcacacacgaaaacagaagtgatgaacgcccttgaagaactctcctgcggcttatgtgatgacattctggtgattggcgcgcgtttcccgctagacgtggacatggacaacgtcattctggtcgactgtatggaagccgataacgccaacagcattcagttcgatcacgcgttcgctgctgaaacggcctgcaactatctcaccagccaggggcgtcgccagatagcactgatccacccgcacggcagcggctttgccgatcaggtgctgctgggttacaaacatgcgctggagaaaaacttcctgccctttaatcgcaacctcgtgtttatggacgcgacttcatcgtccgttgcgcttcaggaattactcaacaacgcgtccacgctgaatttcaacgcgctgctggtggcagacgagcaggaagcccagcgggtgatcccgcagttacaggcgtttaataaatcggtaccggaagacatcatggtcttcagcctcggcggttcgctgcatctcccgggtattccggtgatcccggccattgagtattccatggacgccatggcggcgcgcatcgtgagctggctgacggcgaaaacgcagatgctcgggtcctacgtgctgcgcggggatttgattattccggatgtgcggaagcgttaa

SEQ ID NO: 523419 - DNA, 297 bp, Stenotrophomonas maltophilia
atgaaatctgcacacctggtttgcctgctcgtttgcctgattttcgctgcgtttgttcacgcgcaggagaagagcgctccggagaaagaggcccagataaaacagcaggtcctgaaagatgtgaagaaaacctgtaccccgcagaaaaagcagagcgataaggcctggcaggcgatgattttgtcgtctgaggccaatcaactgctgatcaaaaatgccatcaccgccgtgaagcgtgacaacctggacgcctactgggatgcagtaagtcaggtggattgtatggaagattactga

SEQ ID NO: 523420 - DNA, 1365 bp, Stenotrophomonas maltophilia
atgtttcgtgtaactgttttagcgttagcactgctgagcgcaggctgtgtgtcattagatcccacgtatcagcgcccggacgcacccgttccggccacactgcccggcgcgcacggcgaagccaccgccgtggtgagccagtggcagcaggtgatgaatgatgcgcggctgaaaagcgtggtgacgatggcgctcaacagcaaccgcgacgtgcaaaaagcgattgcggatatcgacgccgctcgtgcccagtatggcgaaacgcgatcgtccctgttcccgacggtggacgcggaactgagccacacccgcagccgcacgctggcgagcggcgtcgcgacgagcgacgaagccaacggcacggtctccagcttcgaactggatctgtttggccgcaaccagagcctgtcgcgcgccgcgcgtgaaacctggcttgccagcgagttcaccgcgcagaacacgcgcctgacaatggtcagcgaactgaccacggcctgggtgacgctggcggcggataacagcaatctggcgctggcgaaatccaccctggagagcgccgcgaactcgctcaaaatcgtcaaacgtcagcaggaagtaggtgtggcagcggccacggacgtcagtgaagcgatggcggtttaccagcaggcgcgcgccagcgtggcgagctaccagacgctggtgatgcaggacaaaaacgcccttaacctgctggcgggcgatacggtgcccgagaacctgctgcccggcacgctggagagcctgagcgataacgccatcacgctgatcccggcgggcgtcagctccagcgcgctgctgcgtcgcccggacattcaggaggcggaacataacctgctgagcgctaatgccaacatcggcgcggcacgcgccaacttcttcccgaccatttcactgaccgccagcgcgggcgtcggcagcgattcgctgtcatccctgttcagccacggcatgaaggtctggtcgttcgcgccgtccatcaccctgccgctgtttagcgggggcaacaatatggcgcagctgcgctatgcggaagcggagaagaaggggctaatcgccacctatgagaagaccatccagagcgcgtttaaggacgtggccgacgcgctggcgcggcgcgaaacgttgagcgaacagcttgatgcccagcgtgaatacgtggcggcggagcaaaaaacgctggatgtggcgacgcgcagttacaaggctggcgcgggcgattatctgtcggtgctcaccgcgcagcgatcgctgtggtcagcacaggaatcactgattgccttgcagcaaaccgacctggaaaaccgcatcacgctgtggcaatcgctgggtggaggggttcagtaa

SEQ ID NO: 523421 - DNA, 3111 bp, Stenotrophomonas maltophilia
atgttttcccgtttcttcgtgcgtcgcccggtctttgcctgggttatcgccattctcatcatgctcgccgggatactggcgatccgcacgctgcccgttgcgcagtacccggacgttgccccgccgtcgatcaaaatatccgccacctacaccggcgcctccgcacaaacgctggagaacagcgtgacgcaggtgatcgagcagcagctcaccgggctggataacctgctctacttcacctccaccagcagctcggacgggtcggtgagcattaacgtcacgtttgaacagggaaccgatccggacaccgctcaggtacaggtgcagaacaaagtccagcaggcggaatcacgcctgccgaccgaggtgcagcagtccgggatcaccgtcgaaaaatcccagagcaacttcctgctgatcatgggcgtatatgataaaaccgacaccgccagcagctcggatatcgccgactggctggtgagtaatatgcaggatccgctggcgcgcgtggatggcgtcggcagcctgcaggtgttcggtgcagaatacgcgatgcgcatctggctcgacccggctaagctggcgtcgtactcgctgatgccctccgacgtgcagagcgcgattgaagcgcagaacgtgcaggtctccgccggtaaaatcggcgcgctgccctcgtcgaacgcccaacagctgaccgccaccgtccgcgctcagtcgcgtctgcaaacggtcgatgagttcaaaaaaatcatcgtcaagagccagtccaacggtgcggtggtgcgcatcagcgacgtcgcgcgcgtggagatgggcagcgaagattacaccgccaccgcgaagctgaacggccacccggcggcgggtatggcggtgatgctctcgccgggcgccaacgcgcttaacaccgccacggcggtaaaagacaagatcgccgagttcaaaaagtcgatgccggaaggctacgacgtggcctacccgaaagacagcaccgagttcatcaagatctccgttgaggacgtgattcagaccctgttcgaagccattatcctcgtggtggtggtgatgtacctgtttctgcaaaacatccgcgcgacgctgatcccggcgctggcggtgccggtggtgctgctgggcaccttcggcgtactggcgctgttcggttactccatcaacaccctgacgctgtttgccatggtgctggcgataggacttttggtggatgacgccatcgtggtggtggaaaacgtcgagcgtattatgcgcgacgaagggctgcccgcccgggaagcgaccgaaaaatcgatgggcgaaatttccggcgcgctgatcgccattgcgctggtgctctctgcggtattcctgccgatggccttcttcggcggctctaccggggtcatttaccgtcagttctcggtcaccattatttcggcgatgttcctctccgtggtggtggcgctgaccctgacgcccgcgctgtgcggctcgatcctgaatcacaccgctccgcacaaaaagggcttcttcggcgcgtttaaccgcttctacagtaagaccgagcacggctatcagaataaggttctgcgcgccctgcgccgttccggcggcatgctggtgatcttcgccctgctctgcggcgcgatggggttcgccatgctgaaactgccgggcagcttcctgccaaccgaagaccagggagaaatcatggtgcagtacaccctccctgccggcgcaaccgcggtgcgtaccgcagaggtaagccgccaggtacgcgagtggttcctcaccaaagagaaagccaataccgacgtgatctttaccgttgaaggcttcagcttcagcggcagcggccagaacgccgggatggcgttcgtctccctgaaaaactggtcagagcgtaaaggcgaggaaaacaccgcgcaggccattgccctgcgcgccacgcaggagctgagcgccatccgcgatgccaccatctttgcgatgacaccgccggcagtggacggtctgggccagagcaacggctttacctttgagctgatggcgagcggcggcaccgaccgcgacgcgctgctgaaactgcgtaaccagctgattggcgaagcgaatcaggacagctcgctgcacgccgtgcgcgccaacgatctgccgcagatgccgcagcttcaggtggatatcgataacaacaaagccgtgtcgctggggctctccctgagcgacgtcaccgacaccctgtccagcgcctggggcggcacctacgtgaacgacttcattgaccgtggccgcgtgaaaaaggtctacatccagggcgacagcgactatcgcgcggtaccgtcggatctcaacaaatggtatgtgcgcggcagcgacagcactatgaccccattctccgccttcgccaccacccgctgggagtatggcccggaaagcctggtgcgctacaacggctcggcggcgtatgaaattcagggcgagaacgccagcggcgccagctccggtacggcgatgagcaaaatggagcagctggcgaataacctgccgtccggcagcacctgggcgtggagcggtttgtcgttgcaggaaaaactggcgagcggtcaggcgatgagcctttatgccctctccatcctcgtggtgttcctgtgcctggcggcactgtatgagagctggtcggtgcccatttcggtgatcctcgtgatcccgcttggggtgctgggcgcggccattgccgcctccctgcgcggcctgagcaacgatgtctatttccaggtggcgctgctgaccaccatcggtctgtcgtcgaagaacgccattctgattgtcgagtttgccgaagccaaagtggccgaaggctactccctgacgcgcgccgccctgcgggccgcccagacgcgtctgcgtccgatcatcatgacctcgctggcgtttatcgcaggcgtgacgccgctggcgattgccaccggcgcgggggccaacagccgcgtggcgatcggcaccggcattatcggcgggacgctggccgcgacgctgctggcgatcttcttcgttcctttattctttgtactggtgaaacgtctgttctccggtaagcacgcaaaccggaggtcataa

SEQ ID NO: 523422 - DNA, 1011 bp, Stenotrophomonas maltophilia
atgagccagccggtgtccgtggtcagcgagctgaccggccgcaccgccgccgcgatgagcgccgaagtgcgccctcaggtgggcggcattattcagaaacggctcttcaccgaaggcgatacggtcaaggccgggcaggcgctgtatcagatcgatccttccagctaccgcgccgcttataatgaagctgctgccgcactgaaacaggcgcaggcgctggtgcaggccgactgccagaaagcccggcgctatgcgcagctggtgaaggacgacggtgtatcacgtcaggatgcggaagacgcgaagtccacctgcgcgcaggacaaggccagcgtcgagtcaaagaaagccgcgctggaaagtgcccgcattaacctcaactggaccaccgtcaccgcgccgattgccggacgtatcggcatctcctctgtgacccccggcgcgctggtgaccgcccagcaggataccgcgctggccactattcgcgggctggacagtatgtacgtcgatttaacccgttccagcgccgatctgctgcgattacgcaagcaaaccctcgccagcaacagcgatacgctggacgtgtcgttgatcctcgaagacggcagcagctacagcgaaaaaggccatctggcgttaaccgaagtggcggtggatgagtctaccggctcagtcaccctgcgcgccgtctttccgaacccgcagcatcagcttctgccgggcatgttcgtccgcgcccgagtggatgaaggcatcatgaatgacgcgatcctcgcgccgcagcagggcatcacccgcgacgccaaaggtaccgccaccgcgctggtggtgaacgccagcaacaaggtcgagcagcgtcagctggagacgggcgacacctacggcgataaatggctggtgctgaatggcctgaaggcgggcgataagctgattgtggaaggcaccgacaaagtcaccgccgggcaggaagtgaaagctgaagagatgaaaaccaacggaggaaacgcctga

SEQ ID NO: 523423 - DNA, 570 bp, Stenotrophomonas maltophilia
atgagcacaaagctggaagaacgacaaaaactacggcaggacgaaatcatcaccgccgcgcgccgctgctttcgcgccagtggatttcacgctgccagcatgtcgcagatcgccagcgaagccaggctcagcgtcggacaaatctatcgctatttcagtaacaaagacgcgatcattgaagagatgatccggcgcattatcgactcacgtattgaggagatgcagggcaaaaccctggttgaagggatgccgcaggcgcttgcctggcgccagacgcttaacgaagatgatgacgcgctaatgctcgaaatgtccgcagaggccacacgtaatccgctggtggcaaacatgctgatcgaagccgaagcccgcatgttcgccaacgcctgtgagcacctgaaaaagcagttcccccacctgagcgatgagcatattcgctgctgcgtggagattaccgccgtgatgatcgaaggcacgatttaccgtcgactcacgcctttaaaagtaccgtcagaacaattagagcccatataccagaatattttaaatatgcttttctctgcgaagtaa

SEQ ID NO: 523424 - DNA, 420 bp, Stenotrophomonas maltophilia
atgcatctgagcattacagataaagtcacggctgaagaaaaagaagaattattaacggggctaagagcctataacgcgcagtatttagatctggcgacgtttagtggcgatattggcgtatatgtgcgagacgacaacggcgtcatgctgggcgggttaatcggcgtacgtaaaggcgactggctgaatatcgactttctgtgggtcagcgacagggtgcggggaacgggcgtcggcagccagctgatcaaaacggctgaagaggaggcccgtcgtaaagggtgtcgtcacgcgctggtggatacggtcagcttccaggcgcgtccgttctatgaaaaacagggttatcaggtgcagatgtccttacaggattacccttatcagggaatgcagagacactatctgaccagggatctttaa

SEQ ID NO: 523425 - DNA, 648 bp, Stenotrophomonas maltophilia
atgtcagcacaaaaggacaattctgaaccccgccgccccggtcggccacgcggcggcaagcgcgttaccgccagccgtgaacagctgctggatatcgccctgaatctcttttcccgccaggggatcgccaatacgtcgttgaacgctattgcccgcgaagcaggcgtgacgcccgccatgctgcactactacttcaactccagagaacagttgctggatgcgatgattgaggagcgcttcctgccgttacgcgagcggatcggggcgattttcgccgacaaccgggattcgccggtggatgccctgacggaaatggtcagggtgctggccgaactggcggaaaagtatcgctggtttgccccgctgtggatgcaggaggtgatcggcgagatgccggtactgcgtacgcatttgcaggagcgctttggcgatgagaaatatcacaccacgctggcaaccatcaaaggctggcagcaggaaggaaagctgaatccggcgctggcccccgaactgctgttcactacgctgctgagcctggtgctggtgccgttctctcgcatgcgcaatgacgagaggcttaatgccctctcgccggagatcgttgtgcgccacgtgttagccgtgatcggcaccgggatcggcggttaa

SEQ ID NO: 523426 - DNA, 1485 bp, Stenotrophomonas maltophilia
atgactcaacctgcgaaaaaggtgccgtcgattaagctgctgttcagcgcactcctgctggtgatgctgctctcggcgctggatcagaccattgtctccaccgcgctgccgaccatcgtcggtgagctgggcgggctggataagctctcctgggtggtgacagcctatatcctcagttcgaccatcgtggtgccgctgtatggcaaattcggcgatctgtttggccgtaaaatcgtcctgcaaatcgcaatagtgcttttcctggtgggctctgcgctgtgtggcctggcgcagaacatgacccagctggtgctgatgcgcgccctgcaagggctggggggcggcggcctgatggtgatcagcatggccgccgtggcggacgtgatcccgcctgccgatcggggtcgctatcaggggctgtttggcggcgtgtttggcctggcgacggtgataggcccgctgatcggcgggtttatcgttcagcatgcatcctggcgctggattttctacatcaacctgccgctggggctgtttgcgctgctggtgattggcgcggtattccacggcagcgcgcggcgcagcaagcatgagattgattacctgggggcgatttacctcagcatggcgctgctgtgcatcattctgtttaccaccgagggcggtacgatccgccaatggaacgacccgcagctgtggtgcattctggccttcggcctgacggggatcgccgggtttatttacgaagagcggctggcgtgggagccgattatcccgctgtcgctcttccgcgaccgcagcttcctgctctgtagcctgattggctttatcatcggcatgtccctgtttggctcggtaacgttcctgccgctctatttacaggtggtgaaagacgccacgccaacgcaggccggcttgcagctgatccccctgatgggcgggctgttgctcacctccatcatcagcgggcgcatcatcagccgcaccgggaaataccgtctgttcccgatcctcggcacgctgctcggcgtggtggggatggtgttactgacgcgcatttcaatcacctccccaacctggcagctgtacctgtttaccggcgtgctgggcatggggctgggactggtgatgcaggtgctggtgctggcggtgcagaacagcgtgtcagccgatcaatacggcgtagcgacctctggggtgacgctgttccgttccattggcggggcgattggcgttgcgctgtttggcgcggtgttcacccatattctgcaatcagggctgatcgacaggctgccggaaggggcggaactgccgcgcgaacttaatcccgttgccattcaccatctgcctgatgccctgcgtctggactatctggatgcgttcggctcggctatccatgcggtgtttatgctggcggcggggattatggtgctggcgtttgtgctgtcgtggtttttgcgcgaagcgccgctgcgtcggcaggcgtga

SEQ ID NO: 523427 - DNA, 801 bp, Stenotrophomonas maltophilia
gtgaaatttcagttgagtgctctggtgctcgcggccctgctgctggcaggttgcgatcaaggcggcaatgatgccagacacattaaagtcggcgtgattaatggcgctgagcaggacgtggcggaagtcgccaaaaaggtggcaaaagagaaatacggtctggatgttgagctggtgggctttagcggctcgctgctacccaacgatgccaccaaccagggcgaactggacgccaacgtcttccagcatcgcccgttccttgcacaagataacaaggcgcacaattacacgctggtcgccgtggccaataccttcgtcttcccgatggcgggttactcccgaaagattaaatcggtgtctgagctgaaggatggcgcaaccattgcgattccaaacgatcccaccaacctcggccgcgcgctgttgctgctgcaaaaagagaagctgattacccttaaaccagatgttggcctgctgccaacggcgctggatattaccgcgaacccgaaaaacgtacagattatggagctggaaggggcgcagctgccgcgcgtgctggacgatccgaaagtggatgtggccatcatcagtaccacctatcttcagcaaacggggctgtctccggtacatgacagcgtctttattgaggacaaaaactcgccttacgtgaatatagtggtcacgcgagaagacaacaaagacgccgaaaacgtgaaggaatttatccagtcctatcagtcgccggaagtggcgaaagcggcagagaccatttttaacggcggtgcggtgccgggctggtag

SEQ ID NO: 523428 - DNA, 363 bp, Stenotrophomonas maltophilia
  misc_feature (305)..(314): n is a, c, g, or t
atgtataccgttcttccctctcccctgttgcaacgtatctcagggctgcgattccagccgcttgtcgatcttcattcgggccagatgttcgcgcatgaagttctcgtggagatccataacgtcaatctggagatattatttgcttctctgccttcgcgcagcgcgctgcaaatcttcttctggcaggccaacaccctgttacagatacccgcccgggacgcttactggctaaaccttccggcagagcaccttctcgacgaacgcgctatccggttgttgctggcgttacgccatcagcagcggtnnnnnnnnnnctatccggttgttgctggcgctacgccatcagcagcggttaacgattga

SEQ ID NO: 523429 - DNA, 621 bp, Stenotrophomonas maltophilia
atgcaaaataaaaaaacaattcacgttgccgttgttgacagctgcgaattcacgatgattggcctgcaatcgctcggaaagcgtgagcctgatgaaaaacacgacgttattttccatgggtttacccatatcgaagaacttgctatgagtgaacaactctttgatatcatcatttatgatccgttgaatacgcgtcatttccgggtgacgacgaatgacgacattctctgtattaaacagaaacaagtgacggcgaagatctatatctattcgttatccgctggctatttgaaattcaaacatgttgatggagtaatcagcaaaagagtctccctgggggatatcaaagcgctgtggcaaatactgatgagccagacgccgcaagagtctggtcgttacaacgtaggcatgactacccgcttacgcaccccggcgaggctgtccagcgaggaggccagcgtattgcgcggctattcctgtaatctcaaaaccaagcaaatcgcccgtcagctggggtgtaacgtcaggctggtttacttttataaaaacaacgccatgaacaagcttaaggccgtgcgtggcccctcgttttaccagagcattcgctggatcctgaattaa

SEQ ID NO: 523430 - DNA, 666 bp, Stenotrophomonas maltophilia
atgaataatactgaacgtatcgtaagggtaatggtgttttacaaaataaatatatttaaagagataatattccgggcgctccatgatcttttacccgattacgtattgaacattactcaggtcgattccactgaacaggcgctggcggcggtcgcggataataacgtggatgttttcttcactgaatttaattatctgcttaatcataaagagtggagtgcggaggtcagcagccgttttacatctttatgtaaaacccatcacgtcaggcgtgttctgttggtgcccgagctgccttacgggctgttaaaaaaagttctggagatgaaatttgaattaaccatcagtcagcaggatgaattgactgaactgaaaaaggaattacccgcgttgctcatggcggacgggcaaacaccgtcgatctcttcgtggctcaggcgggtaatgcggtccggttcccgggcgcgctccatcctctcggccagagagtgggaggtgctccatcttatcgtggaaggattttcaacgacggagattgcccgtcatcgaaaccgttcggtcagtaccattgcgacgcagaagcacaatgcgatgaaaaagctgaatctttccaaccacagcgaactgattaagtatgtgcaagcggttggaaagatggagaaatag

SEQ ID NO: 523431 - DNA, 1065 bp, Stenotrophomonas maltophilia
atgttacgatcattcatattcctgctcctctccagtattagtgggatgagctatgccacctgctccggcagcagcatcgtttatggcacaccgattaccattgatttatcggataagctgagcccggccacgcccacatggaccggcagcttcagcacccagtacagcggctcattcaactgtacgacaggtaacagtgaattttcttacacgccgatcctctcgaccgacagcaaatacgcgaccatcctcgggttcagcaataacaagtatatggtgcgggcggagatcaccaatcccccggccaataaaaccctgactgccagcggtagccatacggcgtctgagctgaacacaccgtttacggttcgcttcaccctcgttaaccagagcggcactaccctgacgggggatacggcgaacatgagcgacgttctgttcgtcagcgacatgagtgggttatccttctgggaaatcatcacctggccaatcaatcaggtcatcaagatagcgcagtggttattcagcgggttcaagtggccttacgacaaccgcgatatgtttggtcagccgatgatcatcaaatacgcgccaaaactgactacctgttcctttgataatgcggggctgaccgtagcgctgccgacgctcggcattccccagctcagtgcatcctcacagccggggctgacgcctttttcactgaacatgagctgtcagaacgtcggggttaacggcaattccgatcgggcaattgagatgtttctgtccagcacgcagttgctctcaacagacagctcggtgctgatcgacagcagcagtagcgcggcgcagggcgtggggctacgcctgataaaacgtgacgccccgcaaacgccggtgaccttctctacctcaaccaccagccgtggcaacgccacgatgattttcagcgtggcggctggcgcggcgctggacgaacatttcacccttccgatggcggcgtactattatgtgtgggcgcccgcccaggtgagccagggtaagatcaatacatcggctacgctgaatattatctatccctga

SEQ ID NO: 523432 - DNA, 1758 bp, Stenotrophomonas maltophilia
gtgcgcggcgtgtcgctggcgtcggacatgaagatgcgcccaaattcacagcagggtttttcaccggtggttcacggcgtggcacggacgaacgccctggtgaaagttatccagaatggcaacgtgatctatcaggagaacgtaccgccgggccagtttaccctcgacagcattcagcctaccggctctgcgggcgatttgctggtggtggtgcgtgaagcggacggttcacagcagtccttcacggtgccgttttccgccgtgcccgggatgctaaaagaaggggtgagtcagtacagcgtggtggcgggtaaagtgcaccagaacacgctcgatgccgaacccgcattcatgcaggccacgctgcgctacgggtttaataacctcatcaccgggtataccgggacgattattagcgataactaccaggccgggcttgtcggtaccgggtggaaccttccgtttggcgcggtctcgtttgatgtcacccacgccaaaacaaccctacaggatcgcaccagcagcggtcagagttatcgcgtgtcgtacagcaaatttatcgataccaccgccaccaacttcaccctggcggcctatcgctattccactaaaggctattacagcttcagcgacgcgctctattcgcgcgaagggtatcagcgcctgagagcgcagtacgacgactatgaagatcggtttggcgttgcgcccgacatgtcgctaagcacctgggatgccctgcgcgcggcgcagcccaagaatacctttacgcttaaccttaatcagcgcctgctcaataactggggcacggtatttgtctccggcacacagcgcgattactggaactcacagcaaaccacgcgcgaataccagatgggctattccaacgccatcggccgcgccagctataccctgtcggccagccgggtacggaacagggacagtgaagaagagacgcgcctttacctctccctcagcctgccgttctcgctgtttgataataatgcctggatcacctccagcctgacggccagcgattcgcattacgagcagagcaatatcagcatgagcgggaacgcgctggcgtcgaaccgcctgagctacaccctctccggcagtaatgcgcgggggggtaaaaatgcggcaagcgttaacgccgcgtaccgttcgaacttcgcgacactcggtggctcttacagcgaatcctccgactaccgccagaccgggctcagcggacggggaagcctggtggcctacccgtggcacgttctcgcctcaaacgaaaccggcacaaccatgactatcgtcgatgcgccaaaagcggagggactgatggtgaacggcgatgaaagcattatgacgaaccgcgatggcgtggcgctggtgccttacgccaccccgtatcgcaaaaacgccattacgttatcgcaaacggaaaacagcgctggcgcggaggtgatcggcaacatggctaacgtggccccttacgacggggcggtgagctacatccgcttcgaaaccgacaaacgcgagtcatgggtacttcatgcgacgcgtgccgacggcaaaccgctgccctttggtaccgaagtgctggatgaacacggtgaatctgtcgggtatgtcggccaggccagcgtactgtatatccgcgctgaacagccgccacgcgcgctcaacgtgcatctccggggcgggaagtgcgaaatctccgccccagcctgggggctgaacagcccctcatcggtttgccattaa

SEQ ID NO: 523433 - DNA, 480 bp, Stenotrophomonas maltophilia
atgcaggcgatgagcgtctctccgaaattaaatgatccgggtattggtcttcgaaataacggaagaaaggttctcacgtacgcggatttgaaaagccgctttgaggatcctgacggacgtgaacctggccgtaccatagaactgcatttaaccggccacatggaaaagtttgcctggtcatttaacggaatcaagttttcagatgccgcaccggtgctgctgaaatacggtgagcggctcaggatcacgctgatcaacgataccatgatgactcaccccattcacctgcatggtatgtggagcgatctggaagatgaaaacggtaatttcatggttcgtaaacacacaatagatgttccccctggtacaaaacgcagttacagagtgacagcagatgcgcttggccgctgggcgtatcactgccatttgctctatcacatggaaatgggaatgtttcgtgaagtccgggtggaggaatga

SEQ ID NO: 523434 - DNA, 897 bp, Stenotrophomonas maltophilia; identical to SEQ ID NO: 19852

SEQ ID NO: 523435 - DNA, 381 bp, Stenotrophomonas maltophilia; identical to SEQ ID NO: 19851

SEQ ID NO: 523436 - DNA, 930 bp, Stenotrophomonas maltophilia; identical to SEQ ID NO: 19850

SEQ ID NO: 523437 - DNA, 681 bp, Stenotrophomonas maltophilia; identical to SEQ ID NO: 19849

SEQ ID NO: 523438 - DNA, 1401 bp, Stenotrophomonas maltophilia
gtgaggttcaaaatttccctgaccacacgcctgagcctgattttttctgcggtgatgcttacggtatggtggttatcaagttttatcctgattagcacccttaatggctatttcgataatcaggaccgcgattttctgacaggtaaacttcagctcaccgaagagtttcttaaaacagagacgttcaggaacaaaacggatattaagtcattatcagaaaaaataaacgatgcgatggtggggcacaatggcttattcatttctataaaaaacatggaaaatgaaaaaattgttgaactctatgccaaaaattctgttgttccagcggtcctgcttaataagtcgggtgatattctcgactatatgatccagacggaagaaaataacaccgtgtaccgcagtatctcgcggcgggttgccgtgacgccggaacagggtaaaagcaaacatgtcatcattacggttgccacggatactgggtatcacaccctgtttatggacaaactcagtacctggctgttctggttcaatatcggtctggtctttatttctgtttttctgggctggctgaccacacgtattggtctgaaaccgctacgggaaatgaccagtctggcttcctccatgaccgtacacagcctggatcagcgtcttaatcccgatttggctccgccggaaatttctgagaccatgcaggagttcaataatatgtttgatcgcctggagggggcattccggaaactgtcagatttctcgtctgacatcgcgcatgagctgcgcacaccagtcagtaatctgatgatgcagacgcagtttgcactggctaaggaaagggatgtttcgcattaccgcgaaatcttattcgcttacctggaagaactgaaaaggttgtcacgaatgaccagtgatatgctttttctggcacgttcagagcatggtctgctgcggctggataaacatgatgtggatctggcagccgaactgaatgaattacgtgagttgttcgagcccctggcagacgaaacaggaaagacaatcacggttgaaggagagggcgttgttgccggagacagcgatatgctccgacgtgctttcagtaacctgctttccaatgcaatcaagtattctcccgataacacctgtacagcgatacaccttgagcgtgacagtgactgtgtgaacgtgatgattacgaatacgatgtccggccaggttcccgctaatctggaacgtttgtttgaccggttctatcgcgcagactcatcaaggttctacaacacggaaggcgcggggctgggattatcaattacaaggtcgatcattcatgctcacggcggcgagctgtcagcagaacagcaggggcgtgaaattgtgttcaaagtgcgcctgttaatggattaa

SEQ ID NO: 523439 - DNA, 435 bp, Stenotrophomonas maltophilia; identical to SEQ ID NO: 19847

SEQ ID NO: 523440 - DNA, 1026 bp, Stenotrophomonas maltophilia
atgtctgctgctcatctcggtttcccgacggaaaccgttgttgtctttgtggtgatggccgttggggcgatgtttatcgacctcttcatgcaccgtcacgataaaccgatctcgctgaaaagcgcggccatgtggtccatcttctgggtcatgatggcgatggcgtttgctggcttcttatacgtgcaccacggcgcggagatggccagtctgttcctcaccggctatgcactggaagaggtgctctccgtcgacaacctgtttgtgatgatggcgatcttcgcctggttcggcgtgccggataagtatcgtcaccgcgtgctctactggggcgtgctgggggcgattgtgttccgcggtatttttgttgccatcggcaccagcctactgagcctggggccatacgttgaggtgatttttgcgctggtcgtcggctggacggcggtgatgatgctgaaacgcaatgaagagagtgatgaagtcgaggattactccaaccatctggcgtaccgcctggtaaaacgcttctatccggtctggccaaaaatcagcagccacgcgtttatcctgacccaaaaagaggtggacgccgagctggagaagcctgaaaacaaggatgtgatggtaggtcgcgtgaagaaggcgaagcgctacgcgacgccgctgctgctctgcgtggcggtggtagagctgtccgacgtgatgttcgccttcgactccgttcccgcgatcattgccgtcagccgcgagccgctgattatctacagcgccatgatgttcgcaatcctcggcctgcgtaccctctacttcgtgctggaagcgctgaagcagtatctggtgcatcttgagaaagcggtagtgttactgctgttcttcgtggcgttcaagctggggctgaatgcgaccgatcacttctggcatcacggttataacatcggtgccacggcaagcctgtttgtggtgctgggggtactggcgctggggattattgcgagcgtgatgttcccggggaaacgtgaggcctga

SEQ ID NO: 523441 - DNA, 663 bp, Stenotrophomonas maltophilia
atgaccaatatgattgccgacgaagccgtggcgaagtccagcgtgctctctgtctttgactttgatggtacgttgacgcaccacgacagttttattccgttcctgcgctttgcctttggcaagcgctactttgcgggtcgcctggtgcgcatggccctgcctacgctgcactgcgtgcgtcgcaagctgacgcgtgatgagctgaaagaggtgttgatcaaaaccttcctgacgggggtggatgagcactggttacgtcagcaggcagaggccttctgtgaaaaatactggaacaagcttatgcgcccggaaggggtcatggctgtcgccaacgaagttaattccggtgcggaagtgacgatttgctccgcctccccggcgctggtattgcagccgtgggccgataagctcggcattaagctgattggcacgcagctggaagtgaaagacggcaagctgaccgggcggatcaccggtaacaactgccgctgcgcgcagaaagtggcgaggctggaaaaggtgtatggcgatctgaacgcatatcacctgcgcgcctggggcgacacgcgtggcgaccacgagctgctggcggcggcgcaggatccgcactggcgccatttccatcatccgcgcaagcgccgaaactcaccaattaagggttag

SEQ ID NO: 523442 - DNA, 795 bp, Stenotrophomonas maltophilia
atgaaaatcgatttaacggggaaagtggcgctggtgaccgcgtccaccggcggtattgggtttgccatcgcccgcggactggcggagagcggtgcggaagtgatcgtcaacgggcgcagcgtcgactcggtgaacaaaggcattcaggcgctccagcaggtggtgccaggcgtacaggtccgtgccgccatcgccgaccagagctcgcaggagggcgttgacgaactactcagggtcgccacgcatgtcgatattctggtgaataacgccgggatctatggccagcaggatttttattccaccgacgacgagacctgggaacgctactggcaaaccaacgtgatgtccggcgtgcgcctctcccgtgccctgctgcccggtatggtacaaaaaggctggggtcgggtagtgtttatctcgtcagaatcggcctgcaatattcctgcggatatgatccactatggcgtgacaaaaaccgcccagctctcgctggcgcgcggtctggcgaagttcgtggcaggcagcggcgtcacggtgaacagcgtgctgccgggcccgacaatgtcggacggttttgccgcaatgatgaaagacgagatggagagaaccggcaaatcgctggagcagctggcgaaagcgttcgtgatggagaatcgccccagctcggttattcagcgcgccgcaacggtagaagaagtggcgaatatggtggtgtatgtctgttccatgcaggcctccgcgacttccggcgcggcgctgcgcgttgacggtggcgtggtggatgacatagtttga

SEQ ID NO: 523443 - DNA, 882 bp, Stenotrophomonas maltophilia
atgcacaagacgacgctcgaacagtgggccttgctggaaagagtcatcgaggctggcagcttcgctaaggcggcggaagagacccatcgcagccagtcctcggtcagctataacctgtcgcttttgcaggagcggctgggcgtagcgctcctgatgacagagggacgccgtgccgtgctgaccccggcgggtgagctgttgctgaatcaggttaaaccgctgctgaaagccttcgcctacgttgaaacgcgcgctgcaaccctgcgcagcgggatgcgaacccgtatcgacctgatggtagacagtatttttccgcgcagtcggctgttcgcgattttgcgccagtttcagcagctgtacccgcaaacgcaggtgcggcttaccgaggtgctggaaaacagccgcgcagatgcgctcaatgatgaggccgacgtgatggtcttaacccgccgccaggacattaccggcctgggcgaatggctgatgaatatcgattttgttgccgtcgcgcatcacgcgcacccgctgtttgcgctggatacaccgcttaacgacgagatgcttcgaccgtggccgcgcattcagatcgcagacagccagcccaccgttcgccccaccggggagtcgtggacattctccaccatcgatgccgcgatcgaagcagtgatgtatcaggttggatatggctggttaccggaagaacgcattcagaccccgctccagcagggcatcctcaaaatcctgcccctcagccacggcgttcgacgcgccacgccgctgcacctcatcgttaaacgctccctcagcccgctggacgagcaggttgagacgctgttgcgcctttttaaacaggagtcgtcatcgtcaactgctacgctttaa

SEQ ID NO: 523444 - DNA, 507 bp, Stenotrophomonas maltophilia
atgagcaccttcgataaacatgatttaagcggcttcgtcggcaaacatctggtatatacctacgacaatggctggaactacgaaatttacgttaaaaacgagaacacgctcgactaccgtattcacagcggtctggtgggcaatcgttgggtgaaagatcagcaggcctacattgtccgcgtcggggagagtatctataaaatttcctggacggagccaaccggtaccgacgtgagcctgattgtgaacctgggcgaccgcctgttccacggcaccatcttcttcccacgctgggtcatgaataatccggaaaaaaccgtctgcttccagaacgatcacattccgctgatgaacagctaccgtgatgccgggccagcgtatccaaccgaagtgattgatgaatttgcgacgattacttttgtacgcgactgcggtgcgaatgacgatagcgttattgcgtgtgctgccagcgagttgccaaaaaactttcctgataatttaaaataa

SEQ ID NO: 523445 - DNA, 594 bp, Stenotrophomonas maltophilia
atgtaccagtttgtactgggaaagatctccacccttagcgcggacccgctggcgtcaacgctcgcagacatggcacctcagggtgcgcgatacgcttcctggcttgcaggccggacgctgctcgccagaactttatccccctcaccgcttcccgagataatctacggcgagcagggaaaaccggccttcgctaacggccatccgctgtggtttaacctgagccacagcggggacgacattgccatgctgataagcgatgaaggcgaggttggctgcgatatcgaagtgatccgcccgcgggagaactggcaggcgctggcgaatgccgttttcagcctcaccgagcatgacgagctggagcgtgaagcgccggaagaacagctttccgcattctggcgcatctggacgcgcaaagaggcgatcgtcaaacagcgtggtggcggcgcgtggcagattgtcagcattgacagcaccgcccagtcgctcccggtcagccagctgcgcttcggctcgctgagcctggcggtctgtactcctacgcctttcaccttaacggcggaatcggtgacttactccggtatttctgcagcataa

SEQ ID NO: 523446 - DNA, 1230 bp, Stenotrophomonas maltophilia
atgacccgccgggtagtgattacgggtatgggcggcatcaccgcattcggcgaggactggccgaccatctcgcgccgtctgcgcgagtatgaaaatgcggtacgtaccatgacggagtggcaggcgtatgacggcctgcaaaccctgctcgccgcgccgattgaagatttcactctgcccgctcactatacccgtaagcgcattcgcgccatgggccgcgtgtcgctgctctcaacccgcgccaccgagctggcgctggagcaggcgggcctgatcgacgacgcggtgctgaccaacggtcagaccggcatcgcctacggctcgtcgacgggcagcaccggaccggtcagcgagtttgcctccatgctcaccgaaaagcacacccacaacatcaccggcaccacctacgtgcagatgatgccgcacaccacggcggtgaataccggactgttctttggcctgcgcggacgggtgatccccacctcaagcgcctgtacctctggcagccaggcgattggctacgcctgggaagcgattcgtcacggctaccagaccgtgatggtggcaggcggcgcggaagagctgtgcccgtcggaagcggcggttttcgataccctgtttgccaccagccagcgtaacgacgcgcccaaaaccacgccgtcgccgtttgacgttcagcgcgatggcctggtgattggcgaaggggcgggcacgctggtgctggaagcgctggatcacgccagagcacgcggggcgacaatctatggtgagatcgtgggctttgccaccaactgcgatgcggcgcacatcacccagccccagcgtgaaaccatgcaggtgtgtatggagcagtcgctggcgatggcgggccttagccctcaggacattggctacatttctgcccacggcacggcaaccgatcgcggggatatcgccgagagtcaggcgaccgccgctattttcggcgacagcgtgcccatctcatccttaaagagctatttcggccataccctgggtgcctgcggcgcgctggaagccttgctgagtctgcatatgatgcgggagggctggttcacgccgacgctcaatttaagacaaccggatgagcaatgcggcgctttagattatattatgggggaaacccgcccgattgattgcgaatttattcagagcaataactttgcctttggcggcattaatacctcgataatcattaaacgctgggcgtaa

SEQ ID NO: 523447 - DNA, 729 bp, Stenotrophomonas maltophilia
atgagatccgtactggtcaccggcgccagcaaaggcattggccgcgctatcgcccttcagcttgcggcggacggtttcaccgtcggcgtgcattaccatcgtgatgaagcgggcgcgcaggagacgctggaggcgattgtccaggcaggcggcgcgggccgtttactcacctttgacgtgggcaaccgcgagcagtgccgtacggtgctggaacaggcgatcgctgaccacggcgcgtggtatggcgtggtcagtaacgccggtattacccgcgacggcgcatttccggcgctcagcgacgatgactgggacagcgtgatccacaccaatctcgacagtttttataacgtcattcatccctgcattatgccgatgatcggcacccgcaagggcgggcggatcatcaccctgtcgtcggtgtcaggcattatgggcaaccgtgggcaggtgaactacagcgcggcgaaagccgggatcatcggcgccaccaaagcgctcgccaccgagctggcaaaacgcaaaatcaccgtcaactgcatcgcgccggggctgattgataccggtatgatcgagatggatgaagccgcgttgaacgcggcgatgtcgatgatcccgatgcagcgtatgggccaggccgaggaagtggccgggctggcgagctacctgatgtcggataaagcaggctatgtgacgcgacaggtgatatcgatcaacggaggcatgctatga

SEQ ID NO: 523448 - DNA, 474 bp, Stenotrophomonas maltophilia
atgcgctacttaccacccggggattatcttcctcacgacacgccgatgctgctgcttgagagcgtggaaagcgtcaccgatgaccgcgccgtttgcaacgtgacggtgaacgatcggggcgttctggcgccgtttctggacgcaggcggcaacctgcccggctggtttgcgctggagctgatggctcagaccgtgggcgtctggtctgaatggcaccggatgcaaaaagggctgccgcactgtgcgctgggtatggtgctgggcgcgcgcgagctggtgtgcgacgcagggcattttgccgcaggcagcacgctgatcatcaccatcgaacgtctgatgcaggatgagcgctttggcagcttcgagtgcaccattcatgcggataatatttccctcgccacgggccgcgtaaacaccttccagccgagcgaggaagaattaaccacactttttaaccagggaacaccatcatga

SEQ ID NO: 523449 - DNA, 1167 bp, Stenotrophomonas maltophilia
atgatttacctttctgccgttggcatggtcaacgcgctcggcaactcggctgatgaaatagcagcaaacctgaacgctggcgtggcccccgggatgcaccagcgtgcgggctggctacagggcctacccgaggccgtgctgggcggggtagagggtgatcttccccctgtccccgggtctttttctgcgcatcgaagtcgcaacaaccagctgctgctggcggcgctggcgcaaatccggcccgccgtcgatgcggccattgcgcgcgtggggcgcgaccgcgtggcggtggtgctgggcaccagcacctccggactggacgagggtgatgagtacgtgcgccgcgcgcagaacggcgagcgcagtccgcagtggcaatatccgcagcaggagctgggcgatccgtcgcgctttctcgccagctggcttgcgctggacggcccggcgtataccatctcgaccgcctgctcctccagcgcacgggcgatcatcagcggccgtcgcctgatcgacgccggtctggtggacgtcgccatcgtcggcggggccgacagcctgagccgcatgccggtcaacggcttcaacagcctggaatccttctcccccaccctgtgcgaaccgtttggccgcaaccgtcgggggatcaccattggcgaagcggcagcattgatggtactgacccgcgagccgggcgagattgcgctcctgggcgcgggggaatccagcgatgcgtaccatatttccgccccacatccgcagggcgaaggggcgatccgcgccatcacccaggcgctgaacgaggcgggcatgacggcggcggacgtcggttatatcaacctgcacggcaccgccacgccgctgaacgatcgcattgaggcgcaggtgatccacgatctctttggcgaccgcgtgccgtgcagctccacgaagcatcttaccggccacacgctgggtgccgccgggatcaccgaggccgccctgagctggctgatcctgacccgagacctgccgctgccgccgcaggatttttcccgctacgcgccggacgacaccctgcccgccttcggcctactgcaccagagcgcaccgctgaataaaccagtgatcctgtcaaactccttcgcgtttggcggcaacaacgccagccttctgctggggagagtatga

SEQ ID NO: 523450 - DNA, 579 bp, Stenotrophomonas maltophilia
atgacccgtttcattcgcctggcggcagtgatgatggccctgttgctggcggggtgtagccatacgacgaaccgcgatgacgcgcgccctcaggcctggctccagcccggtacccgtgtcacgctgccaccgccgggcatcacgcctgccatccgcgcgcagcagttgcttaccggcagttttaaaggccagacccagtcgctgctggtgatgctgaacgccgatggcgataaagtgacgcttgccggcctctcctccgtcgggatccgcctgttcctcgccacctacgacgacaccgggatccacaccgagcagtcggttgtgatgccgcagttgccgcccgccagccaggtgctggccgacgtgatgctcagccactggcccctcagcgcctggcagccgcagttgccgaaaggctggacgctgaacgatactgacaccagacgcgaactgcgcaaccccgatggcaagctggtcacggaaattgcctacctgaaccgtaacggcaggcgcgaaccgattagcattgtgcagcacgcttttcactaccacatcaccattcaatatctgggtgactga

SEQ ID NO: 523451 - DNA, 2322 bp, Stenotrophomonas maltophilia
atgcagaacgccagcgctttgccgcaccgtaacgccctgcgcccggcgctgctgtgggccgcggtatgcctgatcctgctgggcgtgctgctgtcgctgctgcctggcgcgcggctgaacagcagcgtgctcgccatgctgccgaaacagacgctcggcgcgatccctcccgccctcaacgacggatttatgcagcgcctcgaccgccagctcatctggctggtcagccctggtaaacagccggacccgcgcgtggcgcagcagtggttaaccctgctgcaacgcagccaggcgctgagtgtcgtaaaaggtccgctggatgccgccgggcaacaggcctggggagatttcttctggcagcaccgcaatggcctggtcgatccggccacccgcgcccgcctgcaaaacggcggtgaagcgcaggctcagtggatcctgtcccaactctactccgccttttccggcgtgagcggcaaggagctgcaaaacgatccgctgatgctgatgcgcggcgcgcagctcgcgctggcgaagaacagccagaagatgcagctgatggacggctggctggtgacaaaagatgcggccgggaactactggtatctgctgcacggcgagctggcaggctcttcgtttgacatgcagcaaacccaccagctggtgaccaccctcaacgcgatgcagcagacgctgaaaagccaatatccacaggcgcagctgctgtcgcgcgggacggtgttctacagcgattacgccagccagcaggctaaaaacgatatttccacgctcggcgtcgccacggtgctcggggtgatcctgctgattgtgtcggtgtttcgctccgtgcgtccgctgctgctgagtctgctctccattgccatcggcgcgctggcggggacggtcgtgacgctcctgctgttcggtgagctgcacctgatgacgctggtgatgagcatgagcatcatcggcatctcggcggactatacgatttactacctcacggagcggatggtgcacggcgcggaacactcgccctggcaaagcctggcaaaagtgcgtaacgcgctgctgctggcgctgctgactaccgtcgtggcgtatctcttcatgatgctggcccccttccccggcattcgtcagatggcggtgttcgccgccgcagggctgagcgcctcgtgcctgacggtaattttctggcacccgtggttgtgccgtggcatgccggttcgcccgatccccctgagagggatgatgcagcgctggctgaacgcctggcgcgacagcaaagccctctccgtcgggctgccggtagcactggcgctgctctccgccatcgggatcgccagcctgcgggtggatgacgatatcgcccggcttcaggcgctgccgcaggacattctggcgcaggaaaaaaccatcaccgccctgaccgggcaaaatgtcgatcagaagtggttcgtggtgtatggcgcgtcggctcaggaaacgctggagcggctggaggcgtttgccccggcgctggcgcaggcgcaaaaagccggagaattaacccgctggcgcaccctgccgctgaactcgctggcgcggcagaacagcgatctgcaacttctgcgtaacgccgcgccgacggtgacgaaaatgctgcaaagcacggggctgaatgccgtcgccccgaatctgaacgccatgcctgtcagcgtggaggcgtggctcgccagcccggccagcgagggctggcgtttgctgtggctgacgctgccgaacggcaaaagcggtgtgctggtcccggtcgatggcgtcagaaacagcgctgcgctcggtgagctggccgcccgccatcccggagtcgtctgggttgaccgtaaggccagcttcgacagcctgtttgcactctaccgcgcgctgctgacggggctgctgggcgtggcgctggcggtgattgcctgcggcgcggtggtgcgcctcggctggcgaaaagggctggtggcgctggtgccgtccgtgctgtcgctgggcggcgggctggcggcgctggccgtgacgggccatccggtgaacctgttttccctgctggcgctggtgctggtcctcggcattggcatcaactacacgctgtttttcagcaacccgcgcggcacgccgctgacctccatgctggcgattaccctcgccatgatgaccaccctgctgacgctgggaatgctggtgttcagcaccactcaggccatcagcagctttggcattgtgctggtgagcggtatcttcaccgcgttcctgctcgccccgctggcgatgccgactaacaaagagaacttaccatga

SEQ ID NO: 523452 - DNA, 606 bp, Stenotrophomonas maltophilia
atgaagtggataacgctactcgcgctgctggtaagcccgctggtgaacgcggtcacgctggatgaactgcaacagcggtttgcggagcaaccggtggtgcgcgcacacttcgaacagacccgcacgatcaaggacatgcctcagcccctgcgctcgcagggggagatgctgatcgcccgtgacaatggcctgctgtgggatcaaaaagcgccgttcccgatgacgctgctgctggatgacaaacggatggtgcaaatcgtcaacggtcagccgccgcagaccattaccgccgacactaacccgcagatgttccagttcaaccatctgctgcgggcgctgttccaggccgaccgcaaggtgctggaagagaacttccgcatcgatttcaaagacctgggcgaaggccgctggtcgctggtgctgacgcccgttaccacgccgctggacaagattttcgccacccttgatttgaagggcgcgatctatctggaatccattcgcctgaacgataagcagggcgacacgacggatatcgccctctcccgccaccaactgacgcccgcccgcctgaccgatgcagaacgccagcgctttgccgcaccgtaa

SEQ ID NO: 523453 - DNA, 423 bp, Stenotrophomonas maltophilia
gtgctgaccgatccccgctttacggctgaagttgaaatcaccgttccgttccacgacgtcgatatgatgggcgtggtgtggcacggcaactatttccgctattttgagattgcccgcgaagcgctgctcaaccagtttgattacggctatcgccagatgaaagcgtccggctacgtctggccggtggtggatacacgggtgaaataccgcgacgcggtgaccttcgagcagcgcattcgcgtccgcgcccatattgaagaggttgaaaaccgtctgcgcatcgcctatcaaatcttcgacgcgcaaaccgggaaacgcaccaccaccggctacaccattcaggtggcggtggaagaagcaagccgggagatgtgctttgtcagcccggccattctgttcgaacgcatggggatcgcgccatga

SEQ ID NO: 523454 - DNA, 1692 bp, Stenotrophomonas maltophilia
atgtcagtaaccttccgtccctgcgtcctgatcccgtgctacaaccacggggcgatgatggcttcggtgctggcgcgcctggcgcctttcgatctgccctgtctggtggtggacgacggcagcgatgaaaccacgcgccgcacgcttgaagcgctggcggcggatcgtccgcaggtcacgctgctgcgcctcgccgaaaacagcggcaaaggcgcggcggtgatgcaggggctgaaagcctgtgccgatcgcggcttcacccacgccgttcaggtggacgctgacggccagcacgctattgaagacatccccaaactgctggcgctggccgaacgccatcccgatgcgctcatttccggtcagcccgtttatgatgactcgatcccccgttcgcgcctgtacgggcgctggataacacacgtctgggtctggattgaaaccctctccctgcaactgaaagacagcatgtgcgggtttcgcgtttacccgatagcgccggtaatgcgcctggcggcgggcacgccgctcggcaggcggatggattttgatactgaagtgatggtgcgcctctactggcagggcaacaccagctattttctgcccacccgcgtgacctatccgccggacggggtatcccatttcgatgccctgaaagacaacgtgcgcatctcgttgatgcatacccgtctgtttctcggcatgctgccgcgcattccttccctgctgatgcgtcgccgctcgcagcactgggcgcagcagcaggaggtgaaaggattatggggcatgcgcctgatgctgcgcgtctggcagttgctggggcgaaaggcgtttaccatcctgctgtggccggttacggccgtctactggctggccgcccgcgctgcgcgtcaggcgtcgcagcagtggctgacgcgggttaaaacggtgatggcacagcggcaaatgccgcaacccgcacggcttaacagtttttcccacttcctgcgcttcggtcatgccatgctgaacaaagtggccagctggcgcggcgaaatgaagcttcatcgcgatctggtctttgcgccaggcgcgcaggaggcgctgggtcttgacgatcctcagggcaaactgctgctcgcgtcgcatcttggcgatgtggaagcctgccgggcgctggcccagcgcgaaggggcgaaaaccatcaacgcgctggtctttagcgataatgctcagcgttttaaacaggtgatggaggagatggcgccgcaggcgggcattcacctgatgccggtcaccgacattggcccggagaccgccatcctcattaaagagaagctggatcgcggcgaatgggtggcgatcgtgggcgatcgcatcgccgtcaccccgcagcgcggcggcagctggcgggtgatatggagcgaatttatgggccagcccgcgccgttcccgcagggaccgtttatcctggcgtccctattgcgctgcccggtggtgctgatttttgccctctgccagcagggaaagctgaccctgcactgcgagccgtttgccgacccgctgctgctgccgcgcggcgaacgccagcaggcgctacagcagaccgtcgatcgctatgcgcagcggctggagcattacgcgctcttgtcgcctctcgactggtttaattttttcgatttctggcagctgccagaggtcaacgagaaggagtaa

SEQ ID NO: 523455 - DNA, 351 bp, Stenotrophomonas maltophilia
atgaaaatccctgaaatcgaacgccgcgagcctggccccggatatctggagataaccctttatcttgatcctgacctgctctggtttaagggacatttcgccgtacagccgctgctgccgggcgtggcccagctcgaccgggtgatgcattacgctgccgcgctggcgccgggctaccgttttcacagtattcagaacgtgaagttcgccgccccgctgttgccggagaacacggtcacgctgctccttgcctggcagcccgaacgccagatgctgacctttagctaccagcgccatgcgggtaacgagcgccacaccgccagcagcgggaagattcgcttatgtcagtaa

SEQ ID NO: 523456 - DNA, 1347 bp, Stenotrophomonas maltophilia
atgcttaaccctctcccgcttagccagtggctcagtgccccccgccctgacgacacccctgtcgcctggcaggacaaccatctctggacgcttggcgatctgcgccacgacgtcactcagctggtcgacacgctgcgtgatgaagaaggcgagcgctgggcgctgtgcatcgaaaacggctatctgtttattgtcgcgctgctggcgacgctgcatgcgggtaaaacgccggtcctccccgggcacagccgggcggcacagcttaacgaacagcgggcgctgttcagcggcgtcctgagcgacaccacgctcgattttcaggggcgacagctgcgggttgcttccgctcagcgggcaggccatcccttttcaccgctgcctgccatcgatgagatgcgcacgatcgagctttacacctccggctcgaccggcacgccgcagcgggtgagtaagccggtagtcagcctggatcgtgaggctcgtctgctggcggaacattttggcgatcgtctggcaggctgtcacgtcgtcgcttccgtggtgctgcaccacctgtatggcctgacgtttcgtgtcgtcttacccatggcgctcggcctgccgctgcacgccagcctgctcaactatgccgagcagctctctgcccttcccgacaataaacgctatcttttcatcagcagtccggcgtttctcaagcggctggacgcgtcgctgacgccgccccccgtcaacctgctcttctccgctggcggcgcgctgccctggcaggaggtcgccgcggttcaggcctggctcaacgtctggccggatgaaatatacggcagcacggaaacaggcgtaatggcctggcgctaccgtcaggaggaaagcatccgctggcagcctttccccggcgtgacgtttcacggcgatcgcgtgacgtcgccgctgatccccgaggcggagggggtcctgctggatgatatcctgcacttcacggctgacgggcagttcagcctcgtcgggcgccgcggtcgggtggtcaaaattgaagataagcgcatttcgctcgatgacattgagcgccgcctgctggcgctggacggcatccgcgaagccgccgcgctgacggtgacgcgcggcgggcgtcagggtattggcgtattgctggtgctgaatgaagcggtgcgtcagcaacacgaacagagcaaaaaagcgcaggagctcgcctggcgtcgcgcccttcgcccctggcttgaaccggttgccgtgccgcgctactggcggatcgttgatgaaattccggtcaatagcatgaacaagcgcgtaactgcgcagctacaggagttgtttcatgaaaatccctga

SEQ ID NO: 523457 - DNA, 531 bp, Stenotrophomonas maltophilia
atgctgctggcatggccgtttttgatcggcttcgggctggcgaataatagcctgcacgggatactgcccgtgatggcgctggtgctgctgttacgcgtctgccaggcccgtcggcagggcggtcccctgcgttatcttttcgtgagcgtggcgctggctggcatagcgctttgcgcggcgagctacgtcctgcacgcgcaccagtgggtgctgttttatccggtggtggtgaatctggtgatgctggtggtgtttggcggttcgctgtggacggcaatgcctgtcgtcgaacggctggcgcgcctgcgtgaaccggatctctcccccgtcggggtacgttacacgcgccgggttacccgggtctggtgcggcttttttattattaacggggcgatcgcgctgtttaccgtagtacacgccgatatccgtctgtggacgctgtggaacgggatgattgcctatctcctgatgggcacgctgatggccggcgagtggctggtgcgacaacgggtgatgaaaaacgatgcttaa

SEQ ID NO: 523458 - DNA, 252 bp, Stenotrophomonas maltophilia
atgacagaacaacaaacgatttatcaggaagtctctgcgcttcttattacgctgtttgaagtcgctccggaggatattacccctgaggcacggctttacgaggatctggatctcgacagcattgatgccgtcgatatggtagtgcacctgcaaaagaagacgggccataaaatcaagcccgaaacctttaaagcggtgcgcacggtgcaggacgtcgtggacgttgtggaacagcttcagcgcgacgcgtaa

SEQ ID NO: 523459 - DNA, 258 bp, Stenotrophomonas maltophilia
atgcaagcgctctatcttgaaattaagaatctcattatctctacgctgaatctggaagaacttaccccagaggatattgatacagacgccgcgctctttggcgacggcctcggtctggactcaatcgacgcccttgagctggggctggcggtaaaaaatcagtacggcgtagtgctttctgccgaaagtgacgagatgcgtcagcacttctattccgttgccacgctcgcggcttttattcatcaacaacgcgcctga

SEQ ID NO: 523460 - DNA, 816 bp, Stenotrophomonas maltophilia
atgagagggttacgttcccgcctcgatcgggtatggcgcatgctgatgaccggattgtgcttcgccctgttcggcctcggcgggctgacgctgtcgctggtgtggtttaacctgctgctgattttccagcgtgaccgcacccaacgtcgccgcctggcacgccgcactatttctgccagtttccgcctgttcctcgcggtggtacgcggtgtaggggtactggattaccgtttcaacaaccaggacgttttgcgcgccgagcggggctgtctggtgattgcgaaccatccctcgctgctggactacgttctgctggcgtcggtgatgaacgaaactgactgtctggtgaaaagcgcgttgctgcgtaacccgttcgtcagcggcgtgatccgcgcggcggactatctgattaacagcgaagccgacacgctgcttgccgcaagccagcagcgtctggcccagggcgacaccctgcttatcttccctgaaggcacccgcacccgggtgggagaagccatgaccctgcaacgtggggcggcgaatatcgccgttcgctgcaacagcgccgtgcgcgtggtggtgatccactgtagcgaacggatgctggataaacagagcaactggtataacgtgccccccaacaaacctgttttcaccgtggatgttcgcgaacgcatcaacattcatgatttttatgatgcgagtcagcacgaaccggcgctggcagcaaggcagttaaaccggcatatgcagcatcagttaacaaccggtcttcaatctttgtcaggaacgaaagatgcaagcgctctatcttga

SEQ ID NO: 523461 - DNA, 723 bp, Stenotrophomonas maltophilia
atgaaatttacacttacccttatcgactggcaggcaagagcgccaggactcagcgatgccgacgaatggcaggcatggtcacgccggtctgacgccatcgatcctgatgcaccgctggcgaaactgaccgatctgccgatgatgaccgcccgccgcctgaattcaggcagcaagctggccgttgatcttggcctgatgatgctgcgcaaacaccgcatcgacgccgtcgtctacagcagccgtcacggggagctggaacgcaattttcgtattctccaggccctggcggcagatcagcccgtttcccccaccgattttgccatgtcggtacacaactcggcggtcggcaatctcactatcgccgcgcgtcagcctgttgtctcttcgtcggtttccgccggtatggataccttccagcagagcttatgcgaggtgctgagtctgctacatgcgggctactcacgcgtgttgctggtagatttcgacggtctgctgccggagttttatcacgccgggctgccgccgcagatgcccgtctggccctacgcgctggcgctggtaattgaggccggaaatacgctcagctgtgaaacgcacgccaaccgcaggcctgaagagcccgcgctgccgcaaagcctgcagttcctgcgccattacctgcgggacgagcgccagtttaccctgccgggcgagcgcctgctgtggcaatggacgcgccaatga

SEQ ID NO: 523462 - DNA, 1050 bp, Stenotrophomonas maltophilia
atgactgccagcccgcccgacaaagccggacttcatattttattaaaactcgcctgcctggtggttatccttgcgggtatccatgcggcggcagatatcattgttcagcttctgctggcgctgtttttcgccatcgtcctcaacccgctggtgacgtggtttttacgccggggcatcagccgcccggtcgcgattaccattgtggtgatggtgatgctggttgtcctgacggcgctgttcggcgtgctcgccgcctcgctgagcgaattttccaccatgctgccgcagtacaataaagagctgacgcgcaagctggtcgatctccagcgcatgttgccgttcgttaatctgcatatctcaccggaacggatgctgcgccggatggattccgagaaggtgatgacctacgccaccacgttgatgaccgggctttccggggcaatggccagcattctgctgctggtgatgacggtggtgtttatgctgttcgaagtgcgccacgtgccgtataagctgcgttttgccctgaacaatccgcagatccacattgccggcttgcatcgcgcgctgaagggtgtgtccaaatatctggcgctgaaaacgctgttaagcctgtggaccggcgtgatcgtctggctggggctggtgctgctggacgtgcagttcgcgctgatgtggggcgtgctggcgtttttactgaactacgtgcccaatatcggcgcggtgctttctgccgttccgccgatgatccaggcgttcctgtttaacggtttttatgagtgcatgctggtaggggcgctgttcctcgtcgtgcatatggtgctgggcaatattctcgaaccgcgcatgatgggtcaccgtctgggcatgtcgacgatggtggtgtttttatcgttactgatctggggatggctgctgggaccggtgggcatgctgctctccgtgccgctcaccagcgtctgtaaaatctggatggaaaccacgaaaggaggcagtaaactcgccattctgctgggtccgggtcggccaaaaagtcgtttgccgggataa

SEQ ID NO: 523463 - DNA, 558 bp, Stenotrophomonas maltophilia
atgcgcaatctggttaaatatgtcgggattggcctgctggttgttggccttgcagcctgtgataacagcgacaccaaaacgcctgctcagggcgcgtcagcagaaagcaacgccaccggtcagccggtgagcctgatggatggcaaactcagtttctctctgcccgcggacatgaccgatcagagcggtaagctgggcacccaggcgaacaacatgcacgtctattccgatgccaccgggcaaaaagcagtcattgtgattgtcggtgacgataccagcgaagatctgggtgtgctgtccaaacgtctggaagatcagcagcgcagccgcgacccgcagcttcaggtggtgaccaataagtctatcgagctgaaaggccacacgctgcaacagctggacagcatcatctccgccaaaggccagaccgcttactcctccgtggttctcggcaaggtagataataaactgctgaccatgcagatcactctgcctgcagataatcagcaaaaagcgcaggcaaccgctgaaaacatcattaacacccttgtgatccagtaa

SEQ ID NO: 523464 - DNA, 666 bp, Stenotrophomonas maltophilia
atgaactcctttacacaatcgcaacgcgtcaaggcgttgttctggctttcgctatttcatctgctggtgatcatctccagtaactatctggtacagctccccatctccatttttggtttccataccacctggggcgtgttcagtttcccgtttattttccttgcgacggatttaaccgtgcgtatttttggcgcaccgctggcgcggcggattatttttgcggtgatgatcccggcactgtttgtctcctacgccatctcctcgctgttttacatgggaagctggcagggcttcgaagccctgacgcatttcaacctgttcgtcgcgcgtattgccgccgccagctttatggcctatgccctggggcagatcctcgatgtccacgtgtttaaccgcctgcgtcagaaccatcgctggtggatggcaccaacggcttccacgctgttcggtaacgtgagcgatacgctggccttcttcttcattgccttctggcgcagcccggacgccttcatggcagaacactggatggaaatcgctctggtggactacgcctttaaggtgcttatcagcctggtcttcttcctgccgatgtacggcgtgctgttgaatatgctgctgaaaagactggcagataaatcggaaatctccgcattgcaggcaggttaa

SEQ ID NO: 523465 - DNA, 243 bp, Stenotrophomonas maltophilia
atgaccgacctgttttccagcccagaccacacgcttgatgctcagggcctccgttgcccggagccggtaatgatggtgcgtaagaccgtccgtaacatgcagagcggcgaaacgctgctgatcgtcgccgatgacccggccactacccgcgatattcccggtttttgtacctttatggaacatgaactggtagcgcagcaaaccgagaccttgccgtaccggtatgtgattcgtaaggggtaa

SEQ ID NO: 523466 - DNA, 972 bp, Stenotrophomonas maltophilia
atgaaaacgaccctcaagccgttactggctgctctgtgcctgtctgcttttgcctgcaccgtttctgcccagaccatcaaagccgccgatgtgcatcctgaaggctacccgaacgtggtggcggttcagcagatgggtgaaaaactcaaacaacaaaccgatggcaagctggagattaaggtcttccccggcggcgtgctgggggatgaaaagcagatgattgagcaggcgcagatgggggcgatagacatgatccgcgtctctatggcgccggttgccgccatcctgccggatatcgaagtgtttacgctgccctacgtattccgcgatgaagaccacatgcacaaggtgatcgacggggatatcggcaagcagattggcgacaagctgaccgccaacccgaaatcgcgcctggtcttcctcggctggatggattccggcacccgtaacctgatcaccaaagagccgatcgtcaaaccggacgatctgaaagggaagaaaatccgcgtgcagggcagcccggtggcgctggccacgctgaaagcgatgggggcgaactcggtggcgatgggcgtcagcgaggtttacagcggcatgcagaccggggtgatcgacggcgcggagaacaacccgccaacctttatcgcccacaactatatgccggtcgccaaaaactacacgctgagcggccacttcatcaccccggaaatgctgctctattccaaagtgaaatgggacaagctcagcgctgacgaacagcaaaagatcctggtgctggcccgcgaagcgcagttcgagcagcgcaagctgtggaatgcgtataacgaccaggcgctggcaaaaatgaaggctggcggcgtgaagttccacgatatcgacaaaacggtgttcatcaaagccactgagccggtgcgcgcgcagtatggcgacaagcatcaggatctgatgaaagccatcgctgacgttcagtaa

SEQ ID NO: 523467 - DNA, 510 bp, Stenotrophomonas maltophilia
atgtccgaactctacctgaagtggatggatcgtctgtacctgctcgccatggcggtggcgggtctctcgctgctggtgatgacgattgtcatccccatcggcatcttctcacgctacgtgctcaatcgcggcgaatcctggccggagccgatcgccattatctgcatggtgacgtttaccttcatcggcgcggcggtgagctaccgcgccgggtcgcatattgcggtcaacatgcttaccgaccgcctgcccgcgtcgctgcaaaggctgtgcgcgcgggtagtggatctgctgatgctgcttatttctggcctgatgtgctggtacagctactggctgtgcgttgagctgtgggagcagccggtggcggagtttccgctcttgacctccggcgaaagctatctgcctctgcctgtcgggtcggccattttgatcctgtttgtgcttgaacgcctgctgtttggctcgcaggaaaaccgtccggtcgtgctgatcggcaatcacagttaa

SEQ ID NO: 523468 - DNA, 1287 bp, Stenotrophomonas maltophilia
atggatgcttttgttttgttattcaccctcgccattttgctggcgctggggatgccggtggccttcgccgtcggcttaagcgccgtggcgggcgcgctgtggattgacctgccgctggaggcgctgatgatccagatcaccagcggggtcaataaatttaccctgctggcaatcccgttcttcattcttgccggggcgatcatggcggaagggggcattgcccgacggctggtgaatttcgcctacgtgttcgtcggctttatccgcggtgggctgtcgctggtgaacattgtcgcctcgacgttcttcggcgcgatttccggctcgtcggtggcggatacggcgtctatcggcagcgtgatgatcccggagatggagaagaagggttatccgcgcgaatacgcggcggcggtgacggccagcgggtcggtgcaggcgattctgatcccgcccagccacaactcggtgatttactccctggcggcggggggaacggtctccatcgccacgctgtttatcgcgggcgtgctgccgggcctgctgctgggcgtgagcctgatggtgctctgcctgtgcttcgcccgcaagcgcggctacccgaagggggacaaaatcccgttcaggcaggcgctgaaaattatgctcgatgccctgtgggggctgatgacggtggtgattatcctcggcgggatcttgtccgggatttttaccgccaccgaatctgccgccgtggcctgcctgtgggcgttcttcgtcaccatgtttatctaccgcgactacaagtggagcgaactgccgaagctgatgtgccgcacagtgaaaaccgtcaccatcgtgatgattttaatcggctttgccgcggcgtttggggcggtgatgacctacatgcaactgccgatgcgcatcaccgaattcttcacatcgctctccgataacaagtacgtgatcctcatgtacctcaacatcatgctgctgctgattggcacgctgatggacatggcgccgatcatcctgatcctgacgccggtgctgctgccggtgaccaatgcactgggtatcgacccggtgcattttgggatgatcatgatggttaacctggggattgggctgatcacgccgccggtcgggtcggtgctgtttgtggcgagtgcggtgagtaagcagaagatcgaacacgtggtgcgggcgatgctgccgttttacggtatgttgctggtcgtgctggggatggtgacgtacattccggcgatttcattgtggttgccggggctgttaggaatgcagtga

SEQ ID NO: 523469 - DNA, 2172 bp, Stenotrophomonas maltophilia
atgtcgactccagaaatacctaaaaaagttccccaattctcggcacttaagctcagcccggttccgccaaaagaggactgctgctgcgagggcgcatgcgaaacgcaaactcaaacgctgcctgaaagcggcaatcactacagctgggtcgtcaacggcatggactgcgcggcctgcgcccgcaaagtgaaaaacgcggtgaagcaggtgccgggcgtgagccacgttcaggtgctgttcgctaccgaaaagctgctggtcagcgccgaaaacgacgtcagcagacaggttgaagccgccgtcagcaaagcgggttataccctgcgcagcgaaacggcgcccgcagaaaaaacgtctccgctaaaagaaaacctgccccttatcaccctcatcatcatgatggccctgagctgggggctggagcagatcaaccacccgttcggcaacctggcgtttatcgccaccacgctggttggcctgttcccgattgcccgtcaggcgctgcgtctgatgagaagcggcagctggtttgccatcgaaacgctgatgagcgtggcggctatcggggcgctgtttattggcgcgacggcggaagcggcgatggtgctgctgctgttcttaattggcgaacgccttgagggctgggcggcgagccgggcgcgtaaaggggtgagcgcgctgatggcgctaaagccggaaaccgccacgcgagttattgatggtcagcgtgaaacggtcgccatcaacaccctgcgcccgggtgacgtgattgaagtgcccgcaggcggacgtctgccagccgatggggccctcgttaccgccaccgcaagttttgacgaaagtgccctgaccggggaatccatcccggttgcgcgcgcggcgggtgaaaaggtgcctgcgggcgccaccagcgtcgaccgactggtgcagttgacggtcatttccgaaccgggcgacagcgccatcgaccgcatcctcaggctgattgaagaggccgaggagcgccgcgcgccggtagaacgctttatcgatcgcttcagccggatttacacccccgccatcatgctggtggcgctgctggtcaccgtcgtcccgccgctgttcttcggcgcgccgtgggagggctggatttacaaagggctgacgctgctgctgatcggctgtccgtgtgcgctggtgatctccaccccggcggcgattacctccgggctggcggcggcggcacgtcgcggggcgctgattaagggcggcgcggcgctggaacagctgagtcaggtccagcacatcgccttcgataaaaccggcacgctgaccgtcggcaggccgcaggtgaccggcgtgtatccgcaggacatcagtgaagacgccctgctgacgctggccgctgccgtggagcagggttccacccaccctctggcgcaggcgattgtacgtgaagcgaaggggcgcgggctgaacatccctccggcaacggcccagcgagcgctggtcgggtcagggattgaagctgtggtcgaaggcaaaaaagtgctgatcgccgcggcggacgcgcgctctactccacaggttgaggcgctggagcaggccgggcagacggtcattaccgtgatgcaggacggtgtgccgatgggcatgctggcgctgcgcgacaccctgcgtgacgatgcgaaagaggccgtcgacgcactgcacaggctgggagtacagggcgtgatcctgaccggcgataatccgcgcgcggcggcggcgattgcaggcgagctggggctggagtttaaggccggattgttgcctgcggataaagtcagcgcggtaaccgagctgaacagcaacgccccgctggcgatggtcggggacggaataaacgatgccccggcaatgaaagcttccaccatcggcattgcgatgggcagcggcaccgacgtggcactggagaccgccgacgcggcgctgacgcacaaccgcctgaccgggctggcgcagatgatagaacttgcgcgggcgacgcgcgccaatattcggcagaacatcgccattgcgctgggtctgaaggggattttcctggtcaccacgctgctcggcatgaccggactgtggctggcggtactggcggatacgggggcgacggtgctggttacggcgaacgcgttgcggttgttgcgtcaaaggtaa

SEQ ID NO: 523470 - DNA, 627 bp, Stenotrophomonas maltophilia
atgctttggtcatttatcgctgtctgtttttccgcatggctttacgtcgatgcgtcttaccgtggcccagcctggcagcgctggttgtttaaacccgtcacgctattgctcctgctgttgcttgcctggcaggcaccgatgtttaacgccatcagctatcttgtcctcgcggggctgtgtgcgtccctgattggcgatgccttaaccctactgccgcgccagcgtctgctgtacgccgtgggggcattcttcctgtcgcatctgctctataccatctactttgccagccagatgacgctctccatcttctggccgctgccgctggtgctgctggtgattggcgccctgctgatcgcggtgatctggtcgcgtctggaagagatgcgtctgccggtgtgtacgtttatcgccatgacgctggtgatggtgtggctggcgggcgagttgtggttcttccgtccgacagcgcctgcgatgtccgcgttcttcggtgccacactgttgctgttgggtaacatcgtctggctgggcagccaccatcgccgccgcttccgtgcggataatgcgatttctgccgcctgttactttgccggacacttcctcattgtgcgttcactgtatatctaa

SEQ ID NO: 523471 - DNA, 360 bp, Stenotrophomonas maltophilia
atgagcaagatgccgctgttttttattgtcgtgctggcgattatcgtcattgccgcctcgtttcgcttcgtgcagcagcgccgtgagaaggccgacaacgatgccgcaccgctgatgcaaaagcgcgtggtggtgacgaacaagcgcgagaaaccgcttaatgaccgccgatcccgccagcagcaggtgacgcctgcgggcacaacgatgcgctatgaagcgagctttaagccggaaaccggcgggctggagatgaccttcagactggaggcgcagcagtaccaccagttgacggtgggggagaaaggcacgctgagctacaaagggtcgcggtttgaagggtttgaaccggagcagtaa

SEQ ID NO: 523472 - DNA, 282 bp, Stenotrophomonas maltophilia
atgccagtactgattaacgtagggcgcttgctgatgctgggcgtctgggcttttttgattttgaatctggtgcacccgttcccgcgtccgctgaatatcttcattaacgtggcgctgatttttaccgcgtttatgcatgccttacagatggtgatgctgaaaaacggactgccgaaagatagcccaccgatgaccggctggcagcagctacgggtgtttattttcggcgtatttgagctgctggtgtggatgaagaagtttaaggcgcaggtgaagaagtaa

SEQ ID NO: 523473 - DNA, 603 bp, Stenotrophomonas maltophilia
atgaagaaacccacccgcgccccggccggtcaaattcgcattatcggcggtcagtggcgaggccggaaattaccggtgccggacagccccggtttacgccctaccacggaccgcgttcgcgagacgctgtttaactggctcgccccgtcaatggtagacgcccattgcctggactgcttcgccggaagcggtgcattagggctggaagcgctgtcgcgctatgctgcgagcgccacgctgctggagatggagcgcggcgtcgcacagacgttgcagcaaaatttggctacgctgaaagcaaccaacgccaaagtggtgaataccaacacgctgagcttcctcgcgcaacaggggacgccgttcaacgtggtctttgttgacccgccgttccgtaaagggctgctggaagagacattatcgttgctggaaaaaaatggctggctggcagacgacgcgctgatttacgttgaaagcgaagtggaaaatggtctgccgcccgttcccgttcactgggatctgcaccgcgagaaggtcgccggccaggtggcttatcgtctgtatcaccgtcaggcacaaggaggatccgatgccagtactgattaa

SEQ ID NO: 523474 - DNA, 1461 bp, Stenotrophomonas maltophilia
atggcaaaacaaaaaaaacgtggcttcttttcctggttgggtttcggtgaaaaagagcaagaaacagaacagaaaaccgaagaacagcaggttgtagaagagcagtcacagcctgaaacgcctgtcgaaaccgctgcggttgtcgaagcggaagagccagcccacagcaaagaagagattgaatcctttgccgaagaggtggttgaggttaccgaacaggttcaggagagcgaaaaaccagagccggttatcgttgaaacccttaccgaagcgccgcaggccgctatcgaacacgaagcgctgccgctgccggaagaggtgaaagctgaagaggtttctgccgaagagtggcaggccgaagcggaaaccgttgaaattgttgaggcggtggaagaagaagcggcccttgagccagagctgaccgacgaagagctggaggcccaggcgctggcggcggaagcggctgaagaagcggtcatcgtcgtgccggtggaagagcaggccgaagaagagatcgttcaggagcaggaaaaaccgaccaaagaaggtttcttcgcgcgcctgaagcgcagcctgctcaaaaccaaagaaaacttaggttccggatttatcagtctgttccgcggcaagaagatcgacgacgatctgtttgaggagctggaagagcaactgctgattgcggacgtgggcgtggagaccacccggaaaatcatcgccaacctgaccgaaggagcgaaccgcaaacagctgcgtgacgccgaggcgctgtacggcctgctgaaagacgagatgggtgaaattctcgcaaaagttgacgaaccgcttaatattgaaggcaaaatgccctttgttattctgatggttggcgtcaacggcgtgggtaaaaccaccaccatcggcaagctggcgcgccagtttgagcagcagggcaaatcggtgatgctggcggcgggcgataccttccgtgcggcagcggtggaacagctccaggtgtggggccagcgcaacaatattccggtcattgcccagcacaccggcgcggattccgcgtccgtgattttcgatgccatccaggcggcgaagtcgcgtaacgtggacgtgctgattgcagataccgcagggcgtttgcagaacaaatcgcacctgatggaagagctgaagaaaatcgttcgcgtcatgaagaagctggacgaagatgcaccgcatgaaattatgctgactatcgacgccagcaccggacagaacgccatcagccaggcgaagctgttcaatgaagcggtaggactgaccgggatcacgctgaccaagctggacggcaccgcgaaaggcggggtgatcttctccgtggccgaccagttcggcattcctatccgttatatcggtgtgggcgagcgtattgaggatttacgtccgtttaaagcggacgactttattgaggcactatttgcccgagaggactaa

SEQ ID NO: 523475 - DNA, 666 bp, Stenotrophomonas maltophilia
atgattcgctttgaacacgtcagcaaggcctatctcggcgggagacaagcgctgcagggggtaacattccacctccagccaggcgagatggcattcctgaccggccattccggcgcggggaaaagtaccctgctcaagctgatctgtgggatcgagcggccaagtgccgggaaaatctggttcagcggccatgaaattagccgtcttaagaaccgtgaagtgccgttcctgcgtcgtcagattggcatgattttccaggatcaccacctgctgatggatcgcacggttttcgataacgtcgcgatcccgctgattattgccggcgccagttacgatgatatccgccgtcgcgtttcggcggcgctggataaggtcgggctgctggacaaagcgaagaacttcccgatccagctctccggcggtgagcagcagcgcgtgggcatcgcccgtgcggtggtgaacaagcctgccgtcttgctggcggatgaaccgaccggtaacctggacgatgccctctctgaagggatcctgcgtctgtttgaggaatttaaccgcgtgggggtcacggtactgatggcgacgcacgacatggggcttatctcacgccgttcgtaccgcatgctgaccctgagcgacgggcatttgcacggaggccacggtgaataa

SEQ ID NO: 523476 - DNA, 1056 bp, Stenotrophomonas maltophilia
gtgaataagcgtgatgcaatgaaccagatacggcagttcagcaaccggtttgaccgtttccgcaagcctcagggcggcggggacggcaatcgccatgcgcctaagcgtgccaaagcgacaccgaaaccgaactcccgtaaaaccaacgtcttcaacgaacaggtgcgctacgccttccagggcgcgttgcaggatctaaaaagcaaaccgctggcgacgttcctgacggtgatggtgattgccatctccctgacgctgccgagcgtctgctacatggtttacaaaaacgtgaaccaggcggcgtcccagtactatccgtcgccgcagattaccgtttatctggataaagccctcgacgataacgctgcggctcaggtagtggggcagattcaggccgagcagggcgtggagaaagtgaactatctttcccgcgatgaagcgctgggcgaattccgcaactggtccgggttcggcggcgcgctggatatgctggaagagaacccgctgcccgccgtggcggtggtgatcccgaagctcgatttccagggcaccgattcgctcaacaccctgcgcgaccgcattacccgcatcaatgggattgatgaagtgcgcatggacgacagctggtttgcccgtcttgccgccctgaccgggctggtggggcgcgtatcggcgatgatcggcgtgctgatggtggcggcggtgttcctcgtcatcggtaacagcgtgcgcctgagcatcttcgcccgtcgcgataccatcaacgtgcagaaactgattggcgcaacggatggtttcatcctccgcccgttcctctatggcggcgcgttattaggtttttctggtgcatttctttcattgattttgtcagaaattttggtgatgcggctgtcgtctgccgtcaccgaggtggcgcaggttttcggaacgaagtttgatatcagtggcttagggttcgatgagtgcttgctgttgctgctggtctgctccatgatcggctgggtggcggcatggctggcaacggttcaacatttacgccactttactcccgactaa

SEQ ID NO: 523477 - DNA, 858 bp, Stenotrophomonas maltophilia
atgaccaaagaaatgcaaactttagctttagcccctgttggtaacctggaatcttacatccgggctgcgaacacctggccgatgttaacggctgaggaagaaaaggagcttgctgaaaagctgcattaccagggcgatctggaagcagctaaaacgctgatcctgtctcacctgcgctttgttgttcacgttgctcgtaattatgcgggctacggcctgccgcaggcggacctgattcaggaaggtaacattggcctgatgaaggcggtacgtcgcttcaacccggaagtgggtgtgcgactcgtctccttcgccgtgcactggatcaaagcggaaattcacgaatacgtcctgcgtaactggcgtattgtgaaagtcgctacgacgaaagcgcagcgcaaactgttcttcaacctgcgtaaaaccaagcagcgtctgggctggttcaatcaggatgaagtggaaatggtggcgcgcgagctgggcgtttccagcaaagacgtccgcgagatggaatcccgtatggccgcgcaggacatgacgtttgatatgtctgccgacgacgatgcctccgacagccagccgatggccccggtcctgtatctgcaggataaaacctctaactttgctgacggcattgaagaggataactgggaagaccaggcggcgaacaagctgaccttcgcgatggaaggcctcgacgagcgtagccaggatatcatccgtgcccgctggctggacgaagataacaagtccacgttgcaggaactggccgaccgctacggcgtctccgctgaacgtgtgcgtcagcttgagaagaacgccatgaaaaaacttcgcgccgctatcgaagcgtaa

SEQ ID NO: 523478 - DNA, 1266 bp, Stenotrophomonas maltophilia
gtgaaaaataacgaactgaacgaccggcgtttacaggcgacgccgcgcggtatcggcgtcatgtgtaacttctatgccgataaagccgaaaacgccacggtgtgggatgtagaaggtaacgagtatattgattttgccgccgggatcgccgtgctgaataccgggcatcgccatccaaaagttatcgccgccatcgaaaaacagcttcatgcctttacccataccgcttaccagatcgtcccctatgaaggttatgtggcgcttgccgagcgcatcaaccagcgcgtacccatagaggggccagccaaaaccgcctttttctcaaccggtgcagaagtggtcgaaaatgcggtgaaaattgcccgggcgtacaccagacgtcccggccttatcaccttcggcggcgcgttccacggccgtacctttatgaccatggcgctgaccggcaaagtggcgccctataagctcggcttcggcccgttccccggctcggtgtaccacgcgcaattccccaacaacctgcacggcgtcagtaccgccgaagcgttaaaaagcctggagcgcatcttcaaagccgatatcgcgcccgatcaggtggcggcaatcattattgaaccggttcagggcgagggcggattcaacgtcgcgcccgctgattttatacaggcgctgcgtgccctgtgcgatacccacgggattttactgattgccgacgaagtgcaaaccggcttcgcccgtaccggcaagctattctccatggaaaaccactgcgtgaagcccgatctgatcaccatggcgaaaagcctggcgggcggaatgccgctctctgccgtctctggccgggcagaggtgatggacgcgcccgctccgggcggactgggcggcacctacgcgggtaacccgctggcgattgcggcggcccatgcggtgctggacgtgattgacgaggaagatctctgcacgcgcgcgtctcatctcggccatcatcttgtcgaggtgctgaataaagcgaaggatggctgtccctggatcgccgatatccgtggacagggctcgatggtggcggtggaatttaccgatccgcaaaccggactgccgtcgccggaatttacccgtcaggttcaggaacgcgcgttgaacgaagggctgctgcttttgagttgcggcgtctacggcaacgttatccgcttcctctacccgctcaccatccccgaagcgcagttccgtaaagcgctggatattatttccgcctcgctgacacgataa

SEQ ID NO: 523479 - DNA, 1095 bp, Stenotrophomonas maltophilia
atgaagggtaaagcgttactggcaggatgtatcgcgttggcattcagcactatggcgcaggccgatattaaagtggccgtggtgggcgcgatgtccggtccggtagcacagtacggcgaccaggaatttacgggcgcggaacaggcggttgcagacattaatgctaagggcggcatcaagggcgaaaagctgcaaatcgtaaaatatgacgatgcctgtgacccgaaacaggcggtcgcggtggcgaacaaagtggtaaatgacgggatcaaatacgttatcggtcacctgtgctcctcttccacccagcccgcgtctgacatctacgaagacgaaggcattctgatgatcacgccggctgcgacggcaccagagctgaccgcgcgcggctataagctgatcctgcgtaccaccggtctggactccgatcaggggccaaccgccgcgaaatacattgttgaaaaagtgaagccgcagcgcatcgcgattgttcatgacaaacagcagtacggcgaaggcctggcccgtgcggtgcaggataacctgaaaaaagcgaatgccaacgtggtgttctttgacggtattaccgccggtgagaaagacttctcgactctggtagcgcgtctgaagaaagagaatatcgatttcgtttattacggcggctaccacccggaaatggggcagatcctgcgtcaggcgcgtgcggcgggtctgaagacacagttcatggggccagaaggcgtggcgaacgtttccctgtctaacatcgcgggtgagtctgctgaagggctgctggtgaccaaaccgaaaaactacgaccaggtgcctgcgaacaaacctgttgtagatgccatcaaggcgaagaaacaggatccaagcggtgcgttcgtctggaccacttacgcagcgttgcagtctctgcaagcgggcctgaaccagtcagccgatccggcggagattgccacctggctgaaagcgaactcggtggaaaccgtgatggggccgctgtcctgggatgagaagggcgacctgaagggcttcgagttcggcgtatttgactggcatgccaacggcacggcgacagacgccaaataa

SEQ ID NO: 523480 - DNA, 384 bp, Stenotrophomonas maltophilia
atgaaactgactatcgtgcgtctggtgacctttagcgaccaggatcatatcgacctgggcaagatctggccggaatattcctcttcatcgctggccgtcgatgagaaccaccgcatctatgccgcgcgctttaacgagcgcctgctggccgccgtccgcgtaacgctgagcggcacggaaggggcgctggactccctgcgcgtgcgcgacgtgacccgtcgtcgcggggtcgggcagtatttgattgaagaggtgatccgcgaaaacccgagcgtgacctcctggtggatggccgacgtgggcgtagaggatcgcggcgtaatggcggcgtttatgcaggcgttagggtttacggcgcaggcgaacgggtgggagaagcgctaa

SEQ ID NO: 523481 - DNA, 1110 bp, Stenotrophomonas maltophilia
atgaaaaggaacgcgaagacgttaatcgcggggatggtcgcactgtcgatctcgcatgccgctatggcagacgacattaaagttgcggtagtgggtgcgatgtccggccccgttgcccagtggggcgatatggagttcaacggcgcgcgtcaggccatcaaagatatcaatgctaaaggcggcatcaaaggcgacaagctggtgggcgtggagtatgacgacgcctgcgatccaaaacaggccgtcgcggtcgccaacaaaatcgttaacgacggtatccagtacgtcatcgggcacctgtgttcctcctccacgcagcctgcgtctgatatctacgaagacgaaggcatcctgatgatcaccccgggcgccaccaacccggaactgacccagcgcggttaccagcacattatgcgtaccgccggtctggactcctcgcaggggccaaccgccgccaaatacatcctcgaaaccgttaagccacagcgcattgccatcattcatgacaaacagcagtacggtgaaggcctggcgcgctccgtacaggacggcctgaaaaaaggcggggcgaatatcgtcttcttcgacggcattaccgccggtgagaaagacttctccgcgctgatcgcccgcctgcaaaaagagaatatcgacttcgtttactacggcggctactacccggaaatggggcagatgttgcgccaggcgcgcgccaccggtctgaaaacccagtttatggggcctgagggcgtcggtaatgcctccctgtcgaacatcgcgggcgattctgccgaaggcatgctggtgacgatgccaaaacgctatgaccaggatccggcgaataaagctatcgtggatgcgctcaaggcacagaagaaagatccgagtggcccatacgtctggatcacctacgcggccgtgcagtcgctggccacggccatggatcgcaccggcagcaaagagccgctggatctggtgaaagatttaaaagcacacggggcgaacaccgtgattgggccgctgaactgggatgagaaaggcgatctgaagggatttgaatttggtgtctttaagtggcacgccgacggttcgtcctcggtcgccagataa

SEQ ID NO: 523482 - DNA, 927 bp, Stenotrophomonas maltophilia
atgtccgagcagtttctctactttttgcagcagatgtttaacggcgtcacgctgggaagcacctacgcgctgatcgccatcggctacacgatggtttacggcattatcggcatgatcaacttcgcccacggcgaggtgtacatgatcggtagctacgtctcctttatgatcatcgccgcgttgatgatgatgggcatcgacagcagctggttgctggtggccgccgggtttgtcggcgcgattgtgattgccagcgcctacggctggagcatcgaacgggtggcctaccggccggtgcgcagctccaagcgccttattgcgctgatctccgccatcggtatgtccatcttcctgcaaaactacgtcagcctgacagaaggttcgcgtgacgtggcgctgccaagcctgtttaacggccagtggattgtgggggccagcgaaaacttctctgcctctgtcaccaccatgcagctggttatctggattgtgaccttcctggcgatgctggccctgaccgttttcatccgctactcccgcatgggacgcgcctgccgcgcctgcgcggaagacctgaagatggcgagcttgctcgggatcaacaccgaccgcgtgattgccctgaccttcgtgatcggtgcagcgatggcggcggtggcgggcgtgttgctcggccagttctacggcgtaatcaacccgtacatcggctttatggccgggatgaaagccttcaccgccgcggtactgggcggtatcggcagcattccgggcgcgatgattggcggcctgattttgggcgtggccgaagcgctctcctcggcgtacctgagcaccgaatataaagatgtggtgtcgtttgccctgctgattctggttctgctggtgatgcctaccggtattctgggccgtccggaggtagagaaagtatga

SEQ ID NO: 523483 - DNA, 1278 bp, Stenotrophomonas maltophilia
atgaaaccgatgcattttgcgatggcgctgctttctgccgccatgttcttcgtcctggcgggcgtctttatgggcgtccagttagggctggacggcacgaagctggtggtggataccgcccccgatatccgctggcagtgggtgtttatcggtactggcgtggtgttcctgttccagctgctgcgtccgctgttccagaagacgctgaagaacgtctccgggccgaaattcgtccttccggcgatcgacggtacaaccgtgaagcagaagctgttccttgtggcgctgctggtggctgccgtggcgtggccgtttatggtatcgcgcgggacggtggatattgccaccctgaccatgatctacgtgattctggggctaggtctgaacgtggtggtggggctgtctggcctgctggtgctgggctacggcgggttctacgccatcggcgcgtacaccttcgcgctgctgaaccattattacggcctcggcttctggacctgtttgccgctggcggggctggtctctgccgccgcgggcttcctgctcggcttcccggtgctgcgcctgcgcggtgactacctggcgattgtgaccttaggcttcggcgaaatcgtccgtatcctgctgctcaacaataccgaagtgaccggcggtccgaacggcatcagccagatcccgaaaccgaccttcttcggcctggagttcagccgtaccgcccgcgaaggcggctgggataccttcagcaacttctttggcatcaaatacgacccgtccgaccgcgtgatctggctctacctggtggcgctgctgctggtggtgattaccctgtttgtgatcaaccgtctgctgcgcatgccgctgggccgcgcatgggaagcgctgcgtgaggatgagatcgcctgccgttccctgggcctgaatccgacccgtatcaagctgaccgcgtttaccatcagcgccgcgtttgccggtttcgccggaacgctgtttgccgcgcgtcagggcttcgtcagcccggaatcgttcacctttgccgaatcggccttcgtgctggcgattgtggtgctcggcgggatgggttcccagttcgccgtgatcctcgcggccatcctgctggtggtctcgcgcgagctgatgcgcgactttaacgaatacagcatgctgatgctgggtggcttgatggtgctgatgatgatctggcgtccgcagggcttgctgccgatgacgcgtccacagctgaagcttaagagcgcggaagcgaaaggagagcaggcatga

SEQ ID NO: 523484 - DNA, 768 bp, Stenotrophomonas maltophilia
atgagtcagccattattatccgttaacggtctgatgatgcgttttggtggcctgctggcggtcaacaatgtgaatctggatctgcacaagaaagagattgtctccctgattggcccgaacggcgcagggaaaaccacagtattcaactgcctgaccggtttttacaagccgacaggtggcaccatcatgctgcgcgaccagcacctcgaagggctaccgggccagcagattgcccgcatgggcgtggtgcgtaccttccagcacgtgcgtctgttccgtgagatgacggtgattgagaacctgctggtggcgcaacatcagcaactcaaaaccggcctcttttccggcctgctgaaaaccccggccttccgccgcgcgcaggaggaggcgctcgatcgcgccgccacctggctcgaccgtatcggcctgctccagcacgccaaccgtcaggcgagcaacctcgcctacggtgaccagcgtcgccttgagatcgtgcgctgcatggtgacccagccggagatcctgatgctcgacgaaccggcggcgggccttaacccgaaagagaccaaagagctggacgagctgattgccgagcttcgcgatcatcacgacaccaccatcctgctgattgagcacgacatgaagctggtgatgggcatttcggaccgtatctacgtggtaaaccagggcacgccgctggcaaacggcacgccggaagagatccgcagcaacccggacgtgatccgcgcataccttggtgaggcataa

SEQ ID NO: 523485 - DNA, 714 bp, Stenotrophomonas maltophilia
atggaaaaagcgatgttaacgttcgacaaggtcaatgcgcactacggtaagatccaggcgctgcacgacgtcagcctgcacatcaatcagggcgagatcgtcaccctgattggtgccaacggcgcggggaaaaccacgctgctcggcaccctgtgcggcgatccgcgcgccaccagcgggcggattgtgtttgacggcaaagatattaccgactggcagacggctaaaattatgcgtgaagcggtagcgatcgtcccggaagggcgtcgcgtgttctcgcgcatgacggtcgaagagaacctggcgatgggcggtttcttcgcccaccgggatgaataccagacccgcatcaaatgggtatacgaactcttcccgcgcctgtgggagcggcgaattcagcgcgcgggcaccatgtccggcggggagcaacagatgctggcgattggccgcgcgctgatgagccagccgcgtctgctgctgctggatgaaccgtcgctcgggctggcgcctatcatcattcagcagattttcgacaccatcgagcagctgcgcaaagaggggatgaccatcttcctcgtcgagcagaacgccaaccaggcgctgaagctcgctgaccgtggctacgtactggagaacggccgcgtggtgctctccgataccggcgatgcgctgctggcgaacgaagcggtgcggagcgcgtatttgggcggttaa

SEQ ID NO: 523486 - DNA, 1317 bp, Stenotrophomonas maltophilia
atgacatcgttacgacacacagctttgggtctggcaatcggtctggcttttgcgacgaacgcaatggctgtgaccaccattccgttctggcattctatggaaggggagttgggtaaagaggttgactccctggcgcaacgtttcaacgacacccacccggattacaaaattgtgccggtgtacaaaggcaactacgagcagagcctgagcgcgggcatcgccgccttccgtaccggcaatgcgccagccctgttacaggtttatgaagtcggcaccgcgaccatgatggcctccaaagccatcaagccggtctatgaagtgttcaaagacgcgggcatcaactttgacgaatcccagtttgtgccgaccgtctccggttactacaccgattccaaaaccggccacctgctgtctcagccgtttaacagctccacgccggtgctgtactacaacaaagatgccttcaaaaaagccggtttagatccggaacagccgccaaaaacctggcaggatctggcggagtacaccgcgaagctgaaagcggcggggatgaagtgcggctacgccagcggctggcagggctggatccagattgaaaacttcagcgcctggcacggcctgccggttgccaccaaaaacaacggcttcgatggcaccgacgcggttctggaatttaacaagccggagcaggtgaagcacatcgcgctgctggccgatctgaacaagaagggcgacttcagctatttcgggcgcaaagacgaatccaccgagaagttctacaacggtgactgcgccattactaccgcgtcttccggttcgctggcggacatccgtcactacgccaaattcaactacggcgtgggcatgatgccgtacgacgctgatgtaaaaggcgcgccgcagaacgccatcatcggcggggcgagcctgtgggtgatgcagggtaaagacaacggcacctacaaaggcgtggccgagttcctcgacttcctggcgaagccggaaaacgccgccgagtggcaccagaagaccggctacctgccgatcaccaaagccgcgtacgacctgacccgggagcagggcttctacagcaagaacccgggcgcggacatcgcgacgcgtcagatgctgaacaagccgccgttgccgttcaccaaaggcctgcgtctgggcaacatgccgcagatccgcaccatcgttgatgaagagctggaaagcgtctggaccgggaagaaaacgcctcagcaggcgctggattcagcggtagagcgcggcaaccaactgttacgccgctttgagcagtcgacgaagtcttaa

SEQ ID NO: 523487 - DNA, 888 bp, Stenotrophomonas maltophilia
atgtcatcatcccgtccggtgttccgttcccgctggctgccgtacctgctggtcgcgccgcagctggtcatcaccgttatcttttttatctggcctgcgggcgaagcgctgtggtactcggtacaaagcgtcgatccgttcgggctttccagccagtttgtcgggctggacaactttaccgcgctgttccatgacagctactacctggactccttctggacgacgatcaaattcagcgcgctggtcaccgtcagcggtcttgtcgcgtcgctgttcttcgccgcgctggtggattacgtagtgcgcggcagccgtctgtatcagaccctgatgctgctgccttacgctgtggctcccgccgtggccgccgtgctgtggatcttcctgtttaacccggggcgcgggctgattacccacttcctgggcgagtttggctatgactggaaccacgcccagaacagcggtcaggccatgttcctggtggtgttcgcctcggtgtggaagcagatcagctataacttcctgtttttcttcgccgcgctacagtctatcccgcgttcgctggtggaggccgccgcgattgacggcgcagggccagtgcgccgcttcttccggctgtcgctgccgctgatcgccccggtgagtttcttcctgctggtggtaaacctggtgtacgccttcttcgacaccttcccggtgatcgacgccgccactgcgggcggtccggtacaggcgacgacgacgctgatctacaagatctaccgcgaaggctttgccgggcttgatctctctgcctctgccgcccagtccgtggtgctgatgttcctcgtcatcatcctcacggtggtgcagttccgctatgtcgaaagtaaggtgcgctaccaatga

SEQ ID NO: 523488 - DNA, 846 bp, Stenotrophomonas maltophilia
atgattgagaaccgtcgcgggctgacgattttcagccataccctgctgatcctgggcatcctcgtcatcctgtttccactgtacgtggccttcgtcgccgccacgctggacaccaaagcggtgttcgacacgccgatgacgctcgtccccggcgggcatcttttcgagaacatgaaaactatctggacccagggcgtgggggccaacagcgcgccgttctggctgatgatgctcaacagtttcatcatggcgttcggcatcaccgtcggcaaaatcacggtgtcgatgctctcggcgtttgccatcgtctggttccgctttccgctgcgtaacctgtttttctggatgattttcatcaccctgatgctgccggtagaggtgcgtatcttcccgacggtggaggtgatcgccaacctgaagatgctcgacagctacgcgggcttaaccctgccgctgatggcctcggcgaccgccaccttcctgttccgccagttctttatgaccctgccggatgagctgattgaagccgcgcgtattgacggcgcctcgccgatgcgcttcttccgcgacatcgtgctgccgctgtcgaaaaccaaccttgcggcgctgtttgtgatcacctttatctacggctggaaccagtacctgtggccgctgctgatcgttcaggacgtcaacctcggcaccgccgtggcgggcatcaaaggcatgatcgccaccggcgaaggcaccaccctctggaaccaggtaatggcggcgatgctgctcacccttatccccccggtcgttatcgttttagccatgcagcgtgcgtttgtgcgtggtttagtggacagtgagaaataa

SEQ ID NO: 523489 - DNA, 1071 bp, Stenotrophomonas maltophilia
atggcaggtttaaaattacaggcagtaaccaaaagctgggacggcaaaacccaggtcattcagccgctgacgctcgacgtggcggacggggaatttatcgtcatggtcggtccgtccggctgtgggaaatccacgctgctgcgcatggtggcggggctggaacgcgtgacgtccggggatatctggattgaccgccagcgcgttaccgagatggaacccaaagatcgcggcatcgcgatggtgttccagaactacgccctctatccgcacatgagcgtggaagagaacatggcctgggggctgaaaattcgcggcatgggcaaaggccatatcgaggagcgcgtgaaagaagccgcgcgcattctggagctggacggcctgctcaagcgtcgcccgcgtgagctttccggcggccagcgtcagcgcgtggcgatggggcgcgccatcgtgcgcgatccggcggtctttctgttcgacgaaccgctgtcaaacctcgacgccaagctgcgcgtgcagatgcgccttgagctacagcagctgcatcgccgcctgaaaaccacgtccctctacgtgacccacgatcaggtagaggccatgactctcgcccagcgcgtgatggtgatgaacaaaggcatcgccgagcagattggcaccccggtggaagtctacgaaaaaccggccagccgttttgtggcgagttttatcggcagcccggcgatgaacctgctggacgggcggatcaatgctgcaggaacccattttgagctggaaagcgggatggcgttgccgatcaactggtactatcgtggctacgccgggcgtaagatgacgctcggtatccgcccggagcatattggtttgacgtctcaggcggacggcggcgtgccgctggtgatggacacgctggagatgctgggcgcagacaacctggcgcacggacgctggggcgaacaaaagctggtggtgcgcctgccgcatcaggagcgcccgaaggcaggcagcacgctgtggctgcatatgccggaaaatcacctgcacttatttgacggtgaaacaggacaacgagtatga

SEQ ID NO: 523490 - DNA, 741 bp, Stenotrophomonas maltophilia
atgagcaactggccttacccccacattgtcgcccaccgtggcggcggtaaactggcgccggaaaacaccctggcggcaattgacgctggcgcgcgctacggccacacgatgatcgagttcgatgccaagctgtcgaaggacggcgaaattttcctgctgcatgacgacaaccttgaacgcaccagcaacggctggggcgtggcgggcgaactgccgtggcgcgatctgctgaaggtggacgccggaagctggttcagcggggaattcaaaggcgagccattgccgctgctggcggaagtggcggaccgctgccgccagcacggcatgatggccaacatcgaaatcaaaccgaccaccggcaccgggccgctgacgggcaaagtcatcgcgctggccgcgcgtgagctgtgggaagggatgacggtaccgctgctgtcgtcgtttgacatcgacgcgctggaagcggcacaggcggccgtaccagagctgccgcgcgggctgctgctggatgagtggcgagaagactggcgcgcgctgactgcccgcttaggttgcgtgtcgatccacctcaaccataagctgctggatgaagcgcgcgtgatgctgttgaaagaggccggtctgcatatcctggtctacaccgtcaacaaaccccagcgtgcagccgagctgctgcgctggggcgtggacagcatctgtaccgatgcgattgaccagatcgggccgaactttatttattaa

SEQ ID NO: 523491 - DNA, 372 bp, Stenotrophomonas maltophilia
atgaaacgattaccgatcctgatcgcgctgcttccgttcgccgcgctcgcacagccgataaacacgctgaacaacccaaaccagcagggctatgtcattccgagccagcagcgtatgcagacggagatgatgagccagcaacagcagcagaaagggatgcttaatcagcagttaaagacgcagacccaggtgcagcagcagcacctgcaaaaccagatgaacgctaatacccagcgcgtgcagcagggccagatgcgcgagcagccgctgtcaaactcaaacggtgggatgttagggggcggggtgtcgcaaagcagcggtcagcagcatatgctgccgacccagcagaacggcagtatgcttaataaataa

SEQ ID NO: 523492 - DNA, 1746 bp, Stenotrophomonas maltophilia
atgatgaaaccaacctttttgcgctgggtcgccatcgctgcgctgatggcaggcggcacatttaccgtggcggccaacccgcccgccgctcctccggtctcttacggcgtggaggaagatgtttttcatcccgtgcgggcgacgcacggcatggtggcctcggttgacgcgctggcaactcaggtgggcgtcgatattcttaaacagggcggtaacgcggtggatgcggcggtcgcggtcgggtacgcgctggcggtgacgcatccacaggcggggaacctgggcggcggcgggtttatgatgctgcgcacgaaagacggtaaaactacggccatcgactttcgtgagatggcaccgaatcaggcctcccgcgatatgttcctcgacgatcagggcaatccggacaataaaaaatccctgacctcgcaccttgcctccggcacgccgggcaccgttgcggggttctcgctggcgctggaaaaatacggcacgctgccgctgaataaagtggtacagcctgccatcaggctggcgcgcgacggcttcgtcgtcaacgacgcgctggcggacgacctcaaaacctacggcagcgaagttattcccaatcatgaaaacagcaaggctatcttctggaaagacggcgagccgctgaagaagggcgataagctggtgcagaggaacctcgcaaaaagtctcgaactgattgccgaaaacggtccggacgccttctataaggggccgattgccgatcaaattgccgacgagatgcagaagaacggcgggctgatcaccaaagcggatctggcggaatataaggcggtggagcgcgagccgatcagcggcacctatcgcggctacgaggtcttctccatgccgccgccgtcctccgggggcattcacatcgtgcagatcctcaatattctggaaaacttcgatatgcacaagttcggcttcggtagcgccgatgccatgcaggtgatggcggaggcggagaagcgcgcctacgctgaccgctcggaataccttggcgatccggacttcgtgaaggtgccgtggcaggcgctgaccaacaaagcctatgccaaatcgattgccgacgagatcgacatcaacaaggcgaagccgtcgagcgagatccgccccggcaagctggcgccgtatgaaagtaaccagaccacccatttctcggtggtggataaagacggtaacgcggtggcggtgacctacacgcttaacaccactttcggcaccgggattgtggcgggcaacagcggcattttgctgaacaacgagatggatgacttctctgccaaaccgggcgtgccgaacgtctacggcctggtcggcggcgatgcaaatgcggtcgggccgaagaagcgcccgctgtcgtccatgtcgcccaccatcgtggtgaaagacggcaaaacctggctggtgaccggcagcccgggcgggagccggattatcaccaccgtgctgcaaatggtggtgaacagcatcgactttgggatgaacgtcgccgaagcgaccaatgcgccgcgtttccatcaccagtggctgccggacgagttgcgcgtggagaagggctttagcccggataccctcaagctgcttgagcagcgcgggcagaaggtggcggtgaaggaggcgatgggcagcacccagagcattatggtcgggccggacggtgccctgtttggcgcgtcggacccacggtcggtggatgatttaacggcggggtattga

SEQ ID NO: 523493 - DNA, 489 bp, Stenotrophomonas maltophilia
atgagtgagatagtgatacgccacgctgaaccgaaagattacgacgccattcgtcagatccacgcccagccggaggtgtaccacaacacgctacaggttcctcatccctcagagcagatgtggcatgaccggctaaccgatcagcccggtatcaagcagcttgtcgcctgtattgatgataccgtcgccgggcatctgtgcattgccgtagcccagcgtccgcgccgcagccacgttgccgattttggaatttgtgtgggtgcgcagtggcaaaaccggggcgtcgccagcgcgctgatacgcaccatgattgatatgtgcgataactggctgcgcgtcgaccgcatcgagttaacggtgtttgtcgataacgaaccggcaatcgcggtgtacaaaaagcacgggtttgagattgaaggcaccggcaggcgctacgccctgcgcaacggcgagtacgtggatgcgtattatatggcgcgtatgaagtaa

SEQ ID NO: 523494 - DNA, 1038 bp, Stenotrophomonas maltophilia
atgacactacattgtgcatttattggatttggcaaaagcaccacgcgttaccaccttccgtatgttcttaaccgaaaagagacctggcacgtggcccatatctatcgccgccgcgcgaagccagaagagcagtctccgcagtattcccatattcatttcaccagcgatcttgatgaagtgttaaatgatccgcaggtgaagctggtggtggtctgtacccacgccgacagccactttgactacgcaaaacgcgcgctggaagcgggtaaaaacgtgctggtggaaaaaccgttcaccccgaccatcgtcgaagcgaaggaactctttgcgctggcaaaaagcaaaggcctgaccgtcacgccctaccagaaccgtcgctttgacagctgcttcctgacggcgaaaaaggcgatcgaaagcggcaagctcggcgagatcgtggagatcgaaagccacttcgattactaccgccctgtggcagaaaccaaacccggcctgccgcaggacggttcgttctacggtctgggcgtacacaccatggaccagatcatctccctgtttggccgcccggaccacgtggcgtacgacatccgcagcctgcgcaataaggccaatccggacgataccttcgaagcacagctgttctacggcgatctcaaagccatcgtcaaaaccagtcatctggtgaaaatcgactacccgaaatttatcgttcacggcaagaaaggctcctttatcaagtacggcatcgaccagcaggagaccagcctgaaggccaacatcatgccgggcgaaccgggctttgcggcagatgattccgtgggcgtgctggagtacgtgaacgacgagggcctgacggtcagggaagagctgaagccggaaacgggcgattatggacgcgtctacgatgcgctgtatgaaaccctctccagcggcacgccgaattacgtcaaggaatctgacgttctgacgaacctggaaatccttgaacgggccttcgaacaggcttcccctgccacggtaaccctcgccagataa

SEQ ID NO: 523495 - DNA, 696 bp, Stenotrophomonas maltophilia
atgatctacttacgcaaagcaaacgaacgtggtcacgcgaatcatggctggctggactcatggcattcattctcgtttgccgactactacgacccgaacttcatgggcttctccgcgctgcgcgtcattaacgacgacgtgattgatgcaggccagggcttcggtacccacccgcacaaggacatggaaatcctgacctatgtgctggaaggggcggttgagcaccaggacagcatgggcaataaagagcaggttccggcgggcgagttccagattatgagcgcggggaccggggtgcgtcactctgagtacaacccgagcaaaacggaaaaactgcacctgtatcaaatctggatcattccagaagagaccggcatcacgccacgctacgaacagcgccgcttcgatgcgaaacagggtaaacagctggtgctctccccggatgcgcgtgaaggttccctgaaagtgcatcaggatatggagctgtaccgctgggcgctggcgaaagatgaacagtctgtgcaccagatcgccgccaaccgccgcgtgtggatccaggtggtgaaaggcgaggtgtccatcaacggcaccaaagccaccaccgccgatggcctggcagtctgggatgagcaggcgctctccgtgcatgccgacagcgaaagtgaaattctgctgtttgatctgccgccggtctaa

SEQ ID NO: 523496 - DNA, 996 bp, Stenotrophomonas maltophilia
atgaaaaagaaacgccccgtacttcaggatgtcgccgatcgcgtcggtgtgaccaaaatgacggtcagccgttttttacgtaacccggagcaggtttccgtggcgttgcgtggcaagattgccgccgcccttgatgaactgggttatatccccaaccgcgcgcccgatattctctccaatgcgaccagccgtgcggtgggcgtcctgcttccttccttaaccaaccaggttttcgctgaagtgctgcgtggcatcgaaagcgtgaccgatgcctttggttatcagaccatgctcgcccactatgggtacaagccggaactggaagaggaacgtcttgaatcgatgctttcctggaacattgacggcctgattttaacggaacgtactcacaccccgcgcacgctgaaaatgattgaagtggcaggcattccggtggtggagctgatggacagccagtcgccgtgcctcgacatcgccgtggggttcgataactttgaagcggcgcgtcagatgacggcggcgatcatcgcccgcggtcatcgccatgtggcctatctgggtgcgcgtctggatgaacgtactatcatcaaacagaagggatacgagcaggcgatgctcgacgccggtttaaccccgtacagcgtgatggtggagcaatcttcctcttatacgtcgggtattgagctgatgcgtcaggcgcgacgcgagtatccgcaactggacggtattttctgtaccaacgatgaccttgcggtcggcgccgcgtttgagtgtcagcgcctgggtttaaaaatcccggatgatatggcgattgccggcttccacggccacgatattggccaggtgatggagccgcgtctggcaagcgtcctgaccccgcgtgaacgcatgggccgcattggtgcagaacgcctgctggcgcgcattcgtggtgaggcagttacccctaaaatgttagatttaggtttcaccttgtcaccgggtggatctatttaa

SEQ ID NO: 523497 - DNA, 528 bp, Stenotrophomonas maltophilia
ttgagcacgactaatcacgatcaccacgtttacgtcctgatgggcgtgtccggtagcggtaaatctgccgtggcgagcgaagtggcgcatcaactccaggctgcgtttcttgatggtgacttcctccatccgcgcagcaacatcatgaaaatggcttccggcgagccgctgaatgacgacgaccgcaaaccctggttgcaggcgctgaatgatgccgcgttcgcgatgcagcgcaccaataaagtctccctgatagtctgttccgcgctgaaaaaaacctatcgcgacctgctgcgcgatggcaacccgaacctctctttcatctacctgaaaggcgatttcggggtaattgaaagccgcctgaaggcgcgtaaaggccacttcttcaaaacccagatgctggtaacgcagttcgaagcgttgcaggagccgggggctgacgaacaggatgtcttagtggttgatatcgatcagccgctggaaggtgttgttgccagcaccatcgaggttattaataaaaggcagtaa

SEQ ID NO: 523498 - DNA, 1266 bp, Stenotrophomonas maltophilia
atgcacgccttcgttgctttgatggtggtttctattggtgccggtctcttttccggaatgccgctcgacaaaattgcggcgacgatggaaaaagggatgggcggcacgctcggcttcctggccatcgtagtcgcgctcggcgcgatgtttggcaagattttgcacgagacgggcgcggtcgatcagattgccgtcaagatgctgaaatccttcggacacagccgtgcgcactacgcgattggtctggctggtctgatttgcgcgctgccgctgttctttgaagtggcggtggtgctgctgattagcgtggcgttctccatggcacgccataccggtaccaacctcgtgaagctggtcattccgctgtttgcgggcgtggcggcggcggcggcgtttctgctgccggggcctgcgccgatgctgctggcttcccagatgcatgctgactttggctggatgatcctgattggcctgtgtgcggcgatcccggggatgattatcgccggtccgctgtggggcaacttcattagccgttacgttgagctgcacattccggatgacatctccgagccgcacctgggcgagggcaaaatgccgtccttcggcttcagtctgtctctgatcctgctgccgctggtgctggtgggcctgaaaaccatcgctgcgcgttttgtgccggtggggtcaaccgcttacgaatggttcgaatttattggccatccgttcactgcgatcctggtggcgtgtctggtcgcgatttacgggctggcgatgcgtcagggcatgccaaaagatcgcgtgatggagatatgcggtgccgcgctacaaccggcgggtattattctgctggtgatcggggcgggcggcgtgttcaagcaggtgctggtggattccggtgtgggtccggcgctgggcgaagcgctgaccggaatgggcctgccgattgcggtcacctgcttcgtgctggccgcggcggtgcgtatcattcagggctccgcgaccgtggcgtgcttaaccgcggtgggtctggtgatgccggtgattgaacagctgaactactcgggcgcgcagatggcggcgctctctatctgtatcgcgggcggttcgattgtggtatctcacgtgaacgacgcaggcttctggctgttcggtaaatttaccggcgcaaccgaagcgcaaaccctgaaaacctggacgctgatggaaactatcctcggcacgacgggtgcggttgtcgggatgattgcgtttacgctgctgagctaa

SEQ ID NO: 523499 - DNA, 594 bp, Stenotrophomonas maltophilia
atgagtgaaatcatttccgcagcggttttattgatcctgattatggatccgctcggtaatctgccgatcttcatgtcggtgctgaagcacaccgagccgaagcgccgtcgggcgatcatgatccgcgagctgctcatcgccctgctggtgatgtttatcttcctgttcgccggtgaaaaaatcctcgctttcctgaacttacgtgccgaaacggtctccatttccggcgggatcattttgttcctgattgccataaagatgattttcccgagcgcggaaggcagcagcagcggcctgcctgcgggtgaagaaccgtttatcgtgccgctggcgattccgctggtcgccgggccaacgattctggcaacgctgatgctgctttcgcatcagtatccgaatcagatgagccatctggtcattgccctgctgatcgcctggggcgggacatttattatcctgttgcagtcgtcgctgttcctgcgtctgctgggcgagaaaggggtgaacgcccttgagcgcctgatggggctgattctggtgatgatggcgacgcagatgttcctggatgggatccgggcatggatgaaagggtga

SEQ ID NO: 523500 - DNA, 1104 bp, Stenotrophomonas maltophilia
atgaaaaacgttggttttatcggctggcgcggtatggtcggctctgtactcatgcaacgcatggttgaagagcgcgatttcgacgccatccgcccggtcttcttctccacttcccagctcggccaggctgcaccgtcctttggtggtaccacaggcacgttgcaggatgcttacgatctggaagcgctgaaggcactcgacattattgtgacctgccagggcggcgattataccaacgaaatttatccgaagctgcgtgaaagcggctggcagggctactggattgacgcggcctcttcgctgcgtatgaaagacgatgccatcatcattctcgacccggttaaccaggatgtcattaccgacggcctgaacaacggcgtgaaaacgtttgttggcggtaactgcaccgtcagcctgatgctgatgtccctcggcggcctgttcgcacaggatctggtggagtgggtctccgtagcgacctaccaggcggcgtccggcggcggcgcgcgtcatatgcgcgagctgctgacccagatgggccagctgcaccagagcgtcgcgaccgagctggcaaacccggcgtccgcgatcctcgatatcgagcgtaaagtcactcagctcacccgcagtggcgagttgccggtggataactttggcgtaccgctggccggcggtctgatcccgtggatcgacaaacagctggataacggccagacccgcgaagagtggaagggccaggctgagaccaacaaaatcctcgccaccgcgaacaccattccggttgacggtctgtgcgtgcgtatcggcgcgctgcgctgccacagccaggctttcaccattaaactgaaaaaagatgtgtctattccgaccgtggaagagctgctggctgcgcacaacccgtgggcgaaagtggtgccaaacgatcgcgatatcaccatgcgcgaactgaccccggcagccgttaccggcacgctgaccaccccggttggccgcctgcgcaagctgaacatgggaccggagtacctctccgcgttcaccgttggcgaccagcttctgtggggtgccgccgagccgctgcgccgcatgctgcgccagctggcgtaa

SEQ ID NO: 523501 - DNA, 2187 bp, Stenotrophomonas maltophilia
atgtccgatcgtatttcgagagacgtgattaatgcgcttattgcgggtcactttgccgaccccttttctgtgctagggatgcaccgtacagaggccggactggaagttcgggcgctgttaccggatgcaacagaagtgtgggttatcgaacccaaaaccggccgcaaggtgggtaatctggaatgcctcgactcgcgtggcttcttctcgggcgtcatgccccgccgtaaaaatccttttcgttatcagcttgccgttatctggcacggtcagcaaaacctgattgatgatccctatagcttcggcccgctcttaaaagagatggacgcctggctgctgtccgaagggacccatttacgcccctacgaaacgctgggtgcccatgcggataccatggacggtatcaccggcacgcgctttgccgtatgggcgccaaacgcccagcgcgtctccgttgtcgggcagttcaactactgggacggtcgtcgtcaccccatgcgcctgcgccgggaaaccggcatctgggagctgtttatccccggcgcgcacaacggtcagctctacaaattcgagatgatcgatgccaacggcaagctgcgtattaaatccgacccgtacgcctttgaggccgaactgcgcccgaataccgcctcgctgatttgcggcctgccggagaaggttgtccagagcgaggagcgcaagcaggccaaccgctttgatgcgccgatctccgtctatgaagtgcatctcggctcctggcgtcgccacaccgataacaacttctggctgagctatcgcgagctggcggaccagctggtgccgtacgccaaatggatgggctttacccatctggagctgctgccaatcaacgaacacccgttcgacggtagctggggctatcagccgaccgggctatatgcgcctacgcgccgcttcggcacgcgcgatgacttccgctatttcattgatgccgcgcacgccgccggactgaacgtgatcctcgactgggtgccgggccacttcccgtcggatgattttgcgctggcagagtttgacggtacgaagttgtacgagcacagcgatccgcgcgaaggctatcaccaggactggaacacgctgatctacaactacggtcgccgtgaagtgtcaaactacctggtcgggaacgcgctgtactggatcgaacgtttcggcattgatgccctgcgcgtcgatgcggtggcgtcgatgatctaccgcgactacagccgcaaagagggtgagtggatcccaaacgagtatggcgggcgtgaaaacctcgaagcgattgagtttctgcgcaacaccaaccgcatcatcggcgagcaggtggaaggcgccgtgaccatggcggaagagtcaacagacttcccgggcgtttcccgtccaccggcaatgggcggcctgggcttctggtacaagtggaacctcggctggatgcacgacacgctcgactacatgaagcttgacccggtttatcgtcagtatcaccacgataagctcaccttcgggctactctacaactacaccgaaaacttcatgctgccgctgtcgcacgatgaagtggtacacggcaagaaatccgttctcgaccgcatgccgggggacgcgtggcagaagtttgccaacctgcgcgcctattacggctggatgttcgccttcccgggcaaaaagctgctgtttatgggcaacgaatttgcgcaagggcgcgaatggaaccacgacaccagccttgactggcatctgctggaaggcgcggacaactggcaccacggcgtgcagcgtctggttcgcgacctgaacctgacctatcgccaccataaagcgctgcacgagctggacttcgatccgtacggctttgagtggctggtggtggacgaccacgagcgctcggtgtttgtctttgtgcgccgcgacaaggtgggtaacgagatcattgtcgccagcaacttcacgccgataccgcgcgaacactaccgcttcggcataaaccagccgggcaaatggcgagaaatccttaacaccgactccatgcactaccacggcagcaacgctggtaacggcgggctggtacagagcgacgccatcgaaagccacggtcgtccgaactcccttggcctgacgctgccgccgctgagcacaatctggctggtgcgggagggagaatga

SEQ ID NO: 523502 - DNA, 1974 bp, Stenotrophomonas maltophilia
atgacgcagctctcggcaggtaaacccgaaccgctcggggcgagttttgacggaaagggggtgaacttcacgctcttttctgcccatgctgagcgggtggaactctgtgtgtttgacggggaaggtaacgaacaccgttacgatttaccggcgcgcacgggggatacctggcatggctacctgcccggaggacggccggggatgcactacggttttcgcgtacacggcccctgggagccctctcaggggcactggtttaacccggcgaagctgctgattgacccatgtgcgcaccgcgtggacggtgagtttaaagacgacccgctgttccacgttggctacggcgaaccagaccaccgcgacagcgcacccgtcgcgcccaaaagcgtggtggtacacgatctctacgactgggaagacgatgccccgccgcgcacgccgtggggcaacaccgttatttatgaagcccacgtcaaagggctgacgtatctgcatccgtcaatccccaaagagatgcgcggcacctacaaagcgcttgggcatccgacgatggtcgcgtacctgaagcacttagggatcaccgccctggagctgttgcccgtggcgcattttgccagcgagccgcggctgcagcgtcttgggttaagcaactactggggctacaacccgctggcgatgtttgccctcgacccgcgctacgcggtgcatccggagaaggcgcgggatgagtttcgcgatgcggtgaaggcgcttcacgcggcgggtatcgaggtcattctggacgtggtgttgaaccacagtgcagaaagcgatcttgatggcccgacgctctcacagcgcggaatcgataaccgtagctattattggatcagggacgacggcgattacgagaactggaccgggtgcggtaacaccctcaacctcagtcatccggccgttacgcattacgcgtacgcgtgcctgaaatactgggttgagacgttccacgtggacggttttcgtttcgacctggcgccggtaatggggcgtaccccggcgttcagccagcaggcgccgctgtttgaggccatcaaaaactgtccggtgctttcaaaggtgaagctgattgcggagccctgggacatcggcgagggcggctatcaggtggggaacttcccgccgctgtttgccgagtggaacgaccacttccgcgatgccgtccgccgcttctggctgacgcgcgatctgtcgctgggggagtttgccggtcgctttgccggctccagcgatctctttaagcgtgacggcaaacgtccgtcggccaccattaatctggtgacggcgcacgacggttttacgctgcgcgactgcgtttgtttcaatcagaaacacaatgaggcaaacggcgaagagaatcgcgatgggactaacaacaaccatagctttaaccatggtatagaagggttaggcggaagtctggatgtgatcgagcggcgacgcgccagcgttcatgcgctgctgacgacgcttttgttgtcgcagggcacgccgatgctgctggcgggcgatgagcacggtcacagccagcacggcaacaacaacgcctattgccaggacaacaccctgacctggctcaactgggaagaagcgaacagcgggttgacccatttcaccgcggcgctgatccatcttcgccagcacatccccgcgctcaccgccgactgctggtgggaagagggcgacggcaacgttcgctggctgaataaagacgcgcaaccgttaagcgcgcaagagtggcaacacggcataccctgtctgcaaatcctgctttcggatgcgtggctggtgacgctgaacgcgacggatgacgtcgcagagattgttttacctgacggggaatggcgagccattcctccctttgccggagcggataatccggttgttatggctgtctggcacgggcctgcgcacggagtgtgcgtattccaaagatga

SEQ ID NO: 523503 - DNA, 1296 bp, Stenotrophomonas maltophilia
atggttagattagagaagaacgatccgttaatgttggcgcgccagctaccattaaaaacagttgccctgatcctcgcgggcgggcgtggtacccgtctgaaagatttgaccatcaagcgcgccaaaccggccgttcactttggtggtaagttccgtattatcgattttgcactctccaactgcctgaactcaggcattcgccgtattggcgtcattacccagtatcagtcgcacacgctggtgcagcacattcagcgcggctggtcattcttcagcgaagagatgaacgagtttgtcgatctgctcccggcgcagcagcgcgttcacggggagaactggtaccgcggcacggcggatgccgtgacccagaacctcgacatcattcgccgctacaacgcggaatacatcgttatcctcgccggggaccacatctacaagcaagattactcccacatgctgatcgaccacgtcgaaaaaggtgcgcgctgcaccgtggcgtgtcttccggtgcctgttgcagaagcaaccgcgtttggcgtgatgcatgtagatggcgacgacaagattatcgactttgtcgaaaaaccggcgaatccgccaaccatgccgggagacgacaccaaatcgctcgccagcatggggatctatgtctttgatgccgattatctttatgaactgctggaagaagacgacaaagacgaaaactccagccacgacttcggtaaagacatcatcccgaaaattaccaaagctggcatggcgtatgcacatcctttcccgttgtcctgcgtgcagtccgatccaaatgcggaaccttactggcgcgacgtcggcacgctggaagcctactggaaagccaacctcgatttggcatctgtgacgcctgaactggatatgtacgaccagaactggccgattcgcacccatatggaatcgctgccgccggcgaagttcgtccaggatcgctccggcagccacggtatgacgctgaactcgctggtctctggcgggtgcattatctccggttcggtggtggtgcagtccgtgctgttcccgcgcgtgcgtataaactcattctgtaatatcgattcggcagtcctgctgccggatgtctgggtagggcgctcatgtcgtctgcgtcgctgcgttatcgaccgtgcctgcgtcattcccgaagggatggtgattggggaaaacgcggaagaagatgcacgtcgtttctaccgatcggaagaggggatcgtgttagtaacacgggaaatgttgcggaagctgcaaatcaaacaggagcgatga

SEQ ID NO: 523504 - DNA, 1434 bp, Stenotrophomonas maltophilia
atgcaggttttacacgtatgttctgagatgttcccgttgttaaaaacgggcggactggcggatgttcttggtgcattaccggcggcgcaaattgccggaggggtggatacccgcgtgttgttacccgcttttccggatatccggcggggtattcccgatgcgaaggttgttacccgccgcgagaccttcgcgggacgtatcaccctgctgtttggacattacaatggcgtagggatttacctgattgatgcgccgcatttatacgaccgacccggcagcccgtatcacgataccaacctgtacgcctataccgataacgtgctgcgctttgccctgctcggctgggtgggggcggagatggccgtcgggctggatccgttctggcgtccgaacgtggtgcacgcgcacgactggcatgcggggctggctcctgcgtatctggcggcgaaaggacacccggcgaaatcggtgtttacggtgcacaacctggcgtatcagggcatgtattacgcgcatcatatgaatgacatcgatctgccatggtcgttctttaacatgcacggactggagtttaacggacagatttcgttcctgaaggccggtctgtactacgccgaccacatcacggcggtcagcccaacctacgcgcgggaaattacccagccggagttcggttacggtatggaagggctactgcaacagcgccaccgtgaaggtcgtctgtcgggcattctgaacggcgtggatgaacagatctggaatccggaaacggacctcctgctggcagcgcgctatggtcgcgactccgtggaggacaaagcggagaacaagcgtcagctacagattgcgatggggctgaaggtcaacgacaaggtaccgctgtttgcggtggtcagccgcctgaccagccagaaagggctggatctggtgctggaagcgctgccgggattactggagcagggtgggcagcttgcgctgctcggcgcgggcgacccggtattgcaggaaggtttcctcgcggccgcggcggaacatccggggcaggtgggcgtgcagattggctatcacgaagcgttctcgcaccgcatcatgggcggcgcagacgtgattctggtgccgagccgtttcgagccctgcggcctgacgcagctctatggtctgaaatacggcacgctgccgctggtacgccgcacgggcgggctggcggatacggtgtctgacagctccctggaaaacctggcggatggtatcgccagcgggtttgttttcgaggacagtaatgcctggtcgctacttcgggcgatccggcgtgctttcgtcttgtggtcccgtccatccctgtggcgttacgtacaacgtcaggcgatgtccatggactttggctggcacgttgcggcgcagtcctaccgcgacctttatcaacgcttgatgtaa

SEQ ID NO: 523505 - DNA, 2448 bp, Stenotrophomonas maltophilia
atgaatgctccatttagctactcttcccccacgctcagcgttgaggcgttgaaacactccatcgcctataagctgatgtttaccattgggaaagatcccgttattgccaacaaacatgagtggctgaacgccacgctgtttgcggtgcgtgaccgtatggtcgaacgctggctgcgctccaaccgcgcccagctctcgcaggagacgcgacaggtgtattacctgtcgatggagtttttgattggtcgcaccctctccaatgcgctgttatcgctcgggatttatgacgacgtcaaaaacgcactggaagagatggggctggacttagaagagctgattgacgaagagaacgacccggggctgggtaacggtggtctcgggcgacttgccgcctgcttcctcgattcactggcgacgctggcgctgccgggacgcgggtacggtattcgctacgactacggcatgttcaagcagaacatcgttgatgggcgtcagaaagagtcgccggactactggctggagtacggtaacccgtgggagttcaagcgccacaacacgcgctacaaggtgcgttttggcgggcgtattcagcaggaagggaaaaaatcccgctgggtggaaaccgaagagatcctcgccgtggcctatgaccagattatccccggctacgacaccgatgcgaccaacacgctgcgtctgtggaacgcgcaggccagtagcgagatcaacctcggtaaattcaatcagggtgactacttcgcggcggtggaagataaaaaccactctgagaacgtgtcccgcgtcctgtatccggatgactcgacctactcgggccgcgagctgcgtctgcgtcaggagtatttcctcgtctcggcaacgattcaggatatccttagccgtcactatcagctgcacaaaacctatgcgaatctggcggagaaaacggcgattcacctcaacgatacccatccggtgctgtcgatccctgagctgatgcgcctgctgattgacgagcataagttcagctgggatgacgcgtttgaagtgacctgccaggtgttctcgtacaccaaccatacgctgatgagtgaagcgctggagacgtggccggtggatatgctcggcaaaattctgccgcgtcacctgcaaatcatcttcgagatcaacgactacttcctcaagaccttgcaggagcagtacccgaacgataccggcctgctgagccgcgcctcgatcattgatgaatccaatggtcgccgcgtgcgcatggcctggctggcggtggtgatcagccataaggtcaacggagtttcagagctgcattcgaacctgatggtgcagtcgctgtttgcagactttgcgaagatcttcccgacgcgtttctgcaacgtgaccaacggcgtcaccccgcgccgctggctggcgctggcgaaccagccgctgtctgacgtgctggacgaaaatatcggccgcacctggcgcaccgatttgagccagctgagcgagcttgaacaacacattgattttccgacggtgaacaaagccgtacgggaagccaagctgctgaacaagaaacggctgtcagtctggctggcgatgcatctcaacgtggtggcgaacccgaaagcgctgttcgacgtgcagatcaaacgtatccacgagtacaagcgtcagctgatgaacgtcctgcacgtcatcactcactacaaccgcattaaggctgacccgacagcggagtgggtgccgcgcgtgaaaatctttgccggtaaggcggcctccgcgtactacatggcgaagcacatcattcatcttatcaacgatgtggcgaaggtagtgaaccaggatccggacattggtgacaagctgaaagtggtgtttatcccgaactacagcgtaagcctggcgcagctgattattccggcggcggatctctcagagcagatttccacggcggggacggaagcatccggcaccagcaacatgaagtttgccctgaacggcgcgctgaccatcggcacgctggacggcgcaaatgtcgaaatgctggagcatgtgggcgcggagaatatctttatcttcgggaatacggcggaagaggtggaggcgctgcgcaagcagggctactcgccgcgtgagtattatgaagaggatgaagagttacgccaggtgctgacgcaaatcgccaccggggtgtttaaccctgaggagcctgggcgctatcgtgacctggtggactcgctgattaactttggcgatcactatcaggtgctggcggattaccgcagctacgtggattgtcaggataaggtggacgaactgtaccgtcagcaggagaagtggaccagcgccgcgatgcataacatcgccaacatgggatacttctcgtcagacaggaccatcaaagagtatgccgagaatatctggcatattgatccggtgaggttgtaa

SEQ ID NO: 523506 - DNA, 1509 bp, Stenotrophomonas maltophilia
atggaaaccaaagatctgattgtgataggcgggggcatcaacggtgccggtattgcggttgatgccgcaggacgcggtttatccgtgctgatgctggaagctaacgatctcgcctgcgcgacgtcgtccgccagctccaagctgatccacggaggcctgcgctacctggaacactacgaattccgcctggtcagcgaagcgctggccgaacgcgaagtgctgctgaaaatggctccgcatctggcgatcccgatgcgcttccgcctgcctcaccgcccgcacctgcgtccggcgtggatgatccgcatcggcctgttcatgtacgatcatctgggtaaacgcaccagcctgccgggttcgaccggtttgcgttttggctcagaatcggtccttaagcctgaaatcgtgcgcggtttcgaatattccgactgctgggtggacgatgcgcgtctggtgctggctaacgcgcagatggtcgagaagaaaggcggcgaggtgaaaacccgtacccgcgcgatcgccgcgcgccgcgaaaacggcctgtggatcgtggaagcggaagacgtggataccggcgagaagtttagctggaaagcgcgcggcctggtgaacgccaccggcccgtgggtgaaacagttcttcgatgacggtatgcacctgccttctccgtacggcatccgcctgatcaagggcagccacattgtggtgccgcgcgtgcatacccagaagcaggcttatatcctgcaaaacgaagacaagcgcatcgtgtttgtgatcccgtggatggacgagttctccatcatcggcaccactgacgtggagtacaaaggcgatccgaaaaacgttgagattgaagagagcgaagtcagctacctgctgaaagtgtacaacgcacactttaagaaacagctggcgcgcgatgacgtggtctggacctactccggcgtgcgtccgctgtgtgatgacgagtctgactcaccgcaggccatcacccgtgactatacgcttgatattcatgacgtagacggtcaggcgccgctgctgtcggtgtttggcggtaagctcaccacctaccgtaaactggcggagcacgcacttgagaaactggcgccgtattacaaaggcatcggcccggcgtggacgaaaggcgccgtgctgcctggcggcgatatcggcaataaccgcgacgattacgccgcgaagctgcgtcgccgcttcccgttcattaccgaaggaatggcgcgccactacgcccgcacctacggcagcaataccgaactgttcctcggcgacgcaaaagagattgccgatctgggcgagcattttggccatgagctgtacgaagcggaactgcgctacctggtggaacacgaatgggtgcgccgtctggacgatgccatctggcgtcgtactaaagaagggatgtggctgaatgccgagcagcagtctcgcgtggcgcaatggttgcaacagcatgcgggaaagcgtgaattgtcactggcgtcctga

SEQ ID NO: 523507 - DNA, 333 bp, Stenotrophomonas maltophilia
atggatcagtttgaatgtattaacgtagaagaagcccatcagaagatgcaccagaaaaccgcggtgctggtggatatccgcgatccgcagagctttgcgatgggccacacgccgggcgcgttccatctcaccaacgacacgctgggcgcgtttatgcgcgataacgacttcgacacgccggtgatggtgatgtgctatcacggcaacagcagtaaaggcgcggcgcagtatctgctccagcagggttacgacgcggtatacagcgtcgacggcggctttgatgcatggcatcgtcatttcccggcagaagttgaatacgcgtttgagcgctga

SEQ ID NO: 523508 - DNA, 831 bp, Stenotrophomonas maltophilia
atgttgatgatcacctcttttagcaacccgcgcgtcgcccaggcgtttgtcgactatatggcgacgcagggcattatcctgactattcagcagcatacacagacggatgtctggctggcagacgaaagccaggctgggcgcgtgaacgccgagctggcgcgtttcctggaaaacccgggcgacccgcgttatctggcagcaagctggcaatccggccagaccgacagtggcctgcactatcaacgttttccgtttctcgccaccctccgcgagcgcgcaggaccgtttacgctgcttttgatggcagcctgcatcatcgtcttcattattatgagcgtggtgggcgaccagagcgtgatgattgccctcgcatggccgtacgatccctccctgcaatttgacgtctggcgctacttcacgcatgcgctgatgcacttctcggtgatgcatatcctctttaacctgctgtggtggtggtatctcggcggagcagtggagaagcggctcggcagcggcaagctgattgtgatcacccttatcagcgccctgttaagcggctatgtgcagcataaattcagcggtccgtggtttggcgggttatccggcgtggtgtacgccctgatgggttacgcctggctcagaggcgagcgcgacccggaaagcggcatctatttacaacgtggattaataacctttgcgttaatatggcttattgccggatggtttgatctgtttggtatgtctatcgccaatggtgcgcacgttaccggcctggcggtcgggctggcgatggcgctggccgatacgctccatgcgcgaaaacgaacataa

SEQ ID NO: 523509 - DNA, 759 bp, Stenotrophomonas maltophilia
atgaaacaaacacaacgtcatgacgccattatcgaactggtaaaaaaacagggatacgtcagtactgaagagctggtggagcagtttgccgtcagcccgcaaaccatccgtcgtgacctcaacgacctggccgatcagaaccgtattctgcgccatcacggcggcgcggcgctgccgtccagctcggtgaacacctcatggcatgatcgtaaggcgacgcaaacggcagagaaagagcgtatcgcccgtaaagtggcgagccagatcccgaacggcgcgacgctgtttattgatatcggcaccacgccggaagcggtcgcccatgcgctgctgaaccatgagaacctccgcgtggtgaccaacaacctgaacgtggctaacacgttgatgcagaaagacgattttcgcatcatcctcgcgggcggcgaactgcgcagccgcgacgggggcattatcggcgaagcgacgctcgattttatctctcagttccgcctcgacttcggcattctggggatcagcggcatcgacaccgacggctcgctgctggagtttgattaccacgaggtgcgcaccaagcgcgcgattattgagaactcgcgccacgtgatgctggtggtggatcactcgaaatttggccgcaatgcgatggtcaacatgggcagcattagcatggtgaatgcggtctacaccgacgagatgccgccggcgggcgtgttgcaggtgattaaggataacaatttgcagctggagttgtgctag

SEQ ID NO: 523510 - DNA, 690 bp, Stenotrophomonas maltophilia
  misc_feature (602)..(611): n is a, c, g, or t
atggtctttgttggtctcttgtggtctaccctcttttgggggcataatcgggggcatgtcaattcgatcaggatttgtgcccccaaaatgaaactcaatgctcgccagatagagaccgcaaagccgaaagagaaagcctataaaatggctgatggaggcggcttgtatcttgaagtctccccaaaaggttccaagtattggcgcatgaaatatcgccgcccatctgacaaaaaggaagatcggctcgcttttggtgtatacccgacgatcactttggctgaggctcggggtaagcgcgatgcagcaaagaaattgttgtctcagggcattgaccccaaagctgagcaaaagggggcacaagctgaaattgagggggcatatttatttgaaactatcgcaaggcaatggcacgcaagtaacctaacttggagcgaagatcatagccgtcgcgttctgctgacgcttgagcagtatattttcccctcgataggtcaaattgacgccagaacgttgagaaccagccagcttctcaatccgatcaaagctgttgatgcggcaggtaaacatgatgttgcgcagcgactgatgcagcgcgtaaccgnnnnnnnnnnaccgcaattatgcgtttcggtgtgcagaatgaccttcttgaatcaaatcctgccagtgatatggctggagcgcttttaa

SEQ ID NO: 523511 - DNA, 723 bp, Stenotrophomonas maltophilia
atgaataaaacgtggacccgtattgtgattgtcgtcattgcggctgccgccgtggcgttctgggtgtttttcgacaggcagcgcgctccggaacggcagatggataacgtcctcaacgagatgcccgcctggcaggtgattaaggagcaggagcccgcgctgcatcagcgcatcctcgaccagatggccgccctgcaaaaagcgggcgagccggagcagcagattatcgacaccatccagccgcagatcctgcatctgcagatgacgcgcctgcaaaacgccccggacgccaacgtggtgaactacatgaccatcaacatggagcagaccgccgccatccagaaggtgagcgacgacgcctgtttccgcttcctctatccgatggtgaagggcggcatcaacccgatgcgcatgctggataaagacctgatggcgcggcgcatgcaggccgacgccgacatgatgcgcgcggcctacggtaaaaaccgccacaccgtgacccaagccgagcgtgaggcggccgtcgaggatgtccgaccgattatgaagcaacttgccgatcagtacggcgaggacatccaactgctgcagatgccggagaaggcggcgggcaaagagaagctctcctgcgatatggtgcaggagatgtgggccaaggtgctggcgctgccggagcagaaggcggcgggggtgattcggctggcggtttctgagctggactga

SEQ ID NO: 523512 - DNA, 759 bp, Stenotrophomonas maltophilia
atggattacccgcagatactcgcccccgtactcaacttcctccagtgcccgaccccgcaagcatggattgataaagcccgcgacccggcgaacctgccgttgctgctcaccgaccacatggtgtgcgagctcaaggccgcccagactgcgctattactcgtgcgtaaatacgtcgccgacgaaagcggtgccgatgcgctgctcgactggctcaagccctacgaacagttcaccttccgcgacggcccggagccggacttcatcgccctgcacaagcagattggcaaaagcgtgatgcccaaaaccgacgacccgtggggacaggcgctcatcgacagcatggtgctgctgattaaagaggagctgcaccacttctggcaggtgcgcgaggcgatgctggtccgcgacattccgtacgtcaaaatcaccgccagccgctacgccaaagggatgctgaaggaagtgcgcacccacgaaccgctgacgctgatcgacaagctcatctgcggcgcctacatcgaagcccgctcctgcgaacgcttcgccgcgctggccccgttcctcgacgacgacctgcagaagttctatctctcgctgctgcgctcggaagcgcgccattatcaggactacctgacgctggctcagcagttgagcgacgacgatatctcaccgcgcatacagctttttggcgaaattgaagccacacttatctcgacaccggacaacgagtttcgcttccacagcggcgtgccggtgtaa

SEQ ID NO: 523513 - DNA, 426 bp, Stenotrophomonas maltophilia
atggcaaacccggaattactggaagagcaacgcgaagagacgcgtctgattattgaagaactgctggaagacggtagcgatccggacgcgctgtacaccatcgaacaccatttctctgcggacgactttgaagcgctggaaaaaatggccgtggaagccttcaagctgggttacgaagtgaccgagccggaagaactggaagtggaagagggcgacaccgtcatctgctgcgacatcctgagcgaaggcgcgctgaaggcggagctgatcgacgcgcaggtcgaacagctgatgaacctggccgagaagtttgaagtggaatacgacggctggggaacctacttcgaagatccgaacggtgaagacggcgaagaaggcgacgacgaagattacgtcgacgaagacgacgacggcgtgcgtcactaa

SEQ ID NO: 523514 - DNA, 1005 bp, Stenotrophomonas maltophilia
atgtctgatctgtacaagaaacactttctgaaattgctcgactttacccctgcacagttcacttctctgctgactcttgccgcacagctcaaagtcgataaaaaaaatggcaaggaagtacaaaagcttactggaaaaaacatcgcgctcatcttcgaaaaagactcaacccgtacacgttgctctttcgaagttgccgcatttgaccagggcgcgcgcgttacctggttagggccgagcggcagccagattgggcataaagagtcaattaaggataccgcacgcgtgctcgggcggatgtacgatggcattcagtatcgcggtcacggccaggaagtcgtcgaaacgctggcgcagtatgcgggcgtgccggtgtggaacgggctgaccaacgagttccacccgacgcagctgctggcggatctgctgaccatgcaggagcacctgccgggcaaggcgtttaacgagatgacgctggtctacgcgggcgacgcgcgcaacaacatgggcaactcgatgctggaagcggcggcgctgaccgggctggatctacgcctggtggccccgaaagcctgctggccggaagagagcctggtggcggagtgcagtgcgctagcggaaaagcacggcgggaaaatcaccctgacggaagacgtggcggcgggcgtgaagggcgcggactttatctataccgacgtgtgggtgtcgatgggcgaagccaaggagaagtgggcggagcggatagcgctgctgcgcgggtatcaggtgaacgcgcagatgatggcgctcaccggcaacccgaacgtgaagttcctgcactgtctgccggcgttccatgacgaccagactacgctcggcaagcagatggcgaaggagttcgatctgcacggcgggatggaagtgacggacgaggtgtttgagtcggcggcgagcatcgtcttcgaccaggcggaaaaccggatgcatacgattaaggcggtgatggtggcgacgcttggggagtga

SEQ ID NO: 523515 - DNA, 891 bp, Stenotrophomonas maltophilia
atgcggcctgatgccctcaccccggccctctcccacggggagagggagaacaccggcgccatttcattgatttttcaccccgaaaaaggtacgttttcgccttcattccagcgtggacatgccagcattatgccgattattcagtctgttgaacgtgcgttgcagatcctcgacctgttcaacgagcaggccaccgagcttaagatcaccgacatcagcaaactgatggggctgagcaagagtaccctccactcgctgctgaaaaccctccagcttcacggctatatcgatcagaacccggagaacggcaaatatcgcctcggcatgaagctggttgagcgcggtcatttcgttgtgggctcgatcgatattcgccagaaggcgaaaggctggctgacggagctgtcccagcggaccgggcagaccacccatctggggatcctggacggtcgtgaaggggtctatatcgagaagattgaaggcaagctggccgccatcgcctattcgcgcattggccgccgcctgccggttcacgccaccgccatcggcaaggtgttgattgcctggctgggcgaggccgagctgaacaccctgctggagggctatcagtacaccacctataccccttccaccctcgcctcccgggaagcgttaatgactgccctgacgcagacccgcgaacaaggctatgccctggacagcgaagagaacgagcagggcgtgcgctgcgtggcggtgccggtgtggaaccacgaatcccgcgtgattgccgccctgagcctgtcgaccctgacctcgcgcgtggacgatgccgagctggctaatttccgcgaggagcttcagcaggccgggctcgagctctcacgcgcactgggctatgccggctcgtag

SEQ ID NO: 523516 - DNA, 1611 bp, Stenotrophomonas maltophilia
atggaaattactaacccgatactcaccggcttcaacccggacccgtccctgtgccgtcagggcgaggactactacatcgccacctcgaccttcgagtggttcccgggcgtgcgcatctaccactcccgcgatctgaaaaactggtcgctggtcagcaccccgctggaccgcgtgtcgatgctggacatgaagggcaacccggactccggcggcatctgggcaccgtgcctgagctacgccgacgggaggttctggctgctctacaccgacgtgaagattgtcgactcgccgtggaaaaacggccgcaattttctcgtcaccgcgccgtccattgaggggccgtggagcgagccgatcccgatgggcaacggcgggttcgatccctccctgttccacgacgacgatggccgcaaatactacctctaccgcccgtgggggccgcgccaccacagcaacccgcacaacactatcgtgatgcaggagtttgatccgcagaccggcacgctctcgcccgagcgcaaaacgctgtttaccggcacgccgctctgctacaccgaaggggcgcatctttatcgccacgcgggatggtactacctgatggttgccgaaggcggcaccagctacgagcacgccgtcgtggtgctgcgttccaaaaatatcgacgggccgtacgagctgcacccggacgtgacgatgatgaccagctggcacctgccggagaacccgctgcaaaagagcggccacggctcgctgctgcaaacccacaccggggagtggtatatggcctacctcaccagccgcccgctgcgcctgcccggcgtgccgctactggcttccggcgggcgcggctactgcccgctggggcgcgagaccggcatcgcccgcattgagtggcgcgacggctggccgtacgtggaaggcggcaggcacgcgcagctgaccgtgaaaggcccgcagatggcggagcagcctgtagccgttccgggcatctggcgggacgatttcgacgccagttcgctcgacccggaactgcagaccctgcgcattccgttcgacgataccctcggctcgcttaccacccgcccgggctacttacggctctacggcaacgactcgctcaactcaacctttacccagtcgaccgtggcgcgccgctggcagcatttcaccttccgggccgagacgcgtatgcagttctcgcctgtccacttccagcagagcgcggggctgacctgctactacaacagcaaaaactggagctactgctttgtggattacgaggaggggcagggcagaacgattaaggtgatccagcttgaccacaacgtgccgtcgtggccgctgcacgagcagccgattccggtgccggaacaggccgagagcgtctggctaagggtggacgtggataaactggtctaccgctacagctactcgttcgacggcgagacatggcataccgtgccgatcacgtatgaggcgtggaagctgtcggacgactacatcggcgggcgcggcttctttaccggtgcgtttgtgggactgcactgcgaggacatcagcggcgacggctgccacgcggacttcgactacttcacctacgagccggcatag

SEQ ID NO: 523517 - DNA, 1383 bp, Stenotrophomonas maltophilia
atgacgcaattaaccatgaaagacaaaattggctacgggctgggtgataccgcctgcggcttcgtctggcaggccacgatgttcctgctggcctatttctacaccgacgtgttcggtctctccgcaggcataatggggacgctgtttttagtctcccgcgtgctcgacgccgtgaccgacccgctgatggggctgctggtagaccgcacccgcacgcggcatggccagtttcgcccgttcctgctgtggggcgccatcccgttcggcatcgtctgcatgctgaccttctacacgccggacttctccgcgcagggcaaaatcatctacgcctgcgtgacctatattctgctgactctggtctacaccttcgttaacgtgccgtactgcgccatgccgggggtgatcaccgctgacccgaaagagcgtcacgccctgcagtcctggcgtttcttcctcgccgccgcggggtcgctcgccatcagcggcatcgcgctgccgctggtcagcatcattggcaaaggcaacgagcaggtggggtatttcggcgccatgtgcgtgctgggcctgagcggcgtggtgttgctctacgtctgcttctttaccaccaaagagcgctacacctttgaggtgcagccgggttcgtcggtggcgaaagaccttaagctgctgctgggcaacagccagtggcgcatcatgtgtgccttcaagatgatggcgacctgctccaacgtggtgcgcggcggggcgacgctctacttcgtgaaatacgtgatggatcacccggagatggcgacccagttcttactctacggcagcctcgccaccatgttcggctcgctctgctcctcccgcttgctgggccgcttcgaccgcgttaccgccttcaagtggatcatcgtcgcttactcgctgattagcctgctgattttcgtcaccccggcggagcacatcgcgctgatttttgccctcaacattctgttcctgttcgtctttaacaccaccacgccgctgcagtggctgatggcctctgacgtggtggattacgaggagagccgtagcggtcgccgcctcgacgggctggtgttctccacctacctgttcagcctgaagattggcctggcaattggcggggcggtggtgggctggatcctggcgtacgtcaactactccgccagcagcagcgtgcagccggtcgaggtgctgaccaccatcaaaattctgttctgcgtggtgccggtggtgctctacgcgggcatgttcatcatgctttcgttctacaagctcaccgacgcccgcgtggaggccatcagccagcagctgatcaagcatcgcgcgtcgcagggcgaggccgttcccgacgctgcgacagccgcatcccattaa

SEQ ID NO: 523518 - DNA, 1971 bp, Stenotrophomonas maltophilia
  misc_feature (844)..(853): n is a, c, g, or t
atgaccattgagaaaattttcaccccacaggacgacgcgttttatgcggtgatcacccacgcggcggggccgcagggcgcgctgccgctgactccgcagatgctgatggaatcccccagcggcaacctgttcggcatgacgcagaacgccgggatgggctgggacgccaacaagctgaccggcaaagaggtgctgattatcggtactcagggcggtatccgcgccggagacggacgcccggttgcgctgggctaccacaccggacactgggaaatcggcatgcagatgcaggcggcggcgaaggagatcacacgcaacggggggatcccgttcgcggccttcgtcagcgatccgtgtgacgggcgctcgcagggcacgcacggcatgttcgactccctgccgtatcgtaacgacgcggcgatcgtgtttcgtcgtcttatccgctctcttccgacgcggcgggcggtgatcggcgtggcaacctgcgataaagggctgcccgccaccatgattgcgctggccgcgatgcacgacctgccgaccattctggtgccaggcggagcgacgctgccgccgaccgtaggggaagatgcgggcaaggtgcagaccatcggcgcgcgcttcgccaaccatgaactctccttgcaggaggccgccgagctgggctgccgcgcctgcgcgtcgccgggcggtgggtgtcagttcctcggcacggcgggcacctcgcaggtggtcgccgaagcgctgggtctggcgttgccgcactccgcgctggccccgtccggacaggcggtgtggctggagatcgcccgccagtcggcgcgcgcagtcagtgaactggatnnnnnnnnnngcattaccacgcgcgatatcctcaccgataaagccatcgaaaacgcgatggtgatccacgcggcgttcggcggctccactaatttactgctgcacattccggccatcgcccacgcggcgggctgcacgatcccggacgttgaacactggacgcgcgtcaaccgccgggtgccgcgcctggtgagcgtgctgcccaacggcccggactatcacccgaccgtgcgtgcgttcctcgcgggcggcgtgccggaagtcatgctccacctgcgcgatctcggcctgctgcacctggatgccatgaccgtcaccggccagacggtgggcgagaacctcgactggtggcagagctcggagcgccgggcgcgcttccgccagtgcctgcgcgagcaggacggcgtggagccggatgacgtgatcctgccgccggagaaagcaaaagcgaaagggctgacctcgacggtctgcttcccgacgggcaacattgcgccggaaggatcggtgatcaaggccacagcgatcgacccgtcggtcgtcggtgaagatggcgtttaccgccacaccggccgggtgcgggtgtttgtctcggaagcgcaggcgatcagggccatcaagcgggaagagattgagcagggcgatatcatggtggtgatcggaggtggaccgtccggcaccggcatggaggagacctaccagctcacctccgcgctcaaacacatctcgtggggcaaaacggtgtcgttaatcaccgatgcgcgcttctcgggcgtgtcgacgggcgcctgcttcggccacgtgtcgccggaggcgctggcgggcgggccgattggcaagctgcgcgacaacgacatcatcgagattgccgtcgaccgcctgacattaacaggcagcgtgaactttatcggcacggcggacaacccgctgacgccggaagagggggcgcgcgagctggcacggcggcagacgcacccggacctgcacgctcacgactttttgccggacgatacccggctgtgggcggcattacagtccgtgagcggtggcacctggaaaggctgtatttatgacaccgataaaatcattgaggtaattaacgccggtaaaaaagcgctcggcctttaa

SEQ ID NO: 523519 - DNA, 909 bp, Stenotrophomonas maltophilia
atgccgcagtccgcgttgttcacgggtatcattccccctgtctccaccatctttaccgccgatggccagcttgataaaccgggcaccgccgcgctgatcgacgatctgatcgcggcaggcgttgacggcctgttcttcctgggcagcggcggcgagttctcccagctcagcgccgaagagcgtaaaatcattgcccggtttgcgatcgatcatgtcgatcgtcgtgtgccggtcctgatcggcaccggcggcaccaacgcccgggaaaccattgaactgagccagcacgcccagcaggcgggcgcggacggcatcgtggtgatcaacccttactactggaaagtgtcggaagcgaacctgatccgctacttcgaacaggtcgccgacagcgtcacgctgccggtgatgctctataacttcccggcgctgaccgggcaggatctgaccccggcgctggtgaaaaccctcgccgactcgcgcagtaacatcgtcggcatcaaagacaccatcgactccgtcgcccacctgcgcagcatgatccacaccgttaaagcggcccatccacacttcaccgtgctctgcggctacgacgatcatctgttcaataccctgctgctcggcggtgacggggcgatctcggccagcggtaactttgctccgcaggtgtcggtaaatcttctgaaagcctggcgggataaagacgtggcgaaagcggctgagtatcatcagaccctgctgcaaatcccgcagatgtatcagctggatacgccgtttgtgaacgtcattaaagaggcgatcgtgctctgcggtcgtccaatttctacgcacgtcctgccaccagcctcgccgctggacgagccgcgtaaggcgcagctgaaaaccctgctacaacagctcaagctctgctga

SEQ ID NO: 523520 - DNA, 453 bp, Stenotrophomonas maltophilia
atgattattggcaatattcatcatctccagtcctggctaccagaagagctgcgccaggccattgagcacgtcaaggcccacgtcaccgacgcgacgccgaccggcaagcacgacatcagcggcaacagcctgttttatctggtatcggaggacatgacccagccgttcgccgagcgtcgcgctgaataccatgcacgttacctggatattcagattgtgctgaaggggcaggaagggatgaccttcagcaccctgccgcacggcacgccggacaccgactggctggcggacaaagacatcgcgttcctgcccgaaggcgagcaggagaaaaccgtggtgctgagcgaaggggatttcgtggtgttctggccgggcgaagtgcataagccgctgtgcgcggtgggggcgcctgctaaggtcaggaaagtggttgttaagatgctggtggagtaa

SEQ ID NO: 523521 - DNA, 1221 bp, Stenotrophomonas maltophilia
atggaaaagcattacgtcggttctgaaattggtcaattgcgtagcgttatgctgcaccgtcctaatttaagtcttaaacgtttaacgccatcgaattgtcaggagttgttatttgatgacgtgctctcggttgagcgggcgggagaggagcatgatatcttcgcaaacacgctgcgcgagcagggtgtggaagtccttctattgaccgaccttcttacgcaaacgcttgatattgccgaagcaaaagcctggcttcttgaaacacaaatctccgactatcgcctgggaccaacctttgccgccgacgtgcgcggctggctggcggatatgccgcaccgggaactggcgcgcagattaagcggcggattaacctacggtgaaattccggcggccattaaaaatatggtggtcgatacccacacggcgaatgattttattatgaagccgctgccgaaccacttatttacccgcgatacctcctgctggatatataacggcgtctccattaatccgatggcgaaacccgcccgtcagcgcgaaaccaataatctgcgcgcaatatatcgctggcaccccgcatttgccgatggcgagtttattaagtatttcggcgacgagaatattaattacgaccacgccaccctggaaggcggcgacgtattagtgattggccgcggggcggtattgatcggcatgtcagagcgcacgacgccgcagggcgtggagttcctcgccaacagcctgtttaaacatcgtcaggccgagcgcgtgatcgccgttgagctgccgaaacatcgctcctgcatgcacctcgacaccgtgatgacccacatcgacgtggacactttctccgtttacccggaagtggtgcgcaaggacgcccagtgctggacgctcaccccggacggacgcggcggcctgctgcgtacccaggaaaccgacctgctgcacgccatcgaaaaagccctcggcattaaccaggtgcgcctgatcaccaccggcggcgatgcctttgaagccgaacgcgagcagtggaacgacgccaacaacgtcctgaccatccgtccgggcgtggtgatcggctacgagcgcaacgtctggaccaacgagaaatacgacaaggcgggcatcaccgtgctgccgatcccgggcgacgagctggggcgcggtcgcggcggcgcgcgctgcatgagctgcccactggaacgcgacggaatttaa

SEQ ID NO: 523522 - DNA, 912 bp, Stenotrophomonas maltophilia
atggaacgaaaacccactctggttgtggcccttggcggcaacgcgctgctcaagcgcggcgagccgctggaagcggacatccagcgtcagaacatcgagcaggccgcccgcaccatcgcaggcttaacggagcaatggcgcgtggtgctggtgcacggcaacggcccgcaggtcgggctgctggcgctgcaaaacagcgcctacgacaaagtcaccccctacccgctggacgtccttggtgcagaaagccagggaatgatcggctacatgctccagcaggcgctgaaaaacaatctgccccagcgcgaggtgagcgtcctgctcacgcaggtggaagtggacgccgccgacccggcgttcagcaacccgaccaagtacatcggcccggtctatggcgaagcccaggcgaaagcactggccgcggaaaaaggctgggtgttcaaggccgacggggcctatttccgccgcgttgtgccctctccgcagccgaagcgcatcgtggagagcgacgccattacggcgcttattcagcgcgaccacctggtcatctgcaacggcggcggcggcgtgccggtggtggaaaacgccaacggttatcgcggcattgaggcggtgatcgacaaagacctctccgccgctctgctggcgcggcagatcgaggccgatgccctgctgatcctcaccgatgccgacgcagtgtacctcgactggagcaagccgacccagcgcccgctggcgcaggtcacgccggaactgctcagaggcatgcagttcgacgccggatcgatggggccaaaagtggccgcctgccgcgagtttgttgaagcctgcaacggcattgccgggatcggcgcgctggccgacggcgcggagatcctggcgggcgagaaaggcacgttgattcgtaactga

SEQ ID NO: 523523 - DNA, 1005 bp, Stenotrophomonas maltophilia
atgaccatcaacctgaaaaaccgcaacttcctgaaactgctggactacaccccggcggagatccagtacctgatcgacctcgccatcgagctgaaggcggccaaaaaagccgggcgcgaaaagcaaaccctggtcgggaaaaacatcgccctgatctttgaaaaaacctccacccgcacccgctgcgcctttgaagtgggcgcgttcgaccagggcgcgcaggtcacctacctcggcccaagcggctcgcagattggccacaaagagtcgatgaaggacaccgcgcgcgtgctgggccgcatgtatgacggcatcgagtaccgcggctacggccaggccatcgttgaggagctgggcgaatacgcgggagtgccggtgtggaacggcctgaccgacgagttccacccgacgcaaatccttgccgacctgatgaccatgctggagcactctccgggcaaaaccctgccggagctgagctttgcctacctcggcgacgcgcgcaacaacatgggtaattcgctgatggtcggcgcggccaaaatggggatggatatccgccttgtggcgccgaaatccttctggccggaggccgggctggttgagcagtgccgcgccattgccaaagagaccggcgcgcgcatcaccctcaccgacgatgtggaagaaggcgtgcagggcaccgatttcctctacaccgacgtgtgggtttccatgggcgagccgaaggaggcgtgggccgagcgcgttagcctgatgaagccgtatcagattaatgcggacgtgatgaaggccaccggtaatccgaacgtcaagttcatgcactgcctgccggcattccacaacgaacataccaaagtgggccgcgaaatcgagatggcgtacggcctgaaggggctggaggtgacggaggaggtctttgaatccccgaactccatcgtcttcgacgaagcagagaaccgcatgcacaccattaaagcggtcatggtggcgacactcggcgactaa

SEQ ID NO: 523524 - DNA, 1404 bp, Stenotrophomonas maltophilia
atgggcaagttcaaatttccctccgcttataccattctcttttttctgattgccgtggttgccgtgctgacgtggattgttccggccgggcagtaccatatggcgatgaacgaggcgctcggcaaagaagtgccggttgctggcacttacgcgcacgtggcagcgcacccgcaggggctcgtctccgtgctgatggcgccgattgccgggctgtacgatccggagtccggccaggccggggcgatcgacgtggcgctgtttattctgatcatcgggggattcctcgggatcgtcactaaaaccggggcgatagacgccgggatcgagcgcgtcaccacccgactgcgcggccgcgaagagtggatgatcccgatcctgatggcgctgtttgccgcaggcggcacgatttacggcatggccgaagagtcgctacccttctataccttactggtgccggtgatgctggcagcgcggttcgatccggtggttgcggcctctaccgtgctgctcggcgcggggatcggcacgctcggctccaccatcaacccgttcgccacggtgatcgccgccaacgccgccgggatccccttcaccaacggcatcatgctacgcatcgcgctgctggtgatcggctggatcatctgcgtggcgtgggtaatgcgctacgcccgcaaggtgcgcaaggatccgtcgctgtcgatcgtggcggataagcaggaagaaaatcgcgcccactttctcggtaacaagggggagcagtcgctggaatttaccccggtgcgcaaactcatcctggtgatcttcgccctcgccttcgcggtgatgatctacggcgtggcggtgctgggctggtggatggcggagatttcggcggtgttcctcgccagtgccattatcgtcgggctgatcgcccgcatgagcgaagaggagctgacctcaacctttatcaacggcgcgcgagatttgctgggcgtcgcgctgataatcggcatcgcgcgcggtatcgtagtgatcatggataagggcatgattacccacaccattttgcacagcgccgagggaatggtcaccggattgtcgacggtggcgttcatcaacgtgatgtactggctggaagtggtgctgtcgtttcttgtgccttcttcgtccggcctggccgttctgacgatgccgatcatggcgccccttgccgatttcgctaacgtcaaccgcgacctggtggttacggcttaccagtcggcgtccggcatcgtcaacctgatcactcccacctctgccgtcgtgatgggcgggctggctatcgcccgcgtgccctacgtgcgttatctgaaatgggtcgcgccgctgctggggattttaacggtggtgattatggtggcgttaagcctgggcgctttgttgtga

SEQ ID NO: 523525 - DNA, 489 bp, Stenotrophomonas maltophilia
atgggaactatgatggattacgaagagtactctcccaaagagcaactacagctaacggtctgccagcgtctgatcgcggaaaagagctatctctcccaggaagagatccgccgtgacttacaggagcgtggttttgagaccatcagccagtccaccgtttcacgtctgctcaagttgcttggtgtcataaaaattcgcaatgccaaagggctaaagatttattcgctgaatccccagctgcgcccggcccccgacgcggcgcgtacggtctctgaaatggtggtgagcgtggagcacaacagcgaatttatccttatccataccgtcgccggatatggccgcgcggtggcgcgtattctggattatcaccagttaccggaaattttaggtgtagtggccgggagcagtattgtctgggtcgcgccccgcgtagtgaagcgcaccgcgctggtgcataagcaaattaattatttactcagaacgcattaa

SEQ ID NO: 523526 - DNA, 933 bp, Stenotrophomonas maltophilia
atgaatccgctttatcaaaaacacatcatttccataaacgacctcagccgcgaagagctggaactggttctggaaaccgcggcaaaactgaaggccaatccgcaaccggagctgttgaagcacaaggtgattgcaagctgcttcttcgaagcctcgacccgcacccgcctctccttcgaaacctccatgcaccgtctgggcgcgagcgtggtgggcttctcggacagcagcaacacgtcgctgggcaaaaaaggcgagaccctggcggataccatttcggttatcagtacctacgttgacgcgattgtgatgcgccacccgcaggagggcgcggcgcgtctggcgaccgagttttccggcggcattccggtactgaacgccggtgacggcgccaaccagcatccgacgcagaccctgctggatctgttcaccattcaggagacgcagggcacgcttgagaacctgaacatcgccatggtcggcgacctgaaatatggccgcaccgtccactccctgacccaggcgctggcgaaatttaacggcaaccgcttcttctttatcgcgccggacgcgctggcgatgccgcagtacattctcgacatgctggacgagaaaggcatcgcgtggagcctgcacgccagtatcgaagaggtgatgggcaacgtggatattctctacatgacccgcgtgcagaaagagcgtctggatccgtccgagtacgccaacgtgaaggcgcagttcgtgctgcgcgccagcgaccttgaaggcgcgcgtgacaatatgaaggtgctgcacccgctgccgcgcatcgatgagatcaccacagacgtggacaaaacgccgcacgcctggtacttccagcaggccggaaacggcatcttcgctcgccaggcgttactggcactggttctgaatcgcgaattagctctgtaa

SEQ ID NO: 523527 - DNA, 462 bp, Stenotrophomonas maltophilia
atgacacacgataacaaactccaggttgaagccatcaagcgtggcaccgtgattgaccacatccctgcgcaggtgggctttaagctgctgacgctgttcaaactgaccgaaacggaccagcgcatcaccatcggcctgaacctgccgtcgggcgaaatgggccgtaaagacctgatcaaaatcgagaacaccttcctgaccgacgagcaggttaaccagctgtcgctgtacgcgccggacgccacggttaaccgcatcgacgattacgacgtggtgggcaaatcccgcccaagcctgccggatcgcatcgaaagcgtgctggtctgcccgaacagcaactgcatcagtcatgctgagccggtttcctccagtttcgcagtgaaaaaacgcgccaatgacatcgcactcaaatgcaaatactgcgaaaaagagttttctcattatgtggtgctggccaactaa

SEQ ID NO: 523528 - DNA, 387 bp, Stenotrophomonas maltophilia
atgagcaaagtactcgcgacggaaaatgcaccagcggctatcggcccatacgttcagggcgttgatctgggcagcatgatcatcacttctggtcagatcccggtgaacccaaaaaccggtgaagtgccagccgacgtagcggcgcaggcgcgtcagtcgctggaaaacctgcaggcgatcgtggaatctgccggtctgaaagtgggcgatatcgtcaaaaccaccgtgttcgtgaaagatctgaatgatttcgcgaccgttaacgccacttacgaagcgttcttcaccgagcacaacgcgaccttcccggctcgctcttgcgtggaagtggcgcgtctgccaaaagacgtgaaaattgaaattgaagcgattgccgtacgtcgctaa

SEQ ID NO: 523529 - DNA, 1452 bp, Stenotrophomonas maltophilia
atgaaactttcaaaaattgcacttgccctcgcgacagtgaccgttgcatcgtcggcatttgctcacggctatattgaatcaccagccagccgcgcctatatgtgtaagcttggccaaaatattgattgcggcgctgtacagtatgaaccgcagagcgtggaaaaaacttccggtttcccgaccggcgctatgccgccggacggccagctcgccagtgcaggtatttcccagtattctcagctggataagcaaagccagaatgcctggaccaaaaacccgataacagcaggcccgcatgagttcgtctggcatcatactgcaccgcataaaaccactaactggcgctattacatcaccaaacaaaattgggatccaaataagccgctgactcgcgatcaatttgaattaactccattctgtacgatcaacggaaatagtcaggcaccagccgtaacaaaatctatgacttgcaatgttcctgcgcgtacgggctaccaggttatttacggcgtgtgggaaattgcggacacctcaaatagcttttatcaggccattgacgttgatttcgggaatggtggcaacgtaaccccggacgaaacgcctgcgatcgtttccgaatggagcaaaaccctgagcggccagattgccggtaataacctgaacgtgggcgataaggttatcgcacgcttcttcgacgccaacggtgaagtgaccgccatgcgtaccgaaatgaccatcggctctgctgaacaaggcgacgctaaccagtggtcttacgatctggcgcagaagatcaacaccgctcagagcgatgtccgcgtcggtgttaaagatgaagccggtgacatcagcccggttcacggcgccaacagcgtattcgtgaaagagggcagcacgctgaaatccgttgccatctcctatgaagagcaaaaagcgcaggtgagcgagaccatcgccgtttccgatctgcaatacagcaaaatcgaacatggcaacgcgaccgtcaccttccacgtcaacacacagggtgacgttaattttgaagcacacgtgatgaaccaccacggtgcggaaaaaggttacctgaagcaggacatgaacaacgtcaatcaggacgtgaccatgacgctgactgacgtgacggcgggacaccatatgctgaaatactacgcgaccaataaagacggcacgatgttcgcccaggacgtgctgaacctgatgctggaaagcgatgcggctgcggacagcaccggccaccacgactttaccttcccggagaatatcgcctcgtacaaagcaggcaccgtggtactacagccaaaagacggtaagacctacgaatgtaagcctttcccgtacagcggctactgcgtgcagtacagcccaaccgcaaaccagtttgagcctggcgttggcgcgcactggaaagaggcgtgggtgttgaagaactga

SEQ ID NO: 523530 - DNA, 2385 bp, Stenotrophomonas maltophilia
atgttacggtacagcctcttaaccgccgggctcatgctcggcgcctccacctttgccgccccggcaggcgaccttcccttaatgccctggcctgcgaaggttgaacgcccgaccacgcagggtgcgctggtgcttaacaatcaactcaccgtgagcgtcagcggcgacgatctgggggatgcggtcaaccgcctgcgccagcgcatcgccctgcaaaccggctggacgctacagccgcaggccgaaaaacctgacaagccaaccatccgtatttccatcgctaaaaaagtgaagccgcagccgctgccggacagcgatgagagctataaactcacggtggacgccaacggcgtaaatatctccgccaacacccgcttcggcgcgctgcgcgccatggaaaccttgctccagctgatgcagaacggtgccgaaaacacctcgattccgtgggttaccattgaagattcgccgcgcttcccgtggcgcgggctgctgctcgattcagcgcgccatttcatcccgttacccgatatcaaacgccagatcgacggcatggccgcggctaagctcaacgtcctgcactggcatttgacggacgatcagggctggcgctttacctcgaagcgttatccaaaattaacccagcttgccagcgatgggctgttctacacccccgagcagatgcgcgagattgtgcgttacgctgccgagcgcggcatacgcgtggtgccggaaattgatatgccgggccacgcctcggcgattgccgtcgcctacccggagctgatgagcgcgccggggccgtacgccatggagcgccactggggcgtgcttaagccagtgctggatcccaccaaagaggcgacctatacctttgccaacgcgatggtcagcgaactggcggcgatcttcccggatccgtatctgcatattggcggcgatgaggttgacgacagccagtggaaagcgaacgctgcgatccagagattcatgcgcgacaacaaactggcggacagccatgcgttgcaggcgtatttcaaccgcaagctggagacgatccttgagaagcaccaccggcagatggttggctgggatgagatctaccatcccgatctgccgaaaagcattctgatccagtcctggcagggacaggacgcgctggggcaggtggcgcagaacggttataagggcattctctcaaccggtttctacctcgatcagccgcaatccaccgcctaccactaccgcaatgaaattgtgccgcaggggctgaacggcgtggatgtgatagcggacaccgacagcgtccagagctgggctttctccatgccgcgtctgaaaggcaagccggtggaaggcagctttacgctggtgaaaggcgatgccgggtggcgtggatttattgattttgccgggaaatcgcgtcgggcggtggataacattcagtggcgggacgacaaccaggtaacgtttaccgttgatacctggatgggtgaaacgcgtccggtcgtttctgttgagaacgataagctcagcggctatttcctggtgggtaacgcccgctacccgatcgacggcacgcgtctggacgcggtgccaaaaggcataccgccggtggtgccggacccggcgaacgaggccaatctgctcggcggtgaagccgcgctgtgggcggaaaacgtggtcgcgccggtgctggatatccgtctgtggccgcgcgcctttgcggtggcggagcggctttggtcggcgaaggacgtcaacgacatcgacaacatgtatacccggctacaggcgatggacagctggtccacggtatcggttgggctacagcagcatacccagcagcaggtacagttcacgcgcctcgctaataatgcggataccttgccgctgcaaatcctcgcccaggcgcttgaaccggcgcagtattacacccgccagcatcttaagttccaggccggaaactatcatcagtttgagccgctcaaccggctcgctgacgcgctaaacgcggaaagtgcgaccgtgcgtcagatgaataaatgggctgatcgtctggtgagcgatgcggaagacacggagagcgccgacgcgctgcgccacgtctttaaccgctggcagaacaacaccagcgacgtgctggccttgagcgaaaacagctatcagttgaaggccatcaaaccggtaattcaggaggtggacaagctggcctcgattggcctgcggctgacggatctggtggcacgtcagggaacgctggatgataaagagatcgcgtcgatccagagcgaactggataacgcggcgaaaatccaggacgaggtggtgattgcggcggtttacccgctggaaacgctgctgcgtgcgacgcagaatcagtag

SEQ ID NO: 523531 - DNA, 2709 bp, Stenotrophomonas maltophilia
atgctgaaaaatatcacccggcagctgttcgcgcagctgagccgccacctgccacatcgcctgattgcgcgcgatccgctgccaaatgccaacaccctggcgggcgcggaaatccccgcttccctgaccgagcgctgcctgaacgtggcggcgatggatgaaaacgaagtctggcgcgcctttggcggccacccggaagggctgaacgcgcaagaagtgtcaaaaatccgcgaggaacatggcgataaccagatcccggcgcaaaaaccctctccatggtgggtccacctgtggctctgctaccgcaatccgttcaacctgctgctgacggtgctcgggattatctcttacgccactgaagatctgtttgccgcaggcgtaattgccctgatggtggggatctccacgctgcttaactttattcaggaagcgcgctccaccaaagcggcggatgcgctgaaagcgatggtcagcaatactgccaccgtgtcgcgcgtgattaacgacctcggcgaaaacgcctggattgaactgcccattgaccagctggtgccgggcgatctggtgaagctggcggcgggggacatgatcccggcggatttacgcatcatccaggcgcgggatctgttcgtcgcgcaggcgtcactcaccggtgaatccctgcccgtagagaaggtggcgcggacccgcgatccgcagcagatgaacccgctggaatgcgacaccctgtgctttatgggcaccacggtggtcagcggcacggcgcaggccattgtcaccgctaccggcggcaacacctggtttgggcagcttgccggacgcgtcagcgagcaggagagcgagccgaacgcattccagaaaggcattggccgcgtcagcatgctgctgatccgctttatgatggtcatgacgccgattgtcctgctgatcaacggctacaccaaaggtgactggtgggaagcggcgctgttcgccctctccgtggctgtcggcttaacgccggaaatgctgccgatgattgtcacctccacgctggcgcgcggggcggtcaaactctctaaacaaaaggtgatcgtcaaacacctcgacgccatccagaactttggcgcgatggacattctttgcaccgataaaaccggcaccctgacccaggacaaaatcgtgctggagaaccacaccgatatcgccggaaagaccagcgaacgggtgctgtacagcgcgtggctgaacagtcactaccagacagggctgaaaaacctgctcgacgtggcggtgctggaaggtgtggatgaagagtctgcccgcatgctctccggccgctggcagaaggtggacgaaattccgttcgactttgaacggcgccgcatgtcggtggtggtcagcgagcagccggacgtacatcagctgatctgcaaaggggcattgcaggagatcctgaatgtttccacgcaggtgcgtcataacagcgagatcgtgccgctggatgagaccatgctgcgccgcatcaaacgcgtcaccgataacctgaaccgtcaggggctgcgcgtggtggcggtagcaagcaagttcctgcccgcgcgggaaggggactaccagcgtatcgatgaatccgatttgatcctcgagggttacatcgcattcctcgatccgccgaaagagaccaccgcgccggcgctgaaagcactgaaagcgagcgggatcaccgtcaaaatcctgaccggcgacagcgagctggtggcggccaaagtgtgccacgaagtgggcctggacgtgggcgacgtcgtggtggggagcgacattgagcacctgtccgacgatgagctggccgagcttgccctgcgcaccacgctgtttgcccgcctgacgccgatgcataaagaacgcatcgtcactctgctgcgtcgtgaagggcacgtggtgggctttatgggcgacggcatcaacgatgcgccagccctgcgtgcggcggatatcggtatctccgtggacggcgcggtggatatcgcccgcgaggcggcagatatcattctgctggaaaagagcctgatggtgctcgaggagggcgtcatcgaagggcgtcgcaccttcgccaatatgctcaaatacatcaaaatgaccgccagctccaacttcggtaacgtcttcagcgtgctggtggcgagcgccttcctgccgttcctgccgatgctgccgctgcacctgctgattcagaacctgatgtacgatgtctctcaggtcgccatcccgtttgataacgtggacgacgagcagatcaagaagccgcagcgctggaaccccgccgatctggggcgctttatgctgttctttgggccgatcagctccatctttgacattctgaccttctgcctgatgtggtttgtgttccacgccaataccccggaacaccagacgctgttccagtccggctggttcgtggtggggctgctgtcccagaccctgattgtgcatatgatccgcacccgccgcattccgtttatccagagccgtgccgcatggccgctgatcgtgatgacgggcattgtgatggcgctcgggatcgcgctgccgttctcgccgcttgcaagttacctgcaacttcaggcgctgccgctgagctacttcccgtggctggtggcgatcctcgcgggttacatggtgctgacgcagatggtcaaagggttctatagccgtcggtatggatggcagtaa

SEQ ID NO: 523532 - DNA, 948 bp, Stenotrophomonas maltophilia
atgcagaaccgccttacgattaaagacatcgcgcgtttaagcggcgtggggaaatcgaccgtctcacgcgtgcttaacaacgaaagcggtgtcagcgagcgcacacgcgagcgcgtcgaggcggtgatgaatcagcacggtttttccccttcccgctccgcgcgcgccatgcgcgggcagagcgataaagtggtcgccattattgtctcgcgtctggattccctctccgaaaacctcgccgtacagacgatgctgcccgcgttctacgagcagggctacgatccgatcatgatggagagcaagttctcggcgcaaatggtggaggagcatctcggtatgcttcagcgccgcaacattgatggcgtagtgctgttcgggtttaccggccttaaagaggacatgcttaaaccctggcagccgtctctggtgctgctggcgcgcgacgccagcgggtttgcctctgtctgttacgatgacgaaggggcaatcgtgatcctgatgcagcgcctgtatgaacagggccatcggcatatcagctatctcggcgtgccgcatgccgacatcaccaccggcaagcgtcgccatgaagcgtacctggcattttgtaaaaaaaacaatctccccgccgtggccgcgctgcctgggctgggtatgaaacagggatatgagcaggtcgccagcgtgctgactgcacaaaccaccgccctggtgtgcgccacggatacccttgcattgggtgcgagcaaatatttgcaggagcaacgcatcggggagctgcagttagcgagcgtgggaagcacgccgctgatgaagttcttacacccggagattatcagcgttgacccgggttatgccgagtctggccggcaggctgccgcgcagctgatcgagcaaattaccgggcgtaccgagccccgtcagatcgttattccagcccgcctgtcgtag

SEQ ID NO: 523533 - DNA, 480 bp, Stenotrophomonas maltophilia
atgtctactcccgcacacttatggcttgaagatgagaacggttcgccggttgtcggcagctgcatgataccgctgcgcctgggctctattgaattaaaatcattctctcacggtgtgaccatcccggttgactcccattggggaaaactcactggtactcgtgttcaccgcccaatcacaataattaaagaattcgatcagacaactccccttctgtaccgtgcggtgtgcgaaggccgaacaatgaagaaagcgacaatcaaaatgtaccgtattttggactcagggatcgaagccgagtattttaacatcattcttgaaaacgtgaagttcacaacggtagcgccatatctgtcacccaacggcacgagcagtactcacctcgaaacgctcgaattgcgctatgaggcgatcacatggaagtatatggaaggcaatatcctatatcgtgattcatggaacgatcgctgttgtgcataa

SEQ ID NO: 523534 - DNA, 651 bp, Stenotrophomonas maltophilia
atgtacggaaacaacgagatcatcagttatttacaggccaataaaatacttgcgttaaagctcgaccatgctattacaggtgtaagtgagcaagttaaaaatcaggtggatacgataagtaaaggcgcgactcgtctgttgtattacacctcatgtttcaccgatgaatacaatgacgtttgccagagacaaaagaccgaagatatacgtttcagggatgccgtttataaggtgctcagtggcgttgatgtcgcctataacatgctacaaatctactttgaagaaattttcaaaaacaaaacctcagaccagttagaatacatcaagcagcgcctgatggccgtaaatgttcatgttgcagcagttactctcacaggtgctggatttacattagctgtcgcctcttacgttcgacttggtttaaacctcagtctcgaactcagcgccattgcaggaacatgggcatcccggggtattgcccttataggtttttatggtgtcgtgcagaaagctgcagatagtgcttatcgactgcatattcaattccctgcctattattctgcactttatgcgcaaggactggaaatgctctattttctcattgagccgatatttcatcgggcgggcgcgatgaaagcgcaatgggcgtag

SEQ ID NO: 523535 - DNA, 174 bp, Stenotrophomonas maltophilia; identical to SEQ ID NO: 147204

SEQ ID NO: 523536 - DNA, 1419 bp, Stenotrophomonas maltophilia
atgagtaaagtcaaacaagccgatatcgatcagctgatcgtcctggtcggcggacgcgagaacatcgccaccgtcagccattgcattacccgcctgcgcttcgtgctgaacgatccggccaaagccaatccgaaagccattgaagagttgaaaatggttaaaggctgcttcaccaacgccgggcagttccaggtggtgattggtaccgaagtgggcgattactatcaggctctgctggcgactaccgggcactcttccgccgataaagagcaggcgaagaaggcagcgcgccagaatatgaaatggcatgagcagctgatttcccattttgcggagatcttcttcccactgctgccggcgctgatcagcgggggcttaattctgggcttccgtaacgtcatcggcgatgtgccaatgagcgacggcaaaaccctggcgcagatgtacccggcgctgcaaagcatctatgacttcctgtggctgattggcgaagccatcttcttctatctgccggtcgggatctgctggtcagcggtgcgcaagatgggcggaacgcccattctcggaatcgtactcggcgtgacgctggtctctccgcagttaatgaacgcttacttacttggtcagcaaacgccagaggtgtggaacttcggcctgtttaccatcgccaaagtgggctaccaggcgcaggttatcccggcattgctggcgggtctggcgctgggctttattgagacacgtctgaagcgcatcgtgccggactatctctatctggtggtggtcccggtctgctcgctgatcctggcggtgttcctggcgcatgcctttatcggtccgtttggccgcatgattggcgacggcgtggccttcgcggtccgtcacctgatgaccggcagcttcgcaccgattggcgccgcactgttcggcttcctgtacgctccgctggtgatcaccggcgtgcaccagaccacgctggcgatcgatatgcagatgatccagagcctcggcggcacgccggtctggccgattatcgccctgtctaacattgcgcaggcctcggcggtaaccggcattatcatcgtcagccgtaagcacaacgagcgtgagatctccgttccggctgctatctccgcctacctcggcgtcactgaaccggcgatgtacggtatcaacctgaaatatcgcttcccgatgctctgcgcgatgatcggctccggtctggcgggcttgctgtgcggcctgaacggcgtaatggcaaacgggattggcgtcggcggcctgccgggtatcctctccattcagccttcattctggcaggtgtttgcgctggcgatggcggtggcgattatcatcccaatggcgctgactaccgtggtttaccagcgtaagttccgtcagggcacgttgcagattgtttaa

SEQ ID NO: 523537 - DNA, 1644 bp, Stenotrophomonas maltophilia
atgaatacccttcctcactggtggcagaacggcgttatctatcagatttacccaaagagttttcaggataccaccggcagcggcaccggcgatctgcgcggcgtaacgcagcgccttgactacctgaaaacccttggcattgacgccatctggctgacgccgttttatatctcgccgcaggtggataacggttacgacgtggcgaactacactgccattgacccgacctacggcacgctggacgactttgacgaactggttgcccggacgcatgaacgcggtatccgcatcgtgctggatatggtctttaaccacacgtccacgcagcacgcctggttccgcgagtcgctggataaagcgagtccgtaccgccagttctatatctggcgggacggtacgccggatacgcttcccaacaactggcgctccaaatttggcggcaacgcctggcgctggcacgccgaaagcgaacagtattatctgcacctgttcgcaccggagcaggcggatctcaactgggaaaacccggcggtgcgcgccgagctgaaaaaagtgtgcgagttctgggccgatcgcggcgtggacggcttgcgtctggacgtgattaatctgatttcaaaagatcaggatttcccggacgataccctcggcgacggtcgccgcttctacactgacgggccgcgcatccacgaatatcttcaggagatgagccgggacgtctttaccccgcgtaacctgatgacggtgggcgagatgtcctccacctcgctggagaactgccagcagtatgcgtctcttgatggccgcgagctgtcgatgacctttaacttccaccacctcaaggtggactaccccggcggcgaaaaatggacgaaggcaaagccggacttcgtggcgctgaaaacccttttccgccactggcagcaggggatgcacaacaaagcctggaacgcgctgttctggtgtaaccatgaccagccgcgcatcgtgtcgcgctttggtgacgaaggggaacaccgcgtggcggcggcgaaaatgctcggcatggtgctgcacgggatgcagggcacgccgtatatctaccagggtgaagagctgggtatgaccaacccgcatttcagccgtatcaccgactaccgcgacgtggaaagtctgaacatgttcgccgaacagcgggctaacggacgcgataccgatgaactactggcgattctggcgagtaagtcacgcgataatggccgcacgccgatgcagtgggacgcctcgcacaatgcgggctttaccgaggccgagccgtggattggtgtctgcgacaactacgaaaccgtgaacgcccgcgcggcgctggacgaccccgattcggtgttctacacctatcagtcgctgattcgcctgcgcaaaaccctgccggtgctgacgtggggggattatgaggatctcctgcctgaccacccttccctgtggtgctatcgccgtcagtggcaggcacaaacgctgatggtggtggcgaacctgagccatttgcctcaggaatggcaagcggacgctctcagcggcgagtcgcaggtggtgataagcaactaccccgcccctcaaacctcaatgcttcgtccgtttgaagccgtgtggtggttaaagcagtaa

SEQ ID NO: 523538 - DNA, 2139 bp, Stenotrophomonas maltophilia
atgacaccgcatgtgatgaaacgtgatggctgtaaagtgccgtttaaatcagagcgcatcaaagaagccattctgcgtgcagctaaagcagcgggagtcgatgacgcagattactgcgccaccgtcgcagaagtcgttagcagccagatgcatgaacgcagccaggtggatatcaacgagatccagaccgcggttgaaaaccagctgatgtctggtccgtacaagcagctggcgcgcgcctacattgagtatcgtcacgaccgtgacgtccagcgtgagaaacggggtcgccttaaccaggagatccgcggcctggtagagcaaaccaactcgtcgctgctcaatgaaaatgccaataaagacagcaaagtgatcccgacccagcgcgacctgctggccggtatcgtcgccaagcactatgcccgtcagcatctgctgccgcgcgatgtagtctcggcgcacgagcgcggtgagatccactatcacgatctcgactactcgccgttcttcccgatgtttaactgcatgctgatcgacctgaaaggcatgctgacccacggttttaaaatgggtaacgccgagattgagccgccgaaatccatctccaccgcgacggcggtcacggcgcagatcatcgcccaggtggcgagccacatctatggcggcaccaccattaaccgcattgatgaagtgctggccccgttcgtgaccgagagcttcaacaaacaccgtaaaacggcggaagagtggcagatcccggatgctgacggttacgcccgttcccgcaccgagaaagagtgctacgacgccttccagtcgctggaatatgaggtaaacacgctgcacaccgccaacggccagacgccgtttgtgaccttcgggtttggcctcggcaccagctgggaatcacgcctgatccagcagtctattctgcgcaaccgtatctccggcctcggtaaaaaccgtaaaacggcggtgttcccgaaactggtgttcgccatccgcgacggcctgaaccacaagtttggcgatccgaactacgacatcaaacagctggcgctggagtgtgcgagcaagcgtatgtacccggatatcctcaactacgaccaggtggtaaaagtcacgggttcgtttaaaacgccaatgggctgccgcagcttcctcggcgtgtacgaagatgagaacggcgagcagatccacgacgggcgcaacaacctgggcgtcatcagcctgaacctgccgcgcatcgcgctggaagccaaagggaatgaagcggccttctggacactgctggatgaacgtttacagctggcacgtaaggcgctgatgacccgcatcgcccgtcttgaaggggtgaaagcccgcgtcgcgccaattctctatatggaaggggcctgcggcgtgcgcctgaaagcggacgatgatgtgtcggagatcttcaaaaacggtcgcgcgtcgatctctctcggctatatcggcattcacgaaaccattaacgcgctgtttggcgacaagcacatctatgacaacgacgccctgcgtgagaaaggtatcgcgattgtgcagcgcctgcgcgatgcggtagaccagtggaaagaggaaaccggctacggtttcagcctgtacagcacgccgagcgaaaacctctgcgatcgcttctgccgtctggataccgccgagttcggcatcgtggaaggggtgaccgacaaaggttactacaccaacagcttccacctcgatgtggagaagaaggtgaacccgtacgacaagatcgacttcgaagcggcctatccgcccatcgcgaacggcggttttatctgctacggcgagtacccgaacattcagcataacctgaaggcgctggaagacgtgtgggattacagctaccagcacgttccgtactacggaaccaacacgccaatcgacgagtgctacgagtgcggctttaccggtgagttcgagtgcaccagcaaaggcttcacctgccctaaatgcggtaaccacgatgcagcccgcgtctccgtgacccgccgcgtgtgcggctacctcggcagcccggacgcccgtccgtttaacgccggtaagcaggaagaggtgaagcgcagggtgaaacatctggggaatgggcagatcgggtaa

SEQ ID NO: 523539 - DNA, 465 bp, Stenotrophomonas maltophilia
atgaactatcaccagtactaccccgtcgacatcgtcaacggccccggcacccgctgcaccctctttgtatcaggctgcgttcacgagtgccccggctgctataacaaaagcacctggcgcctgaactcgggtatgccgtttaccgctgagatggaagaccgcatcatcaacgacctgaacgacacgcgcattaaacgtcaggggatctcgctctccggcggcgacccgctccatccgcaaaacgtgccggcgatcctgaagctggtaaaacgcatccgccgcgagtgcgcgggaaaagacatctgggtctggacgggttataagctggatgaactgaatgcgcagcagaaggaagtggtggatctgattaacgtcctggtcgacggcaagttcgtgcaggatctaaaagatcctatgcttatctggcgcggcagcagcaaccaggttgtgcatcatctgcgttga

SEQ ID NO: 523540 - DNA, 1911 bp, Stenotrophomonas maltophilia
gtgcgatttccgaaccaacgtttagcgcaacttttcgatctgttgcaaaacgagacgctgccgcaggacgagctggcgcagcggctgtcggtttccacgcgaaccgtccgggcggatatcaccgccctgaacgcgctgctggccagccacggcgcgcagttcattttgagccggggcaacggctatcagctcaaaatcaatgatgtggtgcgctatcaacaattgcagtcgtcccacccgcgcgcgctgcgtattccgcgaaccggaccggagcgtgtgcactatctggtggtgcgttttctgacgtcagccttttccctcaagctggaggatctggccgatgagtggttcgtcagccgggccacattgcagagcgacatggtggaagtgcgcgagtggtttcaccgttacaacctgacgctggaaacccgcccgcgccacggcatgaagctgtttggcagcgagatggcgatccgcgcctgcctgaccgacctcctgtgggagctggcgcagcaggatagccttaacccgctggtgaccgacgtggcgctcaacgcgggcgtggcggaaaagatggtccctgtcctgcacgacgcgctgacgcgccatcacattcgcctgaccgatgaaggcgagctgttcctgcgcctgtactgcgcggtgtcggtacggcgcatcagcgaggggtatccgctgccggaattccacgctgaagacgtggaagagaacgtacgcgaggcggcgaaagatatcgccgtggctatccaggagctggcgggcaaggcgctttcaccatcggaagagagctggctgtgcgtgcacattgcggcgcggcagatccaggagatcgcccccagcgccattaatgctgacgacgacgaagccctggtcaactatatcctgcgctacatcaacacccactataactacaacctgttgagcgacgagcaactgcatgcagatctgctcacgcacatcaaaaccatgattacccgcgtgcggtatcaaatcatgatccccaatccgctgctggataacatcaagcagcactacccgatggcgtgggatatgaccctcgcggcggtgtcgagctggggcaaatacacgccgtatgtgatcagcgaaaacgaaattggttttctggtgctgcatatcggtgtcggtctggagcgccactacaacatcggctaccagcgtcagccgcgcgtgctgctggtatgtgacgccggtaacgcgatggtgcgcatgatcgaggcggtgcttcagcgcaaatacccgcagattgaggtgacgcgcacgctcaccctgcgcgagtacgaacttgccgatgccatcggcgaagacttcgtgatctccaccgctcgcgtgagcgaaaaatccaaaccggtggtgataatcgccccgttcccgaccgattatcagttagagcagatcggcaagctggtgctggtggaccgtacccgcccgtggatgctggagaaatacttcgacgcggcccatttccgcattctcgacaagcctgtcgaccagcaaacgctgttccgcgaactgtgtgggcagcttgaaagcgaaggctttgtcggcgcggaatttctggaatcggttatcgagcgtgaagctatcgtcagcactatgctcggcgacggcatcgcgctgccgcactccctcggcctgctggcgcaaaaaacggtggtctacaccgtgctggcgccgcagggcattcagtggggagatgaaaccgcccatgtcatttttctgctcgccatcagcaaaagcgagtacgaagaggcaatggcgatttacgatatttttgtcactttcctgcgtgaacgcgcgatggcgcgcctgtgccagtgcgaggattttgcggcgtttaaggctgaggcaatggagagtgtgagtcggttttga

SEQ ID NO: 523541 - DNA, 1137 bp, Stenotrophomonas maltophilia
atgcacacccctaccctgcttgtcgcttcactctcaatgctcgccaccgccgctgtcgcccagacgcaatacgcctgggtgggtacctataatcccaacggcgaagggctgtaccgttttaccgtcgacccgcaaaccggcgcgctagataacaaaacgctggtgagccaactcccgaacgctgcgcagcttaccgtctcgcacgacggcaaaacgctctacctggcaagcgaggtggagcagggcgtggtgcaggcgttgcgaataggcgataacggcgcgctgagcgagctgaatcaggtggcctccggcggcgcggggccggtgtatctttccctgacgccgaacggcaaacatttgctggtggcgaactacgtcagcggatcgatcgcggtgctgcccgttaacgcagacggcagcctgggcgatgctacggacacccatcaggacaaaggcgaaccgggcgcggcgaagccggaagctgccgtcgagggcagtttcgccatcagcgatcataacggccctcacgcgcacatgatcgccgccgatccgagcgggaaatacgttttttccaccgatctggggctggatcgcatctatcagtaccgttttgacgatcgaaccggaaagctgaccccgaacgatccgccgtttatcagcgcctcctcaaaaggggccgggccgcgccacttcgtctttacgccgaagggggatgccctgtggctgattaacgaagaagcctctacgctcacccattatgcgctggacagcaacggcaggctgcaagagggtaaaacggtttcagccttgccggacggttataaaggcaccagttttgctgccgggctggcgctaagcgccgacgggaaacagctgtatgtcgctaaccgtttgcataacagcatcgggcactttaccgtaacggcggagggcacgctgacacatcaggacgatgtctggacgcggggcgactatccgcgcaccctgacgcttgataagcaggggcgctggctgtacgtcatgaaccagcgcagcgacaacattacccgtttccgcgtggcgccggacggcaagctgagcgtcgagtcagactataccccggtcggcagcccatcccagatggtcatttcaccctga

SEQ ID NO: 523542 - DNA, 741 bp, Stenotrophomonas maltophilia
atgaaactgacccccaacttttaccgtgaccgcgtctgcctgaacgtgctggcaggatcgaaagccaacgccagcgccatttacgaggcggcggaaggtcatgtgctggtgggcgtgctctccaaaaattaccccgacgtggcgagcgccgtcgcggatatgcgcgagtacgcggcactgattgataacgcgctctctgtggggctgggcgcaggcgatccgaaccagtcggcgatggtgagtgaaatctcccgccaggtacagccgcagcacgtcaatcaggtctttaccggcgtggccgccagccgcgcgctgctggggcagaatgagtcggtggtcaacggcctcgtctccccgaccggcaccgtcggcatggttaaaatttccaccggcccgctgagcagcaacgcgccggacggcgttgtgccggttgaaaccgcgattgccctgctgaaagattttggcggaagctcaatcaagtacttcccgatgggcggcctcaagtgccgtgacgagtataaagcggtggcggaagcctgcgcccgtcacgacttctggctggaaccgaccgggggaatcgatctggagaactttgaggagatcctgcagatcgccctggacgcgggcgtgagcaaaatcatcccgcatatctacagctcgattatcgacaaagccagcggcgacacgcgtccggaagatgtgcgtacggtgctggagatgacgaagaagctggtgaagtag

SEQ ID NO: 523543 - DNA, 1119 bp, Stenotrophomonas maltophilia
atgccttcgatttatgagaagtacaacttaaagcaggttatcaacacctctggccgcatgacggcgctgggtgtctccacgccgcgcccggaagtggtgcaggcggcgatggacggcatgaatcactacttcgagatgaaggatctggtcaacaaaaccggggaatacatcgcgaagctgcttgaggtggaaggggcgacggtggtctcctgcgcgtcggcgggcattgcccagtccgtggcggcggtgctggtgaaagacagcgactggctgctggaaaacctgcacgtcacaccgattgaaaacaacgaaatcgtcctgccgaaaggccacaacgtgaactttggcgcgccggtgggcaccatggtggcgctgggcggcggcaggctggtggaagcgggctacgccaacgaatgctctgccgatcagctggcggcagcgatcaccccgcgtacagcggctatcctctacattaaatcgcaccactgcgtacagaaaagcatgctcagcgtcgagcaggcggcggtggtggcgcgtaaacacgacctgccgctgatcgttgatgccgcggcggaagaagatctgcatacctattaccgctccggcgcggacctggtgatctacagcggcgcgaaggcgattgaaggcccaaccagcggcctggtgatcggcaaaacccagtacattgagtgggtgaagcgccagacggcgggcattggccgcgcgatgaaggtgggcaaagaggggatcctcggcctgacctgcgccatcgaacactacctgacggccaccagggagagcggggccgagatggtggcgaagatgacgccgtttattgacgcgctcaacaccctgaacggcgtcaccgcccgcgtggtctgggacagcgcgggtcgcgatatcgcgcgcaccgagattaagtttgacgaagcgaccaccggcgtcggcaccggtgacctggtgaacgcgctcaagcagggcgaatacgccgtttacttccgtggctacaaggccaacgaagggattatcgaagcggatgtgcgcagcgtgaatgctgatcagctgaacatcgtgtaccgccgtattagcgaagtattaggacaggagaaaaaagcatga

SEQ ID NO: 523544 - DNA, 1134 bp, Stenotrophomonas maltophilia
atgtttgatctactcctgcgccgtgcgcgcctcgccgacgataccctgaccgatatcgccattcaggacgggaagatcgccgcgacaggccaaattgacgctcccgctcgtaaaacggttgagcttaacggtgacgtgttcgtcagcgcgggctggattgactcccacgtccactgctacccgaactccccgatctaccacgacgagccggacagcgtgggcattgccaccggcgtcaccaccgtggtggacgcgggcagtaccggggccgacgacgtggatgatttttacgccatcacccgcaacgcatccaccgaggtgtttgccctgctgaacatctcccgcgtggggctgattgcccagaacgagctggccaatatggccaatattgatgctgatgcggtgaagcaggcggtgacgcgctacccggattttatcgtcggcctgaaggcgcgcatgagcagcagcgtggtcggtgaaaacggcattaccccgctggagcgcgcgaaagcgattcaaaaagagaatggcgacctgccgctgatggtgcacatcggcaacaacccgccgaaccttgatgagattgccgagctgttaagctccggcgacatcattacccactgctacaacggcaagcccaaccgcattctgacgccctccggcgagctgcgcgcctccattacgtctgcgctgaagcgcggcgtgcgtctggacgtcggccacggcacggcgagcttcagctttgaggtggcgaaacgcgccatcgcgatgggcattctgccgcacaccatcagctcggatatctactgccgcaaccgcatcaacggcccggtcggctcgctggccagcgtgatgtcgaaattcctcgccatcggcatgtcattgccgcaggtgattgactgcgtcaccgccaacgccgcagacggcctgcgcctgacgcgcaaaggccgcattcagcctggtctcgacgctgatctgacgctgttcaccctcaaacgccagccgacggtgctgacggatgctgaaaacgacagcctgcaggctgaacacattctggtgccgcttgccgcgatccgcgcgggcaagggctacatgaccgaacaagggagcacggaacatgccttcgatttatga

SEQ ID NO: 523545 - DNA, 642 bp, Stenotrophomonas maltophilia
atggaacagaataaaggtttttggtatgccgactggtcgttcccgatcttcgttggcctgctctcctccggcgtctttgccgggacgcacatgtactacctctacggcatcggcgcgtttaacgaagtggccttcgtggcgatgctgaaagcgggaatcgataccggcgtttacggcgcggtggcggcgttcggcgcaagcttccttttcgcccgtatcatcgaagggtcgctggtcgggattctcgacatcggcggggcgatccagaccggcgtgggcctcggcgtaccggcgctgctgctgggcgcggggatcatgttcccggtgaccaactttattgcctcgctgattaccggcctggtgattggtctggcgattggctacgtcatcatcctggcgcgtaagttcaccatcaaccagagtaactccacctacggtgcagacgtgatgatgggcgcgggtaacgcctccggccgcttcctcgggccgttgattatcctcagcgccatgaccgcctccattccaatcggcgtcggttccctggtgggcgcgctgctgttctacatctggcagaagccgattaccggtggcgccatcctcggcgcaatgattttgggctggctgttcccggtcgccctttaa

SEQ ID NO: 523546 - DNA, 777 bp, Stenotrophomonas maltophilia
atgttcttaattatattaataaaatcgctcatcattggcggcctggttggcgtcggtgttggagccggggctgcacgcatgtttcatgcgcctaccactcagggtatgggcgcgtttcgtacattgggggaactgaactcctgtgaaggggatccggcgtcccacttctcctttgggttaggtttcttctttaacgcctgggcctcttccgtggccgcaggtgccttcacacaggacgttgaccaccgcatcatcccgaactggggtgctgctgcactgatgatcaaaaaccgtaacgtcggtgaaacgctgcatgacccgcgcaaaatggcgattgcctgcggcattatcggcatgattgtcgtgaccttccttaacctgaccgcctcctccgttccggctgcgcttcaggtcaccgccgtgaaggtgctggtgcctgccgcgaacctgctggtcaacaccgtgatgccggtgatcttctggctggcagccatcgacgcgggtaaaaaatcgggcttctgggccaccatctttggcggcgcagcgcagctgatcatgggtaacgccgtgccgggtctggtgctggggatcctgatcggtaaaggcgtggaagagagcggctggaaccacgtcaccaaagtgatgatggcggcgatcgtcctgctgttcgtgctgagcggcttcttccgcggcttcgacatgaagatgatcgaatccttccatctgaccgtgccgaactggctcgacatgatccacaactcgctcagcggtaaataa

SEQ ID NO: 523547 - DNA, 300 bp, Stenotrophomonas maltophilia
atgaaagaacagttcacgaccacggtgagagtgaaggggaagggcgatgccaaagcgcgcgcctttgccgacgccctcaaccacgtacaggccgcggtgatgaaagcctcaccgcatatcttactgcgtattgagccacaggatgtgcaggttgttcaggcgcaagaagcggtgcgaaaagaagcgtttttgttcttctttctgcgtcgggaaagacgcacctacagcgtggagctggatgtgaccgtcaacgtgaccgccatcaatctcgaccaggtggatttcgtcacgcaacgctga

SEQ ID NO: 523548 - DNA, 363 bp, Stenotrophomonas maltophilia
atggaacagattacagtcgtgattggcgatcgcctgggtaaaggtcagaaagtggctgcgggtgtggaaaaagccggcggacgcgcggttgtcgtaccgggcatggcagcggatatgaagctcggtgacgtgatgaaagcagaaaacgccaccttcgggatctcgttctgcggcagcggcggcgcgggtgccatcaccgcccagaccaaatacggctacaaggccaaatacggcatgcgctccgtggatgagggggtgaccgctatcaacgaaggctgcaacgtgctgggctttggctttatggataaagaagagctgggcgagcgtctggtacaggcgtggcagaagaaatacggcgcgtaa

SEQ ID NO: 523549 - DNA, 321 bp, Stenotrophomonas maltophilia
atgaacgacgttggggaacaggcggtgcaaacagaacagctcgcgaacaccatgcttcagcaggtctacgccctgctggcccggcacaacatcatccccaacgcggtacaggagcagatgctgacctcccacgttcgcgcaatggcgcaccggtctgtgaccggggagccgctgccggaggttgaagcagagctgttcgacgaaatttcaccagattcaatgcaacttgcccgtgaagtggtagcgcagtttggcaatcttcctgatgaagaagcctggctgctctccgttcacttcgaagtcgcgaaagacaacctttaa

SEQ ID NO: 523550 - DNA, 387 bp, Stenotrophomonas maltophilia
atgcgtaaacacctgttagcgatcgtcgcggcttcaacgctggttcttggctcatctgcgtttgctgccgatcttgaagacaacatggacatcctcagtcaaaacctgaaggtggtgcagaaaaccgacgatgcggcggagatgaaagacgcactgaccaaaatgcgtgaagcggcgctggatgcgcaaaaagcgacgccgccgaagctggaaagcaaagcggcggacagcgccgagatgaaagactaccgccacggttttgacgtgctggtcggccagatcgacggcgcgctgaagctggcgaacgaaggcaaagtgaaggaagcccaggcggcagccgaccagtttgcggcgacccgcaacgcgtatcacaaaaagtatcgttga

SEQ ID NO: 523551 - DNA, 1353 bp, Stenotrophomonas maltophilia
atggcatttgcgatgaaagtaacctcacaagttgaagcgcagcgtaagatcctggaagaagccgtctccaccgcgctgatgctcgcttcaggtaaatcagatggcgccgaagtggcggtcagcaaaaccaccggcattagcgtgagcacccgctatggcgaagtggagaatgtagaatttaacagcgatggcgcgctggggatcacggtgtatcaccagaatcgcaaaggcagcgcgtcgtctaccgatctcagcccggatgccatcgcccgtacagtgcaggcggcgctggatatcgcgcggtacacctccccggatccttacgctggcgtggctgataaagagctgctggcgtttgacgcgccggatctcgatctgttccatccggcggaagtgaccccggatgaagccattgagctggcctcgcgcgccgagcaggcgtctttgcaggctgacaaacgcatcaccaataccgaaggcggcagctttaacagccactacggcatcaaagtgtttggtaactcccatggcatgttgcaggggtactgctcaacccgccactcgctttccagctgcgtgatcgccgaagagaacggcgatatggagcgtgattacgcgtataccattggccgcgcgctgggggatttgcagtctccggagtgggtgggaaaagagtgcgccgaacgtacgctgtcacgcctctcgccgcgtaaactctccaccatgaaagccccggtcatttttgccaacgaagtggcaaccggtctgtttggtcatctggtgggggcgattgcgggtggttcggtgtaccgtaaatcgaccttcctgctcgactcgctgggcaagcagatcctgccggaatggctgaccatcgaagagcacccgcacctgctgaaagggctggcctccacgccgttcgacagcgaaggcgtgcgcacggagcgccgggatatcgttaaagacggcattctgacccagtggctgctgaccaactactccgcgcgtaagctggggctgaaaagcaccgggcacgcgggcggcattcataattggcgcattgccgggcagggcctgaattttgaacagatgctgaaagagatgggcaccggtctggtggtcaccgagctgatggggcagggcgtgagcggtatcaccggcgactactctcgcggcgcagcgggcttctgggtggaaaacggtgaaattcagtatccggtgagcgaaatcaccatcgccggcaacctcaaggacatgtggcgcaatattgttacggtcggtaacgatattgaaacacgcagcaatattcagtgtggttctgtattactgccggagatgaaaatcgccgggcaataa

SEQ ID NO: 523552 - DNA, 552 bp, Stenotrophomonas maltophilia
atgactaagcagcccgaagactggctcgacgacgttcccggtgatgacatcgaagacgaagatgatgagatcatctgggtcagtaaaagtgaaattaaacgtgacgccgaagagttaaaacagcttggcgcagaaatggtagaactgggtaagaacgcgctggataagatcccgctcgaccaggatctgcgtgatgccattgaactggcacagaaaatcaagaaagaagggcgtcgccgccagcttcagcttatcgggaaactgctgcgtcagcgcgatgttgagccgatccgtcaggcgctggataaacttaagaaccgccacaaccagcaggttgcgctgttccataagctggagcagatccgcgaccgtctgatcgagcaaggtgatgacgcggtacctgaagtgctgaacctgtggccgaatgccgaccgccagcagctgcgttctttgatccgtaacgcgaagaaagagaaagaagggaataagccgccgaagtctgcgcgtctgattttccagtatctgcgcgagctgtctgagaacgaagagtaa

SEQ ID NO: 523553 - DNA, 1374 bp, Stenotrophomonas maltophilia
atgcgcattcatatattggggatttgtggcactttcatgggcggactggcaatgctggcgcgctcgctgggccatgaagtgacaggttcggacgccaatgtgtatccgccaatgagcacgctgctggagaagcaggggatttctctgattcagggatatgacgccagccagctcgagccgcagccggatctggtgatcgttggtaacgccatgacccgtgggaatccatgcgttgaagcggtgctggaacgcaatatcccgtacatgtctggcccgcagtggctgcatgactttgtcctgcgcgaccgctgggttgtcgccgttgccgggacgcacggcaaaaccaccaccgccggtatggcgacctggatcctcgaagcctgcggctacaagccggggttcgtgatcggcggcgtgccggggaatttcgacgtctccgcgcgtctgggcgacagcccgttctttgtgattgaagcggatgaatacgactgcgcgttcttcgacaagcgctccaagttcgtgcattactgcccacgcacgctgatcctcaacaaccttgagttcgatcacgcggatatctttgacgacctgaaagcgattcagaaacagttccaccatctggtgcgcattgttccgggtcagggccgcattatcctgccggagaacgacatcaacctgaagcagactatggcgatggggtgctggagcgagcaggagctggttggcgagcaggggcactggcaggcgaaaaagctcaacgcggatgcttccgaatgggaagtgctgctcgacggcgaaaaagtgggcgaagtgaagtggggcctggtgggtgagcacaatatgcacaacggcctgatggcgatcgccgcggcgcgtcacgtgggcgtactgcctgcggatgccgccaatgcgctgggttcattcattaacgcccgccgccgtctggagctgcgtggtgaagcgaatggcgtgacggtgtacgacgatttcgcgcaccacccaaccgccattctggcgacgcttgccgcattgcgtggcaaagttggcggcaccgcgcgtattctggccgtgctggaaccgcgttcgaacaccatgaaaatggggatatgcaaagacgatctcgcgccgtccttagggcgtgccgacgaggtcttcctcctgcaaccgcagcatattccgtggcaggtggccgaagtggccgacgcctgcattcagccagcgcactggagtgcggacgtggatgtcttagcggatatggtggtgaaagccgcacagcctggcgatcacattctggtgatgagcaacggcgggtttggtgggatccatcagaagctgctggacggtctggcgaagaaagccgcggccgcagagtaa

SEQ ID NO: 523554 - DNA, 999 bp, Stenotrophomonas maltophilia
atgaaaacgttaggtgaatttattgtcgaaaagcagcacgagttctctcatgctacgggtgagctcactgctttgctgtcggcaataaagctgggcgctaagatcatccaccgcgatatcaacaaggccggtctggtcgatatcctgggtgccagcggtgccgagaacgttcagggtgaggttcagcagaaactcgacctgttcgccaatgaaaaactgaaagcagcactgcgcgcgcgcgacatcgttgcgggtatcgcctctgaagaagaagatgagatcgtcgtattcgaagggtgtgaacacgcaaaatacgttgttctgatggatccgctggacggctcctccaacatcgacgttaacgtttctgtcggtaccattttctccatctaccgtcgcgtcaccccggttggcacaccggtgacggaagaagacttcctgcagccgggcagcaagcaggttgctgccggttacgtggtgtatggctcatccaccatgctggtgtacaccaccggctgcggcgtgcacgcctttacctacgatccgtcgctgggcgttttctgtctgagccaggagcgcatgcgcttcccggagaagggcaatacctactccatcaacgaaggcaactacatccgattcccgaatggcgtgaagaagtacatcaaattctgccaggaagaggataaagccacccagcgcccgtacacctcgcgctatatcggctcgctggtggcggatttccaccgtaacctgctgaagggtggtatttacctctacccaagcaccgccagccacccggacggaaaactgcgtctgctgtacgagtgcaacccgatggcattcctggccgaacaggcaggcggcaaagcgagtgacggtaaagagcgtattctggatatcgtgccggaaagcctgcaccagcgccgttcgttctttgtcggcaacgaccacatggtggaagacgttgaacgcatgatccgcgaattcccggacgcgtaa

SEQ ID NO: 523555 - DNA, 363 bp, Stenotrophomonas maltophilia
gtgcgcaatctcgccagccgcagtgccgatgcggcgaaagagatccgctcgctgatcagcgattcgcaaacccacgtgaacgagggcagcgagctggcgcaacaggccggtgagacgatggacgagatcgctaccgaagtgctgcgtatgaccaaactgatgcgagaaattgcgacggcgtctcaggagcagagccgcggtattgagcaggttaacattgccgtcaatcagatggatgaaacggcgcaacaaaatgcggcgctggttcagcagtcctctgtggcaacgcgttccctggaggaacaatcgcgcgagctgatggaggcgatggcatccttcaaactgacggcgcaaacggcatga

SEQ ID NO: 523556 - DNA, 1002 bp, Stenotrophomonas maltophilia
atgataaaacgtaatttgccgttaatgatcacgctgggcgtgttcgtgctgggatacctttactgcctgacccagttcccgggcttcgcctccacgcgggtgatttgcaacatcctgaccgacaacgcctttttaggcattatcgccgtcggcatgacgtttgtgatcctctccggcgggatcgatctctccgttgggtcggtgatcgcctttaccggcgtgttccttgccaaggcgattggcttttggggtatttcgccgctgctggcgtttccgctggtgctggtcatgggctgcgcgttcggcgcctttatggggcttttgatcgacgcgctgaaaataccggcgtttatcatcactctcgccgggatgttcttcctgcgcggcgtgagctatctggtgtcggaggagtcaattccgattaaccatccgatctacgacacgctttccagcctggcgtggaaaatccccggcggggggcgcctgagcgcaatggggctgctgatgctgggcgtggtggtgatcgggatcttcctcgctcaccgtacccggtttggtaaccaggtttatgccattggcggcagcgccacgtccgcgaacctgatggggatttccacgcgcagcaccaccatccgcatctatatgctttcgaccggccttgccacgctcgcggggattgtgttttcggtatacacccaggcaggctatgccctggcgggggtgggcgttgagcttgacgccattgcctcggtggtgattggcggtacgctgctcagcggcggggtagggacggtgctcggtacgctgtttggcgtggcgatccaggggctgattcagacctatatcaacttcgacggcacgctcagctcctggtggaccaaaatcgccatcggtattctgctgtttatttttatcgcgctccagcgcggcctgacggtgctgtgggagaaccgccagagctcgcctgttacccgtgtgaatacatctttaacagggcgataa

SEQ ID NO: 523557 - DNA, 1023 bp, Stenotrophomonas maltophilia
atgtcccgttctctttcgcaaactggcgaagcgaagcgccgcttcagctggccgaccggcacgccgcaaatcgtggcgctgctgctggtgctgctggtggatagcctggtggctccgcatttcttccagatcgtcgtgcaggatggccgcctgtttggtagcccgatcgacatcttaaaccgtgccgcgcccgtggcgctgctggcgattggcatgacgctggtgattgccaccggcgggattgacctctccgtcggtgcggtaatggcgattgcgggcgccaccgccgcctcgatgaccgttgccgggcacagcctgccggtggttctgctggccgcgctgggctccggtgtattagccgggctgtggaacggcattctggtcgcggtgctcaagatccagccgtttgtcgcgacgttgattttgatggtggccgggcgcggtgtggcgcagcttatcacctccggtcaaatcgtcacctttacctccccgaatcttgcgtggattggcagcggcaattttctgttcttcccgaccccggtgatcgtcgcgctggtgacgctggtggtgttctggcttttcacccgcaaaacggcgctcgggatgttcatcgaagcggtggggattaacattcgggccgcgaaaaacgccggggtaaatacacggctgatggtgatgctgacctatgtgctgagcggcgtctgtgctgcgattgccggggtgattgtggcggccgacattcgcggggcggatgccaacaacgccggactctggctggagcttgatgcgatcctcgcggtggttatcggcggtgggtcgctgatgggcggacgttttaatctgctgctctcggtggtgggggcgttaattattcagggtatgaataccggtattttgctctccgggttccagccggagcttaatcaggtcgtcaaagcggtcgtggtgcttatcgtacttatcgtgcagtcgccgcgctttatcactctcattaaggggttccgcggtcatgataaaacgtaa

SEQ ID NO: 523558 - DNA, 1503 bp, Stenotrophomonas maltophilia
atgaccaccgaacaacaccaggaaatcctccgcacagagggcctgagtaaatttttccctggcgttaaggcgctggataacgttgatttcagcctgcggcggggggagatcatggcgttgctcggcgaaaacggggcggggaagtcgacgctgattaaaaccctgaccggggtctatcacgccgatcgcggcgctatctggctggaaggtaatgctatttcgcccaaaaacaccgcgcatgcgcagcaactggggatcggcacggtctaccaggaagtgaacctgctgccaaacatgtcggtagcggataacctgtttattggccgcgagcccagacgttttggcctgctgcgccgcaaagagatggaagcgcgcgccgcgaagctgatggaatcgtatggcttctctctcgacgtgcgcgaaccgctgaaccgtttttccgtggcgatgcagcagatcgtggcgatctgtcgcgctatcgatctctcggcgaaagtgctgatcctcgatgaacccaccgccagcctcgatacccaggaagtggagatgctttttaccctgatgcgccagctgcgcgatcagggcgtgagcctgatctttgttacgcacttcctcgatcaggtttacgaggtgagcgaccgtattacggtgctgcgcaacggcggctttgtcggctgccgggaaacccgcgagctgccgcagattgagctggtcaaaatgatgctgggccgcgagctggagaccaacgcactccagcgtgcgggccgcacgctgctgagcgaaaaaccgatcgccgcgtttcacgattacggcaaaaaagggaccatcgcgccgtttaacctcgaggtacgccccggtgaaattgtgggtctggcagggctgttaggctccgggcgcaccgaaaccgccgaagtgatcttcgggatcaaacctgccgacagcggaacggcgctgatcaaaggcaaaccgcaaacgctacgttcaccgcatcaggcgtcgtgcctcggcgtgggcttctgcccggaggacagaaaaacggacgggattattgccgccgcctcggtgcgggaaaacatcattctggcgctacaggcccagcgcggctggctgcgtccgatccctaagcgcgagcagaacgcgattgccgagcgcttcatccgccagctcggtatccgtaccccgagcgcggaacagcccatcgagttcctttcgggcggtaatcagcagaaggtgttgctctcgcgctggctgctgaccaaaccgcagttcctgatcctcgacgagcccacgcgcggtatcgacgtgggcgcgcatgccgaaatcatccggcttatcgaaacgctgtgcgccgacggtctggcgctgctggtgatctcgtctgagctggaggagctggttggctatgccgatcgcgtcatcatcatgcgcgatcgcaggcaggtggcagagatcccgctggataaactgtcggttccggcgatcatgaatgccatcgcggcgtaa

SEQ ID NO: 523559 - DNA, 957 bp, Stenotrophomonas maltophilia
atgtggaagcgcttacttcttgttacagcagtttcggcagccatgtcgtctatggcgatggccgcaccgttaaccgttggattttcgcaggtcggatctgaatccggctggcgcgccgctgaaacgaacgtggcgaaaagtgaggccgaaaagcgcggtattaccctgaaaatcgccgatggtcagcaaaagcaagagaatcagattaaagcggtgcgctcttttatcgctcagggcgtggatgccatctttatcgccccggttgttgccacgggctgggagccggtgctgaaggaagctaaagaggctgaaattcctgtgttcttgctcgaccgttccatcgacgtaaaagacaaatctctctatatgaccaccgtcaccgccgataacgtgctggaaggcaaactgattggtgactggctggtgaagcaggtggatggcaagccgtgtaacgtggttgagttgcagggcaccgtcggggcgagcgtggctatcgaccgtaagaaaggtttcgcggaggccatcgccaaagcaccaaacatcaagatcatccgttctcagtccggcgacttcacccgcagcaaaggtaaagaggtcatggaaagcttcatcaaggcagaaaataacggcaaaaatatctgcatggtttacgcccacaacgacgacatggtgatcggcgccatccaggccatcaaagaagcgggcctgaagccgggcaaagatattctcaccggctcgatcgacggcgtaccggacatctacaaagcgatgattgacggcgaagcgaacgccagcgtggagctgacgccgaacatggcgggcccggcattcgatgcgctggagaaattcaagaaagacggcacccagcctgagaagttgaccatcaccaaatccacgctctacctgccggacacggcgaaagaagagttagagaagaagaaaaatatgggctactaa

SEQ ID NO: 523560 - DNA, 531 bp, Stenotrophomonas maltophilia
atgagcttactcaacgtccctgcgggtaaagaactgccagaagacatctacgttgtgatcgaaatcccggccaacgcagatccaatcaaatacgaaatcgacaaagacaccggtgcgctgttcgttgaccgtttcatgtctaccgccatgttctatccgtgcaactacggctacatcaaccacactctgtctctggacggtgatccggttgacgtactggtcccaacgccatacccattgcagccaggctccgtcattcgctgccgtcctgttggcgtgctgaaaatgactgacgaagcgggtgaagatgcgaaactggttgccgtaccgcacaccaagctgagcaaagagtacgatcacattaaagatgtgaacgacctgccagagctgctgaaagcgcagatcgcccacttcttcgagcactacaaagatctcgaaaaaggcaaatgggttaaagttgaaggctgggataacgcagaagcggcgaaagcagaaatcatcgcctctttcgagcgtgctgctaagaagtaa

SEQ ID NO: 523561 - DNA, 345 bp, Stenotrophomonas maltophilia
atgcgaatatttgtttatggcagtttacgaactaagcaaggcaacagccactggatgaccaacgcccagttgctgggaaattacacaatcgaaaactaccagttgtacagtctgggccactatccaggcgcggttccggggaacggaacggtacagggtgaggtttatcgtattgataatgctacgctggccgaacttgatgccttgcgcaccaggggcggtgaatacgctcgccagttgatccagacgccttacggcagtgcatggatgtatgtgtaccaacgttcggtcaacgggttaacgctgattgaaagcggtaactggttagacagagaccagttctga

SEQ ID NO: 523562 - DNA, 3777 bp, Stenotrophomonas maltophilia
atgagtttatggaagaagataagcctcggggtgctgatttttatcgtattactgctcggtacggtggcatttctggtgggtaccaccacgggcctgcatctgctgtttaacgccgcgaaccgctgggtgccagggctggaaatcggccaggtgacgggcggctggcgcgatctgcgcctgaagaatattcgttatgaacagcccggcgtggcggtgaacgcgggcgaatttcatctggcggtcaaggtcggctgcctgcgggatagccagctgtgcgtaaacgatctgtcgctaaaagacgttaacgtggcgatagactccaaaaaaatgccgaagtctgagcctgtcgaagaagaggacagcggcccgctgaatctctccacgccgtacccgattgcgctctaccgggtcgcgctggataacgtcaatatcaaaatcgacgacacgacggtatcggtgatggatttcacctccggtctgcgctggcaggagaaaaacctcaccctgaccccaacctccctgcaagggctgctgattgcgctgccgaaggtggccgacgtggcgcaggaagagatcgtcgagccgaagatccagaacccgcagccggaagaaaaaccgctgggtgaaacgctgaaagatctcttctcgataccggttctgccggagatgaccgacgtgcatctgccgctgaacctcaatatcgaagagtttaaaggcgagcagttgcgtttgaccggcgataccgatctgacggtcttcaacatgctgcttaaagtcagcagtatcgacggcaacatgaagcttgacgcgctggatatcgataccaaccaggggtcggtaaacgcctcaggcaatgcgctgctgcgcgataactggccggtagatattacccttaacagcgccctgaacatcgatccgctgaaaggcgagaaggtgaaggtgaaagtcggcggcgcgctgcgcgagaagctggagttcggcgtgaacctctccggccctgtggatatggtactgcgcgggcaaacccagctggcagaggccggtctaccgctcaaccttgagattgtcagcaagcagctttactggccgttcaccggtgaaaagcagttccaggccgacgatctaaagctgaagctgagtggcaaaatgaccgactacacgctgtcgttccgtacggcagtgaaggggcagggagtaccgcccgccgatattactctggatgcgaagggtaacgagttgcaggttaacctcgacaagctgaccgtggcggcgctggaagggaaaaccgagctgaccgcgctgctcgactggcagcaggcgatcagctggcgcggcgagctgaagctgaccgggatcaacaccgctaaagaagtcccggactggccgtcaaaactgaatggtctgatcaaaacccgcggtagcctgtacggcggcacctggcagatggacgtgccggaactcaagctcaccggtaatgtgaagcagaacaaagtcaacgtagagggctcgcttaagggcaacagctatctccagtgggtgatcccgggcctgcacgtggcgctgggccgcaacacggcagatatcaaaggcgagctgggggtgaaagatctcgatctggatgccaccatcgacgcgccaaatctcgataacgccctgccgggtcttggcgggacggcgaaggggttagtgaaggttcgcggtacagtggtggcgccgcagctgctggcggacatcaccgccaataacctgcgctggcaggaactttccattgcccgcgtgcgcgtcgaagggaacgtgaaatccaccgatcagatcggcggaaacctggacctgcgcgtggagcgtatctcccagccggacgtgaacatcagtctggtcacgctggcggcaaaaggtaacgaaaagcagcacgatctccagctgcgcgtgcagggcgagccggtctccgggcagctgcacctgacgggcagttttgaccgccaggcaacgcgctggaacggcgtgctggataacacccgcttcagcacgccggtcggcccgctggtgctgtcccgatccatcgcgctggactaccgcaatgcggagcaaaagatcagcattgggccacactgctggaccaacccgaatgctgagctgtgcgtgccgcagaccattgatgcgggcgcggaaggacgcgcgcagatcaacctcaaccgttttgacctggcgatgctgaaaccgtttatgccggaaaccacccaggccagcggggtcttcagcggtaaagcggacgtcgcgtgggacaccaccaaagagggactgccgcagggcagcgttaccctctccgggcgtaacgtgaaggtgacgcaggaggtcaatgacgcgccgctgccggtggcgttcgacaccctgaatgtgaacgctgacctgcgtaacaatcgtgcggaactgggatggcttattcgtctgaccaacaacggtcagcttgacggacaggtgcaaattaccgatccgcaagggcggcgcaatctcggcggcaacgtcaatattcgcaacttcaacctggcgatggtgaatccgattttctcgcggggagaaaaggcggcggggatgctcagcgccaacctgcgtctggcgggggatgcgcaaagcccgcagctgtttggccagatgcggttaaacggcgtggacattgacggtaactttatgccgttcgatatgcagccaagccagctgacgatgaactttaacggccaaagctcaaccctcagtggctcagtgctgacacagcagggacaaatcaacctgaatggtgacgcagactggagccagctcgacaactggcgcgcccgtattgcggccaagggcagcagggtgcgtatcacggtaccgccgatggtgcgcctggacgtgtcgccagacgtggtctttgaggcaacgccgagtctcttcaccctggacggccgcgtcgacgtgccctgggcgcgcatcgtggttcacgaagtgccggaaagcgcggttggcgtctccagtgatgaagttatgctcaatgaaaatctgaaacctgttgaacagaagagcgctggcataccgatcaatagtaatcttattgtgcacgtggggaataacgtgcgtttggacgcgtttgggctgaaggcgagactcacgggtgacctgaaggtggcgcaggatcaacaggggcttggcctcaatggacaaatcaatattcctgaagggcgcttccatgcctacggtcaggatttgattgtgcgtaaaggtgagctgctgttctccggcccaccggatcagccggtactcaatatcgaagcgatccgtaacccggaagccaccgaagatgatgtgattgcgggcgtgcgcgtgacgggctccgccgatgaacctaaggcagagatcttctctgacccggccatgtcgcagcaggaagcgctctcctacctgctgcgcggccagggtctggatagccaacagggcgatggtgcggcaatgacatcgatgttagtcggtctgggggttgcacaaagtggtcaggttgtgggtaaaatcggcgagacgtttggcgtaagcaatctggcgctggacactcagggcgtgggtgactcttcgcaggtagtggtcagcggctatgtactgccgggtctacaggtaaaatatggcgtggggatctttgactcactggctacactcacgttacgttatcgcctgatgcctaagctatatctggaagcagtgtccggcgtagaccaggcacttgatctgctctatcagtttgagttttag

SEQ ID NO: 523563 - DNA, 1734 bp, Stenotrophomonas maltophilia
gtgacaaagatccgccagttatgtttagtcagtttaatgctgacaagcgggattgccagcgcggcgaatgtccgtttgcaggttgaggggttatccggggcgctggaaaaaaacgtgcgtgcgcagctttccaccatccagagcgatgaagtcacgccggatcggcgttttcgcgcgcgcgtggatgacgccattcgcgaaggcttaaaggcgttggggtactacgaacccaccattgatttcgatttacgcccgccgccggctaaaggacgtcaggtattgattgcccgcgtctcgccgggagaacccgtcctgattggcggcacgaacgtggtgctgcgcggcggtgcacgcacggatcgtgactacctggatctgctcagcaaccgcccgaaagtgggcaccgtgcttaatcacggggattacgatcgctttaaaaaatccttaaccagcgtttcgctgcgcaaaggctactttgacagccagttcaacaaaagccagctgggcgttgcgcttgaacgacgtcaggcattctgggatatcgattacgacagcggcgagcgctatcggtttggcgatgtaacctttgaaggatcgcaaatccgtgatgagtatctgcaaaacctggtgccgtttaaaaagggcgactactaccagtctagcgacctgggcgagctgaaccgtcgtttatctgccaccggctggtttaactccgtggtggtggcaccgcaatttgataaatcccgtaaaacgaaagtgttaccgctgcatggcgtggtctcaccgcgcaccgagaacaccattgagaccggtgtcggctactccacggacgtcggcccgcgcgtgaaagcctcgtggaaaaaaccgtggatgaactcctacggtcacagcctgaccaccagcctcagcctgtctgcgcctgaacagcagctggacttcagctataaaatgccgctgctgaaaaatccgcttgagcaatactacctcgtgcagggcggctttaaacgtaccgatttgaacgataccgagcaggattcgacgacgcttgcggtatcacgcttctgggatctctccagcggctggcagcgcgccattaacctgcgctggagccttgaccactttactcaggcaaacgtcaccaacaccaccatgctgctttatccgggcgtgatgatcagccgtacccgctcgcgcggtggcctgatgccgacctggggcgattcacagcgctactccatcgattattccaactccgcctggggctcagacgtggatttctccgtcgtgcaggcgcaaaacgtctggatccgtaccctctacgacaagcaccgctttgtggttcgcggcaacctgggctggatcgaaaccggtgacttcgaacgcgttccgccagatctgcgtttcttcgccgggggcgaccgcagcattcgcggctataagtacaaatcgatctcacctgaaaacgagaaaggccaattgaccggggcctctaaactggcgaccggctcgctggagtatcagtacaacgtcagcggcaaatggtggggcgccatgtttgtcgacagcggcgaggcggtgaacgacatccgccgcagcgatttcaaaaccggcgcgggtgtgggcgtgcgctggcagtcaccggtcgggccgatcaagctagatttcgccgttccggtgggcgacaaagacgaacacggtttacagttttacatcggtctggggcctgaattatga

SEQ ID NO: 523564 - DNA, 642 bp, Stenotrophomonas maltophilia
gtgagtttatttgataaaaagcatctggtatcacaagccgatgcgttaccgggacgcaacacccctatgccagtggcgacattacacgccgtaaacaaccattcaatgacaaacgttcctgatggaatggagatcgccctgtttgccatgggctgcttctggggcgtagaacgcctgttctggcaactgccgggcgtgtacagcaccgctgcgggctacaccggaggatatacgcctaacccaacctaccgcgaagtctgttccggtgagaccggtcatgctgaagcggtacgtgtggtgtatgacccgagcgtcatcagctatgaacagctgctccaggtgttctgggaaaaccatgacccggcgcagggcatgcgtcagggtaacgatcacggcacccaataccgctcggccatctatccgctcacccctgagcaggaggctgcggcccacgccagcctgacgcgtttccaggaagcgatgcaggcagccggtgataaacgtcaggtcacgacggaaatcgctactgcgaaaccgttctactatgccgaagacgaccaccagcagtatctgcataaaaacccgtacggctactgcggcattggcggcatcggcgtctgtctgcctccacagcaggactga

SEQ ID NO: 523565 - DNA, 1338 bp, Stenotrophomonas maltophilia
atgttaaacagtattttagtaatactttgtcttattgccgtcagtgcatttttctcgatatcggagatctcgctggctgcctcccgtaaaatcaaactgaagctgcttgccgacgagggcaacatcaacgcatcacgcattctgaaaatgcaggaaaacccaggcatgttctttaccgtggtgcagattggcctgaacgcggtcgccattcttggcggtatcgtgggcgatgcagcattttctccggcgttttatagcctgtttgtaaagtacatgtccgcagagctggccgagcagttgagcttcatcctctccttctcgctggtcaccggtttgttcattctattcgcggacctgaccccgaaacgcatcggtatgattgcgccagaagctgtggctttgcgtatcatcaacccgatgcgcttctgcctgtatgtcttccgtccgctggtgtggttcttcaacggcctggcgaacgtcattttccgcatcttcaagctgccgatggtgcgtaaagacgacatcacctccgacgatatttatgcggtggtggaagccggggcgctggcaggcgtgctgcgcaagcaggagcacgagctgatcgagaacgttttcgaactggaatcccgtaccgtgccgtcctccatgaccggccgtgagaacatcatctggttcgatctgcatgaagacgagcagagcctgaagaccaaagtggcgcagcatccgcactccaagttcctggtctgtaacgaagatatcgaccatatcatcggctatgtggactccaaagacctgctgaaccgcgtgctggcaaaccagagcctggcgctgaacagcggcgtgcagatccgcaacaccctgattgtgccggacaccctgacgctctccgaagcgctggaaagcttcaaaactgcgggtgaagacttcgcggtgatcatgaacgagtacgcgctggtggtgggcattatcaccctcaacgacgtaatgacgacgctgatgggcgacctggtcggccaggggctggaagagcaaattgtgcagcgtgacgagaactcatggctgattgacggcggtacgccgattgaggacgtgatgcgcgtgctggatatcgacgagttcccgcagtccggaaactacgagaccatcggcggctttatgatgtttatgctgcgtaagatcccgaaacgtaccgactcggtgaagttctccggcttcaagtttgaagtggtggatattgataactaccgcatcgaccagttgctggtaacgcgcattgatagtaaaccgaccgtgctggtaccgaagctgccggacgcggaagataaggtgtcggcgtaa

SEQ ID NO: 523566 - DNA, 207 bp, Stenotrophomonas maltophilia
atgaaaattttccaacgctacaacccgcttcaggtggcgaagtacgtgaagatcctgttccgtggacggttgtatatcaaggatgttggcgcttttgagttcgataagggcaaaatccttatcccgaaagtgaaggacaaacagcacttgtctgtgatgtccgaagtcaaccgtcaggttatgcgtctgcaaactgagatggcttaa

SEQ ID NO: 523567 - DNA, 558 bp, Stenotrophomonas maltophilia
atgaccctacgtaacctcctggcagcagcttgcctgttgctgccgctgatggcttccgcgcacaacattgaaaaaggacaacgtgtcccgccggtcggcattgctgaccggggagaattgattctcgacaatgataagtttagctacaaaacctggaatagcgcgcagcttgcgggcaaagtgagagttgtacagcatattgccggacgtacatccgctaaagagaaaaacgccaccctcgtggaagcgatcaaggccgcaaaactcccgcacgatcgctaccagaccaccaccatcgtgaataccgacgacgcgattcccggctccgggatgtttgtgcgctcaagccttgagagcaataagaagctctatccctggtcgcagtttattgtcgacagcaacggcgtgacgcgtaaggcgtggcagctggaagaagagagttcagcgattgttgtgctggacaaaaacggtcgcgtacagtgggttaaggacggcgcgctgacgcaggatgaggtgcagcaggtggttgccctgctgcataagctgctgactcagtaa

SEQ ID NO: 523568 - DNA, 741 bp, Stenotrophomonas maltophilia
atgttagatcaaatttgtcagctcgcacgggatgcgggtgatgccattatgcaggtgtacgacggtgcgaaaccgatggatgttgtcagcaaagcggacgactccccggtgacagcggcggatatcgcggcgcatacggtgatcctgaaaggtttgcagaccctgacgccggatattccggtcctttctgaagaagcgccccagggctgggacgaacgtcagcactggcagcgttactggctggtggacccgctggacggcacgaaagagttcatcaagcgtaacggtgaatttaccgtgaatatcgccctgattgaaaaaggaaaggcggtgcttggcgtggtttatgccccggtgatgaaggtgatgtacagcgcggcggaaggtaaagcctggaaggaagagtgcggcgtgcgtaagcagatccaggtgcgagatgcccgtcctccgctggtggtgatcagccgctcgcacagcgacagcgagctggaggagtacctgcaacagctgggggaacaccagacgacgtcgattggctcgtcgctgaagttctgtctggtggcggaagggcaggcgcagttgtacccccgtttcgggccgacgaacgtctgggatacggcggcagggcatgcggtggctgcggccgcaggcgcgcatgtgcatgactggcagggtaagccactggactacaccccgcgcgagtcattcctcaatcctggcttcagggtgtcactttactga

SEQ ID NO: 523569 - DNA, 1944 bp, Stenotrophomonas maltophilia
atgattaagtttagcgcaacgctcctggcaacgctgattgcggcaagcgttcaggcagcgacggtggatctccgcattctggaaaccaccgatctgcacggcaacatgatggacttcgattactacaaagatacgcctgtcgaaaaattcggactggtacgtacggcaagtttgatcaacgccgcccgcggtgaagtgaaaaacagcgtgctggtcgataacggggacttaattcagggcagcccgctcagcgactacatggcggcgaaggggctgaagaaaggcgagatccatcctgtttatagggcaatgaatacgctggactatgccgtcggcaacctgggcaaccacgaatttaactacggcctgaaatacctgcacgatgcgctggcaggggcaaaattcccgtacgttaatgccaatatcatcgacgttaagacgaaaaagcccctctttaccccttacctgattaaagagaccgaggttgtcgaccaggacggtaaaaaacagacgctgaaaatcggctatatcggctttgtgccgccgcagatcatgacgtgggataaagccaacctcgacgggaaagtaaccgtcaacgacattaccgaaacggcgcgcaaatacgtgccggagatgcgggcgaaaggcgcagatgtggtggtcgttgtggcccactctggcctctcggccgacccgtatcaggcgatggctgagaactccgtgtattacctcagccaggtaccgggcgtcgatgcgatcctgtttggtcacgcccacgccgtcttcccgggcaaagatttcgccagtatcaaaggcgcggacatcgaaaaagggacgctcaacggtgtgccatcggtgatgccgggcatgtggggcgaccaccttggcgtggtagatctggtgctgaataacgacagcgggagctggaaagtcacgcagtcgaaagcggaagcgcgtccgatttatgatgccgctgcaaaaaaatccctggccgaagaagataaaaagctggtcgacgtcctgaagcatgaccacgacgcaacgcgtgaatttgtcagcaagccgatcggtaaatcggctgataacatgtacagcttcctcgcgctggtacaggatgacccgaccgtgcaggtagtcaacatggcgcagaaagcctatgccgagcactatattcagggcgatccggatctggccaatctgccggttctgtctgccgcggcgccattcaaagtgggcgggcgtaagaacgatccggccagctacgttgaggtggaaaaaggccagctgaccttccgtaatgccgccgatctctacctctatcccaacaccctcgtggtggtgaaagccaccgggaaagaggtgaaggagtggctggagtgctctgccggacagttcaaccagatcgatccgcacagcagcaaaccgcagtcgctgataaactgggacggtttccgcacctacaacttcgacgtgatcgacggcgtggaatatcagattgatgtaacccagcccgcgaaatatgacggcgaatgtcaggccattaatccgcaggcagaacgcatcacacacctgaccttcaacggcaaagcgattgatccgaatgcctctttcctggtggtgaccaacaactaccgcgcctatggcggtaagtttgccggtacgggtgacagccacatcgcctttgcctcgccggatgagaaccgttcggtgctggcggcgtggattagcgcggagtcgaaaaaagcgggtgaaattcatccggcggtggataacaactggcgtctggcgccgatccacagcgacacgacgctggatattcgctttgagacatcaccgtccgataaagcagccgcgtttatcaaggataaggcgcagtatccgatgaaacaggtcgcgacggatgatattgggttcgcgatttatcaggtagatttgagcaggtag

SEQ ID NO: 523570 - DNA, 387 bp, Stenotrophomonas maltophilia
atgaaaacaccgataccgacgctcagcgagcaaatgcgcgatggcaatctctttgcagaacagtgcccgtcacgggaagtgctcaaacatgttaccagccgctggggcgtgctgatcctggtggcgttacgtcaggggacgcatcgttttagcgatctgcgccgcaagctgggcggtgtgagcgagaagatgctggcccaatcgcttcaggcgctggagcaggacgggtttgtcgatcgcgtttcttatccggttgtgccgccgcacgtggaatacagcctgacgccgatggggctggaggtgagcgagaaggtggccgcgctggctgactggattgaggtgaatacgccgaaggtgatggcgaatcgggacgatcgtgcggcatga

SEQ ID NO: 523571 - DNA, 849 bp, Stenotrophomonas maltophilia
atgatcgcgattaccggcgcaaccggccagcttggccaacacgttattgaagaactgctgaaaaccgttccggccagccagatcgtggctattgtgcgtaacccggcaaaagccgacgccttaagccagcggggaattgtggtacgtcaggcggactataccgaccaggccgcgtccaccaccgccctgaacggcgtggataagctgctgcttatctcctccagcgaagtgggccagcgcgccgtacagcaccagaacgtgataaacgccgccaaagccgccggggtgaaattcatcgcctataccagcctgctgcatgcggacagatccccgctgggtctgcacgttgagcacgtcgaaaccgaaaatacactggcggcttcaggcgtgccttacgccctgctgcgcaacggctggtacaccgaaaactacctggcaagcgcgccgccagcgctggaacacggcgtatttataggtgccgcaggcgaaggcaaaattgcctctgcgacccgtgcggattacgcggcggctgcggcaaaagtgatttctgaagagggtcacgccggcaaggtgtatgaactggcaggtgacaatgcctggacgctgagcgaactggctgcggaactgagcaagcagagcggtaagccggtaacgtatcagaacctcagcgaagccgattatgccgccgcactgaaaggcgttggtctgcctgccgggctggcggagatgctggcggattctgataccggtgcgtccaaaggcggcctgtttgacgacagccgtaccctgagcaaactgattggccgtccgaccacgccgctggcggagagcatcaaagccattctgtaa

SEQ ID NO: 523572 - DNA, 852 bp, Stenotrophomonas maltophilia
gtgcaaggcgtaccggaacagtttactgatgagagagacagcgcgcgctttcgccatctggcgcagttgccgggtctggagctatatcacgcgcatattgctgactacgcctttgagcctcacacgcatgaagccttcggtatcggcaccattgaaaccggcgctgaacgcttccgttaccgcggaacccaacacttagccgctgaaaaatcggtcgtgaccatgaacccggacgagatccacacgggcgaatccgccaccgaaggcggctggcgctaccggatggtctatatcgaacccgacctgctggaagaagtcaccggccttcgccactggtggtttagcgacgtgacccgccacgacccgctgcgctcgcagcaaattggccagctgatttacggcctttggcatacgaacgatgcgctggcacaaaaagggttgctgctggatctgattgagacgttccagccgctggcccgtcacgcgccggtagcccgggagggcgcgcaccgcttcgagcgcgttcgcgactatctgcacgacaactatatgcgcgcgctcaccctggacgaactggcgagcgtcgtgtcgctcagcccgtaccatttccagcgccagtttaaggcccattttcacgtcaccccacaccagatgctgatggccatccggctgtggcgcgccaaagcattcctcacccacggcatgcctgccgccgaggtggccgccgcaacggggctgaccgatcagtctcacctgacccgcgcctttacccgccgctacggcattacgcccgtgcgctaccagaagcaggtttcgccgcgcttaacggctcagggctttattgcacgttaa

SEQ ID NO: 523573 - DNA, 210 bp, Stenotrophomonas maltophilia
atgtttgtcttaagatcgaacgttaatgtaataattgtgataaaactatttttagtctgcttaatggcggtgtttgcactaatggttgtaaacccaagcgcgatctttggaaacaggagtaatgaagaaatcaatgaaagcgaagaccattatcgtgctcaggatttagcccggcaaaaaccggttttatttgtgaccggctttagatga

SEQ ID NO: 523574 - DNA, 177 bp, Stenotrophomonas maltophilia; identical to SEQ ID NO: 143316

SEQ ID NO: 523575 - DNA, 564 bp, Stenotrophomonas maltophilia
atggcattgaaaatgacattagaaaagataggcttcactcatgtggatgaatgtgataacggtgcgcaggctataaaccagataaaaaaagggaaatacaatatcgtcatactggatattggtattcctaacatggatgggatgtcggttatcgcggcggtgcgaaaagcagagattaatacaaaaatcctggtgttcacctcacagtcagcggaactctatgccagcagatgcatgatgtccggcgtgtctggatttttgacaaagaatgagggtatggaagatgtttcagcggcgatcaaagccatcaattctggttttacattttttccaaatataagctatgccaacaattttacatcaagaaaatcatcctcactgacaaaccgcgaactagaggtactgcgtaaaatcattgctggaatgaaaaatattgaaatagcagacagcatgtgcctgagcagcaaaacaatcagtacctataaaacccggataatgacaaaaatgggcgttacgacactggttgatttgatcgagattgctaaaagagaaaagattgaatga

SEQ ID NO: 523576 - DNA, 2181 bp, Stenotrophomonas maltophilia
atgagcatgtcagacgagaccaataacgcggcatccgccggcaaatgtccgttccaccagggcggcgtcgatcacagcgcgggtgcaggtaccggcagcaaagagtggtggcctaaacaactccgcatcgatttacttaatcaacactccagccgttcaaaccctctgggtgaagacttcgactaccgcaaagaattcagtaagctcgactattccgcccttaagggcgatctcaaagcactgttaaccgactcacaaccgtggtggcctgccgactggggcagctatgcgggcctgtttatccgtatggcctggcacggtgcgggtacctatcgctccgttgatggtcgcggcggtgccggtcgcggtcagcagcgttttgcgccgctgaactcctggcctgacaacgtcagcctggataaggctcgccgtctgctgtggccaattaagcaaaaatacggacaaaaaatctcctgggccgacctgtttatcctcgcgggtaacgtggcgctggagaactccggcttccgcacctttggtttcggtgccgggcgtgaagacgtctgggaaccggatctggacgtgaactggggcgatgaaaaagcctggctgactcaccgtgacccggaagcgctggcgaagcgcccgctggccgccacagaaatgggcctgatttacgttaacccggaagggccaaacgccagtggtgaaccgctgtctgcggcggcggcgatccgcgctacctttggcaacatgggcatgaatgacgaagagaccgttgcgcttattgcaggcggccatacgctcggtaaaacgcacggtgcaggcgaagccacgcacgtgggcactgaccctgaagcgtcgcctattgaagcgcagggcctgggctgggccagcacgcacggcaccggtattggcgctgacgccatcacctccgggctggaagttatctggtctcaaaccccaacccagtggagcaactacttcttcgagaacctgttcaaatacgaatgggtgcagacgcgtagcccggcgggcgcaattcagtttgaagccgtggatgcgccggaaattatgcctgacccgttcgacccgtcgaaaaaacgcaagccaaccatgctggtcaccgacctgacgctgcgttttgatccggaattcgagaaaatttcccgtcgtttcctgaacgatccgcaggccttcaacgaagcctttgcgcgcgcgtggttcaagctgacccaccgcgatatggggccaaaagcgcggtacatcggcccggaagtaccgaaagaagatctgatttggcaggatccgctgcctcagccggtgttccatccgacgcaggaagatattgaaagcctgaaagcggaaatcgcggcctcgggtctctccgtgagcgagctggtttccgtggcctgggcgtcggcatcgaccttccgcggcggcgacaagcgtggcggcgctaacggcgcgcgtctggcgctggcacctcagcgcgactgggacgttaacgccgcggcggtgcgggcattaccggctctggaagcgatccagcgcaccaccaacaaagcgtcactggccgatatcattgtgctggcgggtgtcgtgggcgttgagcaggcggcgaaagcggcaggcgtttacgtcaacgtaccgttcactccaggtcgtgtggatgcgcgccaggatcagacggatatcgagatgtttaacctgctcgaaccgattgccgacggtttccgtaactatcgcgcacaggtggatgtgtccaccacggagtcgctgctgatcgacaaagcccagcagttgaccctgaccgcgccggaactgacggtgttgatcggcggtttgcgcgtactgggtgcaaacttcgatggcagcaagaatggcgtgtttactaaccgcgagggcgtgctgagcaacgacttcttcgtcaatctgctggatatgaacacccagtggaaagcgaccgacgactcaaacgagctgtttgccggtagcgatcgcgccagcggggaagtgaaatataccgccacccgcgccgatctggtcttcggttccaacgctgtcctccgcgcgctggctgaagtttacgccagcagcgatgcacaagagaagttcgtccgcgacttcgttgccgcatgggcgcgagtgatggatttggatcggtttgacgtgaagtaa

SEQ ID NO: 523577 - DNA, 891 bp, Stenotrophomonas maltophilia
atgagcttttttcacgccaaccagcgggaagccctgaatcagagcctggccgaagtaaacggccagattaacgtctcttttgaatttttcccgccgcgcaccagtgaaatggagcaaaccctgtggagctctatcgatcgcctgagcagcctgaagccgaagttcgtctccgtaacctacggcgccaactccggtgagcgtgaccgcacgcacagcatcattaagggcattaaagaccgaaccggtctggaagcggcaccgcacctcacctgtatcgacgccacccctgatgaactgcgcgcgattgctcaggactactggaacaacggcattcgtcatatcgttgccctgcgcggcgacctcccgccggggagcggtaagccggacatgtacgccaccgatctggttgccctgctgaaagacgttgctgactttgatatttccgttgccgcttacccggaagttcacccggaagcgaaaagcgcccaggcggatctgcttaacctgaagcgtaaggtggacgcaggtgccaatcgcgccattactcagttcttctttgatgtggaaagctatttacgctttcgcgaccgctgcgtctcggcgggtattgatgtcgaaatcatccctggcattctgccggtctcgaacttcaaacaggcgaagaaattcgcggatatgaccaacgtgcgcattccgctgtggatgtccaaaatgtacgaaggtttggacgatgacccggaaacacgcaagctggtgggggccaatatcgcgatggatatggtgaagattttaagccgtgaaggggtgaaggatttccacttctatacgcttaaccgcgcggagatgagttacgccatttgccatacgctgggtgtccgcccggtgttataa

SEQ ID NO: 523578 - DNA, 2433 bp, Stenotrophomonas maltophilia
atgagtgtgatagcgcaggcaggggcgaagggtcgtcagctgcacaagtttggtggtagtagtcttgctgatgtgaaatgttatctgcgtgtcgcagggatcatgaccgagtattcacagccgggggacatgatggttgtctctgcggcgggcagcaccaccaaccagctgattagctggctgaaactgagccagaccgatcgcctctctgcgcatcaggtgcaacagtccttacgtcgttaccagagtgaactgattgccggtttgctgcctgcggacgtggcggacgggctgataagcgcctttactcacgaccttgagcgtctggcagctctgctggacagcggcattaccgatgcggtgtatgcggaagtggttggccatggtgaagtgtggtctgcgcgcctgatggccgccgtgctgcaacatcttggcgtggaagccgcctggctcgacgcgcgtgatttcctgcgtgccgaacgcgccgcacagccgcaggtagacgaagggttgtcctacccgctgctgcaacagctgctggtgcaacatccgggtaaacgtattgtagtgaccggctttatcagtcgcagcaacgcaggtgaaaccgtactgctgggccgtaacggctctgactactcggcaacgcagattggcgccctggcgggcgtgtcccgcgtcaccatctggagcgacgtggccggtgtctacagcgcggacccgcgcaaagtaaaagatgcctgcctgctgccgctgctgcgtctcgacgaagcgagcgagctggcgcgtctggcggcaccagtgctgcacgcgcgcacgctacagccggtttccggcagcgacatcgacctgcaactacgctgtagctacacgccggatcagggttccactcgcatcgagcgcgtgctggcatccggtacgggcgcgcgcattgtcaccagccacgatgacatctgcctgattgagttccaggtacctgcgggccaggatttcaaactggcgcacaaagatatcgacaccatcctgaaacgtgcccaggtgcgtccgctggccgttggcgtgcataacgatcgccagctgttgcagttctgctataccgctgaagtggtggacagcgccctgaagattctggatgaagcgggactgccgggcgagcttcgcctgcgtcagggactggcgctggtggcaatggtgggcgcgggcgtcacccgtaacccgctgcactgccaccgcttctggcagcagctgaaagggcagccggtggagttcacctggcagtcggaagagggcatcagcctggttgccgttctgcgcaaggggccaaccgaaagcctgattcagggcctgcacacctccctgttccgtgcggaaaaacgcatcggcctggtactgttcgggaaagggaacatcggttcccgctggctggagctgttcgcccgcgagcaggtcacgctttcggcgcgtaccggatttgagtttattctggcaggcgtggtggacagccgccgcagcctgttgaactacgaagggctggacgccagtcgggcgctggccttctttaacgatgaagcggttgagcaggacgaagagtcgctgttcctgtggatgcgcgcgcacccgtacgacgatctggtggtgctggacgttaccgccagcgagcaactggccgatcagtatctggattttgccagccacgggttccacgtcatcagcgccaacaagctggcaggcgcgagcagcactgataaatatcgccagatccacgacgcgttcgaaaaaacgggtcgtcactggctgtataacgccaccgttggcgcaggtctgccggttaaccataccgtgcgcgatctgattgatagcggcgacagcattctggcgctgagcgggatcttctccggcacgctctcctggctgttcctgcaatttgacggtaccgtgccgttcaccgacctggtggatcaggcgtggcagcagggcttaaccgagccggatccgcgcgtcgaccttgccggtaaagacgtgatgcgcaagctggtgatcctggcgcgtgaagcgggctacgacattgagcctggccaggttcgcgttgagtctctggtgcctgcgggctgcgaggaaggatctgtcgatcacttctttgagaacggcgacgagctgaacgagcagatggtgcaacgtctggaagcggcaaacgagatgggcctggtgctgcgttacgtggcgcgcttcgaggcgaacggtaaagcgcgcgtgggcgtggaggcggtacgtcctgaacatccgctggcggcgctgctgccgtgcgataacgtcttcgccatcgaaagccgctggtaccgcgataacccgctggtgatccgtggcccgggtgcggggcgcgatgtgaccgccggagccattcagtccgacattaatcgcctggctaagctactgtaa

SEQ ID NO: 523579 - DNA, 1161 bp, Stenotrophomonas maltophilia
atgacgcgtaaacaggccaccatcgcagtgcgtagcggattgaatgatgacgagcagtacggctgcgttgtcccgccaattcatctctccagcacctataatttcaccggatttaatgaacctcgcgcgcatgactactcgcgtcgcggcaatcctacgcgtgacgttacccagcgcgcgctggcggaactggaaggcggcgcaggggcggtattaaccaataccggcatgtctgccattcacctggtaaccacggtgttcctgaaacctggcgatctgctggtggcgccgcacgactgctacggcggcagctatcgtctgtttgatagcctggcgaaacgtggctgctaccgcgtgttgtttgtcgatcaaaacgacgaacaggcgctgaaacaggcgttagccgaacagccgaagctggttctggtggaaagtccaagcaatccattgttgcgcgtagtcgatattgcgaaaatttgtcagctcgcaagggatgcgggagcgataagtgtagtggataatacgttcctcagtccggcccttcagaacccactggcactgggtgccgatctggtgttgcattcatgcacgaaatatctgaacggccattctgacgtggtagcgggtgtggtgattgccaaagatcctgatgttgtcactgaactggcatggtgggccaataacattggcgtcaccgcgggcgcgttcgacagctatttgctgctgcgcggcatccgcacgctgtcaccgcgtatggacgtcgcgcagcgtaatgcccagacgatcgtggatttcctgaaaacccagccgctggtgaagaagctttatcacccgtcgctgccggaaaaccaggggcacgagattgccgcgcgccaacagaaaggatttggcgcgatgttaagttttgaactggacggtgacgagcaaacgctgcgtcgcttcctgagcgggttgtcattgtttacgctggcggaatccttagggggagtagaaagcttgatctcccacgccgcaaccatgacgcacgcaggtatggcacccgaagcacgtgccgccgccgggatttccgagacgctgctgcgtatctcgaccggtattgaagattctgaagatttaattgccgatctggaaaatggcttccgggtcgcagccaaggggtaa

SEQ ID NO: 523580 - DNA, 318 bp, Stenotrophomonas maltophilia
atggctgaatggagcggcgaatatatcagcccatacgctgagcacggtaagaagagtgagcaagtcaagaaaatcacggtgtccattcctctgaaggtgttgaagatcctcaccgatgaacgtacgcgtcgtcaggtgaacaacctgcgtcacgccactaacagcgaactgctgtgcgaagcgttcctgcatgcgtttaccggccaaccgttgccgaacgatgacgatctgcgcaaagagcgcagtgacgaaattccagaagaggcgaaggtgatcatgcgtgaactgggtatcgacccggatacgtgggaatactga

SEQ ID NO: 523581 - DNA, 213 bp, Stenotrophomonas maltophilia; identical to SEQ ID NO: 117603

SEQ ID NO: 523582 - DNA, 2196 bp, Stenotrophomonas maltophilia
atgcccgtcgctcacgttgccctgcccgttccgcttccccgcacctttgactacctgctgcccgacagcatgagcgccaaagcgggctgtcgcgtgaccgtgccgttcggtaaacagcagcgcgtggggatcgtcgtctccgtcagcgataaaagcgagctgccgcttaccgagctgaaatcgatcgttgaagtgctggacgatgaacctgtttactctcaaagcacctggcgactgctgttgtgggcggcagattattatcaccatcctattggcgacgtattgttccacgccctaccgattatgctgcgtcagggtaagcgcgccagccatgcgccaatgtggtactggtttgccaccgagcagggtcaggcggtcgacattaacagcctgaagcgctcgcaaaaacaacagcaggcgttggccgcgctacgccaggggaaaatctggcgccatcaggtcgacgagctcgaggtgagcgaaaccgcgttgcaggcattaaggaagaaagggctgagcgagctggccagcgaagcacctgcccttcacgactggcgcgacggcttttccgtctcgggcgatcgcctgcgtctgaataccgagcaggccaccgccgtgggcgcgattcacagcgccgccgatcgattctccgcctggctgctggcgggcgtcaccggctccggtaaaaccgaagtgtatctgagcgtactggaaaatgtgctcgcgcagggcaaacaggcgctggtaatggtgccggaaatcggcctgacgccgcaaaccatcgcccgtttccgtgaacgctttaatgcacccgttgaggttctgcactccggcctgaacgacagcgagcgcctcagcgcctggctgaaagcgaaaaacggcgaagcggcgattgtgattggcacccgttcctcactctttacgccgtttaaaaatctcggcgttatcgtgatcgatgaagagcatgacagctcctataaacagcaggaaggctggcgctatcacgcccgcgacttagccgtgtaccgcgcccacagcgagcaaatccccattattctggggtccgccacccccgcgcttgaaacgctgcacaacgttcgccagcgtaaataccacatgctgcgcctgacgcgccgcgcgggaaatgcccgtccggccattcagcatgtgctggatctgaaaggccagcaggtgcaggccgggttagcgcctgcgctgactaaccgcatgcgccaacatttgcaggcgggcaaccaggtgatcctgttcctgaaccgccgcggcttcgcgcctgcgttgctgtgccacgactgcggctggattgccgagtgcccgcgctgcgatcactactacaccttccaccaggctcagcgccatttacgctgccaccactgcgacggccagcgtccggtaccccgtcagtgcccgtcctgcggctcaacgcacatcgtgccggtgggtctggggacggagcagctcgaacaggcgctggcgccgttcttccctgatgtgcccatttcgcgtatcgacagggacaccaccagccgcaaaggggcactggagcagcagctggcggaagtgcatcgcggcggcgcgcgcatactgattggcactcaaatgctggcgaaagggcatcacttcccggacgtgacgctggtcgccctgctggacgtcgacggcgcgctgttctccgcggattttcgctccgccgagcgtttcgcacagctttatacccaggttgctggtcgcgccggtcgagcgggtaagcagggcgaagtagtgctgcaaacgcaccatcctgagcacccgctgctgcaaacgctgctgcacaaaggctatgacgccttcgcggaccaggcgctggccgaacgtcagacgatgcagcttcctccgtggaccagccacgtcatcatccgtgcggaagatcataacaaccagcaggcgccgctattcctgcaacagctgagaaatctcctgcaggccagcccactggtggataatcagctgtggattttaggcccggtacccgcgctcgccccgaaacgcggcggccgtttccgctggcaactcttacttcagcacccttcgcgtatccgtttacagcagatcgtcagcggcacgctggcgctgattaataccctgccggaagcacgaaaagtgaagtgggttctggacgtcgatccgattgaaggctga

SEQ ID NO: 523583 - DNA, 1026 bp, Stenotrophomonas maltophilia
ttgaagtccaggaaagaggttgcctcggcgaccatgaaagacgttgccgagaaagcacaagtctcaacagcaaccgtgtcccgcgcattgatgaaccctgacaaagtctcccaggcgacccgaaaccgggttgaaaaggcggcgcttgaggtcggttatttcccgcaagccatggggcgcaacgttaaacgcaacgaatcccgcaccatcctggtgatcgtgccggacatctgcgatcccttcttcagcgaaatcatccgcggcattgaggtcacggccgccgcccagggctatctggtgctgattggtgattgtgcccaccagaaccagcaggaaaaaacgttcatcgacctgatcatcaccaagcagattgatggcatgctgctgcttggctcacgcctaccgtttgatgccagcattgaagaacagcgcaatttaccgccaatggtcatggcgaacgaattcgcgccggagctggagctgccgaccgttcatatcgataacctcaccgccgcgttcaacgccgtgaactatcttcaggagctggggcataagcgtatcggttgtattgccggaccagaagagatgccgctgtgtcattaccggttgcagggctacgttcaggcgcttcgccgtaccggggctgttgtcgatccgcactacattgcgcgcggtgatttcacctttgaagcgggcgggcaggcgctggaaaaattgcttgccttgccagaaccgcctaccgcggtcttctgccacagcgacgtgatggcgctgggggcgttatcctacgccaaacgtcacggcctgcgcgtgccaaaggacctgtcgataatcggttttgataatatttcgctttcggagttttgcgatccgccgctttcgactgtttcgcagccgcggtatgacattggccgggaagcgatgctgcttttgctggatcagttgcacggtcaaacagttagcagtgggtcacgactactggattgtgagctgattgtgcgcggctctacccaggcattaacttaa

SEQ ID NO: 523584 - DNA, 864 bp, Stenotrophomonas maltophilia
atggtcgccattgctgcggctgtgctggtggcctttattggcggcctctacttcattacgcatcataaaaaagaagagtctgaagcccttcagggtaacaaggtcgtcggcaacggccttcctccgaagcctgaagagcgctggcgctacattaaagaactggaaagccgccagcctggcgtacgtgcgcctaccgagccttctgccgggggtgaagtgaagaatgccgatcagctgacggacgaacagcgccagttgctcgctcagatgcaggcggacatgcgccagcagcctacgcagttgaacgaagtaccgtggaatgaacaaaccccggcgcagcgtcagcaaacgttgcagcgccagcgtcaggcacagcagcaaacgcaacagcagcagtggacgcagacgcagccggtacaacagccgcgtacacaaccgcagcagcagacgcgtactgtacaaacgcagcctgttcagcagcagccgaaagcccagccgcagaagcaaacagcacagccgtatcaggatctgttgcagacgcctgcacataccactgcgcaacagccaaaagcgcagcaggctgcgccggtcactaaagagaccgaggcaccgaagcagacggctgagaaaaaagatgaacgccgctggatggttcagtgcggttcgtttaaaggcgccgaacaggcagaaacggtgcgagctcagctggcatttgaaggatttgactcacgcattaccaccaataacggctggaatcgcgtggtgattggaccggtcaaaggcaaagaaaacgcagacggcaccatttcccgtttgaaagtggctggccacacaaactgcattcgactcgcctccgggggttga

SEQ ID NO: 523585 - DNA, 531 bp, Stenotrophomonas maltophilia
gtgacaacaatagtaagtgtacgccgtaacggccaggtggtaattgccggtgatggccaggccacgctgggtaataccgtcatgaaaggcaacgtgaagaaagtacgtcgtctttataacgacaaagtgatcgccggtttcgcaggcggcacggctgatgccttcacgctgtttgaactgtttgaacgcaaactggaaatgcatcagggtcatctggtgaaagccgccgttgagctggcaaaagactggcgtaccgaccgcatgctgcgcaagctcgaagcactgctggccgtggctgacgaaaacgcctcgctgatcatcaccggtaacggcgacgtggttcagcctgaaaacgacctgattgccatcggctctggcggcccgtacgcccaggccgcagcccgtgcgctgttggaaaataccgacatgaacgcgcgcgatatcgcggtgaaagcgttggatattgcaggtgatatctgcatctataccaaccacaatcacaccatcgaagaattgacctccaaagcgtaa

SEQ ID NO: 523586 - DNA, 1335 bp, Stenotrophomonas maltophilia
atgtctgaaatgaccccacgcgaaattgtcagcgaactgaacaaacacattatcggccaggacaacgccaagcgctccgtggctatcgcactacgtaaccgctggcgtcgcatgcagctcgacgaagagctccgccacgaagtgacaccaaaaaatattctgatgatcggcccgaccggggtgggtaaaaccgaaatcgctcgtcgtctggccaaactggctaacgcgccgttcatcaaagttgaagccaccaagttcaccgaagtgggctatgtgggtaaagaagtggactccatcatccgcgacctgaccgattcagcgattaagatggtgcgtgtccaggcgattgagaaaaaccgctatcgcgccgaagagatggccgaagagcgtattctcgacgtgctgatcccaccggcaaaaaataactggggacaggctgaacagcagcctgaaccttctgctgcgcgtcaggcattccgcaaaaaactgcgcgaaggcgagctggacgacaaagagattgagatcgatctcgctgccgcgccaatgggcgtggaaatcatggcccctccgggcatggaagagatgaccagccagttgcagtccatgttccagaacctgggcgggcagaaacagaaagcacgtaagctgaaaatcaaagacgcgatgaagctgctgattgaagaagaagccgcgaagctggttaacccggaagagctgaaacaggacgctatcgacgcggttgagcagcacggtatcgtgtttatcgacgaaatcgacaaaatctgtaagcgcggcggcaacagctccggcccggatgtttcccgcgaaggcgttcagcgcgacctgctgccgctggtggaaggttgcaccgtctctaccaagcacggcatggtgaaaactgaccacattctgtttatcgcgtcaggtgcgtttcaggttgccagcccatccgatctcattccggaactgcagggtcgtctgccaatccgcgttgagctgcaggcgctgaccactgaagatttcgaacgtatcctgactgagccaaacgcttctgtgaccgtacagtacaaagcgttgatggcgaccgaaggcgtgaatatcgagttcaccgacgatgggataaaacgcatcgctcaggccgcatggcaggtcaacgaaaccaccgaaaacatcggtgcgcgtcgtctgcacaccgtgctggaacgcctggtggaagatatctcttacgatgcgagcgaccttaacggtcaaaccattaccattgacgcagagtatgtgggcaaacacctggatgcgttagtggcagatgaagatctgagccgttttattctataa

SEQ ID NO: 523587 - DNA, 921 bp, Stenotrophomonas maltophilia
atgactgatatcagccgtacgcaggcgtggctcgaaagtctgcgtccaaaaacgcttcctttggcttttgccgccattatcgtcggtaccgcacttgcctggtggcaggggcatttcgatcccctggtggctggtctggcgcttgtcaccgccgggctactgcaaatcctctctaatctcgccaatgattacggcgatgcggtaaaaggcagcgataaacctgatcgtatcgggccgctgcgcgggatgcaaaaaggggtaattacccatgcacagatgaagcgggcgctgattatcaccgtggtgttgatttgcctgtccggcctggcgctggtgacggtcgcctcgaaaaccaccagcgatttcattggcttcctggtgctgggcttgctcgccattattgcagcaattacctataccgtcgggacgcgtccttacgggtatattggtctgggcgacatctccgtactggtgttcttcggctggctgagcgtcatgggaagctggtacttgcaggcgcatacggtgatccccgccctgttcctgcccgcgaccgcctgcggtctgctggcgacggcggtgctgaatatcaataacctgcgcgacatcgacagcgaccgtgagaacggtaagaacacgctggccgtgcgtctgggcccggtgaatgcccgccgctatcacgcctgcctgctcatcggcgcgctggtctgcctggcactgttcaatctgatctctctgcacagcctgtggggctggctgtttgtgctcgccgcaccgctgctggttaagcaggcccgctatgtcatgcgtgaactcagcccggctgccatgccgccgatgctggagcgcacggtaaaaggcgcattgctgactaacctgctgttcgtcatcgggattgtcttaagccagacgctgagttag

SEQ ID NO: 523588 - DNA, 486 bp, Stenotrophomonas maltophilia
atgaaatacgatacctccgagctttgtgacatctaccaggaagatgtcaacgtcgttgaacccctgttctccaactttggtggacggtcgtcgtttggcggacaaatcatcacggtgaaatgtttcgaggacaacgggttgctgtacgatctgctcgaagagaacggccgtggccgcgttctggtggtcgacggcggcggttccgtgcgccgtgcattgattgatgctgaactggcgggaattgccgtccagaacgagtgggaaggcattgtggtgtacggttccgtgcgtcaggtggacgatctcgaagacatggatatcgggattcaggccatcgcggccataccggtaggcgcagcgggcgacggcatcggcgaaagcgacgtgcgcgtcaatttcggcggcgtgaccttcttctcgggcgaccacctttatgctgacaataccggcattatcctttctgaggatgcgctggatattgagtag

SEQ ID NO: 523589 - DNA, 240 bp, Stenotrophomonas maltophilia
atgtctttagaagtgtttgagaaactggaatcgaaagtacagcaggcgatcgacaccatcaccctgctgcagatggaaattgaagagctgaaagagaaaaacaactccctgtcccaggaagttcagaatgctcagcacagccgtgaagaactggagcgcgaaaacaaccagctgcgcgaacagcagaacggctggcaggatcgcctgcaggcactgctgggacgtatggaagaagtctga

SEQ ID NO: 523590 - DNA, 846 bp, Stenotrophomonas maltophilia
atgagtcagacatcaaccttaaaaggccagtgcattgccgagttcctgggtaccgggttgttgatattcttcggagtaggctgtgtcgctgcactgaaagtggcaggtgccagttttggtcagtgggaaatcagtattatctggggtttgggcgtggcgatggccatctacctgaccgcaggggtttccggcgcacatcttaacccggcggtgaccatcgcgttgtggctattcgcgtgctttgacggacgcaaagttgtccctttcatcatttcacaatttgccggcgccttttgcgcagcggcgttagtttacgggctttattacaatcttttcaccgacttcgaacagacgcatcatatggtgcgtggcagtgtcgaaagtctggatctggcaggcattttctcaacgtatccgaatccgcatattaattttgtgcaggcgttcgcagttgaaatggtgattaccgctattctgatgggcgtcattatggcgctgggcgacgacggaaacggcattccgcgcggcccgctggcaccacttttgattggccttctgattgcggtaattggcgcatcaatgggtccgctgaccggctttgcgatgaatccggcgcgtgacctgggtccaaaaaccttcgccttctttgcaggatggggcgatgtcgcctttaccggcggcaaagacattccttacttcctggttccgctgttcgggccaatcgtaggggcggcgctgggcgcattcggctatcgcaaattaattggtcgccacttaccgtgcgacacctgtgtggaagaggaaaaagagtcgacttccaccacacaacaaaaagcttcgctgtaa

SEQ ID NO: 523591 - DNA, 1509 bp, Stenotrophomonas maltophilia
atgaccgaaaaaaaatatatcgttgcgctcgaccagggcactaccagctcccgcgctgtcgtaatggatcatgacgcgaacattgtcagcgtgtctcaacgcgaatttgagcaaatctatccgcgtccaggctgggttgaacacgacccgatggagatctgggcgtcacaaagctccacgctggtggaagtgctggcgaaagccgacatcagttctgacgagattgccgctatcggtatcaccaaccagcgtgaaaccaccgttgtctgggagcgcgaaaccggtaagcccatctacaacgccattgtctggcagtgccgccgcacctcagagatctgcgaaaaactgaagcgcgacggaatggaagagtacgtgcgcagtacaaccggtctggtcattgacccctatttctccggcaccaaagtgaagtggatcctcgatcacgtggaaggttcacgcgagcgtgcacgacgcggcgagctgctgtttggcaccgtcgatacctggcttatctggaagatgactcagggacgcgttcacgtcaccgactacaccaacgcctcgcgcaccatgctgttcaacatcaacactctggagtgggatgacaagatgctggacgcgctggacattccgcgtgcgatgctgccagacgtgcgcaaatcttcagaagtatacggccagaccaacatcggcggtaaaggcggcacccgtattcctatcgccggtattgccggtgaccagcaggcggcgctgttcggccagctgtgcgtcaaggaagggatggcgaagaacacttacggcaccggctgctttatgctcatgaacaccggcgagaaagcggtgaaatcagaaaacggtctgctgaccaccatcgcctgcggcccacgcggtgaagtgaactatgccctggaaggggcggtattcatggcgggtgcctccattcagtggctgcgcgacgagatgaagctgatcagcgatgcgtttgactccgaatacttcgcgaccaaagtgaaagacaccaatggcgtatacgtggtgccagcgtttaccggtctgggcgcaccgtactgggatccgtacgcccgcggcgcgattttcggcctgacgcgcggtgtgaactctaaccacattattcgtgcgaccctggaatccatcgcctaccagacgcgcgacgtgctggaagcgatgcaggcggactccggcattcgtctgcacgccctgcgcgtggacggcggtgcggtagccaacaacttcctgatgcagttccagtccgacattctgggtacccgcgttgaacgtcctgaggtgcgagaagtaacggcgctgggcgcggcgtatctggcaggtctggcggttggcttctggcaaaaccttgacgagcttcaggaaaaagcggtgatcgaacgcgaattccgtccaggcatcgaaaccaccgagcgcaactaccgctacagcggctggaagaaagcggtgaaacgtgccctggcatgggaagagcacgacgagtaa

SEQ ID NO: 523592 - DNA, 1011 bp, Stenotrophomonas maltophilia
atgaaacgtgaacttgctatcgagttttcccgcgtcaccgaagctgccgccctcgcaggctacaagtggctgggccgtggcgacaaaaataccgcagacggcgcagccgtccacgccatgcgcattgtgcttaatcaggtcaatatcgatggcactatcgtcattggcgaaggcgaaatcgacgaagccccgatgctctacatcggtgaaaaagtcgggacgggcaaaggcgatgcggtggatatcgcggtcgacccgatcgaaggcacgcgcatgacggcgatgggccaggccaacgcgctggcggtgctggcggtgggcgataagggctgcttcctcaacgcgccagatatgtacatggaaaagctgattgtcggtcctggtgctaaaggcgctatcgaccttagcctgccgctggatgccaacctgcgcaatatcgcagcggcgctgggtaaaccgctcaacgaactcaccgtgaccatcctggcgaaaccgcgccacgacgccaccatcgcttatctgcaagcactcggcgtgcgcgtatttgccattcctgatggcgacgttgccgcctctattctgacctgcatgccggacagcgaggtcgacgtgctttacggcatcggcggcgcgccggaaggtgtggtctctgcggcagtgatccgcgcgctggacggcgatatgcaggcgcgtctgctgccacgccatgaggtcaaaggcgacagcgacgagaaccttcgcattggtgaagacgaactggcgcgctgtgcggcgatgggcatcgaggccaataaagtgctcgcgctgaacgagatggctcgcagcgataacgtggtcttctccgcaaccggcatcaccaaaggcgatctgctggatggcatcacccgcaagggaaacatggccaccactgaaaccctgctgatccgcggcaaatcccgcaccattcgccgcattcagtccattcattatctcgaccgcaaagacccggacgtacagacgcacattctgtaa

SEQ ID NO: 523593 - DNA, 546 bp, Stenotrophomonas maltophilia
atggcggactgggtaacaggtaaagtcacaaaggtacagttctggaccgatgcgctatttagcctcacgctgcacgctcccgttcatccgtttaccgccgggcagtttgccaagctcgggctggatatcgacggtgaacgcgtacagcgcgcctactcttacgttaacgcgcctgataacccggatctcgagttctatctggtcaccgtcccggacggtaagctcagcccgcgcctcgccgcgctgaaaccgggcgatgaggtgcagattgtctccgacgcggcggggttcttcgtgctggatgaaatccccgactgtgacacgctctggatgctggcgaccggcacggccatcggcccgtatctctctatcctggagtacggcaaagatctggagcgctttaagaatatcgtgctggttcacgccgcgcgctacgccgcagacctgagctatttgccgcagatgcaggcgctggaacagcgatatggcggggagccgcgaaaccgcagctggctcgttaaccggccgcgttccggcgttgattga

SEQ ID NO: 523594 - DNA, 240 bp, Stenotrophomonas maltophilia
atggcggggagccgcgaaaccgcagctggctcgttaaccggccgcgttccggcgttgattgaaagcggcgcgctggaagaggcggtgggtttaccgatgaataccgaaaccagccacgtgatgctgtgcggtaacccgcagatggtgcgcgatacgcagcaactgctgaaggatacccggcagatgacgaaacaccttcgccgccgaccgggccatatgaccgccgaacactactggtga

SEQ ID NO: 523595 - DNA, 420 bp, Stenotrophomonas maltophilia
atgaccatacagcagtggttgttttcattcaaagggcgtattggacgccgtgacttctggatctggatggcagcgtgggttgtcgccatgctgcttctgttttttgttgcctataacgcctggctgagcacgcaaactgcggcttttgcgctggtctgtttactgtggccaaccgccgccgtggtggtgaaacgtctgcacgatcgcggtcgctccggcgcttgggcttttctgattattctggcgtggatgctggtggcggggaactggtcaatgctgccctccatcctcccgtgggtggtgggcagactgctgccgacggttatctttgtgatgatggttgtcgaactgggcgcgtttatcggcacccagagcgagaacaaatatggaaaagatacccttgaggtgaagtaccgctga

SEQ ID NO: 523596 - DNA, 597 bp, Stenotrophomonas maltophilia
atgaaaagttcggcacactctctttatttgtgtttagcgatgctgagcgccagtttttctctgcacgccgcggaaccggcttccccggtcaccgccccctaccttctggcgggcgccccctctttcgatcaatctatcagccagttccgcgaagccttcaataaagaaaacccctcgcttgcgctgggagagttccgtgcgattgacggtgcccgcgatacgccaaccctgacccgcgctgccagcaaaattaacgagaatctatatgcttccactgcccttgagcgcggaacgttaaaaatcaaaagcatgcagatcacctggctgccgattcagggcccagagcagaaagcggcgaaagcgaaagcgctggagtatatgagcgctattctgcgcgcctttacccccaccttcacgaaagcgcaaagccagcaaaagctgcaaaaactgcttaccgccgggaaaaacaaacgctattacgccgatacggaaggtgccgttcgctatgtcgtcgcagataacggcgaaaaggggctgaccttcgcggttgaaccgattaagctggccctatcagacgcactcgagggggcgaattaa

SEQ ID NO: 523597 - DNA, 768 bp, Stenotrophomonas maltophilia
atgcgacatcctttagtgatgggtaactggaaactgaacggcagccgccacatggtaaacgaactggttgctaacctgcgtaaagagctggctggcgtgaccggctgcgcggttgctatcgctccgccggatatgtacctggatctggctaaacgtgccgctgacggcagccacatcattctgggcgcgcagaacgttgacgttaacctgtctggcgcgtttaccggtgaaacctccgctgaaatgctgaaagacattggcgcgaaatacatcatcatcggccactctgagcgtcgcacctaccacaaagaatctgacgagttcatcgcgaagaaattcgctgtgctgaaagagcagggtctgatcccggttctgtgcatcggtgaaaccgaagcagaaaacgaagcgggtaaaaccgaagaagtgtgcgcacgtcagatcgacgctgtgctgaaaacccagggcgcggcagcgttcgaaggcgcggttatcgcttacgagccagtctgggcgatcggtaccggcaaatctgcaactccagcgcaggcacaggcggtgcacaagttcatccgtgaccacattgcaaaagcagacgcgaaagtggctgagcaggtcatcatccagtacggcggttccgttaacgcatcaaacgcagctgagctgttcacccagccagacatcgatggcgcgctggttggcggcgcatccctgaaagcagacgctttcgcggtgatcgttaaagcggcagaagcggctaagcaggcgtaa

SEQ ID NO: 523598 - DNA, 1305 bp, Stenotrophomonas maltophilia
atgtcgctctggttaacgcatcctctgctgcttccctcgctgatcgtcggcgtcaccatcgtgctgtgggcgacgtcgctgttgccggaatttatcaccgcgctgctgttctttacggcggcgatgaccgccagaatcgccccgccggaagtgatctttggcggcttcgcctcgtctgccttctggctggtgttcagcggctttgtgctgggcgtggcgattcggaaaaccggcctggcggacagggccgcccgggcgctgtcggcaaagcttaccgactcctgggtgctgatggtggcaagcgttgtgctgctgagctatgccctggcattcgtgatgccgtcgaacatgggacgtattgcgctgctgatgccgattgtcgccgcgatggcgaagcgggccggcattcctgatggctcgcgggcctggtttggcctggcgctggcggtcgggtttggcactttccagctctcggccactattttgcccgctaacgtgccaaacctggtgatgagcggcgcggcggagggctcatacggtatccacctcaactatgtcccgtatctgctgctgcacacgccggtgctgggtattctcaaaggcctgattctgattggcctgatctgctggctgttccccggtagcccgaaaccagcgaaggatctgacgccgtctgaaccgatggggcgtgacgaaaaacgactcgcctggctgctggcggtggtgttgacgatgtgggtaacggagagctggcatggcgtgggcccagcgtggacagggctggcggcctcggtcatcgttatgctgccgcgcatcggatttatcaccggcgaggagttctcggcgggggtgaatatgcgcacctgtatttacgtcgcgggtatactcgggctggccattacggtgacgcagaccggtatcggtgcggccgtaggcgaggcgttgctccatatcatgccgctggatgcagaccgcccgtttaccagcttcctggcgctgacggggatcaccacggcgctcaacttcattatgaccgccaacggcgttccggcgctgtacaccacgctggcgcagagcttctccgacgcgaccggcttcccgctgctgtcggtgatcatgattcaggtgctggggtattccacgccgctgctgccgtatcaggcgtcgccgattgtggtggcgatgggcttagggaaagtgcctgcgaaggcggggatgctgctctgcctggcgctggcgattgcgacgtatctggtgctgctgccgctggattatttgtggtttagcgtattaggacgtttgtag

SEQ ID NO: 523599 - DNA, 744 bp, Stenotrophomonas maltophilia
gtgaaaaaaattatcttactgattctgatcgttatcgcccttgccgcaggcggcgtgtactggatgaaagcgggtaatccgaatgcgttgcgccatatcgttctcgaccagtgtgtgcccaaccagctgcataaccgtaacccggcaccgtgtgcgcaggtgatgccggatgcgggctacgtggtgttcaaggaccgcaacggaccgctgcaatacctgctgatgcccacgtaccgtatcaacggcaccgaaagcccgctgctgactgagcctcagacaccgaatttcttctggctggcatggcagtctcgtcattttatgagcatgaaacggggagccgacgtgcctgacagcgctatttcgctgaccatcaactccccgaccgggcgcacgcagaaccattttcatatccacatctcctgcctgcgcccggacgtgcgcgagaagctgaacgcggcgcaggggcaaatcagcacccagtggctaccgcttccgggcgggctggaagggcatgagtaccttgcccgtcgggtgacggagaacgaactggtgcagcgcagcccgtttatgatgctggcggaagagctgccggaagcgcgcgaccatatgggacgcttcgcgctggcgatggcgcagcagtcagacggctcgtttgtactgctggcgacagagcgtaacctgcttacctttaaccgcgcgtcggctgaggaattgcaggatcatcaatgcgatatcctgaagtga

SEQ ID NO: 523600 - DNA, 990 bp, Stenotrophomonas maltophilia
atgaataaatggggcgtggggttaacattattgctggcatcgaccagcgttctggcaaaggacattcagttactgaacgtgtcgtacgatccgacgcgtgaactgtacgaccagtacaacaaagcttttgcggcgcactggaaacaggaaaccggcgataacgtggtggttcgccagtctcacggcggttcaggtaagcaggcgacatcggtgatcaacggcattgaagccgatgtggttaccctggcgctggcttatgacgtagacgcgatcgcggagcgtggccgtatcgacaaaaactggatcaagcgcctgccggacaactctgcgccatacacctcgaccattgtcttcctggtgcgcaaaggcaacccgaaacagattaaagactggaacgacctgattaagccgggcgtgtctgtcatcacgccgaacccgaaaagctccggcggcgcacgctggaactacctggcggcctggggctacgccctgcaccacaacaacggtgaccaggctaaagcgcaggaattcgtgaaagcgctgtttaaaaatgtcgaagtgctggactccggcgcgcgcggcgcaactaacaccttcgtcgagcgcggcatcggcgacgtgctgattgcctgggaaaacgaagccctgctggcgaccaacgagctgggtaaagacaaattcgagatcgtgaccccgagcgaatccatcctcgctgaaccgaccgtctccgtagtcgataaggttgttgataagaaagggaccaaagcggtggcggaagcctacctgaagtatctttactcgccggaaggtcaggaaattgcggcgaaaaacttctatcgcccgcgcgatgaggccgtcgcgaagaaatacgaaaacgcattcccgaaactgaagctgttcactatcgatgatgtttttgacggctggaccaaagcgcaaaaagagcacttctctaacggcggcaccttcgaccagatcagcaagcgctaa

SEQ ID NO: 523601 - DNA, 963 bp, Stenotrophomonas maltophilia
atgattaagaaaatcggtgtgttgacaagcggcggtgatgcgccgggcatgaacgcggcaatccgtggggttgtccgtgcagcgctgacggaaggtctggaagtttttggtatctatgacggttacctgggtctgtatgaagaccgcatggttcagctcgaccgctacagcgtgtctgacatgatcaaccgtggcggtactttcctcggttccgcgcgcttcccggaattccgtgacgaacacatccgtgaagtggctatcgaaaacatgaaaaaacggggtctggatgcgctggtggttatcggcggcgacggctcgtacatgggtgcaaaacgtctgactgaaatgggcttcccgtgcatcggcctgcctggcactatcgacaacgacatcaaaggcactgactacaccatcggttacttcaccgcgctgggtaccgttgtggaagcgattgaccgcctgcgtgacacctcttcctctcaccagcgtatttccattgttgaagtgatgggccgttactgcggcgacctgaccctggcggcggccattgccggtggctgtgagttcgtggtagttccggaagtagagttcagccgtgaagatctggtcgcagagatcaaagccggcatcgcgaaaggtaagaaacacgccatcgttgctatcaccgagcacatctgtgacgttgacgagctggcgaagtacatcgaaaccgaaaccaaacgcgaaacccgcgcgaccgttctgggtcacattcagcgtggcggttccccaggcccgtacgaccgtatcctggcgtcccgcatgggtgcgtatgcgatcgagctgctgctacagggccacggcggccgctgcgtcggtattcagaacgagaaattggttcaccatgacatcatcgacgccattgaaaacatgaagcgtccgttcaaaggtgactggctggactgcgcgaaaaaactgtactga

SEQ ID NO: 523602 - DNA, 885 bp, Stenotrophomonas maltophilia
atgaatcaatcctatggacggctggtaagccgggccgcaatagccgcgacggtgacggcgtcgtgtttgctgatcattaaaattttcgcgtggtggtacaccgggtcggttagtattctggcggcgctggtggattcactggtggatattgccgcctcgctgaccaacctgctggtggtgcgctattcgctgcaaccggcagatgaagagcatacgtttggccacggcaaagcggaatcgctggccgcgctggcacaaagtatgtttatttcgggctccgcgcttttcctgtttttgaccggcattcagcatcttatttcgccttctccgatgaacggtccgggcgttggtgtggtcgtaaccgtagttgcacttataagcacacttgttcttgtaacgttccagcgctgggttgtacgcaaaacacaaagccaggctgtacgggccgatatgcttcattatcagtctgatgttatgatgaatggggctattcttattgcgctcggtctggcctggaatggctggcatcgtgccgatgcgttgtttgcgttagggatagggatctatattttatacagcgcgttgcggatggggtatgacgcggtacagtcgcttcttgaccgtgcgcttccggatgcagaacgtgatgaaatttatgccatcgtgacccactggcctggcgtcagtggtgctcacgatcttcgtacgcggcagtcagggccgacccgctttattcagattcatttggaaatggaagacaacctgccactggttcaggcgcatatggtcgctgaacaggtggagcaggcgattttgcagcgtttccctgggtcagacgtcattattcaccaggatccgtgctctgtcgtccccagggcgttttga

SEQ ID NO: 523603 - DNA, 507 bp, Stenotrophomonas maltophilia
atgcgcaaagttaccgctgccgtcatggcctcaacgctggccttctgtgcgtttagccaggctgctgtagctatcaacagcgataacggttcctcagcagagggcgcaacgcagcacagcagccaaagccatatgtttgacggcataagtttaaccgaacatcagcgtcaacagatgcgagatctgatgcagagggcacgacacgaccagccccctgttaatgttagcgaaatggagacaatgcatcgccttgtcaccgcagaaaattttgacgaaagcgctgtacgcgctcaggcagaaaaaatggcgcaggaacaggttgcccgccaggtagaaatggcgaaggttcgcaaccagatgttccacctgctaacgcccgagcagcaagcggttttgaataccaaacatcagcaacgtatgaaccagttgcgtgaggttgcacggatgcagcgaagctcagatatgacgcttttcagtagcaatagcagtacccgtagtaaccagtaa

SEQ ID NO: 523604 - DNA, 699 bp, Stenotrophomonas maltophilia
atgaataaaatcctgttagttgatgatgaccgagagctcacatctcttttaaaggagttgctcgacatggaaggtttcaacgtcctggttgcccatgatggggaacaggcgctgagtctccttgacgacagcatcgatttacttttgctcgacgtcatgatgccgaagaaaaacggtattgatacgttgaaagagcttcgccagacacaccagacccccgtcattatgctgaccgcgcgcggcagcgagcttgaccgcgtactcggccttgagctgggtgcggatgactatttacctaagccgttcaacgaccgtgaactggtggcccgtattcgcgcgatcctgcgccgctctcactggagcgagcagcagcagaataccgacaacagctcacctacgctggaagtggactccctgagcctgaacccgggccgccaggaagcgagcttcgacggtgaaacgctggagctaaccggcaccgagttcaccctgctgtatctgctggcgcagcatctcggccaggtggtgtcgcgtgaacacttgagccaggaagtgctgggcaaacgcctcaccccgtttgaccgcgccatcgatatgcatatctcgaacctgcgccgtaagctgccagaacgtaaagacggtcacccctggtttaaaaccctgcgtggtcgcggttatctgatggtttccgcttcatga

SEQ ID NO: 523605 - DNA, 1374 bp, Stenotrophomonas maltophilia
atgataggcagcttaaccgcccgcatcttcgccatcttctggctgacgctggcactggttttaatgctcgttttgatgttgccaaaactcgactcacgccagatgacggagctgctcgacagcgagcaacgtcagggcgtgatgatcgagcagcacgtggaagcggagctggcaaacgatccgccgaacgatttaatgtggtggcgcaggctgtttcgcgctatcgacaagtgggcgccccccggacaacgtcttttactggtcaccagtgaaggccgcgtgattggggccgatcgcaatgaaatgcagattatccgcaactttattggccaggcggataacgccgatcacccacagaaaaagaaatatggtcgggtagaaatggtgggccctttctcggtgcgggatggggaagataactaccagctctacctgattcgccccgcgagcagttcccagtccgacttcatcaacctgctatttgaccgtccgctgttgctgttgattgtcaccatgctggttagttccccactgctgttatggctggcgtggagcctggcgaaaccggcgcgtaagctgaaaaacgcggcggacgaagtggcgcagggcaacctgaggcagcatccggagctggaatccgggccgcaggagttcctggccgccggaaccagttttaaccagatggtgagcgcgcttgatcgaatgatgacggcccagcaacgtctgctgtcggatatctcccacgagctgcgaacgccgctcacgcgtttacagctgggtaccgccctgctgcgccgtcgcagcggtgagagcaaagagctggagcgtattgagacggaagcgcatcgcctggacagcatgatcaacgatctgctggtgatgtcgcgcaatcagcagaaaaacgcgctggtgagcgaaacggtgaaagccaatcacctctggcatgaggtgctggacaacgcggccttcgaagcggaacagatgggcaaatccttcaccgtcaatttcccgccgggcccgtggccgctgtacggtaaccccaacacgctggaaagcgcgctggagaatatcgtgcgtaacgccctgcgctactcgcacacgaagattgaagtggcgttttcggtggataaagacgggatcactatcatcgtggacgacgacggtccaggcgtcagcccggaagatcgcgagcagattttccgtccgttctaccgtaccgacgaggcgcgcgaccgtgaatctggcggtacggggctgggtctggcgattgttgaaaccgccatgcagcagcaccgtggctgggtgaaagccgatgacagcccgctgggcggtctgcggttaacgctgtggctgccgctgtataagcgttcgtaa

SEQ ID NO: 523606 - DNA, 675 bp, Stenotrophomonas maltophilia
atgcattacccggtgaatgtgtttacaggcaaggtaaggaagtacgaaggcagtcgcccgagcgctatcgccaaagtgcaggtcgacggtgagctgacgcttaccgagcttggtctggcgggtgaccagcaggccgaaaagaaaatccacggcgggcccgatcgcgcgctgtgccactatccgcgcgagcactatcagcactggaaaaccgaatttcctgaacaggcggaccttttcgtcgcccccgcgtttggcgaaaatctctcaacggaagggctgacggagaagaacgtctttattggcgatatttatcgctggggcgatgctctgattcaggtcacccagccgcgctcgccgtgcttcaaacttaactaccattttggcattcaggatatgtcggcccagctgcaaaacgcgggtaaaaccggctggctgtatcgcgttgtgcaggcgggacaggtttcggcggatgcgccgattgagctggcttcgcgcctgagtgaggtgtcggtattcgaggcctgtgccattgcctggcatatgccgttcgacgatgaacagtttcaccgcctgctgtcagcggcaggattatccaccagctggaccagaacgatgcagaagcggcggataagcggcaagatcgagagcagttcgcggagattgtgggggaaataa

SEQ ID NO: 523607 - DNA, 621 bp, Stenotrophomonas maltophilia
atgagttatacactgccatccctgccgtatgcctacgacgcactggaaccgcatttcgacaagcagacgatggaaatccatcacactaaacatcaccagacctacgtgaataacgcgaatgctgcgctggaaagcctgccagagttcgctaatctgcctgttgaagagctgatcaccaaactggaccagctgccagcagacaagaaaaccgtgctgcgcaacaacgcgggcggtcacgctaaccacagcctgttctggaaaggcctgaaaaccggcaccacccttcagggcgacctgaaagcggctatcgagcgtgacttcggttccgttgacaacttcaaagcagaattcgaaaaagccgctgcaacccgtttcggttctggctgggcgtggctggtcctgaaaggtgacaaactggcggtcgtttcaaccgcaaaccaggactccccgctgatgggtgaagctatctctggcgcatccggcttcccaattctgggtctggacgtgtgggaacacgcttactacctgaagttccagaaccgtcgccctgactacatcaaagccttctgggatgtagtgaactgggacgaagcagcagcgcgtttcgccgctaaaaaataa

SEQ ID NO: 523608 - DNA, 1035 bp, Stenotrophomonas maltophilia
atgaatcatgcgattacgatgggtatcttctggcatttgataggcgcggccagtgcagcctgtttctatgccccgtttaaaaaggtgaaaggctggtcatgggaaaccatgtggtccgttggcggtaccgtgtcctggctgattttgccgtggacaatcagcgccatgctgctgcccgatttctggggctacttctcctccttcaacgcctccaccctgctgccggtattcctgttcggcgcgatgtggggtatcggtaatatcaactacggcctcaccatgcgctacctcggaatgtcgatggggattggcatcgcgatcggcattacgctgattgttggcaccctgatgacgccaatcctcaacggcaacttcgatgtgctgatcaacacccagggtgggcgaatgacgttgctgggcgtgctggtagcggtgatcggcgtgggaattgtcacccgcgcgggccagttgaaagaacgcaagatgggcatcaaagccgaagagttcaacctgaagaaagggctgctactggcggtgatgtgcggcgtcttctcggcgggcatgtcgttcgcgatgaacgccgccaaaccgatgcacgacgccgctgcagcgctgggcgtcgacccgctgtacgttgccctgccaagctacgtggtgatcatgggcggcggcgcgctggtaaacctcggcttttgcttcattcgtctggtaaaagtgaataatctgtcggtaaaagccgacttctcgctggcaaaaccgctgatcgtcaccaacgtcctgctttccgccctcggcggtctgatgtggtatctgcaattcttcttttacgcctggggtcacgccagtattccggcgcagtatgactacatgagctggatgctgcacatgagcttctacgtgctgtgcggcgggctggttgggctggtgctgaaagagtggaacaacgccgggcgtcgtccggttggcgtgctgagcctgggctgcgtggtgattattattgcggccaatatcgtcggcctcggcatggcgaactga

SEQ ID NO: 523609 - DNA, 849 bp, Stenotrophomonas maltophilia
gtggctgctcagttaattcttcgtaaagatgatttttttgcctccgcgagtcaggccgtcgcggtggcggaccgctatccgcaaaacgtctttgccgagcatacccacgagttctgcgagctggtgctggtgtggcggggcaacggcctgcacgtcctcaacgaccgtccctaccgcatcacgcgcggagacctgttctacatccgcgccgaagataaacactcttacgcctcggttaacgatctggtgttgcagaacgtcatctactgccctgacaggcttaaactgaatgtcgactggtcgggcaatatccccggtttacatgatgccagaggcgaaccgcactggcgcttaagcagcaacggcatggctcaggtgcgccagacgatttcccagctggagcaggagagccagaagagcgatccggtggcaaaccagatgtcggagctgctttttgcccagctggtgatgaccctgaagcgccatcgttacgctacggataatccctctgccaccacgcaggaagcgctgctggataagctcatcacccggcttgcgggcagtcttaacaagagtttcgtgctggaaaaattctgcgagcaggagcagtgcagcgagcgcgcgctgcgccagcagttccgcacccagacggggatgacggtaaaccactatctgcgccagctgcgcatctgccacgctcagtatctgttacagcatacggagctgatggtgagtgaagtggcgatgcgctgcggctttgaggacagtaactacttttcggtggtgtttaaccgtgaggtggggatgacgccggttcagtggcgtcatcgcagtcgaaaggcagcgtaa

SEQ ID NO: 523610 - DNA, 837 bp, Stenotrophomonas maltophilia
atgaccgtactgcacagcgtcgatttttttccttcgggggcttcgccggttgcgattgagccacggctgcctcaggctgcgttcccggaacatcatcatgattttcatgaaattgtgattgttgagcacggaacgggcatccacgtgtttaatggtcagccgtataccatcagcggcggtacggtgtgcttcgtgcgcgatcacgacaggcacctgtatgaacataccgataacctgtgcctgaccaatgtgctctatcgttctccggatgcgtttcagtttctctccgggctgaatcagctgttgccgcaggagaaggacggccactacccgtcgcactggcgggtgaatcagtccacgttgcagcaggtgcgtcagctggtaagccagatggagcagagcgaggatggacaggagacgcacgccattgctacccgcgagatgctgtttatgcagctgctggtgctgctgcggcgcagcagcctggtggaagggctggaaaataacgacgcgcgcctgaatcagctgatggcctggctggaagatcattttgccgaagatgtctgctgggaaacgctggcggatgacttttcgctctcgctgcgcacgctgcatcgtcagctcaagcagcataccgggctgacgccgcagcgctacctcaaccgtctgcgcctgatcaaagcgcgtcaccttttaaggcacacggatgaaagcgtcaccgatatcgcctatcgctgcggtttcggcgacagtaaccacttttcgacgctgtttcgccgggagtttagctggtcgccgcgcgatatccgtcaggggaaagacgcgttgcttcagtaa

SEQ ID NO: 523611 - DNA, 1470 bp, Stenotrophomonas maltophilia
atgacttttcgccattgtgtggctgtcgatttaggcgcatccagcggccgtgtaatgctcgccacctgggactgcgacctgcacacccttacgcttcgcgaaatgcaccgtttcgccaattgtctgcaaaaacaggacggttttgttacctgggatatcgacgccctggaagcagagatcggcaccggacttcacaacgtctgcgaagacggtattcgcatcgacagtatcggcattgatacctggggtgtggattacgtgctgctggacagtcacggcgaacgcgtcggcctgccggtctcctaccgcgacagccgcaccgatgggctgatggcgcatgccatcgcgcagcttggcaaggagaacatctatggtcgcagtggcatccagttcctgccgtttaacacgctgtatcagctacgtgcgctggttgagcaacagcctgagctggtcgaaaaggtggcgcatgcgctgctgatcccggactacttaagctaccgtctgaccggcaatatgaactgggaatacaccaacgccaccaccacgcagctggtcaacatcaacaccgataactgggatgaacatctgctggcctggacgggcgcctcgccgtcctggttcggcgtgccaacccatccgggcaatgtaatcggtcactggctttgcccgcaggggaatgaaatccctgttgtcgccgtcgccagtcacgacaccgcgagcgcggtcattgcctcgccgctcgccgacaaagatgcggcctatctctcttccggcacctggtcgctgatgggcttcgagagcaaaaccccgtacaccagcgatgccgcgatggcggcgaacatcaccaacgaaggcggtgccgaaggccgctaccgggtactgaagaacattatggggctgtggctgctccagcgggtgctgaaagagcagaacatcaccgacctgcccgcgcttatcgcggaaaccgaaacgctgaaggcctgcaccttcctgatcaacccgaacgacgatcgctttatcaacccggtgcacatgagcgccgaaatccaggccgcctgttttgaagcggggcagccggtaccttcccgccccgccgagctggcacgctgcatttttgacagcctcgccctgctgtatgccgacatcctgagcgagctggctgaccttcgcggcaaaccgttcacacaactgcatatcgtgggcggcggctgccagaaccagctgctgaaccagctctgcgcggatgcctgcggcattaccgtggtggcaggtccgattgaagcctccacgctcggcaatatcggcattcagctgatgaccctggacgaactttcaaacgtcgacgatttccgttcggtggtgacggcgaataacagcctgaccaccttcaccccccatccctgccatgaaattgcccgctaccgggcgcagtttcagcaaaaacgactgactaaggagctttgcgcatga

SEQ ID NO: 523612 - DNA, 1260 bp, Stenotrophomonas maltophilia
atgaccactcaacttgaacaagcctgggacctggctaaacagcgtttcgccgccgtcggcgtggatgtcgaagaggcgctgcgccagctcgaccgtctgcccgtctccatgcactgctggcagggtgatgacgtcgccggtttcgagaacccgggcggttccctgacggggggtattcaggccacgggtaactacccgggcaaagcgcgcaacgccaccgaactgcgtgcggatctggagctggcgctgagcctgatccccgggccaaagcgcctgaacctgcacgccatttatctcgaatccgacgagccggtcgcgcgtaacgaaatcaaaccggaacactttaagaactgggtggagtgggcgaaggccaaccggctgggtctggattttaacccgtcctgcttctcgcacccgctgagcgcggacgggtttacccttgcgcacgccaacgacgaaatccgccagttctggatcgaccatgtcaaagccagccgccgcgtctcggcgtatttcggcgagcagcttggcacgccatcggtaatgaatatctggatcccggacggcatgaaggacatcaccgtagaccgactggccccgcgtcagcgtctgctggccgcgctggatgaagctatcagcgaaaaactggacccggcgcaccacatcgacgccgtcgaaagcaagctgttcggcattggcgcagagagctacaccgtgggctcaaacgagttctacatgggttacgccaccagccgccagaccgcgctgtgcctggatgccggccacttccacccaaccgaggtgatctccgacaaaatttccgccgccatgctctacgtgccgcgtctgctgctgcacgtcagccgcccggttcgctgggacagcgaccacgtggtgctgctggatgacgaaacccaggccattgccagcgaaatcatccgccacgacctctttgaacgcgtacacattggcctcgacttcttcgacgcctccatcaaccgcatcgcggcgtgggttatcggcacccgcaacatgaagaaagccctgctgcgcgcgctgctggagcctgtcgccgccctgaaacagctggaagaaaacggcgactacaccgcgcgcctggcgctgctggaagagcagaaatccctgccgtggcaggcggtgtgggagatgtactgccagcgtcacgatgcgcctgcgggcagccagtggctggacaacgtgcgggcatatgaggaagacgtgttgagtcagcgcgggtaa

SEQ ID NO: 523613 - DNA, 831 bp, Stenotrophomonas maltophilia
atgcagaccatcaccacctcctggttcgtccagggcatgatcaaagccacctctgacgcctggctcaaaggctgggatgagcgcaacggcggcaacctgacgctacgcctggacgacgcggatatcgagccatttgccgccgatttccaccagaagccgcgctatatcgccctgagccagccgatgccgctgctcgccaacacgccgtttatcgtcaccggttccgggaagttcttccgcaacgtccagctcgacccgcaggccaacctcggcgtggtgaaggtggacagcgacggtgcgggctaccacattctctgggggctaacggacgacgcggtgcctacctctgaactgccggcgcacttcctctcccactgcgagcgcatcaaggcgaccaatggcaaggaccgcgtgatcatgcactgccacgccaccaacctgatcgccctgacctacgtgctggaaaataattctgatttcttcacccgcaaactgtgggaaggcagtaccgagtgtctggtggtgttcccggacggcgtcggcattctgccgtggatggtgccgggcaccgacgaaatcggtcaggcaaccgcaacggacatgcagaagcactcactggtgctgtggccgttccacggcgtcttcggcagcggcccgacgctggatgaaaccttcggcctgatcgacaccgccgagaaatccgcggaagtgctggtgaaggtctattccatgggcggcatgaagcagaccatcacccgggaagagctgatcgccctgggcaaacgctttggcgtcacccccatgcagtcggcgttagatctgtaccaataa

SEQ ID NO: 523614 - DNA, 987 bp, Stenotrophomonas maltophilia
atgaaaataaaagcaagcttgatcctcaccgttgccgctctggcgttgtccggttccgctttagcagaagtgaaaatcgccctggtggcgaagtccttaggaaatggattcttcgaggcagcgaacgtcggcgcgcaggaggcggccaaagagttaggcgatgtgaaagtgatttataccggcccgaccaccaccacggcggaagcgcagatcgaggtgctgaacgggttgatcgcccagggcgtggatgcgatcgcgatttctgcgaacgatccggacgccgtcgtgccggtgctgaaaaaagcgatgcagcgcggcattaaggttgtgtcgtgggactccggggtggcgaaagccggacgccagatccacctcaacccgtccaataatgccctgattggcgaaaccaacgtgaagctcgccgccgacgcgctgaaagcgctgaacgtggagaagggcgacgtggcggtgctgagcgccacgccaacctccaccaaccagaatacctggattgcggagatgaaaaaggtgctgccgaagtacccgtccgtcaatctggtgaccgtggcctacggagacgatctctctgacaaaagctaccgcgaagcggtcggcttgctgaaaacctaccccgaactgaaagtgattgtttcgccatcgtccgtgggcatcgtggccgctgcgcaggcggtgaaggaccagggcaagattggcaaagtgtacgtcaccggtttaggcctgccgtccgagatggcgggcgcggtgaagtccggcgcgagcaagagctttgccatctggaacccgatcgacctcggctatgcggcaacctacctggcggatgacctggtgaaaggcacggccacgaaaggtgaggccagcatgggcagactgggcaaagtgaagctggatgctgacggcaacggcgcgatggccgagccgttcgtctacgatgccagcaatattgataagttctcgaaaatcttttga

SEQ ID NO: 523615 - DNA, 1503 bp, Stenotrophomonas maltophilia
atgaccccattgctacagctttctggcatcaccaaggtgttccccggcgtgcgtgctcttgagaacgtgcagcttgcgctgtggcccggcaaagtgaccgccctgataggcgaaaacggcgcgggcaagtcgacgctggtcaaagtgatgaccggcatttaccagcccgacgagggcgaaattctctataaagcgatccccgttcatctcccgacgccggagtcggcgcataaaatgggcatcaccgccatccaccaggaaaccgtgctgtttgatgaactctcggtcaccgagaatatctttgtcggtcagtaccttcacaaaggcttcctgaaaaagctcgactggccggaaatgcaccgccgggcgcaggcgatcctcacgcggctggaagtgcaaatcgacccgcgcgcgacgctgaaaaccctgagcatcgcccagcgtcacatggtggcgattgcccgcgcgctgtcgtttgaggcgcaggtggtgatcctcgatgaaccgacggcggcgctgtcgcagcatgaaatcctcgagttttaccagattgtggagcgcttaaagcaggagggcaaagccatcctgtttatctcccacaagttcgacgagatttttgagctggccgatcactacactattttgcgcgacggcgcgttcgtcggtgcaggtgcaataaatgagatcaccgaggagcggatggtgtcgatgatggtcgggcgcgccattacccaaactttccctaaaatcgactgcgaaaaaggcgagacggtgctggaggtgaaaaacctctgccatccgaccgagtttgcgcatatctcgttctccctgcgtaaaggggaaatcctcggcttttacgggctggtgggggccgggcgtaccgagctgatgcaggcgctttccggcgtcacgcggccatcgtccggggaaattatcctcaacggacagccccggcgcttccgccagcctgcggatgcgatcaaagccggtatcgtctgcgtgccggaagaaagacagaaacagggggcgattatcgccctgccgattgcccagaacatcagcctgcctcagctcagcaagctcaatccgaacggtgtgctgcatgacgaccgtgaatggaagctggcggacgagtacgccaaacgcctgcaagtgaaagccttcagctggaagcaggcggtggagaccctctctggcggcaaccagcaaaaggtcgtgatcggcaaatggctggcgacgcaccctgacgtgattatcctcgatgagccgacaaaaggcatcgatatcggctcaaaagcagccgtgcatcagtttatgtccgagctggtcagtcaggggctggcggtaattatggtctcgtccgaactgccggaagtgatgggcatggcggatcgcattatcgtcatgcacgaggggctgatggtggccgagtaccaggcgggagacgcgacggcggaaaccatcgtcagcgccgccagcggtgcaaaacaggaggcggcataa

SEQ ID NO: 523616 - DNA, 1005 bp, Stenotrophomonas maltophilia
atgcttagctcactcttaaaacaccgcgaagccctgctgggcgcggtgattatcctgatgatcgtcgccattggcagccgcgtgccatcgtttatcgcgccgggcaacctggtggagatgtttaacgacaccgccattctgatcgtcctcgcgctcgggcagatgatggtgctgctcacgaaaggcatcgacctgtcgatggcggccaatctggccctgaccgggatgattgtcgccctgattaatttccattacccggacgtgcccgtctgggcgctgctgatccttgccagcgtgcttgggctgctgatgggcgcgataaacggcctgctggtgtggaagctgggcattccggcgattgtggtaacgctcggcaccatgagcatctaccgcggaatgatctttttgctctccggcggcggctgggtgaactcaaaccagatgggtacagatttcctcggcctgccacgtgcgtcagtgctgggcttgccggtgctgagctggtgcgccatcgccgcgctgctgctggtgggctacttcctgcgctacagccgcaccggacgagcgctctacaccgcaggcggtaatgccacggcagcgtactacaccgggatcaacgccggaaaaatgcagttcattagtttctgcctttccggtctgctggccgggttctgcggctacctgtggatatcgcgctttgccgttgcgtatgttgacgtcgctaacggttttgaattgcaggtggtggcagcctgtgtgattggggggatcagcaccatgggcggcaccgggcgcgtgctcggctgtctgtttggcgcactgttcctcggggtgattaacaacgccctgccggtgatcggcgtctccccgttctggcagatggcgatttccggcacggtaattgtgatagcggtgctgctgaacgagcgcggcaataaacgtaaaggccgattgatactgcgcgatgcggcgctggcacgtcagaaactggcggtgaaatcatga

SEQ ID NO: 523617 - DNA, 990 bp, Stenotrophomonas maltophilia
atgacatctgaagcaatcaaacccacttctgcgccgggcatcttccagcgtctgctgtgctgggaggggttcctgctggcggtgacgctggcggtgttcttggtgaacgcgctcgcctcaccctactttctcaatatctggaacctctccgacgcgacgttcaacttcaccgaaaaagcgatcatcgtgttgccgatggcgatgctgattatcgccagggaaattgacctgtcggtagcctccaccatcgcgctcagctccacggtgatgggcttttgcgcggcggcgggcgtcgatacgccgctgctggtctgcgtcggattaggcgtcgggctactgtgcgggctgttcaacggcattctggtgacgcgctttaacctgtcgtccatcgtcatcaccatcggcacgatgagcctgtaccgcgggatcacctacattctgctcggggaccaggcgctgaacagctaccctgagagcttcgcctggttcggccagggctacgtctggggcgcgctgtcgtttgaattcgcgctgtttatcgtgctggccgctctgtttgcctttgtgctgcaccgcaccaactttggccgccgcacctacgccatcggcaacaacccgaccggcgcgtggtactccggcatcaacgtgaagcgccacaacctgatcctcttcgcactggttgggctgatgtccggcctggcgtcggtgctgcttacctcgcgtctgggcagcacccgcccgaccatcgcgatgggctgggagctggcggtggtgacgatggcggtgctcggcggcgtcaatattctcggtgggtccggcagcatggtgggcgtgattatcgccgccttcctgatggggctggtgaccttcggcctgagcctgctcaacgtgcccggcattgtgatgtcggtgattatcggcgcgatgctaatcgtggtgatttcgctgccgattattacccgccggatgatgcagcgaagacggaattaa

SEQ ID NO: 523618 - DNA, 1149 bp, Stenotrophomonas maltophilia
atgagctttatgttggcactccccaaaatcagcctgcacggcgcgggcgcgatcggcgatatggtcaatctggtggcaaacaaacagtggggaaaagcgctgattgtcaccgacggccagttggtgaagctgggcctgctcgacagtttgttttccgcgctcgacgcccatcagatgtcgtatcacctgttcgatgaagtattcccaaacccaacggaagcgctggtgcagaaaggctatgcggcatatcaggacgcggagtgtgattacgtgattgccttcggcggcggcagcccgattgataccgccaaggcgatcaaaatcctcaccgccaaccccggtccgtcaaccgattactccggcgtcggcaaggtgaaaaacgcgggcgtgccgctggtggcgatcaacaccaccgcaggcacggcagcggagatgaccagcaacgcggtgatcatcgacgccgcgcgtcaggtgaaagaggtgatcatcgacccgaacatcatcccggatatcgccgtggacgatgccagcgtgatgctcgatattccggcctccgtgaccgccgcaaccggcatggacgcgctaacccacgccattgaagcttacgtctccgtgggcgcacacccactgaccgatgccaacgcgctggaagccattcgtctgatcaacctctggctgccgaaagcggtcgacgacggtcacaacctggaagcgcgcgagcagatggcctttgggcagtatctggcgggcatggcgtttaacagcgccgggctggggctggtgcatgctctggcgcaccagccgggcgcgacgcacaacctgccgcacggcgtctgcaacgccatcctgctgccgatcatcgaaaactttaaccgcccgaacgcggtcgcccgattcgcccgtgtggcgcaggcgatgggcgttgacacgcgcggcatgagcgacgaagcggccagcatgtccgccattcaggcgattcgcgatctaagtgcccgcgtcggcattccgtccggatttagccagcttggcgtgaccaaagccgatattgaaggctggctggataaagcgctcgctgacccgtgcgcgccgtgcaacccacgtaccgccagccgcgatgaggtccgcgagctatacctggaggcattatga

SEQ ID NO: 523619 - DNA, 315 bp, Stenotrophomonas maltophilia
atgatccgcaaagcgtttgtgatgcaggtaaacccggatgcgcacgaggagtatgcgcgccgccacaacccgatctggcctgagctggaagcggtactgaaagcccacggcgcgcaccactacgccatttacctcgacaaagcccgcaacctgctgtttgcgacagtggagattgaatcggaggagcgctggaacgcggtggcaaacaccgacgtctgccagcgctggtggaaacatatggctgacgttatgccgtctaatccggacaacagcccggtgagtgcggagctgaacgaggtgttttacctggactga

SEQ ID NO: 523620 - DNA, 1278 bp, Stenotrophomonas maltophilia
atgaacacaacaacctgttcccacaaagacaaccctaacttctggatcttcgggctgttcttctttctctacttcttcatcatggccacctgctttccgttcctgccgatctggctgtcggacatcattggcctgaacaaaacccatactgggattgttttctcctgcatctcgctgtcggccattgccttccagccggtgctgggcgtcatttcggacaagctggggctgaaaaaacacctgctgtggataatctcggtgctgctgtttttgttcgcgccgtttttcctgtacgtctttgcaccactgctgaaagccaatatctggctgggcgcgctgagcggcggggtgtatatcggctttgttttttcagccggatccggggcgattgaggcctacattgaacgcgtgagccgcaacagcttttttgagtacggtaaggcgcgcatgttcggctgtctcggctgggggctgtgcgcctcaacgggcggcatcctgttcggcatcgatccgtcgtatgttttctggatgggatcggcggcggcgctgttgctgatgctgctgctgatggtcgcgaaaccgaagcccaaccagacggcgcaggtgatgaatgccctgggcgccaatcagccgcagatcaccgctaaaaccgtcttcaacctgttccgccagcgcagaatgtggatgttcatcctgtacgtgattggcgtggcctgcgtatatgacgtcttcgaccagcagtttgctaccttcttcaaaaccttcttcgccacgccgcaggaggggacccgcgcctttggtttcgccaccacagcgggggaaatctgtaacgcgatcatcatgttctgctcgccgtggatcattaaccgcatcggtgcgaaaaacacgctgctgattgccggggtgatcatggcgacgcgcattatcggatcgtcgtttgccacaaccgccgtggaggtgattgccctgaagatgctgcacgcgctggaagtcccgttcctgctggtgggggcattcaagtacatcaccggggtgtttgatacgcgcctgtcggccaccatctacctgattggcttccagtttgccaaacagtcggcggcgatcttcctctccgcctttgccggaaatatgtatgaccgggtcggcttccaggagacgtacctgatgctgggctgcttcgtgctggcgattacggtggtgtcggcatttacgctgagtggcaggcgggagatagctgctaccgcaggggcagcagcgttaacacatcagtccaggtaa

SEQ ID NO: 523621 - DNA, 2124 bp, Stenotrophomonas maltophilia
atgcaagatgccatttttcgacttgaaagcaatacggttgacgtggtgctaaaaacccacccgttcgccgaaattctctactgggggccgcaccttcagcacttctcgccgcaggatgtcctgagtattgcgcgcccggttgctaacggcaggctggacgtcgactcccccgtcacgctgatggcagagctggggcacggcctgtttggttcgcccggcatcgatgggcatcgtcaggggctggacggatcgcctgtcttcaccaccacaggcgtacaacagcaggggcaaaccctgacggtaacggcggaagataaacaggcgggcctgcgcctgaccagtgaattaacgctggatgccagcggcgtactggtggtgcgccatgggttaaccaacctgaaaacgcaggcgtggcaggtggatcgctttgccgtgacgctcccgattgccgagcgcgcgcaggaggtgatggccttccacggacgctggatcagggagtttcagccgcaccgcgtgatgcttgaacatgacagctttgtgattgaaaaccgccggggtaaaacctcccacgaacatttcccggcgctgatcgccggtacgccatcgttcagcgaaatgcagggtgacgtctggggtgtgcatctgggctggagcggcaaccaccgcctgcgcgcagaggtgaaaaccgatggccgccgctatatgcaggccgaagcgctctacctgccgggtgaaatggcgattgaagagggggaaacgctctggacgccgcgcctgtatgccagccactccccgcacgggctgaatggcatgagccagcagttccaccgctacctgcgcgataacgttatccgcttcccggaagataaaccgcgcccggtgcatctcaacacctgggaggggatctacttcgaccacgatccggactacatcatgcgcatggccgacgaggccgcagcgctgggcgtggagcgctttatcattgacgacggctggttcaaaggccgcaacgacgaccacgccgcgctgggcgactggtatctggacgagaaaaaatacccgaacggccttaagccggtgatcgatcacgttaaacagctcggcatggagtttggtatctgggttgagccggagatgattaacccggattccgatctgtaccgcgcgcaccctgactgggtgctggcgctgccgggctacgcccaggcgaccgggcgacatcagctggtcctcaatctcaatattccgcaggcctttgaatatctggtcgaacgcatgagctggctgctgggcgaacacgcggtcgactacgtgaaatgggatatgaaccgcgagctggtgcagccagggcacaagggcaaagccgccgccgacgcccagacgcgccagttttatcgcctgctggacgtgctgggcgagcgcttcccgcacattgagtttgaatcctgctcctccggcggcgggcgaatcgattatgaagtgctgacccgctgccaccgcttctgggcgtccgacaataacgacgcgctggagcgcaacactatccagcgcggcatgagctacttcttcccgccggaggtgatgggggcgcatatcggtcatcataaatgtcacgctaccttccgccagcacaacattcagttccgcgggctgacggcgctgtttggtcacatggggctggagctggatccgctcaccgtcgacgcgcaggagcgtgaaggctatcgacattacgccgcgctgtataagcggtggcgcgaggtcattcatcacggcacccagtggcgcgtggatatgccggacaccaccaccctggcgcagggtatagtgagcgaagacaagacgcaggggctgtttttggtcagccagctcgcgatgccggattacaccctgatgatgccgctgcgcatgccggggttagacgccagcgcgcagtaccgcatcacgctgatcgatcatccgaacattcagattacgggcgagggcgggcacaccatgcgcaagctgccagcatggatggaaacgccacaaactgtgagcggtgagtggctgatgcaggcgggcattgcgctgccgattctggatccggaaaccgccattctgattggtgtgaaacgcgtgtaa

SEQ ID NO: 523622 - DNA, 996 bp, Stenotrophomonas maltophilia
atgtcgcttaaagccattgccaaagaactagggctgtctgttaccaccgtcagccgcgccctcaacgggtatgacgacgtttctgctgagacgcgcgcccgcgtggaagcggaggcccagcgccgtggctaccgaccaaatacctttgcccgtcgcctgaagatgggcaaaatcgacgccgtcgggttggtgtttccggtgcatcctgttccgctcaataacagcgtttttatggacatggtcggcgaaattagccacgaactggcgcgacatgagattgacctgctgctcatcgctgacgacgatctggcggacaaacacagctatatgcgcatggtgcagagccgacgcgtggatgcgctgatagtggcgcatacgctggatcacgatccgcgtcttgagcagcttcaggccgccgggttcccgttcctggcgctcggccgcagccagctgccgcagccgtacgcgtggttcgatttcgacaactatgccggtacgtatcaggccacccgctggctgatcgagaaaggccatcagcgcattgcgctgctgggcgaaagcaacaaccaggcattcatcacccagcgtcgccagggcttcctggacgcgctgcgggaagccggtctttccagcgaatggctgcgcgccttgcccccttcgcgccgcgtggggtatgccaccacgcaagaacttctctccctgccgcagccgcccacggccatcattaccgactgcaacactcacggcgacggcgcagcgatggctctggcgcagatggggcgcttaaccggtgaaaatgccgtctcgctggtggtctatgacggtttaccgcaggacagcattgtcgatatcgacgtcgcggcggtgatccagtctacccgtcagggtgtcgggaaacagattgccgatatggtgcgccagctgattaacggcgacgacattgatacgcttcaggtgctctggcagccggaattttccccaggccagacggcctga

SEQ ID NO: 523623 - DNA, 549 bp, Stenotrophomonas maltophilia
atgacgcagccaatcagcgtaatcgccagaagcctggtgcgagaacgcctgcgaaccggactttcgctggcggagatcgcccgccgtgccgggatcgccaaatccacgctttcacaactggagtctggcaacggcaaccctagcctggaaacgctctggtcgctttgcgtggcgctggatattccgtttgcccggttactggagccacagcagcccgtcacgcaggtgatccgccgcggcgagggcacaaaagttgtcgccgggcaggcgaactacgaggcgattttgctcgcggcgtgtccgccgggggcgcgtcgtgatatctacctgctgctgactcagccgggggcagaccgtatttcccagccgcatccgccagggtcggttgagcatattatcgtgacccaggggcgggcgatggtcggcctgatcgacgcggcggaagagctcggcccgggggattacatttgctatcccgctgaccagccgcatatctttaaggcgctggagccagatacgcacgcgctgctggtggcggaacaaaactaa

SEQ ID NO: 523624 - DNA, 660 bp, Stenotrophomonas maltophilia
atgaagaatcacctctcttgcctgaaaggcgacacgataaaagcgatcgtcctggtctgcctcgcggtgggcgtggtcggcatgtcctacggctcgctggcgatggcctacggcttcccgctgtgggtgccatttgtcctctccctcacggtgctggcaggcgcatccgagtttatgtttatcggcatcgtagcgagcggcggcaatccgctggcggcggccgcagccggtttactggtaaacgcgcgccatgtgccgttcggcgtgacggtgcgtgacctggtgggcaagcgcggcctaagctttctgggctgtcatatcatgaacgatgaaagcgtggtgtttggcctgtcgcaaaaaaccgccgagcagcgtaaagcggcctactggctgtgcgggttaggcgtggcaatcatctggccgctgggcgcggtgctgggggcgatggtcggcaagctactgccagacccggaaaccatcgggctggacgcggtgttcccggcgatcctgctggcgttagtggtgccggcatttaaaaaccgtaccacgctgatccgcgcctgtagcggcgcggtgttgtcgctggccgccgtaccgtttgcgccggttggcctgccggtgctgctctctttactcggccttgccgcgaggaaaaaataa

SEQ ID NO: 523625 - DNA, 324 bp, Stenotrophomonas maltophilia
atggaaaacatgacggtctttattctcggcatcgccattctttctgccggaacctatctgatgcgtctcggcggggcaaaactcggcagccggctggcgctttctgaacggtcgcaggcgctgctttcagatgcggctaccgttttgttgttctccgtcgcgctggcgacaacgttttatgaaggggaccattttgccgggatggcgcgcgtgctgggggtggggttcgcggtgtttttggcctggcgcaaaatgccgttaattgtggtgatcgtcgcggcggcggtggtgacggcgctactgcgtctggcgggcataaactaa

SEQ ID NO: 523626 - DNA, 213 bp, Stenotrophomonas maltophilia
atgaaaagcatcaaaacttttgtcgcagtaatcgctcttgctacatctttcggttctttcgctgcgcagactgtgaccgcatccgcctctacgctggacggtgctgaagctaaaatcgccgcacaggctcaggaagcgggcgcgtcatcctacaaaattactcaggcattcaccggtaaccgcgtacacatgaccgctgaactgaacaaataa

SEQ ID NO: 523627 - DNA, 837 bp, Stenotrophomonas maltophilia
gtgtttaaacaaaaccgtgctacccacgcgtcgccactgcctgcgggcattgtggaactgtcggtacacagaccgcctcacatttcacatgccacgtcggattttctggcggaagaggtccccgttgccctggtttacaacgggatttcgcatgtggtgatgatggcctcgccgaaagatctcgagctgttcgccatcggtttctccctctcggaaggcatcattgcgcatccgcaggagatctacggcatggacgtcgtaccggcctgtaacggtctcgaagtgcaaatcgaactctccagccgccgctttatggggctgaaagagcgccgccgggcgctggccggacgtaccggctgcggcgtgtgcggtgttgaacagcttaacgatatcggcaaacccattatccccctgccgttcacccagacgttcaatctggcgcatcttgatcgggcgcttgtgcacctgaatgacgttcagcccatcggccagctcagcggttgtacgcatgcggcggcgtgggtattgccgtcggggagcattgcaggcgggcatgaagatgttggccgccacgtcgcgctggataagctgctgggccgtcgcgctcgggaaaacaacgtctggcagcaaggggccgcgctcgtttccagccgcgccagctacgagatggtgcaaaaatccgccatgtgcggcgtggaaattttgtttgcggtgtcagcggcaaccacgctggcggttgaagtggcggagcgctgcaacctgacgctggtggggttctgcaagccaggcagggcgacaatttacacccatccgcagcgattaattgttaatcagtaa

SEQ ID NO: 523628 - DNA, 588 bp, Stenotrophomonas maltophilia
atgcaggtcagcagaaggcagttctttaagatctgcgctggcggtatggcaggcaccacggcggcggcactgggctttgcgcccggcgtagcgctggcggaaacacggcagtataaactgctgcgcacccgcgaaacccgtaacacctgtacgtactgctccgtcggctgtgggctgttaatgtatagcctcggcgacggtgcgaaaaacgccaaagcatctattttccacatcgaaggcgatccggatcacccggtaaaccgtggtgcactctgtccgaaaggggccggtctggtagattttatccactccgaaagccgcctgaagtttcctgagtatcgcgctcccggctctgacaaatggcagcaaatcagctgggaagaagcgttcgatcgcatcgctaagctgatgaaagaagaccgcgatgccaactttatcgcgaagaatgccgaaggcaccaccgttaaccgttggctctccaccggcatgctgtgtgcatcagcgtccagtaacgaaaccggctatttaacccagaaatttacgcgcgcactcggcatgctcgcggtcgacaaccaggcgcgtgtctga

SEQ ID NO: 523629 - DNA, 2415 bp, Stenotrophomonas maltophilia
atgaccaaccactgggtcgacatcaagaacgccaaccttattgtggtgatgggcggtaacgccgctgaagcgcaccctgtcgggttccgctgggcgatggaagccaaaatccacaacggcgcgaagctgattgtgatcgatccccgctttacgcgtacagcgtcagtggcggatttctacacccctattcgttcaggtactgacatcactttcctgtcaggcgtattgctgtacctgatgaccaacgaaaaatataaccgcgagtacaccgaagcctataccaacgccagcctgatcgtgcgtgaggattaccacttcgaagatggcctgttcagcggttatgacgccgaaaaacgcaggtacgacaaaaccagctggaactacgagctggacgaaaacggctttgcgaagcgcgacaccaccctgcaacacccgcgctgcgtgtggaacctgctgaaagagcacgtgtcccgctatacgccagaggttgtcgaaaacatctgtgggacgccgaaggcggacttcctgaaggtgtgcgagcttatcgccgaaaccagcgccaaagataagaccgcgtcgttcctgtatgcactcggctggacgcagcactccatcggcgcgcagaacatccgcaccatggcgatggttcagttgctgctcggcaacatggggatggcaggcggcggcgttaacgccctgcgcggtcactccaacatccagggtctgaccgaccttggcctgctgtctcagagcctgacgggttacatgaacctgccgagcgagaaacagaccgacctgcaaacctatctgacggccagcacgccaaaaccgctgctcgaaggccaggtaaactactggggcaactatccgaagttcttcgtctcgctgatgaaagccttctacggcgacaaggcgacggcggaaaacagctggggctttgactggctgccgaagtgggacaaagggtacgacgtcctccagtacttcgaaatgatgcaccagggccaggtcaacggctatatctgccagggctttaacccggtggcgtcgttcccgaacaagaacaaggttgtcgagtctctgtcgaaactgaagtacctggtgacaattgacccgctcaataccgaaacctcgacgttctggcagaaccacggtgagtcgaacgatgtcgacccgtcgaagattcagaccgaagtgttccgtctgccgtccacctgcttcgcggaagagaacggctctatcgtcaactctggccgctggttgcagtggcactggaaaggcgcggacgccccgggcatcgccctgaacgacggcgagatcctggccggtatcttcttacgcctgcgtaaaatgtacgcggctgaaggcggcgcaacgcctgagccggtgctgaacatgacctggaactattcgacgccggaaaaccctgcgccggaagaagtggccatggagagcaacggtaaggcgctggcggacgttatcgacccggcgaccggcaccgtgctggcgaagaaaggcgatcagctcagcaccttcgcacacctgcgtgacgacggtacgacgtcaagcggctgctggatctttgccggtagctggacgccgaaaggcaaccagatggccaaccgcgataacgccgacccgtcgggcctcggtaatacgctgggctgggcatgggcatggccgcttaaccgccgcatcctctataaccgtgcctctgctgacccgcagggcaacccgtgggatccgaagcgtcagctactcaagtgggacggcgcgaaatggggcggcgtggatattccggactacagcactgccgcaccaggcagcgatgtcgggccgtttatcatgcagcctgaagggatggggcgcctgtttgctatcgataagatggcggaaggtccgttcccggaacactatgagccgtttgagacgccgctgggtactaacccgctgcacccgaacgtggtctctaacccggcagcccgtatcttcaagggcgattttgaagcgctgggtaaaaaggacaagttcccgtatgtcggcaccacctaccgtctgaccgagcacttccactactggaccaagcacgcgctgcttaacgccatcgcgcagccggaacagtttgtggagatcggcgagaagctggcggacaagctcggcatcgcccatggcgataccgtgaaggtctcctctaaccgcggctacatcaaagccaaggcggtggtgaccaagcgtattcgcacgctgaacgttcatggtcagcaggtggataccatcggcatcccaattcactggggttatgagggcgtggcgaagaaagggttcattgcgaataccctgacgccgttcgtcggtgatgcgaacacgcagacgccggagtttaaggccttcctcgtgaacgtggaaaaggtgtaa

SEQ ID NO: 523630 - DNA, 903 bp, Stenotrophomonas maltophilia
atggcttatcaatctcaagacattatccgtcgttccgcgactaacggtttcacgcccgcgcctcaggcgcgggaccaccagcaggaagtggcgaagcttatcgacgtgaccacctgtatcggctgtaaagcctgtcaggtggcttgttcagagtggaacgacatccgtgacgaagtgggtcacaacgtcggggtgtacgacaacccggcggacctgaccgccaagtcctggacggtaatgcgtttctcggaagtggaacagaacgacaaactggaatggcttatccgcaaagacggctgtatgcactgtgcggatccgggctgcctgaaggcgtgtccgtcagaaggggctatcattcagtatgccaacggcatcgtcgacttccagtctgagcagtgtattggctgcggctactgcatcgcgggctgtccgttcgacgtgccgcgcatgaacccggaagacaaccgcgtctacaaatgtacgctgtgcgttgaccgcgtaaatgtcggtcaggagccagcctgcgtgaagacctgcccaaccggcgctatccactttggctctaaagaggatatgaaaacgctggcggcagagcgcgtgggcgagctgaaaacccgtggttacgataacgcgggcctgtacgatccggccggggttggcggtacgcacgtgatgtacgtgctgcaccacgccgacaagccgaatctgtaccatggcctgccggagaacccggaaatcagcgccaccgtgaagttctggaaaggtatctggaaaccgctggccgcggtcggttttgcggccacctttgcagcgagcatcttccactacgtcggcgttggtccgaaccgcgcggaagaggaagacgataacctgcatgaagagaaagacgaggtgcgcaaatga

SEQ ID NO: 523631 - DNA, 636 bp, Stenotrophomonas maltophilia
atgagaaaacgtgacaccatcgtgcgctacaccgcgccggaacgcatcaaccactgggtcaccgccttctgcttcatgctggcggcgataagcgggctggggttcttcttcccctccttcaactggctgatgcagatactgggcacgccgcagctggcgcgcatcctgcacccgttcgtgggtgtggtgatgtttgcctcgtttatcatcatgtttttccgctactggcaccataacctaatcaatcgggatgatatcttttgggcgaagaatattcgtaagatcgtcgtcaacgaggaagtgggtgataccgggcgttataacttcggccagaaatgcgtattctgggcggcgattatcttcctggtcctgttgctggtgagcggcgtgatcatctggcgtccgtactttgcgcctgctttctcaatcccggtgatccgatttgcgctgatgctgcattcatttgccgcagtggcgttaattgtggttatcatggtgcatatctacgccgccctttgggtgaaaggcaccattaccgcgatggtggaaggatgggtaaccagtacgtgggcgaagaaacatcacccgcgctggtaccgtgaagtccgccagaaacaggaaaagtcatctgaatga

SEQ ID NO: 523632 - DNA, 930 bp, Stenotrophomonas maltophilia
atgagtattcgcataatcccgcaagatgagctggggtcgagcgagaaacgcacggcggataatattccgccgttgttgttccccagactcaagaacctctacaaccgccgcgcagagcgtctgcgcgagctggcagagaacaacccgctgggcgattttctgcgttttgccgcgctggtcgcccatgcgcaggaagtggtgctatacgaccacccgctgcaaatggatctgaccgcacgcatcaaagaagccaacgcgcagggcaagccgccgctggacattcacgttctgccgcgcgacaagcactggcataagctgctgcattcgctgattgccgagctgaagcccgaaatgagcggcacggcgctggcggtcattgagaacctggaaaaagcctcagagcaagagctggaagagatggcgagcgcgctgtttgcctccgacttctcgctggtgagcagcgataaagcgccgttcatctgggctgcgctgtcgctctactgggcgcaaatggcgagcctgatcccgggtaaagcccgcgctgaatatggcgaagcgcgccagttttgcccggtgtgcggctcaatgccggtctccagcatggtacagattggtacgacgcaggggctgcgctacttgcactgcaacctgtgtgaaaccgagtggcacgtggtgcgcatcaagtgcagcaactgcgaacagacccgcgatctgaactattggtcgctggaaaacgaagacgcggcggtgaaagccgaaagctgcggcgactgcgggacctacctgaagattctgtatcaggaaaaagacccgaaagtcgaagcggtagccgacgatctcgcctcgctgatcctggacgcgaagatggagcaggagggctttgcccgtagctcgatcaacccgttcctgttcccgggggaaggggagtaa

SEQ ID NO: 523633 - DNA, 375 bp, Stenotrophomonas maltophilia
atgatggagcacatggctgtgtttgacaccaatatcctcatcgatctttttaataaccacgttgaggctgcggatgcgatcgatcgcacagcttcgcatcgtgccattagcctcatcacatggatggaagtaatggtgggcgctcgcaggcacggtcaagaagcaaaaacggcagccgtgatggaggcctttgaaattattgatataacaagggaaattgctgaaagaagcgtattacttcgcgaacagcacgggatgaagcttcctgacgccattattctggctactgctcagagcagaagctgtccgttaatttcgcgcaatacgaaagacttttcgggtattgctggggtcgtttcaccttaccacctgtag

SEQ ID NO: 523634 - DNA, 243 bp, Stenotrophomonas maltophilia
atgagtcttttggcggaccttactatgggcagaatactgatcgatttgtctgatgacgtgattcaacgactggataacctgaagcagttgcgcaaccggccgcgcgccgaactgctgcgggaagccatagaactgtatctcgaccagcagaattcatcggttatccgcgaagcgcttggcctgtggggaaatcagcaggaagatgggcttgagtacgaacgcaagctgcgtgaggagtggtaa

SEQ ID NO: 523635 - DNA, 921 bp, Stenotrophomonas maltophilia
atggcgctggaaaagggaattgataagcttgtacaagattttattgcagcagggcggccttcctcgcgaaagcagaatatagatgaacggagagccgggtatgttgccagcacagctctggccggggagacagaaactcgtgtccaggttgaaacgcttgttcttgaggagatgacctttcggctattttcgcctgtcaatgcccctgaaacgttaccttgtgccctctactatcatggcggttgttttgtcagcggtgggtttgaaacccatgataatcagcttcgccaactggcgttttacggtaactgtcgggtcattgcggttcagtacagactcgcacccgagcataccttccccgctgcgcatgacgatgcagagagagcggcagatcttgtctggcaaaatgcagaacaattaggtgtggataaaaaccggattacactttgtggagacagtgcgggagggcatcttgcgctggtaacgtcattgcggcttaaggccaaaggtctctgggatcccgcacagctcattcttatctaccccatgctcgacgctacggccagttttgaaagctataccctcaatggcatggactacgtaattactcgcgatacccttttgagcggctatgaaatgtatctggataaagcttaccgtcagcatcctgaagtcagcccactgtggcgcaacgactttagcggtctgccgaaggtccatattgttaccgctgagtatgatccgttacgcgacgaaggcgaggcgctttatcagcgcctcacggagcaaggcgtgaagtgtaccgctcaacgatggcggggtgtaattcacggcttcttccagttgggtggaattagccagtcagcgcgagaagttatgcgagatattgcctggcgcattaaccatgccggacgagagtga

SEQ ID NO: 523636 - DNA, 942 bp, Stenotrophomonas maltophilia
atgtatcaccttcgagtaccgcaaacggaagaagagttagaggtttattaccatttccgctgggaaatgctgcgcaagccactgcatcaaccgaaagggtctgaacgcgacgcctgggacgcgatggcgcaccaccagatggtggttgatgaagagggccatctggttgccgtggggcgtctgtatatcaatgccgacaacgaagcttcaatccgctttatggccgttcacccctccgtgcaggacaaaggcctcggaacgctgatggctatgacgctggaatccgtcgcccgtcaggaaggggtcaagcgcgtcacctgtagcgcccgtgaagatgccgttgagttctttgccaagcttggtttcgtgaatcagggggaaatcaccgccccgcaaactacgccgattcgtcactttttgatgatcaaacccatcgccaccctggacgatatactccatcgtgccgactggtgcgggcagctccagcaggcgtggtatcagcacattccgctcagtgaaaaaatgggcgtgcgtattcagcaatataccgggcaaaaatttattaccaccatgccggaaaccggcaaccagaacccacaccataccctgtttgccggtagcctgttttcactcgccacgctcaccggctggggactgatctggctgatgctgcgcgaacgtcatctcggcggcaccattattctggccgatgcccatatccgctacagcgcgccgatcagcggcaagccgagcgcggtagctgacctgggtgcactgggcggcgatctcgaccgtctggcgcgtgggcgtaaagcacgcgtacaaatgcaggttgagctgttcggcgatgaaacgccaggcgcggtgtttgaaggcacctatatcgttctgcctgcgaagccgtatggcgcgtatgaagagggcgggaacgaggaggagtag

SEQ ID NO: 523637 - DNA, 438 bp, Stenotrophomonas maltophilia
atgattgcattgattcagcgcgtaacccgtgccagcgtcaccgtggcggatgaggtgacgggtgaaatcggcccaggacttttggtgctcctgggtgtcgaaaaggatgacgacgaacaaaaagccaaccgcttgtgtgagcgcgtgctgggctaccgcattttcagcgatgcggaaggcaagatgaacctgaacgttcagcaggcgggcggcagcgtgctggtggtgtcccagtttacgctggctgcggataccgaacgcggcatgcggccgagtttttcgaagggcgcggcaccggatcgcgcagaagccctttacgagtactttgttgagcgctgtcgccaacaggacataaatacacaaaccggacgattcgctgcggatatgcaggtttcgctggtgaacgatggccccgtcacattctggctccaggtatga

SEQ ID NO: 523638 - DNA, 882 bp, Stenotrophomonas maltophilia
atgctaaaaaccgttcatcaaaaagccaatcaccacacgcgcccgctgagggcgtggctgaaactcctctggcatcgcattgatgaggacaacatgaccacgctggcgggcaatctcgcttacgtgtccttgctctcgctggttccgctggtggcggtgatttttgcgcttttttcggcgtttccgatgtttgccgatgtgagcatgcagcttcgccattttgttttcgcaaactttattcctgccaccggcgatgtgatccagaactacattgaacagtttgtcgctaactccagcaagatgacggcggtgggggcgtgtgggcttattgttaccgcgctgctgctgatgtactccatcgacagtgcgctcaacactatctggcggagcaaaaaagtccgcccaaaggtctattcctttgccgtctactggatgattttaaccctcggccccttgctggcgggggcgagcctggcgatcagctcctaccttctttcgctgcgctgggcgagcgatttaaacagcgtgatcgataacgtgctgcgcatcttcccgctgattttatcgtggctttcgttctggctgctttatagcgtggtgccaactacgcgcgtacccaaccgggatgcggtggtgggtgcgctggtcgcggcgttgctctttgagttgggcaagaaaggattcgcgctttatatcaccatgttcccctcttatcagctgatttacggcgtactggcggtgatccccattttgtttgtctgggtctactggacgtggtgcatcgtcttgcttggcgccgaaataactgtcactctcggggtctaccgcgaacttaaaaaagcagcagaagctgaaaaacaacaagaagcagaccaaccatga

SEQ ID NO: 523639 - DNA, 600 bp, Stenotrophomonas maltophilia
atgctttatatctttgacttaggaaatgtaatcgtcgatatcgattttaaccgggtgctgggcgcatggagcgattttagccgtgttccgctggcgacgttaaagcagaatttcgcgatgggtgagactttccatttgcacgagcgcggtgagatcagcgacgaagcgttcgcagagcgtttctgtcaggaaatgggtctctcgttaagttacgagcaattttcccatggctggcaggctatatttgtcgcgatccgccccgaagtgatcgacatcatgcacaagctgcgcgagcaggggcatcgcgttgtcgtgctgtctaataccaaccgcctgcataccaccttctggccggatgaatacccggaaattcacgcggcggcagataaagtgtatctctcccaggagatgggaatgcgtaaacctgaggcgcgcatctatcaggcggtattgcaggaagaaggattcacggcagcggatgcggtcttttttgacgacaacgtcgataatatagaaggggctaatcagttaggtatcacctccattctggtgaccggaaaagagacgataccgaactactttgcgaagcagttatgctaa

SEQ ID NO: 523640 - DNA, 801 bp, Stenotrophomonas maltophilia
atgagccttaccgaactgaccggcaacccgcgtcacgatcagctgctgacgctgattgccgatcgcggctatatgaacattgatgaactggcgcagctgctggatgtgtcgacgcaaaccgtgcgccgggatatccgcaagcttagcgagcaggggctgatcacccgtcatcacggcggtgcgggcagggcatccagcgtggtcaatacggcgttcgaacagcgtgaagtttcgcttaccgaagagaaacgggcgattgccgaagcgattgcggactatatcccggatggctcgaccatctttatcactatcgggacgaccgtggagcacgttgcccgggcactgcttaaccataatcatctgcgcatcatcaccaacagcctgcgggtggcgcacattctttataataatccgcgttttgaggtgatggtacctggcggtacgctgcgcccgcataacggcggcattatcgggcctgcggcaacggcgtttgtgtctggcttccgggcggactacctcgtgaccagcgtgggggcgatagagcacgacggcgcgatgatggaatttgacgttaacgaagccagcgtggtgaaaaccatgattgcccactcccgccacattttactggcggccgatcatacgaaataccacgcctccgcggcggttgaaattggcaacgtggcgcaggcgacggcactgttcaccgatgagctgcccggcccggcgctgcaaagtcacctaaaatccagcaaggttgaggttgtcgaagtgaattccggagaagagcagcaggctggctga

SEQ ID NO: 523641 - DNA, 897 bp, Stenotrophomonas maltophilia
atgactcgcatcgtttgtgtcggcattaccgtgctggatcgcatctggtatctcgatgatttaccaaaagaaggtgggaaatatgtcgcaaaagactacacggaagtgggcggcggcccggcggcaacggcggcagtggcagccgcgaaactgggcgcggaagtggattttattggtcgggtgggggacgacgataccggcagacggttgcttgcggagctggaatccctgggggtgaacactcgctatacgcgcgtagttaagggggcccgatcgtcgcaatcggcggtgctggtggatgcaggtggggaaagagtgattgccaactaccccagccccgatctgcccgccgaggcaggctggctgcatgaaatcgacttctctcagtgggacattgtcttagccgacgtgcgctggcatgacggggcaaaacaggcatttaccctggcccgtcagcagggcgttccgacgttgctggatgcggatgttaccccgcaggatatcgcggagctgatcgccttaagcgatcacgcggccttctctgcgcctgggctgcggcgtttaacgcagttggatgaaacagaagacgcattaaaaaaagcacaaacgctcacaaatggacatgtgtatgtcactcaggggcgagacggctgtttctggctggaaaacggcgcgctatgtcatcagcctggttttgaagtgaacgtcattgataccaccggcgcgggcgacgtgttccacggtgcgctggcggtcagcctggggcagaaattgcccgccgcagacgccgtgcgttttgccagcgccgtcgcagcactgaaatgcacaaagcccggcgggcgcgcgggtatacccgactgtgatcaaacccgctcttttttgtcactttttgtataa

SEQ ID NO: 523642 - DNA, 891 bp, Stenotrophomonas maltophilia
atgtcagcaatcgcatttatcggcttaggacagatgggcgcgcccatggcgaagaatctgttgaaacagggccaccagcttaacgtttttgatgtgaacccgcaggcggttcaggtgctggtagagagcggcgcccgggcggcggcaacgcccgcacaggcagcaacggatgccgaattcgtgatcactatgctgccaaacggcgacctggtgcgcagcgtgctgttcggcgagcacggcgtgtgcgaaggattatcccgcgacgcgctggtcattgatatgtccaccattcacccgctgcaaaccgacgcgctgatccgcgacatggcagagcaaggcttcagcctgatggacgtgcccgtcgggcgcacctctgatcatgccatcgccggtacgctactcctgctggcaggcggcacggcagagcaggttgagcgcgccacccccgtcttaatggcgatgggtaatgaactgattaacgccggcgggccgggaatgggcatccgcgtgaagctcatcaataactacatgagcatcgccctgaacgccctttccgccgaggccgccgtactgtgcgaagcgcttggcctctcctttgacgtggcgctcaaggtgatgagcggcacacctgcgggcaaaggccacttcaccacgtcatggccgaacaaggtgctgaaaggggatctttcacccgccttcatgatcgaccttgcgcataaggatctggggatcgccctcgacgtggccaaccagctgcatgtcccaatgccgctgggcgcggcttcacgagaagtttacaaccaggcacgcgccgccgggcgcgggcgcgaagactggacagccattcttgaacaggttcgcgcatctgccgggctgaaaaaatcacactga

SEQ ID NO: 523643 - DNA, 876 bp, Stenotrophomonas maltophilia
atgacgatgtacaccctgaaagatatcacccgaccttccggcggttttgcgatgctggccgtggatcagcgcgaagcgatgcgcctgatgtttgcggcggcaggcgcgccggtaccggtaaccgaccagcacctgacggattttaaagtcaacgcggcaaaaattctgtcgccgtacgcctctgccattctcgtcgaccagcagttctgctatcgccagattgtcgagcagcgggccgtggccaaaagctgcgcgatgattgtggcagccgacgagtttattccggggaacggtattccggtcgacagcgtggtgatcgataagagcattgacgcgcaggcggtcaaacgcgacggcggcaaggcgctgaagctgctggtgctgtggcgcagcgatgaagatccgcagcagcgcctggagatggtgaaagcgttcaatacgctgtgccacgataacggtctgttgagcattatcgagccggttgtgcgtccaccgcgccgcggcgccgcgtttgaccgcgagcaggcgattatcgatgcggccaaagagctgggcgacagcggtgccgacctctacaaagtggaaatgccgctgtttggtaagggcacgcagcacgagctattgacggcctcgcagaagctgaacgagaacatcgccatgccgtgggtgatcctctcctccggcgtggacgataagttattcccgcgcgcggtgagcgtggcgatgcaggcgggggcatcgggctttttagccggtcgcgccgtctggtcctctgtgattggcctgccggacaccgagttgatgctgcgtgatatttccgtaccaaaacttcagcgtctgggtgagatcgtcgacgaaatgatggctcgccgttaa

SEQ ID NO: 523644 - DNA, 1242 bp, Stenotrophomonas maltophilia
atgaaatggtttaataccctgagccataaccgctggctcgaacaagagaccgaccgcattctcgatttcggtaaaaacgccgccgtaccgaccggctttggctggctgggcaataacgggcaggtgcgtagcgatatgggcacccatctgtggatcaccgcccgcatgctgcacgtttacgcggtggcggcgaacatgggacgtcctggtgcgtacgccctggttgagcacggcattaatgccctgaacggtccgctgcgcgacaagcagcacggtggctggtacgcctgcgtaaacgatgaaggcgtgattgatgcgtccaagcagggctatcagcatttcttcgtcctgctgggcgcggcgagcgccgtcaccaccggccatccgcaggcacgcaagttgctggacgacgccatcgaggtgattgagcgctacttctggagcgaacaggagcagatgtgcctggagtcctgggatgaagccttcagcaaaacggaagattaccgcggcggtaacgccaacatgcacgccgtggaagccttcctgatcgtttatgacgtgacccacgaccgtaaatggctcgaccgcgccctgcgcatcgcctcggtgattattcacgacgtggcgcgcaaaggggagtaccgcgttaacgagcatttcgacaccaactggaacccgatccgcgactacaacatcgataaccccgcccaccgcttccgcgcctacggcggcacgccggggcactggattgagtggggtcgcctgatgctgcacctgcgcgccgccctggaagcgcgctttgaaaccccgccggaatggctgctggaagatgcgaaaggcctgttccacgccaccatccgggacgcctgggcacccgacggggccgatggctttgtctactccgtgggctgggacggcaagccaatcgtccgcgaacgcgtgcgctggccaatcgtcgaagcgatgggtacggcttacgcgctctacaccgtcaccggtgaggcgcagtacgaagcctggtatcagaagtggtgggattactgcatcaagtacctgatggattacgaaaacggttcatggtggcaggagctggacaccaataacgaagtgaccaccaaagtctgggacggcaagcaggatatttaccatctgctgcactgcctggtgatcccccgcctgccgctggcgccgggcttagcgcctgccgtagccgccggattactggatagcctggccaaataa

SEQ ID NO: 523645 - DNA, 2025 bp, Stenotrophomonas maltophilia
atgcgtaccctacacaatattgacctgaaaaataacgaaagtggttttaccctgcgctggcaggaccgtctgattttatcccactctgcggatgccccttgcctgtggatcggcgcaggtgaggcggatatcgagatgtttcgcggcaacttcagcatcaaagacaagctcaacgaaaagattgccctgacgaacgcgaccgttacgcagcaaagcgcgggctgggcaatccgctttacccgcggcgacgcggtgagcgcgacactgctggtgggcgtagatgctgaaggccgtctggagctgaagctgaaaaatgacgccgccagccataaccgcatctggctgcggctggcagctcagcctgacgatcatatttacggctgcggcgagcagttctcgtatttcgatctgcgcggcaagccgtttccgctgtggaccagcgagcagggcgtgggccgcaataagcagacctacgtcacctggcaggccgactgcaaagagaacgcgggcggcgattactactggaccttcttcccgcagcctaccttcgtgagcacccagaagtactactgccacgtggataacagctgttatatgaacttcgacttcagcgcgccggacttccacgagctggcgttctgggaagataacgccacgctgcgcttcgaatgcgcagaaacctacgtcgatctgctggaaaaactgaccggcctgctggggcgtcagcctgaactgccggactgggtttacgacggcgtgacgctgggtattcagggtggcaccgaggtgtgtcagcagaagctcgacgccatgcgcgagggcggcgtgaaggtgaacggcatctgggcgcaggactggtccggcatccggatgacctccttcggcaaacgcgtgatgtggaactggaagtggaacagcgcgctctatccgcagcttgatgagcggattgcgcagtggaaacaggaaggcgtgcagttcctctcctatatcaacccgtacgtcgccagcgataaagatctctgcgaagaggcggcgaaacgcggctatctgaccaaaaacgccaacggcgaggattaccacgttgagttcggcgaattctacgcgggcgttatcgacctgaccaacccggcagcctacggctggtacaaagaggtcataaaaaagaacctgatcgaactgggctgcggcggctggatggccgatttcggggaatatctgccgaccgataccttcctgcacaacggcgttagcgcggagatcatgcataacgcctggcctgccctgtgggcgaaatgtaactacgaagcactggaggagaccggcaagctcggggagatcctgttcttcatgcgcgcgggctacaccggcagccagaagcactcggtgatgatgtgggcgggggatcagaacgtcgactggagcctggacgacggtctggcgtccgtcgtaccggcggcgctgtctctggcgatgaccgggcacgggttgcaccacagcgacattggcggctatacgacgctgttcgagatgaagcgcagcaaagagctgctgctgcgctggtgcgacttcagcgcctttacgccgatgatgcgtacccacgagggcaatcgccctggcgacaactggcagttcgacggcgacgccgaaaccatcgcgcacttcgcgcgcatgaccaccgtgttcaccactctgaagccgtacatcaaagcggcggttgcgcagaacgcgaaaagcggcctgccggtgatgcgtccgctgttcctgcactacgaggacgacgcgcgcgcctacacgctgaaataccagtacctgtttggccgcgatttgctggtggccccggttcatgaagagggacgccgcgactggtcgctctatctgccgcaggacagctgggtcaatgcgtggacgggggaaatctgccggggcggtgacgtgaccgttgatgccccgctcggcaaaccgccggtcttctatcgccagcaaagcgaatgggcagatctgtttagcaccttacgtcatatctga

SEQ ID NO: 523646 - DNA, 1383 bp, Stenotrophomonas maltophilia
atgagtcaacatacttctgacccggcaaccctgcgcctgccgtttaaagaaaaactcgcctacgggatgggcgatctcggctctaacatcctgctggatatcggcacgctgtatctgctgaagttctacaccgacgtgttgggactgcccggtacctacggggggattatcttcctgattgcgaagttttttaccgccttcaccgatatgggcaccgggatcatgctcgactcccggcgcaagattggcccgaaagggaaattccgcccgttcgtgctgtatgcagccttccctgtgacgctgctggcgattgccaacttcgtcggcacaccgtttgagatgaccggcaaaacggtgatggcaacggtgctgttcatgctgtacggcttgttcttcagcatgatgaactgctcttacggcgcgatggtgcccgccattaccaaaaacccggacgagcgagcctcgctagcggcctggcgtcagggcggcgccacgctcggcctgctgctctgtaccgtgggctttgtcccggtgatgaacctcattgagggcaatgaccagcttggctacatctttgccgccaccctcttctcgctgttcgggttgttctttatgtggtggtgctataagggcgtaaccgagcgttacgttgagacgcaacctgctaacccggcgcagaaaccggggctgttgcagtcgtttcgcgccatcgccgggaaccgtccgctgtttatcctgtgcatcgctaacctgtgcacgctgggtgcctttaacgtcaaactcgccattcaggtctactacacgcagtacgtgctgaacgacccgatcctgctgtcgtacatgggcttcttcagcatgggctgtatttttatcggcgtctttatgatgcctggcgcggtgcggcgctttggtaagaaaaaggtctatatcagcgggctggcaatttgggtggcaggcgatctgcttaactacttcttcggcggcggctcggtgagctttgtggcgttctcctgtctggcgttcttcggttccgcgttcgtgaacagcctgaactgggcgctggtctccgataccgtggagtacggcgagtggcgcaccggcgtacgctccgaggggacggtctataccggctttaccttcttccgcaaggtatcgcaggcgctggcgggcttcttcccggggatcatgcttacgcagattggctatgtgcccaacgtggtgcaatccgccggcacggttgaagggctgcggcagctgatatttatctacccgagcctgctggcggtcatcaccatcgtggcgatgggctgcttctacaacctcaacgagaagatgtatgtgcgcatcgtggaagaaattgagctgcgcaaacgtacggcataa

SEQ ID NO: 523647 - DNA, 1398 bp, Stenotrophomonas maltophilia
atgacacacaatactgatccgttaaccctgaaattgagcctgcgagagaagtgcgcctacgggatgggcgattttggctcgaacctgatgctgtgtattggcacgctgtatctgctgaagttttacacggacgagctgggcatgcccgcgttctacggcggcatcatttttctggtcgccaagttctttaccgcgtttaccgacatgctgaccggggtgctgctggactcccggcgtaatatcggcgcgcgggggaaattccggccattcattctctacgcctccgtcccggtggcgctggtggccacggcgcagtttatggccaacgactttagcctgacggtgaaaacggccctcgccaccgtgctcttcatgatgtttggcctctgctacagcctgatgaactgcgcctacggtgcaatggttccggccatcaccaaaaacccgaacgagcgcgcgcagcttgcggcgtggcgtcagggcggcgcaacggtaggactgttgctctgcaccgtcggctttatgccgattcaggcgctgttcgtcagccagccctcactcggctatctggtggccgcgctggtgttcgtcaccggggggctgttctgcatgtggtggtgctacagcggggtgaaagagcgctacgtcgagcttacgcccgatcaccataagcccggcattctgaaatcattctgcgcaattttccgcaatccgccgctgctggtgctgtgcatcgccaacctctgtaccctcgccgcgtttaacatcaagctggcgattcaggtctactacacccagtacgtgctgaacgatctgcatctcctgtcgtggatgggctttttcagtatgggctgcattctgattggcgtgtttctggtgcctggcgcggtaaaacgctttggcaagaaaccggtctatctgggcgggctggcgctgtgggcggtgggcgacgtgctgaatttcttctggggaaccagctccctgctgttcgtgctcttttcctgcatggccttcttcggcacggcgtttgtgaacagcctgaactgggcgctggtgccggatacggttgattacggcgagtggaaaaccgggattcgcgccgaagggtcggtgtataccggctataccttctcgcgcaaaatctccgcggcgctcgccggttttctgcccggcatcatgctgacccagattggctacgttccccatgccgtgcagagcgcgggcacgctgctgggtttgcgtcagctgattttcctctggccgtgcggcctggcgatcgttgctgccgtgaccatggggctgttttataaactcaacgaagcgcgcttcgcctttattatcgaggagattggaaaacggaatctatggtcactcccgtttttgcaacaccgattttga

SEQ ID NO: 523648 - DNA, 411 bp, Stenotrophomonas maltophilia
atgagtgaaacggtggtgttcagccagctgagccgtaagtttattgatgagaacgatgccacgccggatgcggcgcagcaggtggtctattacagcctggcgattgggcaccacctcggggtgatcgactgcctggaggcggcgttaagctgcccgtggcccgagtacctggcgtggatcgccacgctggaggagggcagcacggcgcggcgcaaaatggagggcgtgcctaagtacggtgagatcgtcatcgacgccaaccatatcacgatgctcgccaacgcctttgacgcggcgctgagcaggcaaaacccggcgcagcaggcgtggagcaaaacgctgctcggcatgctgcacgatattcatcaggagagcgccatctacctgatggtgaggagattacgtgactga

SEQ ID NO: 523649 - DNA, 768 bp, Stenotrophomonas maltophilia
atggaaaacttactcggcccgcgcgacgctaacggcattccggtaccgctgacggtggaggagtccatcgccagcatgaaggcgtcgctgctgaaaaaaatcaaacgctcggcctacgtctatcgcgtggactgcggcggctgcaacggctgtgagatcgaaatcttcgccaccctgtcaccgctgtttgacgccgaacgcttcggcatcaaagtggtgccgtccccgcgccacgcggatatcctgctgttcaccggcgcggtcacccgcgcgatgcgctcgcctgcgctgcgcgcctggcagtctgcgccggatccgaaaatctgcatctcctacggcgcctgcggcaacagcggcggcatcttccacgatctttactgcgtctggggcggcaccgacaaaatcgtgccggtggacgtttacattccgggctgcccgccgacgcccgccgccacgctatacggttttgccatggcgctcggcctgctggagcagaagatccacgcccgcgagccgggcgagctggacaaccagccagccactctcctgcacccggatatggtgcagccgctgcgggtgaagatcgaccgcacggcgcgcaggctggcgggttaccgctatggccgtcagattgccgacgattatctgcgcctgctgagccagggcgaccatcaggtggcgcgctggctggaggccgagaacgatccgcgtctcaatgagatcgtggcaaacctgaacagtattgtggatgaggcgcgtatccgatga

SEQ ID NO: 523650 - DNA, 543 bp, Stenotrophomonas maltophilia
atgtttacctttatcaaaaaagtgatcaaaaccggcgcgcagaccagcagttatccgctggagccgatcccggtggataaaaactttcgcggcaagccggagcacaacccgcagcagtgcatcggctgcgcggcctgcgtcaacgcctgcccgtcgaatgccttaacggtggaaacggacctgaaaaccggcgagctggcctggcaatttaacctcgggcgctgcatcttctgcggccgctgcgaggaggtctgcccgacggtagccattcgcctgtctcaggagtacgagctggcggtgtggaaaaaagaggatttcctccagcagtcgcgctttgcgctgtgcaactgccgcgtctgcaagcgtccgttcgccgtgcaaaaagagatcgactacgccatcgcgctgctgaagcacaacggcgacgtgcgtgcggagcatcaccgtgaaagcttcgaaacctgcccggagtgcaaacgtcagaaatgcctgctgccgtctgaccgcatcgatttaacccgtcatatgagagaggccagctga

SEQ ID NO: 523651 - DNA, 1710 bp, Stenotrophomonas maltophilia
atgtctgaagaaaagaaaggtcagcagtatctcgccgcgttgcatcaggctttcccgggcgtggtgctggaggagtcatggcaaaccaaagaccaggtaaccgtcaccattaaggtgaactacctgccggaagtggtggagtttctttactaccagcagggcggctggctgtcggtgctgttcggcaacgacgagcgtcagctgtgcggcaactatgcggtgtactacgtgatgtcgatggagcagggcgagaagggctggctcaccgtgcgcgtcgaagttgacccgaacaagccggagtacccgtccgtcacgccgcgcgtacccgccgccgtctggggcgagcgcgaagtgcgcgacatgtacggcctggtgccggttggtctgcctgacgagcgtcgtctggtgctgccggacgactggccggatgaactctatccgctgcgcaaggacagcatggactaccgccagcgtccggccccgacaaccgacagcgaaacctacgagttcatcaacgagctgggcagcaagaagaataatgtggtgccgatcggcccgctgcacgtcacctctgacgaaccgggccacttccgcctgttcgtcgacggcgaaaacattatcgacgccgactaccgcctgttctacgtccaccgcggcatggagaagctggcggagacccgcatgggctacaacgaagtcacgtttctttctgaccgcgtgtgcggcatctgcggctttgcccacagcaccgcctacaccacctcggtggagaacggcatggggatcgtggtgccggaacgcgcgcagatgatccgcgccattctgctggaggtggaacgcctgcactcacacctgctgaacctcggcctggcctgccacttcgtcggctttgactccgggtttatgcagttcttccgcgtgcgtgaggcatcaatgaagatggcggagatcctcaccggggcgcgtaaaacctacggcctgaacctgatcggcgggatccgccgcgacctgctgaaagacgacatgatccagacccgccagctggcgcagcagatgcgccgcgacgtgcaggagctggtggacatgctgctcagcacgccaaacatcgagcagcgcaccgtcgggattggtcgtcttgacccggaaatcgcccgcgacttcagcaacgtcggcccgatggtgcgcgccagcggccacgcccgcgacacccgcgccgatcacccgttcgtcggctacggcctgctgccgatgaccgtgcacagcgagcagggctgcgacgtcatctcccgcctgaaggtgcgcatcaacgaggtgtttactgcgctgaacatgatcgactacggcctcgataacctgccgggcggcccgctgatggtggaaggcttcacctacattccaaaccgctttgccctcggattcgccgaagcgccgcgcggggatgacattcactggagcatgaccggcgacaaccagaagctctaccgctggcgctgccgtgcggcgacctacgccaactggccaaccctgcgctacatgctgcgcggtaacaccgtctctgacgcgccgctgatcatcggcagcctcgacccgtgctactcctgcaccgaccgcatgaccgtcgtggacgtgcgcaagaagaaaagccaggtggtgccctacaaagagcttgagcgctacagcatcgagcgtaagaactcgccgctgaaataa

SEQ ID NO: 523652 - DNA, 942 bp, Stenotrophomonas maltophilia
  misc_feature (299)..(308): n is a, c, g, or t
atgagtttgttactggcaatacttcaggcgctggtgctgttcgccgccgcgccgctgctgtcgggcatcacgcgcgtggcgcgcgcccggctacacaaccgtcgcgggcctggcgtgctccaggagtaccgcgatctcttcaagctgctctcccgtcagagcgtcgcgccggatgcctcaggttgggtgttccgcctgacgccgttcgtgatggtcggcgtgatgctgaccatcgccaccgcgctgccggtagtgacggtgggctcgccgctgcccgtgcttggcgatctgattacgcnnnnnnnnnngattacgctgatctacctcttcgccatcgcgcgtttcttctttgcgattgcgggcctggacaccggcagcccgtttacgggtatcggcgccagtcgtgaggcgatgctcggcgtgctggttgagccaattctgctgctggggctgtgggtcgccgcgcaggttgctggctcgacccacatcagtttcatcaccgacaccgtttaccactggccggtttcacgttcgctcccgctggtgctggcgctctgcgcctgcgcgttcgccacctttatcgagatgggcaagctgccgttcgatctcgcggaagcggagcaggaattgcaggaggggccactcaccgagtacagcggctacggctttgcggtgctgaagtggggcatcagcctcaaacagctggtggtgttgcagatgttcgtcggcgttttcttcccgtgggggcagatgacgcacttctctgcgggcggcctgctgctggccgttgtggtggctgcgctcaagctgcttatcggcgtgctggtgattgccctgtttgaaaacagcatggcgcgcctgcgttttgtcgaaacgtcacgcattacctgggctggttttggttttgcatttttagcgttcgtctccttgctggtggcgtga

SEQ ID NO: 523653 - DNA, 1815 bp, Stenotrophomonas maltophilia
atgaacgcgatagttatgatgaccagcggcgtggcctggtttgccaccgccgctgtcctggcgctgctcctctccttccataaaacgctgagcggctggatcgccggtatcggcggagcggtcggcagcctgatgacgctggcggcgggcggcgttgtcctgatcgacggccaatccgtcgacaccctcatcccgctgatccaccacgccgttgagcttacgccgctaaatgccatctggctggtcacctttggtctgtgtgggctgtttatcagcctgtttaatatcgactggcaccgccatcagcacaccaacgccaacggcctgctggttaacctgttgatggccgccgcggtctgcactgttgtcgccagcaacctcggcgcgctggtggtgatggctgaaatcatggccttgtgcggcgtgttcctgaccggatgcagcgcctccggcaagctgtggtttgcgctcggacgactcggcacgctgctgctggcgctggcctgctggctggtgtggcagcgtttcggcacgctggactttgccgtgcttaacggccagccgctggggaatgacgtctggctgttgggcgtagtcggttttggcctgctggccgggattatcccgctgcacggctgggtgccgcaggcgcatgccaatgcctcggccccggctgccgcgctgttctccaccgtggtgatgaaggtcggtctgttcggcatcctgacgataaccctgacgggcggccagccgccgctgtggtggggcgtggcgctgctgattgcgggaatgatcaccgcatttgtcggcgggctgtacgccctgatggagcataacatccagcgcctgctggcgtaccacaccctggagaatatcggcatcatcctgctcggcatgggcgcgggtgtcagcgggctggcgctcaaccagccggcgctgattgccgccgggtttattggcggtctgtatcaccttatcaaccacagcctgtttaaaagcaccctgttcctcggcgcgggcagcgtctggtttcgcaccgggcaccgcgatattgaaaagctcggcgggattggcaaaaaaatgcccgtcatttcgctggcgatgctggtcgggctgatggcgatggccgcgctgccgccgctgaacggctttgccggggagtgggtgatctatcagtccttcttcgcgctcggccagagcgacgcgtttatcgcgcggctgctcggcccgctgctggcggttgggctggcgattaccggggcgctggcggtgatgtgtatggcgaaggtttacggcgtcaccttcctgggcgcgccgcgcacccgcgaagcggaaaacgcctgttgcgccccggtgctgatggccaccagcgtggtcgcgctggcgctgtgctgtatcgcaggtggggttgccgcgccgtggctgctgccgcttctgggccacgccattccgctgccgctggctacggcgcataccgtcgtgtcccagccgatgatggcgctgctgctgattgccgcgccgctcctgccgttcgtgctgatgctgttcttcagacgcgaccgtctcgcctcccgctcgcgcggcgcggcgtgggcctgcggctacgaacacgagcagtcgatggtcatcaccgcccacggtttcgccatgccggtgaaggagaacttcgccgccgtgctgaagctgcgccactggctgaacccggtgggctgggtgccgggttggcagagtgccgccgtgcccgtgctgttccgtcgcctggcgctgatcgagctggcggtgctggtggtgattgtcatttcacgaggagcctga

SEQ ID NO: 523654 - DNA, 609 bp, Stenotrophomonas maltophilia
gtgaaccgttttgtaattgctgactcgacggtctgtattggctgtcgaacctgtgaggcggcgtgctcggaaacacaccgcctgcacgggctacagtccatgccgcgcctgcgcgtcatgcgtaatgagaaagagtctgccccgcagctctgtcaccactgtgaagacgcgccatgcgcgggcgtctgtcccgtcaatgccatcacccgcgttgacggcgcggtacagctgaacgaaagcctgtgcgtgagctgcaagctgtgcggcatcgcctgtccgtttggcgccattgagttttccggcagccgtccgctgcatattccggcgaatgccaacaccccgaaagcgccgcctgcgccaccggctccggcacgcgtgagcacgctgctggactgggtgccgggcattcgcgccgtcgcggtgaagtgcgacctgtgcagcttcgatgaacaaggtccggcctgcgtgcgcacctgtccgaccaaagcgttaattctggttaatattcgcgacatcgcccgcaccagcaaacgcaagcgcgagttgaccatcaatactgacgtcggcgatctttcgctgctgcgggcgcttaacgagggggcgaaatga

SEQ ID NO: 523655 - DNA, 465 bp, Stenotrophomonas maltophilia
atgactatttgggaaattagcgaaaaagcggattacatcgcgcaacgtcatcagcagcttcaggatcagtggcacctctactgcaactctctgattcaggggatcaccctgtcaaaagcccgtctgcaccatgccatgagctgcgcggcgcagggggatatgcgctttgtgttgtttggacacttcacgatttttgtcaccctggcggagagcttcaacagccacaccattgagtattacgttgagacaaaagagggtgaaaaacagtgtattgcgaaagcccaactgatggccgacggcatggtggacggtcacgtcagcacccgcgatcgccagcaggtgctggagcactatctggagaaaatcgcgccggtttataacggcctctacgctgccgttgagcacgatcagccgatcaacctgaaacagctgatcgacggaaaatcctccgcgaacgtggcctga

SEQ ID NO: 523656 - DNA, 351 bp, Stenotrophomonas maltophilia
atgcacgaaatcaccctctgccagcgggcactggaacttatcgaacagcaggctgtgcagaaccatgcgaagcgcgtgaccggcgtctggctgaaggtcggggcgttttcctgcgtcgagaccagcgccctcaccttctgttttgagctggtgtgccgcggcacgctggcggagggttgcgcactgcatatcgaggagcagcaggcggagtgctggtgcgagcagtgtcagcagtacgtcacgctgctgtcatcgaaggtacagcgctgtccgcagtgccagagcagcgggctgcgcatcgtggcggatgacggtatgcagatccaacgcctcgaaatcgagaaggagtaa

SEQ ID NO: 523657 - DNA, 864 bp, Stenotrophomonas maltophilia
atgtgtagtacctgcggttgcgctgaaggcaacctgtatatagaaggggatgaacaccgcccccactccgcgtttcgctccgcgcccttttcccctgccccacgtcccgcggcggcactgaccggcatcacctttgcgccgcagcgttcagacgcgggcgacctgcattacggccacggcgaagcgggcacccacgcgccgggcatcagccagcgcgagatgctggaggtggagattaacgtgctggacaaaaataaccagctcgccgcccgcaatcgcgcccgctttgccgcccgtcaacagctggtactgaacctggtctccagccccggctccggtaaaaccaccctgctgaccgaaaccctcaaacgactgaataaacgtgtctcctgcgccgttatcgaaggcgatcagcaaacggtaaacgacgcggcgcgcatccgcgaaaccggtacgcccgcgattcaggtcaacaccggcaagggctgccacctggacgcgcagatgattgccgacgccgccccgcgcctgccgctggcggataacggcatcctgtttattgaaaacgtcggcaacctggtctgcccggcaagcttcgacctcggcgagcggcataaagtggcggtgctctccgtgaccgaaggggaagacaagccgctgaagtatccacatatgtttgccgccgcctccctcatgctgctgaacaaagtcgacctgctgccgtacctgaatttcgacgtggataagtgcctggcttacgcccgggaagtgaacccggacattgagatcctgctggtttccgccacgcacggcgacgggatggatgcctggctgaactggctggagagcgaacgatgtgcatag

SEQ ID NO: 523658 - DNA, 273 bp, Stenotrophomonas maltophilia
atgtgcataggcgtccccggacaaattcattcgatcgacggcaatcaggccaaagtggaggtctgcggcatcctgcgcgatgtcgatctgacgctggtgggcagccacgatgagaccggcgcatcgcgtctcggccagtgggtgctggtccacgtggggtttgccatgagcgtgattaatgaggaagaagcccgcgacacgctggacgcgctacagaatatgttcgacgttgagccggacgtgggtgccctgctgtatggtgaggaacgataa

SEQ ID NO: 523659 - DNA, 1122 bp, Stenotrophomonas maltophilia
atgcgttacgttgatgaatatcgcgcgcctgagcaggtgttgcagcttatcgatcgcctgaaaacccgcgcgtccctgctggaatacacgaaagaaaaaccgctgcggatcatggaggtgtgcggcggacacacccacgccatcttcaaatttggcctcgaccagctgctgccggagaacatcgaatttatccacggccccggctgcccggtgtgcgtgctgcccatggggcgcatcgacagctgtctcgacatcgccagccgccccggtgtgattttttgcacctttggcgacgccatgcgcgtaccgggaaaaaatggctcgctgctccaggcgaaggcgcgcggcgcggacgtgcggatcgtctactcaccgatggatgccctgacgctggcgatggctaatcctgagcgtaaggtggtctttttcgggctgggttttgaaaccaccatgcccgccaccgctatcactctccagcaggcgaaagcccgcaacgccactaacttttactttttctgccagcacatcacgcttattcccacgctgcgtagcctgcttgaagcaccggacaacggcatcgacgccttcctggcaccaggacacgtcagcatggtgatcggcacagaagcctacggttttatcgctgaacagtacaatcgtccgttagtggtggctggtttcgagccacttgatctactgcaaggcgtgaccatgctggttgagcagaaaatagcggccctgagtgtggtggaaaatcagtatcgccgcgtggtgcccgatgcaggtaacagacgggcacagcaggcgatagccgacgtgtttagcgtcgaaggcgacagcgagtggcgcggactggggttgattgccgaatccggcgtacacctgacgcccacgtatcgcgccttcgacgccgaagcgcatttccgcccgcagccgcagaaggtgtgcgacgatccccgcgcccgctgtggcgacgtactcaccggcaaatgcaaacctcatcactgcccgttatttggcaacgcctgtaacccgcaaaccgcgtttggcgcgctgatggtctcttccgaaggggcatgcgccgcgtggtatcactatcgcaaccaggagtgtgaagcatga

SEQ ID NO: 523660 - DNA, 1011 bp, Stenotrophomonas maltophilia
atgaacacggtggaaatggcgcacggaagcggtggacaggcgatgcagcagttgattaacaggctgttcatggaagcctttaacaacccctggctcgccgagcaggaagatcaggcgcgtattgacctcgcggccctgactgcccacggcgacaggctggcgttctctaccgacagctacgtgattgacccgctgttcttcccgggcggcgatatcggcaagctcgccgtctgcggcacggcaaacgacgtggccgtcagcggcgcgatcccccgctacctctcctgcgggtttatcctcgaagaaggcttacccatggagacgctcacggcggtggtcaacagcatggcgcacaccgcccgcgaggcggggatcgccatcgtgaccggggataccaaggtggtgcagcgcggcgcggcagataagctcttcattaacaccgccggaatgggggcgatccccgccaacattcactggggcgcgcagcagctttgtgcaggcgacgtgctgattgtcagcggcacgctgggctgccacggggcaaccatcctcaacctgcgcgaaggcttagggctggatggcgagctgcacagtgactgcgcggtactcacgccgctgatccagacgctgcgcgacatgccgggtgtaaaagccctgcgcgacgccacgcgaggcggcgtgaacgccgtcgtacacgaatttgccgcaagcagcggctgtggaattgaactgaccgagcgcggcctgcccgttaagcctgctgtacgcgggctgtgcgagctattagggctagacccgcttaactttgccaacgaaggcaagctggtgatcggcgtggaacgtacggtggcggaagccgtacttgaacaactgcgcgcacatcccttagggaaagacgcggccatcatcggcgacgtggttgagcgcaaaggggtgcgcctgaccgggctttacggcgtgaagcgcacgctggatctgccgcacgctgaaccgttaccccgaatttgctag

SEQ ID NO: 523661 - DNA, 2073 bp, Stenotrophomonas maltophilia
atgccgtatacaccgatgagcgatcttggacagcagggcctgtttgacatcacgcgcacacttttacaacagcccgacctcggcgcgctgagcgatgccctgacgcggctggtcaggcaatcagcgctggcggacagcgccgccattgtgctctggcatagcgcaacccaccgcgcgagctatttctcaacgcgtgataatggcaaaatcttcgaatatgaagatgaaacgtttctggcccacggtccggtgcgacgtattctctcccgcccggaagcgctgcactgcaattttgaccagtttcgccaggcctggccgaagctggcagagagcaacctttaccacccgttcggccactacagcatgctgccgctggcggtggaagggcaaatttttggcggctgcgagtttatccgtaataacgaccagccctggaccgaggcggagtacgagcggttgcataccttcacgcagattgtggccgtcgtggcagagcagatccaaagccgcgtcaccaataacgtggattacgacctgttgagccgcgagcgcgataatttccgcattctggtcgccatcaccaatgccgtgctgtcgcgtctcgatatggacgaactggtgagcgaagtcgccaaagagatccatcactatttcaggatcgatgctatcagcattgcgctgcgcggcaaccgtaagggcaagctgaacatctactccacccactacctcgacgaagctaacccggcgcacgagcaaagcgaagtggacgaagcgggaaccctgtctgaacgggtatttaaaagcaaagagatcctgctgttaaacctcagcgagcaggatccggtagcgccctacgagcggatgctgtttaacacctggggcaacaagatccagaccctgtgcctgctgccgctgatgtccggcaacaccatgctcggcgtgcttaaactggcgcagtgcgatgaagccgtatttaccaccgccaacctgaagctgctgcgccagatcgccgaacgtatctccattgcgctggataacgccctcgcctatcaggagatccaccgtctgaaagaacggctggtggacgaaaacctggcgctgaccgagcagctcaacaatgtggacagcgagtttggcgaaatcatcggacgcagcgatgccatgtacaacatcctcaagcaggtggagatggtggcgcagagcgacagcacggtgctgatcctcggtgaaaccggcacagggaaagagctgattgcccgggcgatccacaacctgagcaaccgcaacagccgccggatggtgaagatgaactgcgcggcgatgcctgcgggcttactggaaagcgacctgttcggccacgagcgcggcgcgtttaccggcgccagcagccagcggctgggccgttttgaactggcggataaaagctcgttgttcctcgacgaagtgggcgatatgccgctggagcttcagcctaagctgctgcgcgttttgcaggagcaggagttcgagcgtctcggcagcaacaagctgatccagaccgacgtgcgtctgattgccgccaccaaccgcgatctgaaaaaaatggtcgccgaccgcgagtttcgcagcgatctttactatcgtctgaacgtcttcccgatctgcctgccgccgctgcgcgaacgcccggaagatattccgctgctggtgaaagcctttaccgcgaagattgcccgccggatggggcgaaatatcgacagtattcctgccgaaacgctacgcaccctttcggcgatggagtggccggggaacgtgcgcgagctggaaaacgtcattgagcgcgcggtcctgctgacgcgcgggaacgtgctccagctctccctgccagaggttactctctctgaaacgaccgtggccgcaagcgagcttgcgaaagagggagaagatgaatatcagctcattatgcgagtgctgaaggagaccaacggcgtggtagccggaccgaaaggtgcggcgcaacggctggggctgaagcgtactaccctgctctcgcgtatgaagcgtctgggaatcgataaagagagcctgaaataa

SEQ ID NO: 523662 - DNA, 345 bp, Stenotrophomonas maltophilia
atgtccggtaaacgtatttcacgagaaaaaaagacgatcgccagaatgatcgccctgtacgaaaacaggtgtccgcacgccataaaagaagaggggcactattcggcgcttaaggcttatgccgataagcggctggataaatgcgtgtttggtgaggaaaaacctgcctgcaaacagtgcccggtgcactgttatcagcccgcccgacgggaagagatgaagcaggtaatgcgctgggcagggccacgtatgttatggcgtcatccgattctgaccatccgacatctgatcgacgatcgtcgtccggttccggaattaccggaaaagtatcggcctaaaaaataa

SEQ ID NO: 523663 - DNA, 231 bp, Stenotrophomonas maltophilia
atgcaacagatcgcgatcgccaaaccctatcggcacttaaaagtgggttacttcagaaaacgtcatgaagaccgtaaaacgaaaattccaaaacgctacagcgtacacgcagcgctgagcctgaaaggcgactggcttgaacaagcgggatttaccaccaactcgcaggttcgggtgggcgtcgagcacggaaaaatcatcattgaattaatagcggaagatgcctcgtaa

SEQ ID NO: 523664 - DNA, 2562 bp, Stenotrophomonas maltophilia
atgagcacaatcgacaatttcgacgcgcatacgccgatgatgcagcaatacctgaagctgaaggcacagcatccggaaattctgctgttttaccgtatgggcgatttttacgagcttttttatgacgatgcgaaacgtgcgtctcagctgctcgacatttctctgacgaaacgtggcgcgtcggcaggcgaacccatcccgatggcgggtatcccgcatcacgcggttgaaaactatctggcgaagctggtgaaccagggcgaatctgtcgctatctgcgaacaaattggcgacccggccacgtcgaaaggccccgttgagcgcaaggtcgtacgcatcgtgacgccgggaaccatcagcgatgaagccctgcttcaggagcgccaggataacctgctggcggcgatctggcaggacggtaaagggtttggctacgccacgctggatatcagctccggtcgttttcgcctgagtgaaccggctgaccgtgaaaccatggcggctgaactacagcgcaccaatccggcagaactgctttatgcagaggatttcgccgagatggcgctgattgaaggtcgccgcggcctgcgtcgtcgtccactgtgggagttcgaaattgataccgcgcgccagcagctgaacctgcaatttggcacgcgcgatttgattggctttggtgtggaaaatgccccgcgcgggctatgtgctgcaggctgcctgttgcagtacgtgaaggatacgcagcgtaccgccctgccccatatccgttcaattaccatggagcgtcagcaggacagcatcatcatggatgccgccacgcgccgcaacctggagatcacgcagaacctcgctggcggcatggaaaatacgctggcgtcggttcttgacagcacggttacccccatgggcagccgtatgctcaaacgctggctgcatatgccgatccgcaacaccgaaacgctgattggccgtcagcaaaccattgccgcattgcaggatcgttacaccgaattgcagccggtgctgcgtcaggtgggtgaccttgagcgtatcctggcgcgcctggcattgcgtaccgcgcgtccacgcgatctcgcccgtatgcgtcacgctttccagcagttgccggaactgcgcgctcagctgggagagatcgacagcgcgccagtgcaaaagctgcgcgaaaccatgggcgaatttaccgagcttcgcgaactgctggaacgcgccatcattgatgcgccgcctgttctggtgcgggatggcggggttattgctccgggttataacgaagagctggacgaatggcgtgcgctggccgatggcgcgacggattatctggataaactggaaatccgcgagcgtgaacgtctggggctcgacaccctgaaagtcggctacaacgcggtacacggttactatatccagatcagccgtgggcagagccacctggcaccgattcactacgttcgccgccagacgctgaaaaatgccgagcgctacattattcccgagctgaaagagtacgaagacaaagtgctcacgtcgaaaggtaaagcgctggcgctggagaaacagctgtatgacgagctgttcgacatcctgatgccgcatctggctgaccttcaaatgagcgccgctgcgctggccgagctggatgtgctggtaaacctggccgagcgcgccgaaacgctgaactacacctgtcctacctttactgacaagcccggcattcgcattaccgaaggtcgccatccggtggttgagcaggtgctgaacgagccgtttattgccaacccgttgaatctgtcaccgcagcgaagaatgctgatcattaccggccccaatatgggcggtaaaagtacctatatgcgccagacagcccttatcgcgcttctcgcctacattggcagctacgttccggcgcagaaggttgagattggccctgtcgaccgtatcttcacccgtgtgggtgcggctgacgatctggcgagcggtcgctctacctttatggtcgagatgaccgaaaccgccaacattctgcataacgcgacagagaacagtctggtgttgatggacgaagtaggacgcggtacctccacctatgacggcctgtccctggcctgggcgtgcgcggaaagtctggcgaataaaatcaaggcgctgacgctgttcgcgacgcactatttcgaactgacacagctgccagagaaaatggaaggcgtggctaacgtccaccttgatgcgcttgagcacggcgacaccatcgcctttatgcacacggtgcaggacggcgcggcaagcaagagctatggcctggccgtcgccgcgctggcgggtgtgccgaaagaggtgattaagcgcgcgcgtcagaaattgcgtgagctggaaagtttgtcaccgaatgcggcagctacgcagatagatggtacgcagatgtcactgctggcggtgccggaagagacctctccggctgtggaagcgctggaaaatctcgatccggattcgctgacgccgcgtcaggcgctggagtggatttatcggttgaagagtctggtttag

SEQ ID NO: 523665 - DNA, 222 bp, Stenotrophomonas maltophilia
atgatttgtccacgttgtgccgatgaacatattgaggtgatggcaacatcaccggtgaaaggtgtctggacggtataccagtgtcagcactgtctgtatacctggcgcgataccgaaccgctgcgccgtaccagccgcgagcattacccggaagcgttccgcatgacgcagaaggatattgatgaggcaccgcaggtgccgacgatcccgccgctgctgtaa

SEQ ID NO: 523666 - DNA, 1425 bp, Stenotrophomonas maltophilia
atggcatttgatgatttgagaagcttcttgcaggcgctcgatgagcaagggcagctgctgaaaattgaggaagaggtaaacgctgagccggatttagccgccgccgccaacgctaccggacgcattggcgatggtgcgcctgcgctgtggttcgataatattcgcggcttcaccgatgcccgtgtggtgatgaacactatcggctcgtggcaaaaccacgctatttcgatggggctgccagcaaataccccggtgaaaaaacagttcgacgagtttattcgtcgctgggacaaattccccgtctcgccagagcgtcgtgcaaatccggcctgggcgcagaacacggtggacggggaagacatcaacctgttcgacattctgccgctgttccgcctgaacgacggtgacggaggcttttatctcgataaagcgtgcgttgtctcccgcgatccgctcgaccccgatcacttcggcaaacagaacgtcgggatctaccgtatggaagtgaagggcaagcgtaagctcggcctgcaaccggtgccgatgcatgatatcgcgctgcatctgcataaggcagaagagcgcggcgaagacctgcctattgccattacgctgggtaacgatccgatcatcaccctgatgggcgccacgccgctgaaatacgatcaatccgagtatgagatggccggtgcgctacgcgaaagcccgtatccgattgcgacggctccactgaccggtttcgatgtgccgtgggggtcggaagtgatcctcgaaggggtgattgaaggccgaaaacgtgagattgaagggccattcggtgagtttaccggacactactccggcgggcgcaacatgacggtcgtgcgcattgataaagtctcttaccgaaccaaacccattttcgaatctctctacctggggatgccttggaccgagattgattatctgatggggcccgctacctgcgtgccgctctatcagcagctgaaggcggaattcccggaagtgcaggcggtaaacgccatgtacacccacggcctgctggcgattatctccaccaaaaaacgatacggcggttttgcccgtgcggtcgggctccgcgctatgaccacgccacacggtctgggttacgtgaaaatggtgattatggtggatgaggacgtcgatccgtttaacctgccgcaggtgatgtgggcgctgtcatcgaaggtcaatccggctggcgatctggtgcagctaccgaatatgtctgtgctggagcttgaccccggctccagcccggcggggatcactgacaagctgatcattgatgccaccaccccagtcgctccggacaaccgtggtcactacagccagccggtacaggatctccctgaaaccaaagcctgggccgaaaaactgaccgcgatgctggcggcacgttaa

SEQ ID NO: 523667 - DNA, 603 bp, Stenotrophomonas maltophilia
atgagattgattgtgggaatgacgggcgcgacgggtgcgccattaggcgtggcgttgttgcaggcgctgcgggaaatgccggaggtggaaacgcatctggtgatgtcgaagtgggcaaaaaccacgattgagctggaaacgcccttcactgcgcatgacgttgctgcactggcggatgtcgtccatagcccggccgatcaggctgccaccatctcctccggctcgtttcgcaccgacggcatgatcgtcattccgtgcagcatgaaaacgctggcgggtatccgcgcgggctacgccgaagggctggtagggcgtgcggcagacgtggtgctgaaagagggacgcaagctggtgctggttccgcgtgagacgccgctcagcaccatccatcttgagaacatgcttgccctttcccgcatgggcgtggcgatggtgccacctatgcctgcgtactacaaccacccgcaaaccgccgatgacataacccagcatatcgtgacccgcgttctcgaccagtttggtctggagcataaaaaagcccgacgctgggaaggtttgcaggcagcgaaacatttttcacaggagaataaagatggcatttga

SEQ ID NO: 523668 - DNA, 408 bp, Stenotrophomonas maltophilia
atggagttaagacaagaagcgtttcacctgctacgtcagctttttcaacagcataccgcccagtggcaacacgcattgcccgaactgaccaaaccacaatatgcggtgatgcggtcaattgctgaaaatcctggcattgagcaggttgccctgactgaagtcgcggtgagcaccaaagcgacgctggcagaaatgctgagccgcatggaagcacgcggcctggtcaggcgcgagcacgatccggcagacaagcgccgtcggtttgtctttctgacggccgaaggtgaggccctgcttgagagcagtaaaccgattggaaatgaggtggatgaggcgtttttagggcgccttaacggcgcggaacgagagcaattttcagcgctcattaaaaagatgatgcagggttaa

SEQ ID NO: 523669 - DNA, 888 bp, Stenotrophomonas maltophilia
atgcttaatttacagcgtacggcgatgtttatcgccgtagcggacaccggcagtttcaccgccgcggcggaggcgatggggctgacaaaagcggtggtcagctttcatattcgtcagcttgaagaggagctgggcgtcaccctgttgctgcgaaccacccgacgcctgacgctgaccgaagcggggaagctctttcatcaacgaagcgtgatgctgttacgggatgcagagcgattgcaggatgatgttcgcgccaaccacgccgggctgacgggagaactgcggatcaccaccacgcccgagtatggctcgcaggtggtggtgcctttgctggctgagtttagccagctgcaccctgatctccgcgtgcggcatgtctcgtcctctttgcatgccgatcttatcgccgagcgcttcgatgtcgctatccggctcggcacgcttgcagattcgcgctaccacgccgcgttgatgacctccttcaccatcctgcccgtggcgacgccatgctggctggcaaaccatccggttgactcgctggagcagctggcggaagcggactggatcattcacgagcgtttaacgtcgccgctgcgctggcaggtgagaggcgttgatcggcatcctgtttcctttgagatcagaaaagcgccgcgcctgtatgcagacagtgcccaggcgttgatggcttttgccctcgcgggatgtggcgtggcgctgttgccggagtggctggtgcgtaacgcactggatgcagggaagctggtctcgctgttaccggagtacacgtttgctcagcagggcatctatgctgtttatcccgatgcccggcatgtgcccgcgaaagtgcgaacatttattgattttatgcgcgtcagggttacttaa

SEQ ID NO: 523670 - DNA, 1203 bp, Stenotrophomonas maltophilia
atgacgtatcgcagcaaaatcgccgtcgtctttctgctcggctttttccttgatttgataaacatgtttattgccagcgtcgcctttccggcgatggctcacgcattcaataccacaccttccgcgcttgcctgggtaagtaacggatacattgccgggctgacgttagtcatcccattcagcagtattctgacgcgccgcgtcgggccgaagcgcgttattctgctctcactgcttctctttagcgcggcctccgttgcggcgggtttctcatcttcgctggaacgtttgattgcctggcgcgtcgtgcagggcgccggagggggtttactgatcccggttggtcaggcgctgacctggcaacagtttaagcctcatgagcgggccagactcacctcggcggtgatgctggtcgcgctgcttgcccccgcctgctcaccggctgtgggcggcatgctggttcagacattcacctggcgctggatattttatgccaccctgcccgtcgccattgtcacctttgttttggcctgcgcgtggcttaaaacagaaccgtcaccgataaacaccaccagaatagtaaacctgtctttgctgacggatccgctgttgcgcttatccatgcttatctatgtatgcgtacccggcatctttattggcgtgaacgtaacgggcatgtattaccttcagagcgaggccaatatgacgcccaccgcaacgggcatgcttatgctgccgtggtctgtggcatcgtttttggctatcaccgcgacaggacgctatttcaaccatatcggcccgcggccgctggtggtcatcggttgccttttgcaggcggtgggcattctgcttttaattaacgtcggcccggctatgctgttacctgccgttgcgtttgcgttaatgggtgcggggggaagcctttgcagcagtacggctcagagcagcgcgtttttgacaacgcggcgggaagatatgcctgatgccagtgcgctatggaatctgaatcgtcagttgagcttttttgcgggtaccctgctgctggcgcaggcgctgagcttcatgcaagcttattttacgccgctggccgcctggcacgggatgtttatttttgccgcagttatcactctgctgcccgtactgtacgtctaccgtcttaataacacgcagttacttgcgcaactgcaacaggagcaaccatga

SEQ ID NO: 523671 - DNA, 378 bp, Stenotrophomonas maltophilia
atgacccatttcgaacaagagatcctcgacatccacgtcgcccttgaaaactggttaggtgcaggcgaaggcgaacaggacgccctgctcgcccgtttccgtccggattttctgatggttccaccgagtggcgcccatttagatcatcacgctctggccaaatttttatatgcgcagcggggaacccgacccgggctcaggatcggtattgatgcgttaacaacgcttcagacatgggacaacggcgcggtgctccattaccgggagacgcaaacccggcctggccagcccgtcaacgtgcgctggtcaaccgcggtgcttaatcaggaaggggataacatcacctggcgtttgctgcacgaaacggcgcaatcgtaa

SEQ ID NO: 523672 - DNA, 993 bp, Stenotrophomonas maltophilia
atgagtcagaatacgctgaaagttcatgatttaaatgaagacgcggaatttgatgagaacggatcagaggcttttgacgaaaaagccttagtagaagaggaacccagtgataacgatttggctgaagaagagctgttatcgcagggtgccacacagcgtgtgctggacgcgactcagctttaccttggggagattggttactccccactgctaacggccgaagaagaagtctatttcgcacgtcgtgctttgcgtggtgatgttgcctcgcgtcgtcgcatgatcgaaagtaacctgcgactggtcgtgaaaattgcccgccgttacggcaatcgtggtctggctctgctggatctgattgaagagggcaacttaggtctcatccgcgcagttgagaagtttgacccggaacgcgggttccgtttctcaacctacgcgacctggtggattcgtcagaccatcgaacgggctattatgaaccagacccgtacgattcgactgccgatccacatcgtcaaagagttgaatgtttatctgcgtaccgcgcgcgagttgtcccataaactggaccacgagccaagtgcggaagagatcgcagagcaactcgacaaaccggttgatgacgtaagccgtatgctgcgtctcaacgagcgcattacctcggttgacaccccgctgggtggtgactccgaaaaagcgctgctggacatcctggccgatgaaaaagacaacggcccggaagacaccacgcaggacgatgatatgaaacagagcatcgtcaaatggctgttcgaactgaacgccaaacagcgtgaagtgctggcacgtcgtttcggtttactggggtatgaagctgcgacactggaagatgtcggccgtgagattggcctgacccgtgaacgtgttcgtcagattcaggttgaagggctacgccgcctgcgtgaaatcctgcaagggcaaggtctgaatatcgaagcgctgttccgcgagtaa

SEQ ID NO: 523673 - DNA, 1125 bp, Stenotrophomonas maltophilia
atgagcgcgggaagcccaaaattcaccatcagccgtgttgcggcattatcactggtttcgctctggctggcaggctgtacaagttcaaataacgcgcctgcgcccgtcagttccgttaatggaaccagcggctcgggtaacacgtccagcggaatgttgatcacccctccgcctaaaatgggcacctcaacggcgcagcaaactccgcagatccagccggttcagcgtccagttacgcagcctacgcagattcaggcagtggaacagcctgttcagactgaaaatggccgcatagtgtataaccgtaagtatgggaacattccgaaaggtagctataccggcggcagcacctataccgtgaagcgcggcgatacgctgttctatattgcctggatcaccgggaacgatttccgcgatctggcacagcgaaacaacgtccaggccccgtatgctctggaagtcgggcaaacgcttcaggttggcaacgcgacggggacaccgcttacgccaggcaacaccgtttcagcggccgacgtaactgcgcaaaataacagcgttactcctgcacaaaaaaccaccacggtggttgcttcacaacctgtaattacgtattctgaggattcaggtgatcagagtgctaacaaaatgttgccgaataataaaggtactgcgactgttgtcacagcatcgactacggcacctgtggttagctctactgtaccgactgcaagcagtcagaatgccagctcgtcaatcaccacctggcgctggccaactgacggcaagattatcgagaacttcgctacctctgaggggggcaacaaagggatcgatatcgcaggcagtaaaggacaggcaatcatcgcgaccgcagacggacgcgttgtctatgccggtaacgcactgcgcggttacggtaatcttattatcatcaaacataacgatgattacctgagtgcctacgcccataacgacactatgctggtccgggaacaacaagaagttaaggcggggcaaaaaatcgctaccatgggtagcaccggaaccagttctacacgcttgcattttgaaattcgttacaaggggaaatccgtaaacccgctgcaatatttaccgcagcgataa

SEQ ID NO: 523674 - DNA, 627 bp, Stenotrophomonas maltophilia
atggtaagtaaacgtgtacaaactcttctggaacaattacgcgcacaggggatcgccaacgagcaggtgctgaacgcgcttgcccaggttccccgtgagaagtttgtagatgaggcgtttgaacacaaagcgtgggaaaacgtggcgctgcccattgggcaaggccagacgatttcgcagccctacatggtggcgcgtatgacggagcttctggagctaacgccagagtcccgggtgctggaaattggcaccggttcagggtatcaaaccgcgatcctggctcaccttgtgcaccatgtctgttcggtggaacggattaaagggttgcagtggcaggcgcgccgtcgcctgaaacagcttgatttacataatgtatcgacacgccacggcgatggatggcagggttggcaggctcgcgccccgtttgacgccatcattgtcacggcagcgccacctgaaatccccactgcgcttctttcgcagctggacgagggtggcattcttgtattgcccgtcggcgatgagcagcagcttttgaagcgcgttcgtcgacgcggcggcgagtttattatcgataccgtggaagccgtgcgctttgtgcccctggttaagggcgaactggcctga

SEQ ID NO: 523675 - DNA, 762 bp, Stenotrophomonas maltophilia
atgcgaatattgctgagtaacgatgacgggatccatgcgccaggtattcagacgctggcgaaacacctccgcgaatttgcggatgtgcaggtcgtggctcccgatcgtaaccgcagtggcgcgtctaactcattgacgctggagtcttcacttcgcacctttacctttgagaatggcgatattgccgtccagatggggacgccgaccgactgcgtgtttctgggcgtgaacgcgctgatgcgcccgcggccggacgttgtggtctccggcatcaatgccgggccaaatcttggcgatgatgtgatttactccggcaccgtggccgcggcgatggaagggcgtcacctggggtttccggcgctggcggtctcgttaaacggtcacacccactatgacacagccgccgcggtgacctgctccattctccgtgcgcttggccgcgagccgctgcgtaccggacgtatcctcaatattaacgtgccggacctcccgctggacgagatcaaagggatccgcgtgacgcgctgtggcagtcgccatcctgccgatcaggttattccccagcaggatccgcgcggcaataccctgtactggatcggcccgccgggagataaatgcgatgccgggccagacaccgacttcgctgcggtggatgaagggtacgtttccgttacgccgttgcacgtagatttaaccgcttatagcgcgcatgatgtggtgtcggactggttagatcgggtcggagtgaacgcgcaatggtaa

SEQ ID NO: 523676 - DNA, 1050 bp, Stenotrophomonas maltophilia
atgacggatttcgacaatctgacgtatctgcacggtaaaccgcagggcaagggtctgctgaaagccaaccctgaagatttcgtggtagtggaagatctgggttttgagccggacggcgaaggcgagcacatcctggtgcgcattctgaaaaacggctgcaacacccgcttcgtggcggacgcgctggcaaaattcctcaatattcacgcccgcgaagtgagctttgccggtcaaaaagataaacatgccgtgaccgaacagtggctttgcgcccgcgtgcccggcaatgccatgcccgatttaagcaaatttgagcttgagggctgtaaggtactggagtacgcccgccataaacgcaaattgcgtctgggcgcactgaaaggtaatgcctttaccctggtgttgcgcgaagtgaccgaacgcgaggacgttgaaaaacgcctgaaggccattaacgaacgcggcgtaccaaactatttcggcgctcagcgctttggtatcggtggtagcaacctgctgggcgcgctgcgctgggcgcaaagcggtgcaccggtgcgcgatcgtaataaacgcagtttttggttgtcggcggcccgcagtgcgttgtttaatcagattgtgagcgaacggctgaaaaaaccggacgcgaatcaagttgttgtcggcgatgcgctacaattagcgggacgcggaagctggtttgtggcaacggccgaagagatggccgatgtccagtcgcgcgtggacgctaaaacgctgatgattaccgccgccttgccgggttcaggcgactggggaacccagggcgaggcgctggccgctgagcagtcagcggtggcggatgcgccagaattacaatcgttgctggtgcgggaaaaggtcgaggcggcacgtcgtgcgatgctcctctacccgcaacagctgagctggaactggtgggatgacgtaaccgtcgagttacgcttctggctgccggcaggtagctttgccaccagtgttgtcagggaacttatcaacacgtcgggtgattatgcgaatattgctgagtaa

SEQ ID NO: 523677 - DNA, 480 bp, Stenotrophomonas maltophilia
atgcgtattggacacggttttgatgtacacgcctttggcggcgttggcccaattatcattggcggcgtgcgcattccttacgaaaaaggtctgctggcgcattctgatggcgacgtggcgctgcatgcgctgaccgacgcgctgctgggtgccgccgcgctgggcgacattggcaaactgttcccggacaccgatcctgcttttaaaggcgcagacagccgcgaactgctgcgcgaagcctggcgtcgtattcaggccaaaggctacaccctcggcaacgttgatgtgacgatcattgctcaggcaccaaagatgctgccgcacatccctcagatgcgcgtgtttatcgctgaagatctgggttgccatatggacgacgtcaacgtcaaagcgaccaccacggagaagctgggctttaccggtcgtggcgaaggcattgcctgtgaagccgtggcgctgctggtgaaggcggccaaatga

SEQ ID NO: 523678 - DNA, 711 bp, Stenotrophomonas maltophilia
atggcagcaactttttcggacgtctgtgccgtggtgccggccgcaggttttggccggcgtatgcagacagaatgtcctaagcagtatctctcaattggcgataaaacgatcctcgagcacgccgtggcggcgctgctggcgcatgcccgggtgaaacgcgttgttattgccatcagccccggcgatgcacgttttgcgcagctcccgctggcgaatcatcctcagattaccgtcgttgacggcggcgcagagcgggctgactccgttctggcgggcattcaggctgccgggaacgcgcagtgggtgctggtgcacgatgccgcgcgtccctgtctgcatcacgacgatctgtcgcgtctgctggccctgagtgaaaccagtaaagtgggcggcattctggccgccccggtgcgtgacaccatgaagcgtgccgaaccgggtaaaccagcgattgcccacaccgtcgagcgcgtcgatctatggcacgcgctgacgccacaattttttccccgcgaattactccacgactgcttaacgcgagcgcttaaagaaggtgcgaccattacggacgaagcctcggcgctggagtattgcggtttccaccccacgcttgttgaaggacgcgctgataatataaaagtgacgcgcccggaagacttacagctcgcggaattttatcttacccgtacgacccctcaggagaaggcataa

SEQ ID NO: 523679 - DNA, 312 bp, Stenotrophomonas maltophilia
atgggtaaactaacgctgctgttgctggctttgctggtctggctgcaatattcgctgtggttcggcaaaaacggactgcacgactacagccgggtgagcgatgacgtcgcggcacagcaggcgacaaacgccaaacttaaagcgcgtaacgatcaactttttgctgaaattgatgacctcaatggcggccaggaggcgattgaggagcgcgcacgcaatgaacttagtatgactaagccgggcgaaacgttttatcgcctggttccggatgcgtctaaacgcaatcagggctccgcacaaaacaatcgataa

SEQ ID NO: 523680 - DNA, 327 bp, Stenotrophomonas maltophilia
atgcgcaacagtgaaaactacatgattaccaccgggtcggaaccgttaacgaccgacgacgagacgacctggtccttccctggggcgattgtcggctttgtgtcgtggctactggcgctgggtatcccgtttttgatctacggtggaaacaccctctttttcttcctctatacctggcctttcttcctcgcgctgatgcccgttgcggttgtggtgggcgtggcgctgcactcccttttcaacggcaagctcctgtatagtacgctcatcactatcgccaccgttgtggtcatctttggcctgctgtttttatggctgatgggctaa

SEQ ID NO: 523681 - DNA, 606 bp, Stenotrophomonas maltophilia
atggctgcccatgatgagaacgtcgtctggcatcctcatccggtcaccgtcgcccagcgcgaacagctccacggtcaccgtggggttgtgctgtggtttaccgggctgtctggctccggtaaatccacggtggcaggcgcgctggaagaggcgctgcatcagcagggagtgagcacctacctgctggacggcgacaacgtgcgtcacggactgtgcagcgatttagggttcagcgatgaagaccgtaaagagaacattcgccgggtgggagaagtcgccagcctgatggcggatgccgggctggtggtgctgacggcgtttatctcaccgcaccgcgccgaacgtcagatggtgcgtgagcgcgtgggccggaatcgcttcattgaagtgtttgtggatacgccgctggcaatctgcgaagcgcgcgatccgaaagggctgtataaaaaagcccgcgcgggagagctgcgaaacttcaccggtattgactcggtttacgaagcgcctgaatcccctgagattcatctggaaggtcaacaattggtaacaaatttagtaagccaattattagacctgctcagacgggacgatattatcagatcctga

SEQ ID NO: 523682 - DNA, 1425 bp, Stenotrophomonas maltophilia
atgaatacgactattgcccaacaaattgccgatgaaggcggcgtagaagcttatctgcacgcccaacagtacaaaagtctgttgcgtttcctgacctgcggcagcgttgatgacgggaaaagtaccctgattggtcgtctgctgcacgacacgcgacaaatttacgaagatcagctctcttccctgcacaatgacagtaaacgccacggcacccagggcgaaaaactcgacctggcgctgctggtggacggcttgcaggcggagcgcgagcagggcattaccattgatgtcgcctatcgctacttctctaccgaaaagcgcaaatttattatcgccgacaccccggggcatgagcagtacacccgtaacatggcgaccggcgcgtccacctgtgacctggcgatcctgctgatggacgcccgtaaaggcgtgctggatcagacgcgtcgtcacagctttatctctacgctgctggggatcaaacacctggtggtggcggtgaacaaaatggatctggtggactacagcgaagcgcgattcgacgagatccgccagagctacctgacctttgctgaacagctgccgggcaacctcgatattcgctttgtgccgctgtcggcgctggaaggggataacgtcgcctctcagagcgcgaacatgccgtggtacagcggcccgacgctgctggaggtgctggaaaccgttgaaattcagcgcgtggttgagacccagccgatgcgctttccggtgcagtacgtaaaccgtccgaacctcgatttccgcggcttctccggcacccttgcgtccggctcggtcaacgtgggccagcgtgtgaaggtgctgccgtccggcgtggaatcgaccattgcccgtatcgtcacctttgatggcgatctggacgaagcaggggcaggtgaagcggtaaccctggtgctaaaagacgagattgacatcagccgcggcgatctgctggtcgacgcgcaggaaacgctggcggcggtgcagggcgcatccgtggacgtggtgtggatggcggaacagcccctgaccgcaggccagagctatgacattaaaattgccggcaagaaaacccgcgctcgcgtggacggcattcagttccaggtggacatcaacaacctgacccaccgtgacgtgagcgagctgccgctgaatggcatcggtctggtggatctgaccttcgacgagccgctggtgctggatccgtatcagcagaatccggtgacgggcgggctgatctttatcgaccgcctgaccaacgtcaccgtcggcgccgggatggtccgtgaaccaaacacgcaggctaccgtggcctctgagttcagcgcgtttgaacttgagctgaatgcgctggtgcgtaaacacttcccgcactggggcgcacgcgatttgctgggaggcaagtaa

SEQ ID NO: 523683 - DNA, 909 bp, Stenotrophomonas maltophilia
atggaccaaaaacgacttactcacctgcggcagctcgaagcggaaagtatccacattatccgcgaagtggccgccgagttctctaacccggtgatgatgtactccatcggtaaagattccagcgtcatgctgcacctggcgcgtaaagcgttttatccggggacgctgccgttcccgctgctgcatgtggataccggctggaaattccgcgagatgtacgagtttcgtgaccgtaccgccaaagcctacggctgcgagctgctggtgcacaaaaacccggaaggggtggcgatgggcatcaacccgttcgtgcacggcagcgccaagcataccgatatcatgaaaaccgaagggctgaagcaggcgctgaataaatacggttttgatgcggccttcggcggcgcacggcgtgacgaagagaaatcccgcgccaaagagcgaatctactctttccgcgaccgcttccaccgctgggacccgaaaaaccagcgtccggagctgtggcacaactacaacggccagataaacaagggcgaaagcattcgcgtcttcccgctctccaactggaccgagctggatatctggcagtacatctatctggaaaatattgagatcgttccgctgtatctggcagcagagcgcccggtcctggagcgcgacggcatgctgatgatgatcgacgacgatcgcattgatttacagccgggtgaagtgatcaaaaaacagatggtccgtttccgtactctcggctgctggccgttgaccggcgcggtggaatccagtgcgcagacgctgccggagatcatcgaggagatgctggtgtcgaccaccagtgagcgacagggccgcgtgattgaccgcgaccaggcaggctccatggagctgaagaaacgtcagggttatttctaa

SEQ ID NO: 523684 - DNA, 1359 bp, Stenotrophomonas maltophilia
gtggactatctccccctttttgccgccttgaaagaccgaccggtactggttgtcgggacgggtgaaattgccgatcgcaaaatcgcgttcctgcaacgcgccggggcgcaggtgcaggtcgttgcagaggcggattttgaagagtctcagatcgacagcgtggtgctggtgattgcggcaaccgaagatcgggcgctcaatcgccgaatctccgacgcagctcaggaccgtcaccgtctggtgaacgtggtagacgaccagccgctgtgctcgtttatcttcccgtcgattgttgaccgctcgccgctgctggtggcgatctcctccggcggcaccgcgccggtgctggcgcgcgtactgcgggaaaaaatcgaagcgctgctgccgaccagcctcgggcgcatggcggagaaggccagctactggcgcaaccaccttaaaacgcgtctgaccagcgtgacggaacgccgtcgcttctgggagcgtgtgtttcgcggccgctttgccagcctgatgcatgccggtaacgagacggcggcgcaacaaattctcgaagacgaactggataaccccggcagtacgggcggggagatcattctggtgggcgccgggccgggcgatgccgggctgctcacgctgcgtggcctccaggttcttcaggatgcggatgtcgtgttctacgaccatctggtcaccgacggtattcgcgaactgatccgccgtgacgcggagcaaatctgcgttggtaaacgtgccggcgagcactccgtgccgcagcacgacaccaatcaaatgctgattgccgccgcgaaagcgggcaagaccgtggtgcgcctgaaagggggcgacccgtttattttcggccgtggtggcgaggagttgcaggcggcagccgaagcgggcgtcccgttccaggtggtccccggtattacggcggcgtctgccgtcacggcctacgccggtattccgctgacccatcgtgattacgcccagagcgtgacctttgtgaccgggcattataaagccgacagcacgccgtttgactggtcgcatctcgcccagagccgacaaacgctggcgatttatatgggcacgatgaaagcggcagacatcagcgaacagcttattcagcacggtcgcgatgcgacgacgccggtagcagtgatttcccgcgggacacgcgtcgatcagcatgtcgccatcggcactttacaagaccttgcaaccctggcgaaagacgccccgatgcccgccctgatcgtggtgggagaagtggtgcagttgcacagctcgctcgcctggttccaacacacaaccgacacagaaggcttcggcgcttctgttgtaaatttggcttaa

SEQ ID NO: 523685 - DNA, 1044 bp, Stenotrophomonas maltophilia
atgttttccgcaatgcgccaccgattcgttgccctggcgctcggcgtttgctttatccttccggctcaggcaaaaaatcaatcttacggtgaaatagccagtatgcaggcgcggcatattgcgacggtctttccgggccgcatgaccggaaccccagccgaaatgctctcggcagactatattcgtcagcagtttgcggatatgggctatgagagcgacattcgcgctttccacagccgctacatctatacctcacgcaataaaacgcagaactggcataacgtaaccggcagcacggtcattgcggcgcacgaaggaaaggcggctgagcagattattattatggcgcaccttgatacctacacgccgatgagcgacgccgatgtcgataataacctcggcggcctgacgcttcagggactggatgacaatgcggcggggctgggcgtcatgcttgagctggccgaacgcctgaagaatattccgacgaaatacagcattcgctttgttgcgaccagcggtgaagaagaaggaaaactcggcgctgagaatctccttaagcgcatgaccgctgaggagaagaaaaatacgttgctggtgattaacctcgataatctgatcgtgggagataagctctattttaatagcggacagagcacgccgagcagcgtacgtaaactcacccgcgaccgcgcgctggcgcttgcccgcacgcatggcgtctatgccgcgacaaatccgggcggtaaccccgattatcccaaaggcacgggctgctgtaatgacggtgaagtgtttgataaggcgggcattccggtgctgtacgtcgaggcgactaactgggcgctgggcaaaaaagatggctatcagcagcgcgctaaatcgaaggcgttcccaaacgggaccagctggcatgacgtgcggctggataaccagcagcacattgataaaacgctgccgcagcggattgagcaccgcagccgggatgtcgtgaaagtgatgctgccgctggtgaaggagctggcgaaagcggggaaagcctga

SEQ ID NO: 523686 - DNA, 735 bp, Stenotrophomonas maltophilia
atgtccgtactcgatctaaacgcccttaatgacctgccaaaagttgaacgcattctggccctggcagaaactaacgcccaactggaaaagctcgacgccgaagggcgcgtggcgtgggcgctggaaaacctgccgggagactatgtgctttcgtcgagctttggcattcaggcggcggtcagtctgcatctggtgaatcagatccgtccggacattccggtgatcctcaccgataccggctatctgttcccggagacctatcagtttatcgacgagctgacggacaagctcaagctgaacctgaaggtttatcgcgcaaccgaaagcgcggcctggcaggaggcgcgttacggcaagctgtgggagcagggcgttgagggcatcgagaaatacaatgagatcaacaaggtcgagccgatgaaccgcgcgctgaaagatcttcatgcgcagacgtggtttgctgggctccgccgcgagcagtccgggagccgggcaacgctgccggtgctggcggtgcagcgtggcgtgttcaaagtgctgccgatcatcgactgggataaccgcacggtgtaccagtatctgcaaaagcacgggctgaagtaccatccgctgtgggatcagggctacctgtcggtaggcgacacccataccacgcgtaaatgggaaccgggaatggcggaagaagagacgcgattctttgggctgaagcgcgagtgcgggctgcacgaagggtaa

SEQ ID NO: 523687 - DNA, 1713 bp, Stenotrophomonas maltophilia
atgagcgaaaaacatcctggcccactggtggtcgaaggcaaactgactgatgccgagcgcatgaaggtagagagcaactacctgcgcggtaccattgccgaagatttaaatgacggcctgaccggcggtttcaaaggcgacaacttcctgctgatccgtttccacggtatgtaccaacaggacgaccgcgatatccgcgccgagcgtgccgaacagaagctggagccgcgtcacgcgatgctgctgcgctgtcgtctgccgggcggggtaatcactacgaaacagtggcaggcgatcgacaagtttgccggtgaaaacacaatctacggcagcattcgtctgaccaaccgtcagaccttccagttccacggcattctgaagaagaacgtcaagccggtgcaccagatgctgcactccgtgggtctggacgcgctggcgactgccaacgacatgaaccgtaacgtgctctgcacctcgaacccgtacgaatctgagctgcacgccgaagcgtacgagtgggcgaaaaaaatctccgaacatctgctgccacgtacccgcgcctatgcggagatctggctcgatcaggagaaagtcgccaccaccgatgaagagccgatcctcggtcagacctacctgccgcgtaagtttaaaaccacggtggtgatcccgccgcagaacgatatcgacctgcacgccaacgacatgaacttcgtggcgattgccgaaaacggcaagctggtcggctttaacctgctggtgggcggcggtttgtccattgagcacggtaacaagaaaacttacgcccgcaccgcgagcgagttcggcttcctgccgctggagcacacgctggccgtggcagaggcggtggtcacgacccagcgcgactggggtaaccgtaccgatcgtaaaaacgcgaaaaccaaatacaccctggagcgcgtaggcgtcgagacgttcaaagaagaagtggagcgtcgcgcgggcatcaagtttgagccgatccgcccttacgaattcaccggtcgcggcgatcgcatcggctgggtgaaaggcatcgacaataactggcacctgacgctgtttatcgaaaacggccgtattcttgattatccgggccgtccgctgaaaaccggcctgctggaaatcgcaaagatccacaaaggcgagttccgtattaccgccaaccagaacctgatcgtcgccagcgtgccggaaagcgataaggcgagaattgaagagctggcccgcgagcacgggttgatgaatgcggtgagcgcgcagcgtgaaaactcaatggcctgcgtgtcgttcccgacctgtccgctggcgatggccgaagccgagcgattcctgccgtccttcactgataaagtggaggcgattctggaaaaacacggtattccggacgagcatattgttatgcgcgtgacgggctgtccgaacggctgcggccgcgcgatgctggccgaactcggtctggtagggaaagcgccgggtcgctataacctgcacctgggcggtaaccgtatcgggacacgtattccgcgtatgttccgcgagaacatcaccgagccggaaattctcgattccctcgacgtgcttatcggacgctgggcgaaagagcgcgaagcgggtgaaggcttcggcgactttacggtacgtgcgggcatcattcgcccggtgctcgatcccgcaagggatttctgggagtaa

SEQ ID NO: 523688 - DNA, 1806 bp, Stenotrophomonas maltophilia
atgacaacacaggccccaccttcaaatttgcttccccttaacccggagcaactggcgcgcctccaggccgcgacttccgatttttcacccacccagcttgcctgggtctccggctatttctggggaatgctgaaccagcagccgggtgctgtggcaggcgtaccgccaacggccgttgaaattcctgccatcacgcttatctccgcttcgcaaacgggtaatgcccgtcgtgtggccgaagcgctgcgtgatgacctgctcgccgcgaagctgaacgttaacctggtcaacgccggggattataaattcaaacagatcgcgtcagaaaaactgctggtggtggtggcgtcaacgcagggggaaggtgagcctgctgaagaagccgtcgcgctgcataagttcctgttctcgaaaaaagcgccaaagctcgagggcaccgcctttgccgtcttcggcctcggtgatacgtcctatgaatttttctgccagtccggtaaagatttcgacagcaagctggcggagctgggcgcagagcgcctgctggatcgcgtagacgctgacgtggaataccaggctgccgccgccgaatggcgggcgcgcatcgttgaggtgctgaaggcccgcgtcccgaaagagacgccagcgcaggccgccgttaccgcagccggcaccgttaacgaaatccacaccagcccttacacgaaagaggcgccactgacggcgagcctgtcggtaaaccagaaaatcacgggccgtgattcagaaaaagacgtgcgccatatcgaaatcgatctcggtgactctggcctgcgttaccagcctggcgatgcgctgggcgtctggtatcagaacgatccggcgctggtgaaagagctggtcgagctgctgtggctgaaaggcgatgaaccggttaccgtggacggcaaaacgctctcgatctccgaggtgctccagtggcatttcgaactgacggtgaacaccgccaacatcgttgaaaactacgccaccttaacccgcagcgaatcgctccttccgctggtcggggataaggcgaagttacagcaatacgcggcgacaacgccgattgtcgatatggtgcgtttctctccggcacagctggatgctgacgcgctggtcggcctgctgcgtccgctgaccccgcgcctgtactccatcgcctcctcgcaggcggaagtggaaaacgaagtccacatcaccgttggcgtggtgcgttacgacatcgaaggccgcgcgcgcgcgggtggggcgtcaggcttcctggcagaccgcgtggaagaagagggtgaagttcgcgtctttttcgagcacaacgacaacttccgcctgccggcgaaccccgaaacgccggtgatcatgattggcccaggcaccggtattgcgccattccgcgcctttatgcagcagcgtgcggcagacgacgcgccgggtaaaaactggctgttcttcggcaacccgcactttactgaagatttcctctaccaggttgagtggcagcgctacgtcaaagagggcgtgctgacccgcatcgatctggcctggtcccgcgatcagaaagaaaaagtatacgtacaagacaaactgcgcgaacagggcgcagagctgtggcgctggatcaatgacggcgcccacatttatgtctgcggcgacgccaatcgcatggcgaaagacgttgagcaggcactgctggaagtgattgccgaattcggcggtatggatgccgaaacggcggatgaatttttaagtgagctgcgcgtagagcgccgttatcagcgagatgtctactaa

SEQ ID NO: 523689 - DNA, 363 bp, Stenotrophomonas maltophilia
atgtccaccacactgtttaaagatttcaccttcgaagccgcacaccaccttccacacgttcctgccgggcacaaatgtggccgcctgcatggacactcgtttatggtgcgtcttgaaatcaccggtgaagtcgatccccatacgggctggatcatggactttgccgaactgaaggccgcgtttaagccgacctacgatcgtctcgatcactactatctgaatgatattccgggccttgaaaacccgaccagcgaagtgctggcgaaatggatttgggatcagatgaaaccgcttgtgccgctgctgagcgcggtgatgatcaaagagacctgcacggcaggctgcgtctaccgcggggagtga

SEQ ID NO: 523690 - DNA, 2355 bp, Stenotrophomonas maltophilia
atgaatcagcggggagatgaattttgggtggagatccaggacattcgccactgcgtggaggatgaaggcgatacgctaacgttgctctgggtgctggaagggcgggctgagctgaataccgatgtgggacgtgacatcctggaggccaatacccttgccatcatcaaccgtcatcggcgctggcagttcacgagcgaaacggcaaatatcaccctgcgcgtgtccctttccgggcgctgggtggtccagctctgcaatgatttttttgtccatgattacgctataccggcagaagccggaggcgtctggccccaatgcgatgcgcttcgcgatctgctgcgccagcttcttgtggtcaccctcatcaacgacccacaccgctaccggctggaggcgtaccgctggctgagcgagatattgctgttgctgaccagccgctttcagcagcccgcccggtttttgtcccgtgaactttccccagcgcacagcaaacgcattgcccgggtgatagagcggatcaatgccagttattctcgccgtattacgcttgcggaaatcgccgcgagtgaatatgtctctgaagcctggctctctcgtctctttagaaaggaagtggggatcagtttcatgcagtacatcactaccctgcggctggaaaaggcggctgacgcgctccgtctgacgaaccgaccgctgcatcagattgcgcttgagcagggtttcgccagcacgcgtatgatgaccgatcggtttcggcgtgttcacaatatgtccccgggtgagtttcgtaaggcccggcgccagcacccggaggccacacgtgttcgtacggacaggtgtgagcagcgctatccggtggccatggataagctgtttagcctgctcaatgaaccggtggcgcgcggctggggagcctccccgcttatcgatcgcccgcagcaggagcagacactgtatcttgagcagcttaatcctctctccagctcgctgcgtcgtatgcgggtggtcattaccctgcgtgagctcgacgatttactgcgtgaggacgttcgtcagaatcttgaagcgataaatgaggccattcccatagagggaattgatatcgccgaaccttttctcagcagccgtctgtttgccaccgggtgggatgacccccagatggcgggctacgcctgctggtacaatctgcatcagctcttcacctggctggcaaaaaagcaatggacggtgctgctgcacaccggcgtaacgacccgtcgcgatctacttgcccgttttttacaacggtcggtcaatcatttttcgcccgagatcaccgcgggctggcactttgtcatgcactggtcaacacaggcgagtgaggagacccgggagcaggtctggctggcacagcaaaacgtcatacgcaactatctgccacaggcaaagtttggtttatggcatcgattttcacccgacagcgcgggcgtgagcgacaataccctgttcagctcagccatcctgatgcaggccgattttcttgcctgttcagccgatgccaatgaacttctcgatcctgcgcagcgggagccagcccaactctcttctacagaaaattatccggtacagaagatccgccagattatcgccgcccttcgtctgcgcaaatgttcgcttcccgtctggcttctctcctggaataccctcaccgggaacacgcgggcgacaaacggctggttttttcgtggggcgctgctgatgcagagcctgctcgggctatcggagcaggtctggctagggggattctggctcaattcgggccttcagggtgaagctcgtgcgaacaataccatcgatacgtcaagccttgcgctacagtacaaccatggtctcccacggccggtttattgggtactctggctctggcaacgcctgcggggcgaggtgctggtaaacgacgggcgtgttctgctcacgcgccattacaatggttaccagttgctgctgcgtaatgtggtggtttttaatccgctcctttccagtgaagaagcattcatccagcgttttcgccagcagtatcatttacacctgaagggaatgcgcggtatttggcgaattaaacgccatcttttcgatcagcataacggcgcgctctatccgttgcttgaaggggtaggcagcgaaagcggccctgacgaagagacgtggcgctggatagcgcacaaagcgcgtccaacgctttccctgtacgatgaacgcattgatgacggctggcaactgacagaatcactggagagtaatgcgctggtgctctatgagtttacgccgctcgtgcctcttgaggccgaaacggaggagattcactccccgcggtag

SEQ ID NO: 523691 - DNA, 1170 bp, Stenotrophomonas maltophilia
atgacacatccaattatcgaagctctgcgcggcaaagaggcccagttcactgaattacgtcgctattttcatcagcatcctgaaattggttttgaggagcacaatacgagcgatcgcgttgcggcgttgcttgaggaatggggatatgaggttcatcgcggcctggcgaaaaccggtgtggtcggcacactgaaggtgggtaacgggcctaaacgcctgggtctgcgcgccgacatggatgcgctgcctatgcaggaaaacagcggcaaggcctggagcagtaccgttgagggtaaattccacggctgcggtcatgacggccacaccacaacgctcctgtatgcagcggagtacctggcacgcacccgcaattttaacggcacgctgcaccttatttttcagcccgcggaagaacttctgtatggcggacgcgttatggtagaggacggtttgtttgacctgttcccctgcgaccacatttttggtctgcacaatatgccgtcacagcccgtcggaaaaattggtctgcgcgatggcgccatgatggcctcttcggacacccttcatattgaggttaacggcgtggggggtcacggtgcggtgccagaacataccgtagacgccaccctggttgcctgtcatatcactatcgctttgcagtccattgtttcgcgcaatatcaccccttttcagcctgccgtcgttaccgtaggcagcattcaggctggacatgcccccaacatcatcaacgacaaagtattgatgaaacttaccgtgcgcacgctggatgaaagcgtgcggcaaaccgtgctacagcgcatccatgatatcgccgttgcgcaggcggaaagtttcaatgccacggctaccattcgacacattaatggcagcccggtactgaaaaacaatccgcaagccaatgagatggtgcgcaacgtcgccaccgatctgttcggtcaggattccgtcgcggaggtgaatgcgtttatgggcagcgaggactttgcgttcatgctcgagaaaaatcccaatggctgttatttcacccttggcgctggcgatgagcctgaccgctgcatggtgcataacccgggctacgactttaacgacactattctcctcaccggcgcggcgctgtgggccgcactgaccgaacactatctgcgctga

SEQ ID NO: 523692 - DNA, 1398 bp, Stenotrophomonas maltophilia
atgagtaccgtttccctgacagacgcatccgcctacgccggtaacgatcggctgctggcgggtatcgtcatgagcgttctgaccttctggctgtttgcccagtcggttatcaacgtggttccggccatgcagaatagcctcgacattgccctcgaaacccttacgctggccgtcagcctgagcgcgttgtttagcggctgttttgtcgtagcctgcggtgggtttgccgataagtttgggcgcatgcgcctgaccatgacaggcctgattttgagcatgatcggaagcggtctgctgttcatttcatgggagcccgtcctgtttctggtgggaagagcgatacaggggctatccgcggcctgcatcatgcccgccacgctggcgctgattaagacctggtatgaagggaaagcacgccagcgcgcaatcagcttctgggttattggttcatggggcgggagtggcctgagctcgtttgtgggaggcgcaatcgccaccacgctgggctggcgctggatttttattttgtcgatagtggtggctctggtcgcgctattacttatccgcgccacgccggaaagccgcagccctgatgcgtgtcgacacaagctggatatcagcggcctggtgagttttgtccttatgctggtgctgttcaatctgtttatcagcaaaggacacagctggggctggagcagcagtttatcgcttcttgtactgtgtggagccgtgattgcactgatgtgctttgtcgttaccgggcggcggaagggcgatgcggcgttgatcgatttcgccctgtttaaaaaccgtgcctatagcgcctcggtattctcaaatttcctgctcaacggctgcattggcaccatgatgatcgccagcatctggttgcagcaaggccatcatctgtcaccgctacagaccggcatgatgacgctggggtatctggttaccgtactggcgatgatccgggtgggtgaaaaactgcttcagcgctatggcgccaggctgccgatgatgaccggcccgctgctgaccgcaacaggtattacgctgatttcatgcaccttcttaagcaaagaggtctacattgtcaccgtctttctgagcaatattttattcgggctggggctcggatgttacgccacgccctcaacggacacggcggtaatgaatgcccctgaaaacaaagtgggggtggcttcagggatctataagatgggcagttccctgggcggcgcaatggggatcgcggtcaccgcatcgctgtacgccctatggctgccgatgggaacggccagtgccgcgcagtatgccttgcttttcaacagtgcgatttgtcttgggtcagccgtagtgacctgggcattactgccaacaacaaaagccccgcgttaa

SEQ ID NO: 523693 - DNA, 672 bp, Stenotrophomonas maltophilia
atgcagtacccgattaacgagatgttccagaccctgcaaggcgagggttactttaccggcgttcccgctatctttattcgtttacagggatgcccggttggctgcgcctggtgtgataccaaacatacgtgggataagctcgcagatcgggaagtgtcgctgttcagcattctggcgaaaaccaaagagagcgataaatggggcgcgggcagcgcggaagatctgcttgccataattggtcgtcagggctggacggcgcggcacgtggtgatcaccggtggggaaccctgcattcacgatctgatgcccctcaccgaactgctcgagaagaacggctatagctgtcagatcgaaaccagcggtacccatgaagtgcgctgctcccattcaacgtgggtaacggtttcaccgaaagtgaatatgcgcggcggttatgacgtactgtcgcaggcgcttgagcgtgcggatgagatcaaacatccggtggggcgcgtgcgtgacatcgaagcgctggacgaactgctggcgacgctgacggacgaaaagcagcgcgtgatcgcgctacagcctatcagccagaaagacgatgcaacccgtctgtgcattgaaacctgtatcgcccgcaactggcgcctgtcgatgcagacgcacaaatatctgaacattgcctga

SEQ ID NO: 523694 - DNA, 708 bp, Stenotrophomonas maltophilia
atgaaaactgtactggataacctgaaaggaaaactggtcgtctcctgccaggcgctggaaaatgaaccgctgcacagcccgtttattatgtcgcgaatggcgctggcagcagcccagggcggtgccgctgcgatccgcgccaatagcgtggtggatatcaaggctatcaaagggctggtctcactgccggtcatcggcatcatcaaacgggactatccggatagcgaggtgtttatcaccgcgacgctcaaagaagtggatgagctgatggcggtcgccccggacatcgttgcgctggatgcgaccgcccggaaacggcccggtggcgtatcgctggacatgctgatcgcgcagatccgcacccgttacccttcgctgctgctgatggcggatattgccaccgtgcaggaggccgtgaccgcgcaggcgctggggtttgattgtgtcggaaccaccctttacggttatacggcagagaccgcgggccattcgctaccggaaaatgactgcgcgtttttgaaagaggtgctgtctgccgtcacgatccccgtgattgccgaaggtaacgtggatacccccgatcgcgcggccaggtgtctggagttgggggtgcatacggttgtcgtcggcggggcgatcacccgaccgcagcaaattacggaacggtttatggcggcaattggcgcgcaaagcaccgatggagcatga

SEQ ID NO: 523695 - DNA, 1560 bp, Stenotrophomonas maltophilia
atgatgcaaatgttcagcggagcgtcttccggcggatggtttgaaaaagcgcagcgctttggcaaatcctttatgttacctatcgccatactgcccgcagcaggtctgttgttggggatcggcggggcgctatcgaatccgaatacgcttaccgcgtatccatttttagacgttggctggctacaggccatatttaccatcatgagcagtgcaggctcgattgtgtttgcaaacctgtcggtactgtttgctgttggggtcgccgttgggctggcaaaaaatgataaaggtacggcagggctggcggcattactcgcttatctggtgatgaatgccactatcaatgcgctgctgatcctgaccggaaaactggcgcatgagaacccgggcgccgtagggcagggcatgacgctgggtattcagacgcttgaaacgggcgtgtttggtggggtcgttattgggcttgtgacctgcgcactgcatcatcggtttaataaaatcgcgcttccgcaattcctgggcttttttggcggctcacgcttcgtacccattatcagctcactggcggcgatactcgtcggcgcgctgatgaccgtggtctggccgcattttcagaagctgatctttggccttggcggtctggtggatgccaccggctatctgggaacattgctgtacggcttcatcctgcgcatgcttggcccgtttggcctgcaccacatcttttatctgccgttctggaccaccgcgcttggcggcagtgaaattgttaacggtcacctggttgagggcacgcagcggatcttctttgctcagctcgcggacccgaacacccagcacttctatgagggcacgtcgcgcttcatgtccgggcgctttattacgatgatgtttggcctgctgggcgcctgcctggcgatgtaccacacggctaaacccgagaacaagaagcgcgtagccgggctgctgctgtcagcggcgttaacctctttcctgacgggcattaccgagcccatcgagttctcattcctgtttattgcgccggtgctgtacgtcattcatgcgctgtttgacgggctggcgtttatgctcgcgcacatgctgcatatcaccatcgggcaaactttctccggcgggtttattgatttcgtgctgttcggcattttgcagggtgaagcgaaaactaactggatgttcgtcccgctggtaggcgtaccgtggttcttcctttactactgtactttccgctatctgattaaacgttttgattttgccacgccgggccgtgaaaaggaggcgttggctgacgaggctaccctgccgcaaagcgagcgcgccgcagcggtgatcgccgggctgggaggaaaagacaatctggatgacgttgactgctgcgccacgcgccttcgcgtcacggtgaaagacggtagcaaagtcaatgaagcagcactgaaagcgaccggcgcgcgcggcgttatcgtccgcggcaacggtgtccaggtcatctatggcccgcacgtcacccttatcaaaaacgaagtggaagagatcttatcgtaa

SEQ ID NO: 523696 - DNA, 825 bp, Stenotrophomonas maltophilia
atgtcggaccatgaaaacctgctgctgaagctacgccaggaggcttccgggtacagcccaacgcaacaaaaactgggggagtttgttctcaacgatcctgccagggtgctctacctgacgatcaccgagctggcgcgtgaaagcggcaccagcgaggccagcgtcacacgcctttgccgcacgctgggctgtaagggatataacgaatttaaaatggcgcttgcgctggatattcagcagggtttgccagagcgtcaggcaggagatgcgatagataacgtggtggatgagtctgtccaggcgctgcaagataccgcaaaactcctcgaccgggcccagcttgaacaggcgacactggccctgcatcaggcgcaatcagtgcaaatttacggggtggcagccagcgcgattctgggggagtatttgcattacaagctgctgcgactcggcaaacctgcacagctgtttagcgatatgcatcgcgccgccatgaatgcgacgacgctctcgaaagagacgctggtggtggccatctcaagttctggctctacacgggatctgcttcacgtggtgaaactcgcccgcaagcgtggcgttaaggtactggcgctcagcaatacaccccgcagcccgctggcctccctgagcgatttacagctggttgcagccaagcccgagggaccgctgagcgcgggtgcgctcaatgccaaggttggcgtgatgctgctggttgaactgcttaccacttcccttattgcagtagacagccattacggtgacgtaagccagcaaacggccagcgccacgctgccgcttctgctatag

SEQ ID NO: 523697 - DNA, 1299 bp, Stenotrophomonas maltophilia
atgtccaaaatcgttaaagtcatcggtcgtgaaatcatcgactcccgtggtaacccgaccgttgaagccgaagttcatctggaaggtggtttcgtcggtatggctgctgctccatcaggcgcatctacaggttcccgcgaagcgctggaactgcgtgatggcgacaaatcccgtttcatgggcaaaggcgtactgaaagcggttggcgctgttaacggtcctattgctcaggctatcgttggcaaagatgccaaagatcaggctggcatcgacaagatcatgatcgatctggacggtactgaaaacaaatctaacttcggtgcgaacgcaatcctggcagtttccctggcgaacgccaaagcagcagctgctgctaaaggtatgccactgttcgagcacatcgctgaactgaacggcaccccaggcaaatactccatgcctgtaccaatgatgaacatcatcaacggtggtgagcacgcagacaacaacgttgatattcaggaattcatgattcagcctgttggcgcgaaatccctgaaagaagcggtgcgtatgggttctgaagtgttccacaacctggctaaagttctgaaagctaaaggtatgaacactgctgttggtgacgaaggtggctacgcgccaaacctgggttctaacgcagaagcgctggctgttatcgctgaagcggttaaagcagcaggctacgagctgggcaaagacatcaccctggcgatggactgtgcagcatctgaattctacaaagacggtaaatacgttctggctggcgaaggcaacaaagcgttcacctccgaagagttcacccatttcctggaagacctgaccaaacagtacccaatcgtttctatcgaagacggtctggacgagtctgactgggatggtttcgcataccagaccaaagtactgggcgacaaaatccagctggttggtgacgatctgttcgtaaccaacaccaagatcctgaaagaaggcatcgagaaaggcatcgttaactccatcctgatcaaattcaaccagatcggttctctgaccgaaacgctggctgcgatcaaaatggcgaaagacgctggctacaccgctgttatctctcaccgttctggcgaaactgaagacgctaccatcgctgacctggctgtgggtaccgctgctggccagatcaaaaccggttctatgagccgttctgaccgtgttgctaaatacaaccagctgattcgtatcgaagaagcgctgggcgaaaaagcaccttacaacggtcgtaaagagatcaaaggccaggcataa

SEQ ID NO: 523698 - DNA, 1638 bp, Stenotrophomonas maltophilia
atgacaacgaactatatttttgtgaccggcggggtcgtatcctctctgggtaaaggcattgccgcagcctccctcgcagccattcttgaagcccgtggcctcaatgtgaccatgatgaaactggatccgtacatcaacgtcgatccaggcaccatgagcccaacccaacacggggaagtgttcgttactgaagacggcgctgaaaccgatctggatcttggccactacgagcgtttcatccgtaccaaaatgacccgtcgtaacaactttacgactggccgtatctactctgacgttctgcgtaaagagcgccgtggtgactacttgggcgcgaccgtgcaggtcatcccacacatcactaacgccattaaagagcgtgtccttgccggtggcgaagggcatgacgttgtgctggttgaaatcggcggtaccgtaggggatatcgaatccctgccgttcctcgaagcgattcgtcagctggcggtagatattggtcgtgagaacgcgctgttcatgcacctgacgctggtgccttacatggcggcagcaggtgaagtgaaaaccaaaccgactcagcactctgttaaagagctgctctccatcggtattcagcctgatatcctagtttgccgttccgatcgtgcgattccggcgaacgaacgcgcgaaaattgcattgttctgtaacgtgcctgaaaaagccgttatttcaatgaaagacgtcgattccatttataaaatcccgggcctgttgaaatcacagggtctggacgattatatttgtaaacgattcagcttgaactgtccggaagctaacctgtctgaatgggagcaggtgatttacgaagaagccaatccgggcggcgaagtgactatcggtatggtcggcaagtatattgaactgccggatgcctataagtcagttatcgaggcgctgaagcacggtggtctgaagaatcgcgtctccgtcaacatcaagctgattgattcgcaggatgttgaaacgcgcggcgtcgaaattctcaaagatctggatgcgattctcatccctggcggcttcggctaccgtggtgttgaaggcaagatcgccactgcacgctatgcgcgtgaaaacaatattccatacctcggcatctgcctgggtatgcaggttgcgctgattgaatttgcgcgcaacgtagcgggaatggaaaacgcgaactctacggaatttgtgccagactgtaagtaccctgtcgtggcgctgattacggaatggcgcgacgaagacggtaacgtcgaagtccgtaccgagaagagcgatctgggtggcaccatgcgtcttggcgcacaggcctgccagctgtcagacgatagcgtggttcgcaagctgtacggcgagccggtgattaccgagcgccatcgtcaccgctatgaagtcaacaacatgttgttgaaacaaattgaagctgcaggtctgcgtgttgcgggccgttccggggatgatcagttagtcgagatcatcgaagtgccaaaccatccgtggttcgtggcctgccaattccacccggaatttacttcaacgccgcgtgacgggcatccgctgtttgcaggcttcgtgaaagccgccagcgagtaccagaagcgtcaggcgaagtaa

SEQ ID NO: 523699 - DNA, 792 bp, Stenotrophomonas maltophilia
atgactcaaatcgaccgcctgcttggcatcatgaaacgcctgcgcgacccggaaaacggctgcccgtgggataaagagcagactttcgccaccattgcgccttacacgctggaagagacctacgaagtgctggacgcgatttcgcgcgaagatttcgacgacctgcgcggtgagctgggcgacctgctgttccaggtagtgttctacgcacagatggcgcaggaagaggggcgctttaactttgacgacatctgcgccgctatcagcgacaagctggagcgccgtcatccgcatatctttggcgatgcctccgcaggcaacagtgcggaagtgctggcgcgctgggagcagatcaaaagcgccgaacgcgctgaaaaatcccagcactcggcgctggacgacattcccctgaaccttcctgcgctgatgcgcgcgcacaaaattcaaaagcgctgctcggcggtagggtttgactggacctctctcggcccggtgctggaaaaagtgcacgaagagatcgacgaagtgatgcatgaagcgcagcaggccgttgtggatgaagcaaagctggaagaggagatgggcgatctgctgttcgcgaccgtcaacctttctcgccacctcggtgtaaaagcggaaaccgccctgcaaaaagcgaacattaaattcgaacgtcgcttccgcgaagttgagcggattgtggcctcgcgcggcctggaaatgagcggcattgacctcgaggcgatggaagaagtctggcaggaagtaaaacgccaggaacatgatctctaa

SEQ ID NO: 523700 - DNA, 2232 bp, Stenotrophomonas maltophilia
atggttgcggtaagaagtgcacatttaaataaagctggtgagtttgaccctcaaaaatggatcgcaagtctggggatttccagccagcagtcgtgtgaacgcttaaccgaaacctgggcctattgtttacgcacaacgcaggggcatccggacgctgaactgctgttgtggcgcggcgtggagatggttgaaattctctccatgcttaacatggatatcgaaacgctacaggccgcactgctgttcccactggcagatgctaacgtggtgacggaagacgtgctgcgtgaaagcgtcggccagtccgtcgtggcgctcatccacggcgtgcgtgatatggccgccatccgtcaactgaaagccgcgcaaacggattctgtctcttccgagcaggtggataacgtccgccgcatgctgctggcgatggtggatgattttcgctgcgtggtgatcaagctggccgaacgggttgcccatctgcgcgaagtgaaggatgcgccggaagacgagcgcgtcctggccgccaaagagtgtacgaatatctatgcgccgctggcgaaccgtctgggtatcgggcaactgaagtgggagctggaagattactgcttccgctatctgcatccggcggaatacaaacgcattgcaaaattgctgcacgaacgccgcatcgaccgcgaacactatatcgaggaatttgtcagcgggctgcgccagtcgatgaaagaggagaatgtgcgcgccgaggtctacgggcgtccgaagcacatctacagcatctggcgcaaaatgcagaagaaacatctcgcctttgacgagctgtttgacgtgcgcgccgtgcgtatcgtggcggagcgtctccaggactgctacgccgcgctggggatagtacatactcacttccgccatctgccggatgagttcgatgactacgtcgcgaaccccaaaccgaatggctatcagtccatccacaccgtggtgcttggccccggcggcaaaactgtggaaattcagatccgtactaaacagatgcacgaagacgccgaactgggcgtcgccgcgcactggaagtacaaagaaggcacttccggcggcgcgcgctccggacacgaggaccgtatcgcctggctgcgtaagctgattgcgtggcaggaagagatggccgactccggcgaaatgctcgacgaagtgcgcagtcaggtcttcgacgatcgcgtctacgtctttaccccgaaaggggatgtggttgatctgccggcaggctctacgccgctcgatttcgcctaccacattcatagcgacgtggggcaccgttgcatcggggcgaagatcggcggacgtatcgtaccgtttacctaccagctacagatgggtgaccagattgaaatcatcacccagaagcagccaaacccaagccgcgactggctgaatccaaacctcggttacgtgaccaccagccgcgggcgctctaaaattcacgcctggttccgcaagcaggatcgtgacaagaatatccttgccggtcgtcagatccttgacgacgagctggagcatatcgggataaacctgaaagaggcggagaagttcctgctgccgcgctacaacttcaacgagctcgacgaactgttagcggcgattggcggcggcgatatccgcctgaaccagatggtgaacttcctgcaagcgcagttcaacaagccaagcgcggcagagcaggatgcggcagcgctgaaacagctccagcagaaaacctacgctccgcagcagcgcagcaaggacaatggccgcgtggtggttgaaggggtgggtaacctcatgcaccatattgcccgctgctgccagccgataccgggtgacgatattgtcggctttatcacccaggggcgcgggatttcaattcaccgctccgactgtgatcagcttgctgagctgcaatcgcatgcgccggaacgtatcgtggaagccgtctggggtgaaagctactccgctggctactcgctggtggtgcgcgtcactgccaacgaccgcagtggcctgctgcgcgacatcaccacgattctcgccaacgagaaggtcaacgtgctgggcgttgccagccgcagcgatacccgcgagcagcttgccaccatcgatatgaccatcgaaatctataacctgcaggtgctgggccgggtgctcggtaaactgaaccaggtgccggatgtgattgacgcgcgtcgtctgcacggcggctaa

SEQ ID NO: 523701 - DNA, 1299 bp, Stenotrophomonas maltophilia
atggcgcaattctactctgcaaaacgacgcgtgacgacgcgtcagatcataactgttgaagcctctgacctcgatccttttggacagggggtagcgcgtcacaagggtaagacactgtttatcacaggtttgctgccaggagaacgcgcagatattacgctgacggaagacaaacgccagtatgcgcgcggccaggtcaagcgccgtcttaatgatagcccggagcgcgtgacgcctcgctgcccccattttggcgtttgcggaggctgtcagcaacagcatgccagcacagaattacagcaaaaaagtaaaagcaacgcgctggcccgcctgctaaaacatgacgtcagtgacatcgttgctgaccagccgtggggctaccgtcgccgcgctcgcctgagtctaagctaccagccaaaaactgaacggctggagatggggtttcgcaaagccagctccagcgatatcgtctccatcacgcaatgccctgttttggtgccccaacttgaggcgctgctcccggccgtgcaccattgtcttgcatcgctggatggggtgcgttcgctgggccatgtcgaactggtgctggccaacggcggcccgctgatggttctgcgccacaccgcaccgctgtccagggcagatcgcgaaaaactggaacgcttttcgcattctcatgagcttgcgcttttcctcgcgccgcaaagcgagatacttgagcaggttagcggagacgcgccctggtatgcgtcagacgggctacgcttaacgttcagcccgcgggattttatccaggtcaatgacggcgtgaaccagcagatggtggcgaacgcgctggcgtggcttgacgtccagcccaccgatcgggtgctcgatctgttctgcggtatgggtaactttaccctgccgctggcccgcaaagcagcaagcgtggtcggggtggaaggcgttgaggcgctggtggcgaaaggccaggagaacgcccaacagaacggcttgcaaaatgtgacattctttcatcaaaatcttgaggatgatgttactcagcaaccgtgggctaagcagggctttgataagatcctgctcgatccggcgcgagcaggtgcgccgggcgtgatgcagcatataattaaactcgcgcctgaacgcgtggtctatgtttcctgtaacccggcgacgctggcccgtgacagcgaagcattattgagcgggggttaccagattcggcgtctggcaatgctggacatgttcccgcacactggacatctggaatcaatggtgttgttcgagcacatctaa

SEQ ID NO: 523702 - DNA, 2760 bp, Stenotrophomonas maltophilia
atgaccaactacagcctgcgcgcgcgcatgatgattttgatcctcgctcctaccgttctcatcggtttgctgctgagcattttctttgtggtgcatcgctataacgatttgcagagacagcttgaagatgccggggccagcattatcgaaccgctggccgtctccagcgagtacggaatgaacctgcaaaaccgtgaatccattggtcagttaatcagcgtgctgcaccgccgtcattcagagattgtgcgcgccatttccgtttacgatgagcataaccgtcttttcgtcacctcgaatttccatctggatcccacgtcgctgaaaatcccggaaggtacccctttcccgcgtcatctcacggtcctgcggcgcggcgatatcatgatcctgcgcacgccgattatctcagaaagctattcacccgacgaatccgcccagtccgatgcgaagtccagcaataatatgctgggatatgtggcgctggagctggatctcaagtcggtgcggctccagcagtacaaagaaatattcatctccggcgtgatgatgctgttctgtatcggcatcgcgttgatcttcggctggcggctgatgcgcgacgtcacggggcctatccgtaacatggtgaataccgttgaccggatccgccggggtcagctggacagccgcgtggaaggcttcatgctcggcgagctggatatgctgaaaaacggcatcaactcaatggcgatgtcgctggcggcttatcacgaagagatgcagcacaacgttgaccaggccacctctgacctgcgcgaaacgctggagcagatggagatccagaacgtggagctggatctggcgaaaaaacgcgctcaggaggcggcccgtattaagtctgagttcctggcaaacatgtcacatgagctgcgcacgccgctgaacggggtgattggcttcacccgtctgacgctcaaaagcgagctcaacccgacccagcgtgaccacctgcataccattgaacgctcagccaacaacctgctgaccattattaacgacgtactggacttctcgaagctggaagcgggcaagctgattctggagagtatccccttcccgctgcgcagcacactggatgacgtggtcacgcttctcgcccactcctcgcatgataaggggctggaactgacgctcaatatcaaaaatgacgttccggataacgtcattggcgacccgctgcgcctgcaacaggtcatcaccaatctggtgggcaacgcgattaagttcaccgagagcggcaacatcgacattctggtcgaaaaaagggcgctcagtaataataaagtccagattgaagttcagatccgggataccggcatcggcattccggagcgcgatcagtcgcgtctgttccaggcgttccgccaggccgatgcgagcatttcccgtcggcacggcggaacgggcctgggtctggtgatcacccaaaagctggtgaaagagatgggaggcgatatctccttccacagccagcctaaccggggctcgaccttctggttccatatcaatcttgatcttaatccgaacgtgcaaaccgacggtccggtcaccgactgcctgaaagggatgcgtctggcctatgtggaaccgaacgccgccgcggcgcagtgtacgctggatgtattaagcagcacgccgctggaggtggtctacagcccgaccttctccgcgctggcgaacgatcattacgatattcttttgctggggattccggtgacatttaccggagaactgaccatgcagcaggaacggctggcaaaggctgcctcaatgacggactacctgctgctggctctgccgtgccacgcccaaatcaacgccgaagagcttaaaaacgacggggcggcggcatgtctgctgaaacccctcaccgccacacggctgttacctgcgttgactgaatattgccgtctgacgcatcagtccctgccgctggaaaacgacgaacataagctgccgatgacggtgatggccgtggatgataacccggcaaaccttaagctgattggcgtgctgcttgaggatcaggttcagcacgttgagctgtgtaccagcggcgccgaagccgtagaacaagccaaacagatgcagtttgacctgatcctgatggatattcagatgccgggcatggatggcatccgcgcctgcgaattaattcgtcagcttccgcaccagcagcagacgccggtgattgccgtgacggcgcacgcgatggcgggacaaaaagagaaactgctgggtgcgggcatgaacgattatctggcgaaaccgattgatgaagagaagctgcacagcctgctgctgcgctacaaaccggggcacattggcgggacgtacaccatttcagctgaatcgccggaaatcagcgttaaccagaatgccacgtttgactggcaactggcgctgcgccaggcagcaggcaaagccgatctggcccgcgatatgctgcaaatgctggtggacttcctgcctgagatccgtaacaaggttgaagaacagctggtgggcgaaaaccctgaagggctgctggaggccatccataaactgcacggtagctgcggctacagcggcgtgccgcggttgaaaaatctctgccagctgcttgaacagcagctccgcgcgggtacgccagaatccgatcttgagccggagtttctggagctgctggacgagatggacaacgtgacgcgggaagcgatgaaggtgttgggaagctaa

SEQ ID NO: 523703 - DNA, 1146 bp, Stenotrophomonas maltophilia
atgaaaattgttatcgctccggactcgtataaggaaagcttgagcgcgctggaggtggcgacagcgatagaggtcggttttcgcgaaattttcccctcagcggagtacgtcaaattaccggttgccgatggcggcgaagggacggtggaagcgatggtggcagccacccatgggcgtcttgtccatgttcccgttaccgggcctttgggagaacacgtggaagggtttttcgggttatccggagacggaaaaagcgcgtttatcgagatggcggccgcgagcggtctggagcttgttgctcctgcaaagcgtaacccgttaatcaccacctcgtgggggaccggggaactgatccgtcatgcgctggatgcgggcgttaagcatatcattattggcattggaggcagcgcgaccaatgacggtggcgcaggcatggtgcaggcgctgggcgtaaaactgctggatgcgaaagcacagcccgttgggccgggcggcggcgaactggcaagccttgcgcatatcgatcttagtgggctggatgagcggctggcagactgtcgaattgaagtggcctgcgatgtgaccaaccccctgattggcgagactggcgcttctgcggtattcggtccgcagaaaggggcgacgccggagatggtcaggacgctggacaacgcgcttgcgcattacgcaaacattatcgccagggatctggatattgacgtcttaaacctggcggggggcggagcagctggcggaatgggggcggcgctgtatgcattttgcggggcacagcttcgtcgggggattgagattgtcaccgatgccctgcatctcgatgaacaggtcgcggacgccgatctggtgatcacgggcgaagggcgtatcgacagccagacgatccacggcaaagtgcccgttggcgtggcgagagtcgcgaaacgctataacaaaccggttatcggcattgccggcagcctgacggcggatgttggcgtggtgcacgagcacggactggatgcggtattcagcgtgatttacaccatctgctcgctggaggatgcgctggaaaatgcgcaacagaatgtacagatggccgcaaggaatattgcggcggccataaaggtggggcaggggatgtcgcgttaa

SEQ ID NO: 523704 - DNA, 1338 bp, Stenotrophomonas maltophilia
atgagcacattttctacccctgtagtcacctccatgcagatcattcctgtcgcgggacatgacagcatgctgatgaacctgagcggcgcccatgcgccgttcttcacccgtaatattgtggtgatcaaggacaactcagggcataccggtgtcggtgaaatcccgggcggggagaagatccgtaaaacgctggaggacgccattccgctggtggtgggtaaaacgctgggcgagtacaaaaatgtgctgaccagcgtgcgtacgacctttgccgatcgtgatgcgggtggccgtggtctgcaaacgtttgatctgcgtaccactatccatgtggtcacgggtattgaagccgcgatgctggatctgctaggccagcatctgggcgtcaatgtcgcctccctgctgggcgacggccaacagcgcagcgaagtggaaatgctcggctacctgttctttatcggcaaccgcaaactcaccccgctgccgtaccagagccagccggacgaaaaatgcgactggtatcgtgtgcgtcacgatgaagcgatgaccccggatgcggtggtgcgcctggctgaagccgcgtatgaaaaatatggctttaatgacttcaagctgaaaggcggcgtactggcgggtgaagaagaagctgaggcgattgccgcgctggcgaagcgcttcccgcaggcgcgcgtcacgctggatccgaacggtgcctggtcccttgatgaggcgatcaaaatcggtaagcagctcaaaggcgtgctggcctacgcggaagatccgtgcggcgcagagcaggggttctctggacgtgaagtgatggcggagttccgtcgcgccaccgggctgccaaccgccaccaacatgatcgcgaccgactggcgccagatggggcacacgctctcgctgcaatcggtggatattccgctggcagacccgcacttctggacgatgcagggctcggttcgcgtggcgcagatgtgccatgagttcggcctgacctggggctcgcactccaacaaccacttcgacatctcgctggcgatgttcacccacgtagcggctgctgcgccgggcaacattaccgctatcgacacccactggatctggcaggagggcaatcagcgcctgactaaacagccgtttgagatcaagggggggatggtgcaggttccagctacgccggggctgggcgttgaactggatatggatcaggtcatgaaagcgcacgagctttaccagaaacacgggctgggcgcacgtgatgatgcgctggcgatgcagtacctgatcccagagtggtcattcgacaataaacgtccgtgcatggtacgataa

SEQ ID NO: 523705 - DNA, 1344 bp, Stenotrophomonas maltophilia
atgatgacaacgcaatcaagcccgattgtgacggagatgaaagtcatcccggtggcgggtcaggacagcatgctgctcaacattggcggcgcgcataacgcctggttcacccgcaacatcgtggtgctgaccgacagcgcagggaataccggcgtcggggaagcgcctggcggagaggtgatttaccagacgctggtcgacgccatcccgcaggtggttgggcaggaggtcgcccgcctgaacaaggtggttcagcgggtgcataagggcaaccagtcggctgattttgataccttcggcaaaggcgcctggacgtttgaactgcgcgttaacgcggtggcggcgctggaggcggctctccttgatttactgggcaaagcgctgaatgtgccggtctgcgaactgctggggccaggcaaacagcgtgatgcggtaacggtgctgggctatctgttctacgttggcgaccggacgaaaaccgatctgccgtatctggaacgctcgccgggcagccacgcgtggtatcacctgcgtcatcaggaagcgctctctggcgaggctgtggtacgcctggcagaggcggcgcaggatcgctacggctttaaagacttcaagctgaaaggcggcgttctgccgggcgaacaggagattgacagcgtgcgcgcgttgaaaaaacgcttcccggaggcacgcatcaccgtcgatccgaacggcgcctggcggctggatgaagctatcgcgctgtgcaaaggactgggcgacgtgctgacctacgcggaagatccgtgcggcgccgagcagggcttttctggccgcgaggtgatggccgaattccgccgcgctaccgggctgccggttgcgaccaacatgatcgccactaactggcgcgaaatgggccacgcggtgatgctgaatgcggtggacataccgctggctgatccgcacttctggaccctttccggcgcggtgcgcgtggcgcagctgtgcgatgactgggggctcacctggggctgccactccaataaccatttcgacatttcgctggcgatgtttacccacgttggcgcggcggcgccgggtaacccgaccgccatcgatacgcactggatctggcaggaaggcgaagcgcgcctgaccaaaaatccacttgaaatcaaaaacggcaccattgccgtaccggatgcgccggggctgggcgtggagcttgactgggatcagatccacaaggcgcatgaagcgtataaaaaactgccgggcggcgcgcgcaacgacgcaggcccgatgcagtaccttatccccggctggacatttgaccgtaagcgccctgtatttggacgtcactga

SEQ ID NO: 523706 - DNA, 1356 bp, Stenotrophomonas maltophilia
atgagtacattaagccacgcggcgagcagcgctgagaagcgcaccaacgcccgatactggatagtggtgatgctgtttatcgtcacctctttcaactacggcgaccgtgccacgttatccattgccggctctgagatggcaaaggacatcggacttgatccggtgggtatgggttatgttttctccgcattttcatgggcctacgtaatcggccaaatccctggcggctggctgctggaccgcttcggctcaaaacgggtctatttctggtccattttcatctggtcgatgtttaccctgttacagggcttcgtggatatcttcagcggcttcggcattatcattgcgctctttaccctccgcttcctggtgggtttagcggaagcgccatctttcccgggcaacagccgcattgtggccgcctggttcccggcgcaggagaggggaacggcggtagcaatctttaactcggcgcaatactttgcgacggttattttcgcgccaattatgggctggctgacgcacgaagtgggctggtcgcacgtcttcttcttcatgggcgggctggggatcgtcatcagctttatctggctgaaagtgatccacgaaccaaaccagcacccgggcgtgaacaagaaagagctggactacattgctgaaggcggggcgctgatcaacatggatcagaaaacccagaaagcaaaagtcccgttcagccagaaatgggggcagatcaaacagctcgtcggctcacggatgatgatcggtatctatctcggccagtactgcattaacgccttaacctacttcttcatcacctggttcccggtttacctggtgcaggcgcgcgggatgtcgattctgaaggcgggttttgtcgcctctgtgccagccatctgcggcttcgtgggcggggtgctcggcggggtcatctccgactggctgatgcgtcgcaccggttcgctgaatattgcgcgtaaaacgccaatcgtgctcggcatgctgctctccatgaccatggtgttctgtaactacgtcagcgcggagtggatgattatcggctttatggcgatggccttcttcggtaaaggcattggcgcgctgggctgggcggtgatggcagataccgcgccgaaagagatcagcggcctgagcggcggtctgttcaacatgtttggcaacatttccggcattgtcaccccaatcgctatcggttacatcgtcggcaccaccggctccttcaatggtgcgctgatttatgtaggcgtccatgcgctggtggcggtactcagttacctggtgctggtgggggacatcaaacgaatcgaactgaaacctgttggggagcgcggatga

SEQ ID NO: 523707 - DNA, 237 bp, Stenotrophomonas maltophilia
atgccccaaaccacgttccccacgcccgtcaatgttgtgttcctgcacggtgagagaaccggtcactccttcatatacttttcccgtcactataaaacggcttcgggccgtaccaaaaccaaacacaaatctctcattctgattaccctacaggtgctgtacagaatgaaccaggcgaaagctatgtttcaggagtgcaacaatgagtacattaagccacgcggcgagcagcgctga

SEQ ID NO: 523708 - DNA, 450 bp, Stenotrophomonas maltophilia
atggctgaagtaggtatttttgtcggcacgatgtacggcaactcgctgctggttgcggaggaagcagaagcaatcctcgtcaatcagggccataaagcaacggtctatgaagacccggagctggcagactgggaaaagtataaagataaatacattctggtggtgacctccaccaccgggcagggcgatctcccggacagcatcgtcccgcttttccagggcattaaagaccagcttggctatcagccagatgttcactatggcatcatcgccctcggcgatagctcttacgccaatttttgcggcggcggtaagcagttcgacgcgctgttgcaggaacagcacgctcagcgggtcggcgagatgttactgattgatgctggcgagcaccccgaaccggaaagcgagtcaaatccctgggttgaacattgggccacgctcctgaactaa

SEQ ID NO: 523709 - DNA, 735 bp, Stenotrophomonas maltophilia
atgacgcttgagatcctgtatcaggatgagtggctggtggcggtgaataaaccgtccggctggctggtacaccgaagctggctcgatcgcgatgagaaagtggttgttatgcaaaccgtgcgcgaccaaatcggtcagcacgtctttactgcccaccgtctggatcggccaacctctggcgttctgctgatggggctttccagtgaggccgggcgcctgctgtcgcagcagtttgaacagcaccagatccagaagcgctaccacgccattgtgcgcggctggctgacggattccgccacgctggattatccgctggtggaggaactggataaaatcgccgataaatttgcccgcgaagataaaggtccgcagcctgcggtgaccgactatcgcggtatggcgaccacagaactgccggtggcgaccagcaaatttcccactacgcgatacagtctggttgagcttttgcccaaaaccgggcgcaagcaccagcttcgccgccaccttgcacatctgcgccacccaattatcggcgacagcaagcacggcgatctgcggcagaaccgcagcgcggcagagcactttggctgtaaccgactgatgctgcacgccagcgagctaagcctgacgcatccgtttaccggcgaaccgctgactattcgcgcggggctggacgaggtctggatgcaggcgctgtctcagtttggctggctgggacaactccccgaaaattaa

SEQ ID NO: 523710 - DNA, 330 bp, Stenotrophomonas maltophilia
atgacgcatcacgatagcgttcgtgcgcagttgcacgccatcgaagcccttatgcgccagcatcagctgtggcaggaaagtgcgccgcagccagacgcgttcgccagcacccagccgttttgtctggatacgctgtctccattcgaatggctccagtgggtattaattccgcgcatgcacgcgctgctggaagggggacacgcgttgccccaggcgtttgccgtctctccctattacgaaatggcgctggaggcgactcacccggcgcgcgacgttatgttggttgagctggaaaagctggatacgcttttcgccggtgacgatgcatga

SEQ ID NO: 523711 - DNA, 546 bp, Stenotrophomonas maltophilia
gtggatatcgaaactgcaaatgccctgacgtccttcacgacccgctattgcgatgcctggcatgaaaagcgggggacgtggccgcaaagtactgacttatatggcgtgccgtcaccgtgcattatcgcttcgcaggatgattacgttatctggcaaccgaaaccgttcacgggcgagcagaatgtaaatgcggttgaacgcgcaatggacattgtgatacaacctgcgcttcatgcaatttataccacgcagtttgccggggatatgactgcatgttttgcaggacagccgctgacgctgctgcaaacctggagcgaagacgatcttcaacgcgttcaggaaaacctcattggtcacctggtcacgcaaaaacgccttaagctctccccgactctctttattgcgacgctcgacagtgaactggacgtcatttcagtctgcaacctgtctggcgaggtcattaaagagacgctcggcacccgcaatcgcgacgttctcgcgccttctcttgcggattttcttacccgacttgagccgcttctgtaa

SEQ ID NO: 523712 - DNA, 1365 bp, Stenotrophomonas maltophilia
ttgattacacatattagcccgcttggctctatggatatgttgtcgcaactggaagtggacatgcttaaacgcaccgccagtagcgacctgtatcaactgtttcgtaactgttcacttgctgtactgaactccggaagcctgaccgacaacagtaaagagctgctgtcccgcttcgaaagttttgatatcaatgtgctgcgccgcgagcgcggggtgaagctggaagtgatcaacccgccggaagaggcgtttgtcgatgggcgtattattcgctcacttcaggccaacctttttgccgtgctgcgcgacatcctgtttgttaacggacagatcagcaacgccggtcgtttccagcatctcgatctggaaagctccgttcatatcaccaacctggttttctccattctgcgtaacgcccgcgccctgcacgttggcgaagcgccgaacatggtcgtctgctggggtggtcactctattaacgaaaccgaatacctgtacgcccgccgcgtgggtaatcagctcggcctgcgcgagctgaacatctgtaccggctgcggtcctggcgcgatggaagcgccgatgaaaggcgcggcagtaggacacgcgcagcaacgctataaagaaggccgttttatcggcatgaccgagccgtcgatcatcgccgctgagccgcctaacccgctggttaacgaactgattattatgccggatatcgaaaaacgtcttgaggcgtttgtccgtatcgcgcacggcattatcatcttcccgggcggcgtaggtacggcggaagaactgctttatctgctcgggatcctgatgaacccggccaacaaaaatcaggttctgccgctgatcctgaccggcccgaaagagagcgccgactatttccgcgtgctggacgagtttatcgtgcatacgctgggggaagacgcgcgccgtcactaccgcattattattgacgatgccgcagaagtggcccgtcagatgaaaaaagcgatgccgctggtgaaagagaaccgtcgtgataccggggatgcctacagctttaactggtccatccgtatcgcaccggatctccagatccccttcgagccgtcgcatgagaacatggcgaacctcaaactctatccggatcagccggtggaagtactggcagctgacctgcgtcgcgccttctctggcatcgtggcggggaacgtgaaggaggtggggatccgcgcgattgaggagttcgggccgtataaaatccacggtgacccggagatgatgcgccgcatggatgacatgctgcagggctttgtagctcagcaccgcatgaaacttccgggttctgcctatattccctgttacgaaatcatcaaataa

SEQ ID NO: 523713 - DNA, 1290 bp, Stenotrophomonas maltophilia
atggaaaccactcaaaccagcaccgttgcttcgattgaatcccgaagcggttggcgcaaaacggataccatgtggatgcttggcctgtacggcacggcaatcggcgctggtgtactgttccttcctatcaacgcaggtgtcggcggtctgatcccgctgatcatcatggccatcatcgcctttccgatgaccttctttgcacaccgcggcctgacccgcttcgtgctgtccggtaaaaacccgggcgaagacattactgaagtcgttgaagaacacttcggcgtcggcgcaggtaagctgattaccctgctctacttcttcgcgatttacccgattctgctggtgtatagcgttgctatcaccaacaccgttgaaagcttcatgatgcaccagctgcagatgaccccgccgccgcgtgcgatcctgtccctgatcctgatcgtcggtatgatgaccatcgtgcgctttggcgagcagatgattgtcaaagcgatgagcgtgctggtattcccgtttgttgcagccctgatggtgctggcgctgtacctgatcccacagtggaacggcgctgcgctggaaactctgtctctgagcagcgcatccgcaaccggtaacggcctgctactgaccctgtggctggcgatcccggtaatggtgttctccttcaaccactcgccaatcatctcctccttcgcggtggcgaagcgtgaagagtacggcaatggtgcagagaagaagtgctccagcatcctggctcgcgcacacatcatgatggtactgacagttatgttcttcgtgttcagctgcgtgctgagcctttccccggcggatctggcggcggcgaaagagcagaacatctctattctgtcctacctggcaaaccactttaacgcaccgctgattgcgtggatggcaccgatcatcgcgattatcgccatcaccaaatcctttctgggccactacctgggcgcacgtgaaggcttcaacggtatggtgattaaatctctgcgcggtaaaggcaagagcattgaaatcaaccgtctgaacaaaatcaccgcgctgttcatgctggtgaccacctgggcggtagccaccctgaacccaagcattctgggcatgattgaaaccctgggcggcccgattatcgcgatgattctgttcctgatgccgatgtacgcgattcagaaagtgccagcgatgcgtaaatacagcggccatatcagcaacgtgttcgttgttgtgatgggtctgattgccatctccgctattttctactcgctgttcagctaa

SEQ ID NO: 523714 - DNA, 534 bp, Stenotrophomonas maltophilia
atggtcttcgtcgacaataaacccgccgccgatggagtaatacgtctggctgtaaaccgctttatcgccgaccagcgcggtaatgcgcatgccgttttcgtgcagcgacaggttatccgcatggaaattcatgcagtggtcaaccgggaattcaacctcatgctcgccgttggccagcagcaaacgaccgtgggtgttcacgtcctggataaagccaggaatggagtcaatatcaacggtatccggcaggttacccgccagccccatgataatggcaatatcggtatggtggcctttaccggtcagggaaagggaaccgtatacatcgacaaccacgcgggagatgtcgtgcaaaatgccgcgtgcaatcaagtcatccgtgaattgtttaccggctttcattggtccgacggtgtgagagctggaaggaccaataccgattttgaagatatcgaatacgctaatcatgatgcgtccattgcttcagtcagaggggaggagtgcgccatccgcagacggcgcaggaggtattag

SEQ ID NO: 523715 - DNA, 1221 bp, Stenotrophomonas maltophilia
atgctcacaaccatcatttaccgcagtcatatctgcgaggacgttccagtgaaagcgctggaagacatggtcgctgctgcaaattgtagaaatcgccagttcgatgtgacggggattttgctgtttaacggcacacacttttttcagttacttgaagggcccgctgataacgttaaggagatctatgagctcatttgccgtgacccacggcatcacaacgtggtcgaattgtttagcgatcacgggccttcaagacgttttggcaatgtgggtatggagctcttcgaccttcgtcagtacgacaccaacgaagtgctgcaacaggttcttgataaaggcacaagccgctatcagctaacctataacgatcgcgccctgcaatttttccgcaccttcgttgaggccactgaaaaagccaactactttgagctgcctccggctgacgcctgggagtttgtcaccgaaaatacgccgttatcctcccagccgacagtagtggcaaagggcgcggactgtagtttcgcgtttcaacctatcgtcgatccgtttatgcagcaggtagtttcctgggaagccctgatccgcacgccgtccggtgagtccccggaaagctattttgccaacctgtcgcgtgaggcgctgtacgaatcggatctgaagagtaaacaggtggctttgtcgatggccagcgcgctgggcctacagactcaaacgttgtccattaatctgctgccgatgacgctggtcaatgttcctggcgccgtcgattttttactgacggcaattgaggcgaacggttttgtgccggagcaaattgtggtcgagttcaccgagagcgaggcgatctcgcgcttcgaagagttcaccagcgcggtcagacagcttaaaagcgccgggatcagcgtggccatcgatcactttggcgcgggattcgccggtctgcaactgctggctcagttccagccggacagaatcaagatcaaccgtgatttgattgctaacgtgcacaagagcggcccgcgtcaggcaatcattcagtcaatcattaaatgctgcgcctccctggaaattctgttctgtgcggtaggcgtagagctggctgaagagtggatgtggctggaatctgccgggatttctcagttccagggtcaccttttcgccagcccgcgtctggggggcattccggcgattgcctggcccgagaaaaagtacgatttataa

SEQ ID NO: 523716 - DNA, 516 bp, Stenotrophomonas maltophilia
  misc_feature (461)..(470): n is a, c, g, or t
atggcctattacagtatcggcgaagtggccgaacgatgcggtatcaaccccgttacgctgcgtgcctggcagcgccgttatggattgttgaagccgcagcgaagtgaagggggtcatcgtcagtttgacgatgaagatatcctgcgtatcgaagagatcaaacgcctgatgaaaacgggtgtttcggtcggtaaagtaaaagcgcttcttgaaaatacagaagtgatgacgcatgggaactgggcatcgtttcaggaagagatgttaaccgttctgcgctatgccaatccggcaaaactgcgcgccaaaatcagtgagttccgccgtgaccatgcgatggatgttctgatagataacatcatcacccctgtgcggcagcgaatgaaccaggaccagaatacggtgcgtcacatggcgagcctgctggacggtgtcctgattgagtttgccgttgcaagccnnnnnnnnnnagcctgggtgagtcgcgaaaaaaagcaggtaaagatgcgctgctga

SEQ ID NO: 523717 - DNA, 453 bp, Stenotrophomonas maltophilia
atgaaaaaaataattctggcgatcctgcttctgcccactctcgcatcagctgcacagaagttaccccctgaggtatccgctgcccttcagtttaataagtggtacatctcgcaaattattatcgggaaagagcccctgaaaaactatgaagcgctgaggccatatgtaacccgtgaaaccatcagcaaactcaaagacatggataagctggatccagatgaatatgacgtgcctgacgtcgatatgttcatcaaggctcagggatatgaagatgactggggcatcgtcagtgcgcgggcgctggattacgatgccgcctgtatgcaggtttatatctcattcggcaaaaagcgggatcacaccgtaattgactgcatggtcaaggaagatggcgtgtggaaagttgaatccgtggccagtatgaatatttcagacaacctgatgatggaataa

SEQ ID NO: 523718 - DNA, 216 bp, Stenotrophomonas maltophilia
atgttagtgataacgattatcacttcaaccccctgcgagcaggggctttgggctaaaccgccctttttggctactttcattaagcatagaccctgtgacgggatgcggatgggtgggttagttttgttcaatgcattgataaataatgcatttcataagaaaggcggtaaggtggcgggcaataataaaaattgtattgaaaatacctatttttga

SEQ ID NO: 523719 - DNA, 369 bp, Stenotrophomonas maltophilia
atggaactgcattcagaaaccttcaatccggccgattttgcctggcgtggcttaacgctgacgcccgcggcggcggcgcatattcatgagctggtggcaaaaaatcccgacatcctcggcgtacgcttaggcgttaagcagacgggctgcgcgggatttggctacgtgctggataccgtaaccgaacccaaaaaggacgatctggtctttgaaaccgacggtgcaaagttatacgtcgcgctacaggctatgccgtttatcgatggaaccgaagtcgactacgttcgggaaggtttaaaccagttattcaaatttcataacccgaaagcccagaacgaatgcggctgcggcgaaagctttggggtatag

SEQ ID NO: 523720 - DNA, 1446 bp, Stenotrophomonas maltophilia
atgtctcgtaatactgaagcaacgagtgatgtaaacacctggagcggcggacacctcaactataaagagggtttcttcacgcagctgcaaaccgatgagctggcgaaaggcatcaacgaagaggtcgtgcgcgccatttcggcgaaacgtaacgagccggagtggatgctggagtttcgcctgagcgcattccgcgcgtggctggagatggaagaaccccactggctgaaagcgcattacgataagctgaactatcaggattacagctattactccgcgccctcatgcggcagctgcgatgatacctgtgcctcgcagcccggcgcggtacagcaaaccggtgccgagaacagcttcctgagtaaagaggtggaagaggccttcaatcagctcggcgtgcccgtgcgcgaaggtaaagaggtggcggtggacgccatttttgactccgtctcggtggcaaccacctaccgtgaaaagctggcggagcaggggataattttctgctcctttggggaagccattcacgatcacccggagctggtgaaaaagtacattggcaccgtggtacccagtaacgataacttcttcgcggcactgaatgcggcggtggcgtcagacggcacctttatctacgtgcctaaaggtgtgcgctgcccgatggagctctcgacctatttccgcatcaacgcggaaaaaaccggccagtttgaacgcaccatcctggtggccgatgaaggcagctacgtcagctatatcgaaggctgttcggcgccggtgcgcgacagctaccagctgcacgcggcggtggtagaggtgatcatccataaagacgcggaagtgaaatactctacggtacagaactggttcccgggcgatggcaacaccggtggtattctgaacttcgtcaccaagcgtgcgctgtgcgaaggtgaaaacagtaagatgtcctggacgcagtcagaaaccggctccgccattacctggaaatacccgagctgtattctgcgcggcgacaactccatcggtgagttttactccgtggcactgaccagcggtcatcagcaggccgataccggcaccaagatgatccacatcggtaaaaacacgaacagctatcgcgggctggtgaaaatcatgccgacagccaccaacgcacgtaactttacccagtgcgactccatgctgattggtgcggactgcggggcgcataccttcccctatgtcgaatgccgcaataacagcgcccagctcgagcatgaggcgactacgtcacgtatcggtgaagatcagctgttctactgcctgcaacgcgggatcagtgaagaagatgcgatttcaatgattgttaacggcttctgtaaggacgtgttctctgaactgccgctggaatttgccgttgaagcccagaaactcctcgccattagtcttgaacacagcgtcggttaa

SEQ ID NO: 523721 - DNA, 747 bp, Stenotrophomonas maltophilia
atgttaagcattaaagatttacaggttagcgtggaagagaaagagatccttcgtgggctcaattttgacgtcaaaccgggtgaagttcacgccatcatggggccaaacggctccgggaaaagtacgctttcagcgacgctggcaggacgcgaagattatgaggtcaccagcggctccgttgagtttaacggcaaggatctgctggagatgtcgcctgaagagcgtgccggtgagggcatctttatggccttccagtatccggtggaaatcccgggcgtcagcaaccagttcttcctgcaaaccgcgctgaacgcggtgcgcaagtatcgcgggcttgaggcgctggatcgctttgacttccaggatctgatggaagagaaaatcaagctgctgaaaatgcccgaagatctgctcacccgctcggtgaacgtgggtttctccggcggtgagaaaaaacgtaacgatattctgcaaatggcggttcttgagccggagctgtgcattctcgatgaaaccgattcaggcctggatattgatgccctgaagatcgttgccgacggcgtaaactctctgcgtgacggtaaccgctcatttattatcgtgactcactaccagcgtattctggactacatcaaaccggactatgtccacgtgctttatcaggggcgcattgtgaaatccggtgactttacgctggttaaacaactggaggagcagggttatggctggcttaccgaacagcagtaa

SEQ ID NO: 523722 - DNA, 1272 bp, Stenotrophomonas maltophilia
atggctggcttaccgaacagcagtaatgcactccagcagtggcaccggctgtttgaagcgcagggtggagcgcgctctgaacaggctcagcaccatctccagcagatgctgcgtctcggtttaccgacgcgtaagcatgagaactggaaatataccccgctggacggcctgctgaacggcgagtttgtcacccgtctggcgcaggttagccccggtcagcgcgatgtgctggcgctgagcgtggatgccgtgcgtctggtgtttgtagacgggcagtttcgtgaggaactcagcgacagcgtacaggagagcgggttcgatatcgccattaacgatgagcgtcagtcgctgaacgcgcccgttcagcctgaagtcttcctgcatctgacagagagcctgtctcagtctttaacccatattcacgttaagcgtaaccagcgcccggcgaaaccgctgctgctgatgcatatcacccagggtgttgagggcggcgagatcaacaccgcccactatcgccaccatctcgagctggcagaaggggcagaagcgacggtaattgagcattacgttagtctgaacgacacccgccattttaccggctcgcgtctgacgatgaacgtggcggccaacgcccagctgcaccatatcaagctggcgtttgagaatccgctcagtcaccacttcgcccacaacgatattctgctgggccaggatgccgcggcgtacagccacagcttcctgcttggcggcgcggtgctgcgccacaataccagcacccagctgaacggtgagaacactacgctgcgtattaacagcctggcaatgccggtgaagtcagaagtatgcgacacgcgcacctggcttgagcataacaaaggctactgcaacagccgtcagctgcacaaaaccatcgtcagcgacaaaggacgtgcggtgtttaacggcctgatcaatgtggcgcagcacgccatcaaaactgacgggcagatgaccaacaacaaccttttgctgggacgtctggcagaggtggacaccaaaccacagctggaaatttatgcggacgacgtgaaatgcagccacggcgcaacggtcgggcgtattgacgatgagcagatgttctacctgcgctctcgcggaatagaccagcaggccgcgcaaaagatgattatttacgcctttgcggctgagctgacggaagcgctgcccgatggcggacttaaacagcaggtgctggcccgtatcggtcagcggctgcctggaggcgaagcatga

SEQ ID NO: 523723 - DNA, 1221 bp, Stenotrophomonas maltophilia
atgacatttcccgtagagaaaatccgggcagattttccggtactgacccgtgaagtgaacggtctgccgctggcctatctcgacagtgcggccagcgcgcaaaaaccgaatcaggtggtggatgcggaagccgagttttaccgccacggttatgcggcggtccatcgcgggatccacactctgagcgccgaggcgacccagcgcatggaaaacgtgcgcacgcaggttgcggcgtttctcaacgcgcgttcgccggaagagctggtgttcgtgcgtggcaccaccgaagggatcaacctggtggctaacagctggggcaatgcgcaggtgcacgcgggggataacatcatcatcacccagatggagcaccacgctaacatcgtgccctggcagatgctctgtgagcgtatgggggcgcaactgcgggtgatcccgctaaacgaagacggtacgcttcagcttgaacagctggacgccctgcttgacgacagaacgcggctggtagcggtgacccacgtttcaaacgtgctggggacggaaaatccggtggcgctgatcgtcgacaaagcccatcaggccggtgcgaaagtgttgattgatggtgcccaggcggtgatgcaccatgcggttgacgttcaggccctggactgcgatttctacgtcttctccgggcacaagctgtatggtccgacgggcatcggcgtgctgtatgtgaaggaggatattctccaggccatgccgccgtgggaagggggcgggtcaatgattgccaccgtcagcctgacggaaggcacaacctacgcccgggcgccctggcgcttcgaggcgggtacgccaaacacgggcgggataatcgggctgggcgcggccattagctacgtctctgaaacggggctggcggcgattcaggagtacgaacagctgctgatgcaatatgccttgcaggagcttgccggcgtcccggatctgaccttatatggccctgctgaccgtctgggtgtgatagccttcaacctcggcaagcatcacgcttatgatgtgggcagtttcctggataattacggcgtcgccgtacgtaccgggcatcactgcgcgatgccactgatggcgtattatcaggtaccggccatgtgccgcgcatcgctggtgatgtacaacacaacggaagaggtcgacagactggtggcgggactaaaacgtattcatcagctgcttggctaa

SEQ ID NO: 523724 - DNA, 417 bp, Stenotrophomonas maltophilia
atggcagatttgccggacagagataaattgctgcgtaactttgggcgttgcgcaaactgggaagagaaatacctttatattatcgagctaggtcagcgcctgccgccgctcagcgaagaggcgcataaccgggacaacatcattcagggctgccagagccaggtctggatccagatgcagcagacggatgatggcgtaatcgatttacagggtgacagcgatgccgccattgtgaaggggcttattgccgtcgtatttattctttatcaccagatgtcggcgcaggatattgtcgcctttgacgttcgctcgtggtttgaaaaaatggccttaacccaacacctcaccccgtcccgctcccagggactggaagcgatgaaccgcgccatacgcgccaaagccacaatccttagctaa

SEQ ID NO: 523725 - DNA, 1014 bp, Stenotrophomonas maltophilia
atgaagcgcgcgtctctaataactctattactccttggttcgctcagtgctgttaattcagccagggcggttgattatcctttaccgcccgcaggcagccgcctgattgggcaaaatcagacatacaccattcaggaaggcgacaataagctccaggctatcgctcgtcggtttaataccgccgcacagcttatccttgaaaccaataataccattgcaccggtaaaccctgcgccaggaacggtcattaccattccttcccagatgctgctcccggacaccgagcgtgagggcattgtggtgaatctggcggagctgcgtctttacttctatccgcctggcgaaaatatcgtgcaggtctatccgctgggtattggtcagcttgggctggaaacaccggtcagcaccacccgtgtgagtcagaaaatccctaaccctacctggacccccacagcgggcatcagagcgcgctcactggcacagggcattaaactgccgcctgtggtacccgcagggccaaataacccgctggggcgctttgcgctgcgtctgggcatcgggaatggggaatatcttattcatggcaccagcgcgccggacagcgtagggctacgggtcagctcgggctgtatgcgaatgaacgcgccggatatcaaagcgttgtttgaacaagtgcgcgtcggcacgcgggtgcagattatcaatgagccggttaagttctccgtcgagccggacggcaaacgttatatcgaggtgcacaggccgctggcgcaggctgagggcgaaaacccacagacggtgccgttcacgcactcggcggcgtttaccgccttcgcagcggaatcaggtagcgataaaacgctaatcgacaaagctctggcgcgcagagccgggatcccggttgccgtttcagcaggcaatggttcgtcagccggcaattctgtcctgtcggttcagaacagtcgtgtctcagcggcagtgacggaaggcgagggagagaaagcgcttcagtag

SEQ ID NO: 523726 - DNA, 237 bp, Stenotrophomonas maltophilia; identical to SEQ ID NO: 114707

SEQ ID NO: 523727 - DNA, 1422 bp, Stenotrophomonas maltophilia
atgaaaaagacgaaaattgtttgtactatcggcccgaaaaccgaatccgaagagatgctgagcaaaatgctggatgccggcatgaacgtgatgcgtctgaacttctcccacggcgactatgctgaacacggtcagcgtattcagaacttgcgcaacgtgatgagcaagaccgggaaaaaagcggcaatcctgctcgacaccaaaggtcctgaaatccgcaccatcaaactggaaggcggtaacgacgtttccctgaaagcgggccagaccttcaccttcaccaccgacaaatccgttgtaggtaataacgaaatcgttgccgtgacctacgaaggcttcaccagcgatctgtccgttggcaacaccgtgctggtagatgacggcctgatcggcatggaagtgaccgcgattgaaggtaacaaggttatctgtaaagtgctgaacaacggcgatctgggcgaaaacaaaggcgttaacctgccgggtgtgtccattgctctgccagcgctggctgaaaaagacaaacaagacctgatcttcggctgcgaacaaggtgtggacttcgttgcggcgtccttcatccgtaaacgttctgacgtggttgagatccgtgagcacctgaaagcgcacggcggtgagaacattcagatcatctccaagatcgaaaaccaggaaggcctgaacaacttcgacgaaatccttgaagcgtctgacggtatcatggtagcgcgtggcgacctgggcgtagaaatcccggttgaagaagtgatcttcgcgcagaagatgatgatcgagaaatgcgttcgcgcgcgtaaagtggttatcaccgcaacgcagatgctggactccatgatcaaaaacccacgccctacccgcgctgaagccggcgacgtggcgaacgccatcctcgacggtaccgatgccgttatgctgtctggcgaatctgcaaaagggaaataccctctggaagcggtcggcatcatggcgaccatctgtgagcgtaccgaccgcgtgatgaaaagccgtctggattacaacaacgacagccgtaaactgcgcatcaccgaagccgtgtgccgtggtgcggtagaaaccgccgagaaactggaagccccactgattgtcgtggcgacccagggcggtaaatctgcgcgtgccgtgcgtaaatacttcccggatgcgaccattctggcgctgaccaccaacgaaaccactgcgcgtcagctggtgctgagcaaaggcgtgatcccacacctggtgaaagagattgcctctaccgatgatttctatcgtctgggtaaagaagtggctctggaactggttgattgtggcctggctcagaaaggcgacgtggtggttatggtttctggtgcactggtaccaagcggtacaaccaacactgcatctgtccacgtactgtaa

SEQ ID NO: 523728 - DNA, 1146 bp, Stenotrophomonas maltophilia
atgaaaaacctggccaccctcagcgttcacagcggtgagtatcacgacacgcacggcgccgtgatgccgccaatttacgccacgtcgacgtttgcgcaaccggcaccgggtgaacataccggctacgaatactcccggagcggcaacccaacccgccatgcgctggagaccgccatcgccgaactggaaggcggcacgcgcgggtacgccttcgcgtcagggctggcggccatttccaccgtgctcgaactgctggataaagacagccatatcgttgccattgacgacgtgtatggcggtacgtatcgcctgatcgaaaacgtgcgcaagcgcagcaccgggttacaggtgagctgggttaagccggacgatgtagccggacttgaggccgccattcgcccggacacccgcatgatctgggtggaaacgccgacgaacccgctgctgaaactggccgacctggaggccatcgcagacattgcccggcgccataatgcgatcagcgtggcggataataccttcgcctccccggtcattcaccggccgctggaggcggggttcgacattgtggttcactccgccaccaaatatctcaacggtcattcagacgtggttgccgggctggctgttgtcggggcaaataaggatctcgcggagcgtctgggctatctgcaaaacgcggttggcggcgttctggatccgttcagcagcttcctgacgctacgggggattcgcaccctctccctgcgcgttgagaagcacagtgccaacgcgctggcgattgcgcaatggctggagcagcatccgcagatagagagcgtgctctatcccgggctggagtcacacccccagtatgcgcttgcccgcagacaaatggcgctgccgggcggcatgatctccgttgtgattaaaggcgatgcgcaacgcgcgacagaggtgattcgtcatcttacgctctttaccctggcggaaagcctgggcggggtggagagtctggtgagccagccctacagcatgacccacgcctccattccactggcgcagcgtcttgcaaacggcattgtgccgcagctgatacgcctgtcggtggggattgaggatgcgaaggatctgatcgccgaccttcaacatgcgctggaaaagtga

SEQ ID NO: 523729 - DNA, 1368 bp, Stenotrophomonas maltophilia
  misc_feature (876)..(885): n is a, c, g, or t
atgacgctttaccactccgtcaccgaactaattggccatacgccactcatccagctgcacaagctggataccggcccctgctcgctgtttctgaagctggaaaatcagaatccaggcggctcgattaaagaccgcgtcgcgctgtcgatgattaacgaggccgagcgtatggggcagctacggcccggcggcaccattattgaagccacggcggggaacaccggcctggggctggcgttgattgcggcgcaaaagggatactcgctgatcctggtggtgccggacaaaatgagccgcgagaagattttccacctgcgcgcgttaggggcgcaggtcgtgctgacccgttcagatgtgaataaagggcatccggcctactaccaggattatgcccggcggttggcgaacgaactgccaggcgcgttttatatcgatcagttcaataacgcggccaatccgctggcgcaccggaccactaccgcaccggaactgtttgaacagcttgacggccatatcgataccatcgtcgtcggcgtggggtccggcggtacgctgggtggcttacaggcgtggtttgcagaacattcgccgcagacgaaatttgtgcttgccgatccggccgggtcggtactggcggaccaggttgagaccggacgctatcacgatgccggatcgtggctggttgaggggattggcgaagactttattcctccgctggcgcacatcgaaggggttaaacgcgcctggcgcattaccgatcgcgaggcgttcaccaccgcccgcgatctgctaaaaacggaagggatcctggcaggctcctccaccggcacgctgctggcggcggcgctgaaatattgccaggcgcagactacgccnnnnnnnnnnaccttcgcctgcgacagcggcaataaatacctctcgaagatgttcaacgacgactggatgcgccagcaggggttgatttcgcgtccgcaggcaggcgatctctcggactatattgccctgcgccacgatgaaggcgcgacggtgactgccgccccggacgacacgctttccaccgtgctggcccgcatgcgcctgtacgacatctcccagctgccggtgctcgataacaacaaggtcgtcggcatcatcgacgagtgggacctgctgcgacacattgagggagatgccgatcgcttctctctccccgtgacggcggccatgacgcgtcaggtcgaatatctggataagcaggccccggagagcgccctgtacaccatctttgaccgtggcctggtggcgattatttatgacgaagaccgctttctgggtctgatcacacgcagtgacgtactcaccacctggcgtaaccgcctgacgaaataa

SEQ ID NO: 523730 - DNA, 1023 bp, Stenotrophomonas maltophilia
atgatcgtactcagtaatatttcgaaggtttttgacaacgggaagctggcgctgacagccgttgataacgtcaatttgacgatagagcagggacagatttacgggatcattggttacagcggggccgggaaaagtacgcttatccgtctgctgaacggtctggaaaagcccagcgccggcagcgtcactattaacggtcaggatatctccgccgcgaagggagaagcgctgcgtcaggcacgcctgaaaatcagcatggtgttccagcactttaatctgctctggtcgcgcacggtgaaggaaaacatcgccttttcaatgcaaattgccggtgtgccaaaagcgcaaattcaggctcgcgttgccgagctggtggagctggtcggcctgaaggggcgcgagaatgcctacccgtcgcagctgagcggcgggcaaaaacagcgtgtgggcattgcccgcgcgctggccaatcatccggacgtactgctgtgtgacgaagccacctcggcgctggatccgcagaccaccgatcagatcctcgatctgctcctggacattaaccgtcgttttaacctgaccatcgtactcattacgcatgagatgcacgtggtgcgcaaaatctgcgaccgcgtggcggtaatggagaacggcaaggtggtggaagagggggaggtgctgagcgtgtttacgcatcctcagcagccgatcacccggcagtttgtccgccaggtgagccagtacgcggaggaagagaccttcaataccgaactggcaaatgagctggagggcgcggtcatcaagctcaccttcaccgggcacagcacgcacaggccgatcgtcggtgaactgaccctgcgctacggcctgccgtttaacatcctgcacggcaaaatgacgcaaaccgctcacggtgttttcgggcagctctgggtgcacgtggtggcatcggatgaacaactgaacaatatcctcgccgacctgaagcaaagcgatattgaaggcgaggtaatcaagcatggctga

SEQ ID NO: 523731 - DNA, 669 bp, Stenotrophomonas maltophilia
atggctgaagaactctttccgcacctgaagtgggatcagctttgggctgcaacccaggagacgctctacatgaccgcgctttccggcgtggcgacgtttgttctggggatcgcgctcggtctggcgctgtttttaaccgcccgcggcgggttattccacaaccgcacggtctacagcgtgatgtcgattgtggtgaacgtgttccgctcgattccgttcatcattctcattgttctgctgatcccgttcaccaagaccgttgtggggaccattctcggcgctaacgctgcgctgcccgccctgattgtgggcgccgcgccgttctacgcccgtctggtcgagattgccctgcgggaagtggataaaggggtaattgaagccacgcgttcgatgggcgcgcggctgagcacgttagtgtttcgggttttactgccggaatcttcacccgcactggtttcaggtatgacggtgacgctgattgcgctggtgagctacagcgcaatggcgggggtgataggtgccggcggtttgggaaatctggcttatctggaaggattccagcgcaaccatggtgacgtcacgctggtggcaacggtgaccattctgatcatcgtgttcattatccagttctgcggcgatgccattacttcactgttagataaacgctaa

SEQ ID NO: 523732 - DNA, 813 bp, Stenotrophomonas maltophilia
atgaaaaagacactgacactgatcgccgcagccaccctgagcgccctgagctttgcctcctgggcggacacgctcaccgtgggggcgtccaacaccccgcacgcggaaattctggagcaggctaagccgattctggcgaagcagggtattgaactggagattaaaccgttccaggactacattctgccaaacacggcgctggcagggcatgacattgatgccaactatttccagcacatcccttacctgaacagcgtgcttaaagatcatgcgggcgataaggattatgattttgtcagtgcaggcgcaatccacattgagccgatcggtatctattcaaaaaaatacaaatcgctgaaggatctgccggaaggcggcaaaatcatcatgcgtgatgcggtttccgaggaagggcgtattctctccatcttcgaaaaagagggcgtgatcaagctgaagccaggcatcgataaagtgaccgcgcacatcagcgatattgtggagaacccgaaaaagctgcaattcacccctaacgtcgaggcatctctgctgccgcagatgtacaacaacgacgaaggtgctgcggtggtgatcaacgccaactacgcaattgatgccggtctggatccggtccacgatccaattgcggttgaaagcggtgagaataacccgtacgccaacatcattaccgttcatcgcggtgatgagaagaagaaggatatcgtcgcgctggtgaacgtgctgcactccaaagagattcaggactggatccgcaccaaatacaaaggcgcggtcatcccggtaaacaactaa

SEQ ID NO: 523733 - DNA, 210 bp, Stenotrophomonas maltophilia
atgggcaatgtgaccaaagacgaagcgctgtaccaggagatgtgtcgggtggtaggcaaggtcgttctggagatgcgtgacttagggcaggagcccaagcatatcgtgattgccggggtactgcgtaccgcgctggcgaaccagcgcgttaagcgcagtgagttgaccaccaaagcgatggaaacggtggttaaagcgctggccggttag

SEQ ID NO: 523734 - DNA, 174 bp, Stenotrophomonas maltophilia
atgacgatgaaaaaatggataagcacgttacggcggttttttgcgccccgaccagcgaatgcggagaacagcgcgcaacgtgttcttgagtcaatactgcctgtcgccagcctctatggcgtggacgtagccaacatcgacccggagtggttctatgttaaaacgtcacgctga

SEQ ID NO: 523735 - DNA, 1098 bp, Stenotrophomonas maltophilia
  misc_feature (1082)..(1091): n is a, c, g, or t
atgaaacggacagtattaacccccgcgctttctgccaccgtgctattgcttgccatgcaggcggcacacgctggtccacaggcgcatgttgtatgcagttattcccataccctcggcgatgatgccattatgatgtacggcatgcccaacgaggccatgctgcacgatttttttggtaacgtgcaaacggatgcttactccagccgtgaatcgctgcgtacccaggaaaagaccacctgcgataacaaagcagacagctcggcctactgggctccgtcgctaaaattaccggacggaacggtggtcaaacccgcctatcaaaaaacctattatcaggcatcgaacgttgacgcctggccgctgcacccgttcccggcggggctgtcgctgctggcgggcgatcatcacggcaccgcgccaaatccacatatcacctttttatgcgccaacggcaagggctacaccaccagaacgggtgaagtatgcggcttacgcaaggcgaaggatgccgtgcagtttaatatcggcattcagttcccgaactgctgggacggggtcaacctgaagcccgcccacggcctggctaacgccacctacgatacgaatggacagtgtccgtccgccttcccggtgaagatcccgacggtgaacatgaatattgcgtacgtgcttccgacaattagctctctggataccagcaaagtccagctttccctcgaccccaccatgcatggcagtgaacgtgaagagcgatgggggagcctgtatacggcgcatgctgacttcatgaacggctggacggaagatgccgcgcgctttatgaccgatctgtgcatgaaccgcggaatggattgcggcaccaccgtgccgtatggttattcaaaagcgaaggccaacgtctggctcagcagcatggaacccgcactttcacaacccgatccccaggtcttactggtgcaggataactggaagaacggtggacgcacgaaaaacagcgaaacattgtcgctggtgaagttcaacatccctccgctgcctgccggacaggatcctgcccagtataaataccgcgtgagaatttnnnnnnnnnnagtttaa

SEQ ID NO: 523736 - DNA, 336 bp, Stenotrophomonas maltophilia
gtgagaatttatggcgggaaagtggaaaccaacggcgcggatcaaatcttcttctatccggcgagcaacgactgggatccggccactgtgagctggcattcacggccgtcctgcaactatcgctcggatgcggtgctttacctgaaccactcccgcgaataccggatggtggacgtggataaagcggtgcgcaaggcgctggcagaagggaaaaccgaaatttcgtggtatatcggcggcgatcgtcagggaaaccactatcagtttgagacggggtcatctcaacaaagcctgatcctgatgctgaccgggtttagcaaaacgccggagatctga

SEQ ID NO: 523737 - DNA, 1311 bp, Stenotrophomonas maltophilia
atgataaagcgcagcatcgctgcatgggtggcggtctgcctgataagcggtatgctgctttatgcggaacagatacgtcgccagtactgggagcgcgatcgcgagtttacggcacgctattcggcgatcggcgcggtgctgacgcaaaacgaatcggtgcttccgcttctgagcggcgatgaagatattaccgcgttacgcaaaaagtttccttctgtcctggccctggaaaaaaccgcggggcgtgcgctggacgccccgcgtgtggagccgtttcgcggggtgcagtactggttatacaatccctggcggcagatacgcgtgctggtcgacctaagcgcgctgattcccgcgcgccatagctttgcgcagctgcatcttaacgtcacgaacggcgatggtccgccatcctccggcgctttctggcgctggcagcgcgctttcccgcagcatacccagcccttcgttcttacagccgaggcagagcctgactggttcagcgtttccctgctgccttacctgctgctctttctgacgtggggggtagcgattgcgggcgtgggaagcgtgctctggcagcgcaaacagcggcagcaggccgagcagcgcgcccgctattatcagcatgccaggcttaacacgctgggggagatcaccgcgggcattgtccatgaaattaaccagcctcttaccgccgtgcaaacctggatccagggggcgcagcgacagctcgaggctaatccgcaggccgtgccgcaggcgcttgcggccgcgctgctgcaaacgcaacgcatcagcgccctgctgacgcgctttcgcgagcatgtggtacaggagaaggtgactctgcgcgaaaccgatctggtgcagtgctggcagcaggttgagagcctgctggagcacgagcgcaaatcgaaccgtatcgcggtcatccacgcgtttgcagcggacgccacgaccgtgctggcagacaggctctggctggagcagatactgcacaacctgctcagcaatgcgattcaggctcagcaggagagcacgcacggctgggtgcgaatcgacagccagaaaaacgagaagggcattctggtcacgcttactgacggcggaccgggatttagcccggaggccctgcaaaacgcttttatgcccttctttagtggacgccccggcggaacggggctggggatgacgttaaccgaaacgctaataacccgcatgaccggctcgattgccctgggcaacgccccgcagggtggggcgcagatccggttgcagctcgcagaaggtaaggagacaaagcatggataa

SEQ ID NO: 523738 - DNA, 612 bp, Stenotrophomonas maltophilia
atggataaggtggtctggctcattgatgacgatgagtccatcagggaatcattgacgtttttactctccggaatgggctggcaggttaaggcattcgagagcgtcgatgcctttacgctggcgcacggcggcgaaacggcgcttgtcggctgtctgcttctggatatgcgcatgccgggcaagagcgggcttgcctggctggaggagggtgaatggccctggccgctgctgccagtcgttatcatgaccgggcacggaacggtcgacgcctgccgtcgcgcgtttcgcaacggcgtgtttgagttcttcaccaaacccctggatgccgacaggcttatcgaaacggttggcatggctttcgaagagagcctgcggcgatctgccgcctggcaggatatctcgcggattaaagcgcgattcgaacagctaaccgcgcgggagcacgaggtgttgaccgtgctgatggaaggatgcagcaataaagaggcggctgcgcgtcttaacctctccccgaggaccgtggaagcgcaccgcgcggcggcgtttgccaagcttggcgtcagcagcctggttcaggcgagccgggattatgacaaattgcaatccgtataa

SEQ ID NO: 523739 - DNA, 480 bp, Stenotrophomonas maltophilia
atgaaaaaagtattgatggtggcggcactggttgcaggtagcgtaagcctggctgcacgggcggatgcgctgaatcagaaaagcctctctctggcacaggctaacgcgctggcaacgtctgctgttaaggcctgtatggcaaagaactatcaggttacggtgaccgtggttgaccgcgcaggggttgttaaggcggtgcagcgcacggataacgctggtccacatacggtaaaagccagcgaaatgaaggcatataccgcgctgagtacgaaaaacgcgtcaggcaaggtaatggaagctgcacagactaacgcgggcgcgcagaatatgcttgatgttcccggcttcctgctgctggcgggtggtttaccggtaaaagagggcgatgaggtgattggggcgattggcatcggcggtgcgccgggcggtcatcttgatgaagcctgtgcccaggcggccattaacggggccggacagtaa

SEQ ID NO: 523740 - DNA, 141 bp, Stenotrophomonas maltophilia; identical to SEQ ID NO: 165685

SEQ ID NO: 523741 - DNA, 783 bp, Stenotrophomonas maltophilia
atgattacactctgtaaaacctgcggtaccgcttacgatgaacagcccaaaaactgcccgatttgcgacgatgagcgccagtatgtcccggtgacgggccaggcatggacggacttcgacagccttacgaccacgcacaccaacaaatggcaacagctggagccgcagctgttcagcatcaaaaccgttcccgcttttgccatcaaccagcgggcgcttctgctgagtacgccgcagggcaatgttctgtgggactgcatcgccaatcttgacctggcgaccagagcgttagttgacgcgctcgggggcatcagcgcgatcgcgatttcgcacccgcattactacaccaccatgcaggagtgggccgccgcgtttaacgcgccgatctatctgcacgccagcgatcggcagtgggtgatgcgtgacagtccggcgatacgcttctgggaggaggacgccctggagattatgccgtcggtgacgctgctgcgtctgggcgggcattttgcaggcggcacggtgctgcactggcagtcaggcgacggcgtgctgctggccggtgatattttgcaggttacgcctggtaaggacgccgtgtcgtttatgtggagttatccgaatatgctgccgctgcctgcccgcacagttgaggcggtgatcggtcgactgaccgggaaaacgtaccagcgactgtacggggcctttgaagggcaaaacatcccggcgaacgcagatgagattgtgcagcggtcgggccagaaatatattgcttgtctccgctaa

SEQ ID NO: 523742 - DNA, 636 bp, Stenotrophomonas maltophilia
atgcaacatatcattgaaggttttctcagctttcaaaaagagattttcccgcaacgtaaagagctttttcgtagtttagcgtccagtcagaatcccaaagcgctgtttatctcctgctccgacagccgtctggttccggaactggtcacgcagcaggagccaggacagctctttgtcattcgaaacgcgggcaacattgtgccaccgttcgggccggagcctggcggtgtctctgcaaccatcgaatacgcggtagtggcccttggcgtgaccgatattgttatttgcggccactccaactgcggcgcgatgaaggcgattgctgacaacgccgatctggagccgatgccagccgtttcccactggctgcgctattctgatgcggcaaaagcggtggttgagaagaaaacctgggatcagccaatcgataaagtgaatgcgatggtgcaggagaacgtctttgctcagctgagcaacatcaagacccatccgtcggtggcggtaggcctgcgcaacaacgccattcgcctgcacggctgggtgtatgatattgaaagcggcaaaatccttgccctggacaagaacactaaatccttcgtgtcgttgtcggaaaacccggaagtcttcttcgagtaa

SEQ ID NO: 523743 - DNA, 1596 bp, Stenotrophomonas maltophilia
atgaaaaaaatcgccattatcggctcaggcccaacagggatttacaccttctactcacttcttaccaacgcagcgcccctttcgatcaccgtgtttgagaaagcagatcagcccggcgtcggtatgccttacagcgatgaagataactcccgactgatgctggcgaatatcgccagtatcgaaatcccgcccatttttatcacctatctcgactggcttaaacagcaaaatgcagcccatcttgcccgctatagcgtcgacaaagacaaactgcacgaccggcagtttttgccccgtattctgctgggtgaatatttccacgaccgttttctcgccgtcgttgccgaggcgaaaaaggctgggtttcatatcgaggttcaccccaacgcagaagtcactgatattaaggctgatgcagacggtgtggtcctatcagtgaacgatgcccctttctcaaggcggtttgatcttgcagtggtcgccaccggtcacgtctggcctgatgaagatgaatccacccgcgactatttcccaagcccatggtcggggctgatggacgcggatatccgagcctgtgaggtggggattatgggtacctccctcagcggactggacgctgctatggcggtagtaatgcagcatggtcggtttagcggggagcagttcgttgtcaataaaggtagtgaggggctaaacatcacgctgatgtcccgctcgggcgttcttccggaggccgacttttactgccctatcccttatgaaccgctgtcggtgttaacggagtctgtggcagaaagcgaaattgccaaaggccctgacgggctgcttgaccgcatctttgcgctgatggtgaaagagcttgagctggccgatccgcgctggtgccaggcgatagcgatcggcacgctgaatgctgacacgcttcgtgatgtctggtttgaggatcgtaaaaagcatggtcctttcacctgggccgaagcgaatctgaaagaagtggagcgcaataagtgcgagaaacgcaccgttgcctggcgctataccgtgcttcgtctgcatgaagtagttcaggccattgtcccttcactcaatgaacgtgacagagaacggtttaaatccgggctggagcgtgtgtttattgataactatgccgccattccaccgcagtctatccgccggttactggcactgcgcgaggcagggaacattagcgtagtcgcactcggtgatgattacgacctggatatcggcagcgatcagaccgtcatcaccacgaaagaaaagcgttatcgcttcgacgtctttatcgatgcccgcgggcagaaaccgctcagaaataaggatattcccttcccgacgctgcgcaaacagcttgaggaaacgggggatgaaataccggacgtgggggaagactacacgttgctgtcacctgcgtctctgcgcggacgtatcgcttttggggcgatcccctggctgatgcacgatcatccgtttgttcagggtttgtctgagtgcgctgaaattggtaaagcgatggcgaaagcggcggggaatcctgcgtcgggcgtgcgacgaaaattacctttcatggagttttaa

SEQ ID NO: 523744 - DNA, 1362 bp, Stenotrophomonas maltophilia
atgatcgaagcgcgtcagttattggcactggccataccggtgatcgtcgcgcaggtagcccaaaccgcaatgggatttgtggatacggtaatggccggtggttacagcgccaccgatatggccgccgtggcgatcggaacctcaatctggctcccggccattctgtttggtcacggcctgctgctggcgctgacgcccgttatcgcgcagcttaacggctccggtcgacgcgaccgcgtagcccatcaggtgcgccagggcttctggctggccgggggtgtctccgtcctgattatgatcgtcctgtggaacgccgggtatattattcgcgccatgcataatatcgacccggcgctggcagataaagcagtcggttatctgcgcgccctgctctggggcgcgcccggttatctcttcttccaggtggctcgtaaccagtgtgaagggctggcaaaaaccaagccgggcatggtgatgggctttatcggcttgctggtgaacattcccgtgaactacatcttcatctacggtcattttggcatgccggaactcggcggcgtgggttgtggcgtggcgacggctgcggtgtactgggtgatgttcggctgtatgctcacctacgttaaacatgcgcgatccatgcgcgacattcgtaacgacaccgcctttagcacgcctgactggtcgatgatgagccgccttacccaactgggtctgcccattgcgctggcgctgttctttgaagtgacgctgtttgccgttgtcgccctgctggtctcgccgttagggattattgacgtggcaggccaccagatcgccctgaacttcagctctttgatgttcgtcctgccgatgtcccttgctgctgcggtgacgattcgcgtggggttccgtctggggcaaggctcgacgctggatgcgcaaacggcagcccgcaccgggctgggcgtcggcgtctgcatggcagtctgtaccgcgctctttaccgtgctgttgcgtgagcaaattgccctgctctataacgacaacccggaagtagtgaccctggcctcgcatttgatgctgcttgcggccatttaccagatctctgactccatccaggtaattggcagcggcgtgctgcgtgggtataaagatacgcgttccatcttctttatcacctttatcgcttactgggttctgggcctgccgagtgggtatattctggcgctcacggatctggtggtggatcgcatggggccagccggattctggatgggctttatcatcggcttaacgtctgcagccattatgatgatgctgcgcatgcgcttcctgcaacgtcagtcgtctgcggtaattttgcaacgcgctgcgcgttaa

SEQ ID NO: 523745 - DNA, 642 bp, Stenotrophomonas maltophilia
atgtttactggtattgtgcagggcactgccaaagtggtgtccattgatgaaaaaccgaatttccgcactcacgtagttgagctgcctgaatatatgctcgacggcattgaaaccggggcgtcgatagcgcataacggctgctgcctgacggtgaccgaaattaacggtaaccagataagctttgatttaatgaaagagacgctgcgcatcactaacctgggtgagctggtggtgggggataccgtcaacgttgaacgcgcggcgaaattcagcgatgagattggcgggcatctgatgtcgggccatattatgaccaccgcagaagtggcgaaaatcgtgacctcggaaaataaccgtcaaatctggtttaaggtgcaggatccgtcattaatgaaatacatcctttataaaggatttattggcatcgatgggattagtctgaccgtcggtgaagtgacgccgacgcgtttttgcgtgcatttaattcctgaaacgctgcaacgtactacgcttggcgcaaagaaactggggcagcgcgtaaatatcgaaattgatccgcagacccaggcggtcgtggataccgttgagcgcgtgctggcggcgaaagaggcggcgataataaaggccgtggaagaagaataa

SEQ ID NO: 523746 - DNA, 1149 bp, Stenotrophomonas maltophilia
atgagttcatcgtgtatagaagaagtcagcgttccggacgataactggtcccggatcgtcagtgaactgttgggacgtgcgggcattacgattaatggctcatccccctccgatccccagattaaacatcccgattttttcaaacgcgtgttacaggagggatcgttagggctgggtgaaagctatatggacggctggtgggagtgtgagcggctggatatgttcttctccagcgttttacgcgccggtcttgaaaatcagctccctcgtcatttcaaagatacgttacgtatcgcttccgcccgcctgttcaatctgcaaagtaaaaagcgcgcgtggatcgtcggtaaagagcattatgacctgggcaacgatctgttcagccgtatgctcgacccgttaatgcagtactcctgcggatactggaaaaaagcgacaaccctggaagaggcgcagcaggataagctacagctgatttgcgataagttgcagttgcagcccggcatgcgcgtgctggacatcggctgtggttggggcggccttgcctggtttatggcgaaacattacggtgtcagcgtagtcggcgtcacgatttcagctgaacagcagaagatggcacaggaacggtgtctgggtctggatgtcgatattcggcttcaggattaccgcgacctgaatgagcagttcgatcggattgtttccgtgggtatgttcgagcacgtggggccaaagaactacaagacttatttcgacgtcgccgaccataacctgaagcctgacggaattttcctgctacacaccatcggctctaaacgcaccgataacaatgtggatccctggatcaacaaatatatcttcccgaatggttgtttaccctctgttcgccagatagcgaacgccagcgaaccgcattttattgtggaagactggcataacttcggcgcagattacgacaccacgctgatggcctggcatgaacgtttccaggctgcatggcctgaaatcgccgacaactattcggaacgattcaaacggatgtttagctattatctgaatgcctgcgcgggtgcgttccgcgcgcgggatatacagctgtggcaggtggtgtttagtcgtgggattgagcacggcctgcgcgtggcccgctga

SEQ ID NO: 523747 - DNA, 1200 bp, Stenotrophomonas maltophilia
gtgcaacccaggaaaggatttttagtctggctcggcggcttaagcgtgctgggctttttggcgaccgatatgtatctgcccgccttcgccgcgatgcaggaagatttgcaaactcctgccgccgccatcagcgccagtttgagtttattccttgcaggttttgcttttgcgcaactactctggggaccgctctctgatcgttttggccgtaagcccgttctgttgctgggactggcgatttttgccgtaggctgtctgggcatgctgtgggtccgcgatgccgcctggttactggtgttgcgctttattcaggcggtcggcgtctgtgccgcagcggtcacctggcaggcgctggtgaccgattactactccgcctcacgcactaaccgcattttcgccaccatcatgccgctggtcggcctgtctccggcactcgccccgttactgggcagctggatcctggcgcatttcgactggcaggccattttcgccacgctctttgcgatcacgctggtcctgatgctgcccgcgttcgggcttaaacctgcgcataaaaaagagacgcatccggacgcgaagcccatcacctttacctctttactgcggtcgaaagcctatcgcggtaacgtgctgatttatgccgcctgctctgccagcttctttgcctggctgaccggttcgccgttcattttgcatgacatgggctacagcccggcggctatcggcctgagctatataccacagaccatcgccttcctggtgggtggctatggctgtcgcgccgcgctgcaaaaatgggaaggccagcagatgctgccctggctgctggtgctgtatgcgctaagcgtgattgcgacctgggctgtcggctttattcccggcgccgggcttgcagaaattttgattccgttctgcgtcatggcgatcgctaacggggccatctaccctatcgttgtagcccaggcgctgcgtccattcccgcaggcgacaggccgcgctgccgcgctgcaaaataccctgcaacttggcctgtgcttcctggcaagtctcgtggtctctgcgttgattgcaaccccgctgctcaccaccaccagcgtgatgctggtcaccgttgtgctggcaggattgggttatcgcatgcagtcctccgcccatcgcgagcagagtgaaaacgcgcagacagaaacgtcgcacgcctga

SEQ ID NO: 523748 - DNA, 912 bp, Stenotrophomonas maltophilia
atgtggtcagattattcccttgaagtggttgatgccgtggcgcgtaacggcagctttactggtgccgcccaggagttgcaccgcgttccctcggctatcagctatacggtgcgccagctggaagcgtggctggcagtcccgctgttcgagcggcgtcatcgcgacgtggagctcacgcctgccggcgcgtggtttttgaaggaaggtcggtctgttatcaaaaaaatgcagatcacccgtgagcagtgccagcagatcgccaacggctggcgcgggcatctcgctatcgcggtggataacattgttaagccggaacggacccggcagatgatcgtcgatttctatcgtcatttttccgacgtcgaactgcgtgtgtcgcaggaagtgttcaacggcgtatgggatgcgctggcggacggcagggcggagatggcgattggtgcaacccaggcgatcccggttggcgggcgctacgcgttccgcgacatgggcatgctgagctggacctgcgtggtcgcgcgcgatcacccgctggcggcgctggacgggccgctgagtgatgacaccttacgcaactggccctcgctggtgctggaagatacctcccgctcgctgcccaagcgcattacctggctgctggataatcagcgccgcgtggttgcgccggactgggagtcgtcagccacctgtctgagcgcggggctgtgcgttggcatggtgccggtgcattttgcgcgcccgcgcatcgacgcgggagagtgggtggctctgacgctggaaaatcctttcccggatgctgcatgctgtctgacgtggcagcaaaacgacgtctcgcccgccatggcctggctgctggattatctgggagacagcgaaacgctgaaccgggagtggttgcggggaccagcgtag

SEQ ID NO: 523749 - DNA, 1026 bp, Stenotrophomonas maltophilia
atggcaacaattaaagacgtagcaaaacgcgcaaacgtttccactacaaccgtatcacatgttattaacaaaacgcgtttcgtcgcagaagagacgcgtaatgccgtttgggcagcaatcaaagaactgcactactcgccaagtgcggtcgcccgtagcctgaaggttaatcacaccaaatcgattggcctgctggccaccagcagtgaagcggcttactttgctgaaatcatcgaagccgttgaaaaaaactgctttcagaaaggctataccctgattctgggcaacgcgtggaacaacattgaaaaacagcgcgcttacctgtcgatgatggcgcaaaagcgcgtcgacggcctgctggtcatgtgttctgaataccctgagtcggtgctttcaatgctggaagagtatcgccacattccgatggtagtgatggactggggcgaggcgcgcgcagacttcaccgactctgttattgataacgcctttgaaggtggctacatggccgggcgttatctggtagaacgcgggcatcgtgaaattggcgtgatcccgggcccgctggagcgtaacaccggtgctggccgtctggccggtttcatgaaagcgatggaagaggcgctgattaccgtgccagaaaactggattgtccagggcgatttcgagccggagtcgggctatcgcgccatgcagcagatcgtctcccagccgcatcgccctaccgctgtgttctgcggcggcgatatcatggcaatgggcgcgctctgcgcggcggatgaactcggcctgcgcgttccgcaggacatctcggtgatcggctatgataacgttcgcaacgcccgtttctttaccccggcgctgaccaccattcaccagccgaaagattcgctgggtgaaacggccttcaatatgctgatggacaggatcgtcaacaagcgagaacagtcccagtccattgaggtccacccgcgcctgattgaacgccgttccgttgccgacggtccgttccgcgactaccgacgttaa

SEQ ID NO: 523750 - DNA, 1167 bp, Stenotrophomonas maltophilia
atgaaaatcaattttcccctgctggccctggcgattggcgcctttgggattggcaccactgaattctccccgatggggttattgcctgttatcgcccggggtgtggacgtctctatccctgcggccggtatgttgattagcgcctatgcgatcggcgtgatggtgggcgcaccgctgatgacgctgctgctttcgcaccgcgcgcgacgcaatgcgctgattttcctgatggcaatttttactctcggaaatgtgctttccgcgatttcgccggattataccacgctgatgctttcccgtattctgaccagcctgaaccacggcgctttcttcgggctgggctcggttgttgccgcaagcgtagtgccaaaacataagcaggccagcgcggtagccactatgtttatgggcctcactatcgctaatatcggcggcgttcccgctgccacctggctcggagaagccatcggctggcgtatgtctttcctcgcaaccgccggactgggcgtggtcgcgatggtcgcgctgttcttctcgctgccgaaaggaagtgcgggagaacgtccggaagtacgtaaagagctggcggtactgatgcgtcctcaggtgttgtccgcgctgctcaccacggtgctgggggcaggggcgatgtttacgctctacacctatatctccccggtgctgcacgacataacccacgcaacgccactctttgttaccgcgatgctggtgctaattggtgtcgggttctcgattggcaactatctcggcgggaaatttgccgaccgctccgtcagcgggacgctgaaaggttttttaacgctgctgattgtcatcatggtggcgatcccgtggctggcgcgtaacgaagtgggcgccgcggttgccatggtggtgtggggcgccgcaacctttgccgtggtgccgccgttgcagatgcgcgtgatgcgtgttgcgcatgaggcgccggggctctcatcatccgtgaatatcggtgcgtttaacctgggaaatgcgctgggagccgcagcgggtggggcggtgatctccagtggtttgggttacagctttgtgccggtgatgggggcgatcattgccgcactcggcttgctgctggtgttgatgtccgggcgtaaacagccagaagcggtgtgtacggcggaataa

SEQ ID NO: 523751 - DNA, 582 bp, Stenotrophomonas maltophilia
atgtcgttcgaattacctgcactaccgtatgcaaaagacgccctggctccgcacatttctgcggaaaccctggagtaccattacggcaagcatcaccagacctatgtcaccaacctgaataacctgatcaagggcaccgattttgaaggcaaaacgctggaagagattgtgcgcagttcagacggtggcgtattcaacaacgccgctcaggtgtggaaccacaccttctactggcactgcctggcaccgaatgcaggtggggaacctaccggtgagctggccgcagcgattaacgccgcgttcggcagcttcgcggatttcaaagcgaagtttactgacgccgccgttaaaaactttggctccggctggacctggctggtaaaagaggctgatggcaaactggctatcgtttccacttctaatgcgggtacccctctgaccaccagcgcaacgccgctgatgaccgtggacgtatgggaacacgcctattacattgattaccgtaatgcgcgcccgaactacctggaacatttctgggcactggttaactgggaatttgttgcgaagaacttcgccgcataa

SEQ ID NO: 523752 - DNA, 759 bp, Stenotrophomonas maltophilia
gtggcgcggataactaaaatctcgatgacgctctgtgctttactgtttaccacactctcatttacgccagcggcgaacgcctccgaacaggcgcggcattctgctgtacaaaaaacgcatctggcaaaaaccacagaacgtaagaaaaaaaccaccagcaaaacagtaaagaagaaaaccaccgctcacaccaaaaagaccgcctccagtaaaaccaaaactctccgttccggcacgcacaaaaccactcgcacgaccgccagcctggtgaatgataaatgcaccgtgcgcaaaggccataaaacgaaatgcgccaaagtgacgaagctggctgacgtgcataaagcgcgtatgcagaaagcgcaaaaaacggcgatgaataaactgatggggcaaataggtaaaccatatcgctggggtggcacctctccgcgcaccggttttgactgtagtgggctggtttattatgcctataaagatctggtgaagtttcgcattccacgcaccgccaatgagatgtaccatctgcgcgacgccgcgcctgtaaaccgtggcgaactgcaaaatggcgacctggtgttcttccgcacccaaggacgcggcacggccgatcacgttggggtgtatgtgggtaacggtaaatttatccagtcaccgcgcagcggtcaggacattcagatcacctccctcagcgaagattactgggtgcgccactatgtgggtgcgcgccgagtgatgacgccaaaaaccattcgctag

SEQ ID NO: 523753 - DNA, 348 bp, Stenotrophomonas maltophilia
atgagcaccactattgaaaaaattcagcgccagatcgctgaaaacccgattctcctgtacatgaaaggttctccgaagctgccaagctgcggcttctccgcgcaagcggttcaggcgctgtccgcctgtggtgagcgttttgcttacgttgatatcctgcaaaacccggacatccgcgctgagctgccaaaatacgcaaactggccgaccttcccacagctgtgggttgacggtgaactggttggcggctgtgatattctgattgaaatgtatcagcgcggcgaactgcaacagctgatcaaagagactgcggcgaagtataaaaccgaagagccggacgcagaataa

SEQ ID NO: 523754 - DNA, 828 bp, Stenotrophomonas maltophilia
  misc_feature (551)..(560): n is a, c, g, or t
atgtccgataacgctcaatttaccggtctgtgcgaccgttttcgtggtttttatcccgttgtcattgatgtagaaacagccggatttaacgctaaaaccgatgcgctgcttgagattgccgccatcacgctgaagatggatgaacagggctggcttgtaccggacaccacgctgcatttccacgttgaaccctttgaaggggcaaacttacagccagaggcgctggcctttaacggtatcgatccgacaaacccgctgcgcggggcggtaagcgaatacgaggcgctgcacgccattttcaaaatggtgcgcaaaggcatgaaagagaatgactgtagccgcgccatcatggtggcccacaacgctacgttcgatcacagcttcaccatggctgccgccgagcgcgcctcgctaaagcgtaatccattccatccgtttgtgaccttcgacaccgccgcgctgagcggcctggcgctggggcaaaccgtgctctctaaagcctgcatcacggcgggtattgcgtttgacggcactcaggcgcattccgcgtnnnnnnnnnngcgttatacgataccgagcgtacggcggagctgttctgtgagatcgtcaaccgctggaaacgtctgggtggctggccgctgccgatgggcgacgaggccgatcttcaatcgtagactgggtaatcaacagccccacaggacaaaaaaaagcgaccaacataatgtggtcgcttttttatatccgcagaaaacttattctgcgtccggctcttcggttttatacttcgccgcagtctctttgatcagctgttgcagttcgccgcgctga

SEQ ID NO: 523755 - DNA, 303 bp, Stenotrophomonas maltophilia
  misc_feature (212)..(221): n is a, c, g, or t
atgcgcctacttcacaccatgctgcgcgttggcgacctgcaacgttccatcgatttctacactaacgttctgggcatgaagctgctgcgcaccagcgaaaatccggaatataaatactctctggcgtttgtcggttacggcccggaatctgaagaagcggtcatcgagctgacctacaactggggcgtggacagctacgagctgggtacggnnnnnnnnnngctgaagcctgcgaacgtatccgcagcaatggcggtaacgtcacccgtgaagccggtccggttaaaggtggcaccaccgtga

SEQ ID NO: 523756 - DNA, 1098 bp, Stenotrophomonas maltophilia
atgtccgctgaaaagctatttaccccactgaaagtgggtgccgttactgccccaaaccgcgtgtttatggccccacttacccgtctgcgcagcatcgagccgggagatatcccaacgccattgatgggtgagtattaccgtcagcgcgccagctcgggcctgattatttccgaagccacgcagatttctgcccaggctaaaggctacgccggtgcgccgggtctgcacagcccggaacagatcgccgcgtggaaaaaaatcaccgcaggcgttcatgctgaagatggccgtattgcggttcagctgtggcacaccggtcgtatctcgcacagtagcatccagcctggcggtcaggcgcccgtttctgcctctgccctgaatgcgaatacccgcacttccctgcgcgatgaaaacggtaatgctattcgcgtcgacaccaccacgccacgcgcgcttgagctggacgagatcccgggtatcgtgaatgatttccgtcaggccgtcgccaacgcccgtgaagcgggcttcgacctggttgagctgcactctgcgcacggctacctgctgcaccagttcctgtcaccgtcttccaatcagcgtaccgaccagtacggcggcagcgttgaaaaccgcgcgcgtctggtgcttgaagtggtagatgccgtgtgtaatgagtggagcgcagatcgcattggtattcgagtttccccaattggtaccttccagaacgtcgacaacggtccgaacgaagaagcggatgcgctgtatctgattgaagagctggctaaacgcggtatcgcgtatctgcacatgtccgagccggactgggcaggcggcaagccctacagcgaagccttccgccagaaagttcgcgagcgcttccacggcgtgattatcggggcgggcgcttatacggcagagaaagccgaggatctgatcggtaaaggtctgatcgacgccgtggcctttggccgtgattacattgctaacccggatctggttgcccgtttgcagaagaaagccgaactgaacccgcagcgccctgaaagcttctatggcggcggcgcggaaggttataccgactacccttcactgtaa

SEQ ID NO: 523757 - DNA, 537 bp, Stenotrophomonas maltophilia
atgcatcgcgggtttaccggtatggggctgagtgagttattaaaaaccgctgaagtgcctaagggatcgttttatcactattttcgatccaaagaggcgtttggcgtagccatgctggagcggcactacgccagctaccatcagcgcctggcagcccacttcgccagcggcgaaggtgactaccgggatcgtgttctgaactactatcaggaaacgctgacgcagttctgtcagcagggcatcatcagcggctgcctgacggtaaaactgtctgccgaagtgtgcgatctctccgaagatatgcgcaccgccatggataaaggggccagcggcgtaatcgctctgctggctcaggcgctggaaaaaggccgcgatgaaacaacgctctccttctccggcgatccgctcacgcaggcacaggtgctctattccctctggttaggcgccaacctgcaggcaaaaatgtctcgcagcgccgtgccgctcgaaagcgcgctggcgcatgtgaaaaactgtattaccgcgcctggcgtgtag

SEQ ID NO: 523758 - DNA, 1626 bp, Stenotrophomonas maltophilia
atgtggctcactaaaaagttacactgtaacgatacgaaatttaccctcgcctgtgcgcttttcttcaccgtgttcaatgtgctgtttatccagcgcagctggtcaattatcgcacctgcccgtctgcacgacgtgctttttgccgccagtgtgccgctggttctgttctgcggctgggtcattgtttttagcctgctgaatattccctttattcgcaagccgctcatgattgccctgaccataggatgcgccgccgcgacctggtttatgtacacctatggcgcggttatcgatcaaaacatgattgtgaacgtgtttgagactaactcccaggaagcgacagccctggtaacgccgcagctgatcctgtggctggccgtcgcgggtctggtcccttccgtcatcttagccctgacgcgcattcgaaccggaaaatggtggtatgccctgctaacacgtttcgccgctatactgggtgcgctgctggtgatcattctcgtcgcggcagtgttctataaagactatgcttcgctgttccgcaataacaaaagcatcgtcaaaatggtcactccggcgaactacgtgagcgccgttgtgaagtacagtaaaatgcgctggtttgccggcgaccagacgctggtccgcattggcgaggatgcccataaaggcgcgctgatttccggccagcacaagaaaaccgtgctggttctggtggtgggcgaagcctcccgcgccgcaaattactcgttaaatggttacccgcgtgaaaccaaccccgagctgaaaaagcgggatgtcatcaacttcccacaggcctcttcctgtggcacggaaaccgccgtttccgtcccctgcatgttctccggcatgacgcgaaaaaaatatgacgcggacctcgcccatcatcaggaaggactgctcgatgtgcttaaccacgccgggttcaacctgctgtggcgcgacaatgacggcgggtgtaaaggtgcctgcgaccgcgtgccacacacggacatgacccagtggaaactggatcagttctgtaaggacaaatcctgtatcgacgacgtcaacctgtaccgcctggacaacgtgctggacggaataaagcaggataccgtactggtgatacacctgatgggcagccacggtccggcttattacaaccgttacccggaccgcttccggaaattcaccccaacctgcgataccaatgaaattcaggattgcgatcatcagtcgctgatcaatacctatgacaactcgattctgtataccgatagcgtgctcagccgaaccatcgacgcgctaaaagcccggcaggccagtatgaacacagcgctcatttacctctccgatcacggcgaatcgctgggcgaaagcggaatttacctgcacggtacgccgtatatgctggccccggagcagcaaacgcatattccgtttatgttctggctctccccggactatgcgaaaaacttcggcgtaaacacggattgcctgcgtaaccatgctgcaaaagaggcagtttcacaggacaatttgtttgccacggttctgggcatgatggacgtgaaatcagtggtttatcagccgcagctggatattttgtcgcaatgtcgtcgctaa

SEQ ID NO: 523759 - DNA, 936 bp, Stenotrophomonas maltophilia
  misc_feature (771)..(780): n is a, c, g, or t
atggttcagcgtattacccttgccccgcagggcccggaattctcccgattcgttatgggctactggcgccttatggactggaatatgtctccggtccagctggcggactttatagaagagcatctcgatctcgggatcaccaccgtcgatcacgctgatatttatggcggctatcagtgcgaggccgcttttggcgaagcgctgaagcgtgcgccagcgctgcgtgaacgtatggagattgtgaccaaatgcggtattgccaccacagcaaaaccggagcatgcacttgggcattacatcactgacagcgcgcatatcgttaaaagcgccgagcagtcactggtcaacctggccaccgatcgtatcgacctgctacttatccaccgtcccgatccattgatggatgcggacgaggttgcagaagcgttcctgacgctacaccagagcggcaaagtgcgtcattttggcgtgtctaacttcaccccggcacagtttgcgctattgcagtctcgcctgccgtttacgctggcgacgaatcaggtggagatctcgcctgttcaccagccgctgctgctggacggaacgctcgatcagctgcaacagttacgcattcgtccgatggcctggtcttgtctcggcggcggtcgcctgtttaacgatgaggccttccagccgctgcgtaacgagcttgaaaccgtggcccgcgaactgaatgcggaaagcatcgagcaggtggtttacgcctggatcctgcgcctgccgtctaaaccnnnnnnnnnnccggcaaaattgagcgcgtacgcgctgcgctggtggctgaagagctggatatgtcgcgtcagcagtggttccgcatccgcaaggcggctctgggctacgacgtaccctgagtgcgtggagtctgactttccggtgaaatctgcgcctctggtatag

SEQ ID NO: 523760 - DNA, 519 bp, Stenotrophomonas maltophilia
atgaagcgttttgctctggcagtggtcacgctggttgtttgcgcaggagcgcaggcagccagcgaagaagttgaaatgaatctcgtcacttctcagggggtaggccagtccatcgggacggtgaaaatcaccgaaaccgataaagggctggaatttgctcccgatctcaaggcccttccacccggtgaacatggttttcacgttcatgccaaaggcagctgtcaacccgcaatgaaagaggggaaaccttcagccgctgaggccgctggggggcatctggatccgcacaactctggtaagcatgaaggcccggaaggtatggggcacctcggcgatctgccggtgctggtggtgaataacgacggtaaagccaccgatccggttgttgcgccccggctgaaaaagattgacgaggtcaaaggcaaggcgctgatggtccatgtgggcggcgataacatgtccgatcaacctaaaccgcttggcggcggcggggcgcgctatgcctgcggggtgatctga

SEQ ID NO: 523761 - DNA, 2037 bp, Stenotrophomonas maltophilia
atgatgaacctgggggctttctcctggcgcaatacgccgtggataaaagcgacacggccgcagtggcgttacgcgctgcgtaacggcatcgccatgtgccttgcgcttacggtagcctattatctgaatctggatgagccttactgggcgatgacctctgctgcggtcgtcagcttccctaccgtcgggggcgttatcagtaaaagcctcgggcgcgtggcgggtagcctgctgggtgcgaccgctgcactgcttcttgccggccataccctgaacgatccctggctctttctgttaagcatgtcggcatggctggggctgtgcacctgggcctgcgcccattttaccaacaacgttgcgtacgcgtttcaactggcaggttacaccgcagccattatcgcctttccggtcgtcaacgtgctggataccaccgagctatgggacatcgcccaggcacgcgtatgtgaagtgatggtcggcattctgtgcggcggcgtcatgatgatgatcctgcccagcacctcggatggcactacgcttatcaccgcccttaaaacgatgcacgcgcgtttgctggaacatgccagcctgctctggcagcctgatagcagcgataacatccgtctagcacacgaaaaggtcatcggccagatcctgaccatgaacctgttacgcatccaggcattctggagccactaccgttttcgtcgccagaacacgctcctgaactatttactgcaccagcaattgcggatgacgagtgcgatctcgagccttcgccggatgttgctgaactggcctgcgccgccagcccatacccgggaagttatcgaggcgctgctcgccgcccttgcgcgtccggatgccgatatctataccgtggcccgtattatcgcgccgctcaccccaacggatgaatatgattaccggcaccgcgccttctggcagcgtctgaactatttctgccgcctgtatctgcgcagcagccgctggttaaaagccgtcgaaaatgccacgcccgtcaccgaattttccgttcccggtagcccagctctggcgcgccataccgacgcaatggaggcgctgtggagcggttttcgtacgttttgcgcgttgacggccgtgggcgcatgggccatcaccacccaatgggatgcgggcagtgcagccctgacgcttgcggcaatcagctgcgtgctctattccgtcgcagcttccccgtttaattccctgacgcttctgctgcgtacgctggtactgctgtcgctgttcagcttcgtggtgaaatttggtttgatggtgcagataaccgacctctggcaatttctgctgtttctcttcccgctattaaccaccatgcagttgctcaaactgcaaatgccaaaactggccggtctgtgggggcagttgattgtttttatgggctcatttatctctgtaacgaatcctccggtttacgattacgctgattttctcaacgataacctggcgaagatcctcggcgtggggctggcgtggctggctttcgccgtgctacgcccgggctcggatgcgcgtaaaagccgcaggcatattcgtgagctgcgcaggggttttgtcgatcaactgagtcgcagcccgcatctgcgtgaaagcgagtatgaatcgctggtttaccatcatgtcagccagctgaacaacagccaggattccctctcccgtcgctggctactgcgctggggcgtggtgctgctgaactgttcgcacgtggtgtggcagctgcgtgcctgggagacgcgttccgacccgctttcgcaggtccgcgataattgtatttccatgcttcgcgatgtgatgagcgagcgcggagttcagcaacgtcccctgagcgtcacgctcgccgagcttcagcgtatttgcgacgctctggcgcaccaccatcagcctgcggcccgcgatctggcgtccattatctggcggctgcactgctccctgtcacagcttgaacaggcgccgccacccggaacaattggcgatcagatcaccccgcaggcatag

SEQ ID NO: 523762 - DNA, 804 bp, Stenotrophomonas maltophilia
atggccggctggtggctctggaattattacatgcagtcgccctggacgcgtgacggcaagatccgcgcagaacaggtcagcatcacgccacaggtgtccggcagtatcagcgcgctgctggtgaaggacaaccagtttgttcatgcgggcgatgtgttattccgcatcgatgagacccctttccacattgcggtgctcaatgcccaggcgcagctcgcaaaagctcaatcagatctggcaaaagccaataacgaagccgaacgtcgccgacatctgtcgaggaattacatctctgcggaagatctcgataccgccaatatcaatgtaaaagccatgcaggccagcctgaaggttgcagaggcaacgctgaaacaggccgagtggcaactgacccagaccgtggtcaaagctccggtggatggatggatcacgagcctgtcgacccgtgtgggggattacgccaccacaggccagccggtctttgccctggtagatagccactctttctatgttgtaggttattttgaagagaccaagctgcgccatatccgcgagggtgcgcctgcccggatcacgctttacagcggtgcagaaaagttacagggtcacgttagtagcataggtcgggcaatttacgatcagagcgtggaaaccgattctggtctggtgcctgacatcaaacccaacgtaccgtgggtgcgtctggctcagcgggtgcctgttcgcgtcgagtttgagcaactgccgaaagacattactctggtctctggcacaacctgcaccgtcgccatcggatcgcgatga

SEQ ID NO: 523763 - DNA, 237 bp, Stenotrophomonas maltophilia
gtgacgttcttttccctctccgcagggttgcccctccaggatctgattgtcggcgcatcggtctactttccgccactgtttaaagccgtgatggtcggttttgtgatctggctcattgcgcatcgtctgctgcgcgactggatgtattccggtgaaatctggcacccgatgttaatggatctctccctgtttaccctttccgtctgtcttggccttgccgtgttaaccgtgtggtga

SEQ ID NO: 523764 - DNA, 435 bp, Stenotrophomonas maltophilia
ttggaatcgccattaggttctgatctggcaaggttggtacgcatctggcgtgctctgattgaccatcgcctgaaacctctggaactcacgcagacgcactgggttacgctgcataacattcatcagctcccgcccgaccagtcacagatccaactggcaaaagcgattggcattgagcagccgtcactggtgcgcactcttgaccaactggaagagaagggacttatctcccgacaaacctgcgccagcgaccgtcgcgccaagcggatcaaattgacggaaaaagcggccccgattattactgagatggaagctgtcatcagtaaaacgcgtggggagatccttgaaggtatttcccccgctgagctggagatgctgataggactcatcgcccgtcttgagcagaacatccacgatctgcagtctcgcgactga

SEQ ID NO: 523765 - DNA, 1338 bp, Stenotrophomonas maltophilia
atgaaccgctttgtggcctttgcacttgggtgcatttttatcattgccgtgttacaaggttgttttataaaacttgttgaatgggttccttcattctctccgctatttttccctacgctcactatttttcttctggtattccatctgtttatcgcctgttttatggcaatgaaatactggtgtgataaaaaacggctatatctcgttccgattgcgtcagcctttgccggttcagcactgctgatggtgggtacgctatccagttttccaggctggctggatctctatcagttcaacgaggcgaactataatgacgcgatgatcttttatatgttccgacacctcttaatggcggtgctcatgatggcctcagccttactttatacgcttcgcgtttcccccctttcacgaagcacccacatcggtattgttgtcggatcggctctctttacgggctgcatgctttggctggcgtggttctattccagccattccacgacgttaaccctggatcttgtggataatgaaacccggcagttcatgattctctggagccagaccatcaacatcattttggtcattctttgggttgtcacattaatcaccctgatggtcgtgacccggataaaaaatttgttctgggcgggcggcaattttttatgcgtctgttatgtcgtcacgctgttaatgctgttgttaggtggatacgtagaagatgtatcatggtaccgcgcccggttattcgaaactgtcgcgacattaatgattattttcattttgctttccgacgtctttaatttgtatcgtgactcgcacgtcaaataccagcagtcatatcaaaattcaatccgcgacccgcttacccgtctttataatcgcagctatttttatgattcattaaactatgccctcagctctgcaacggaggcacacccggtatcggtggtggtaagcgaccttgaccgtttcaaacgtatcaacgactgttacgggcatttgcagggcgataaggtattacagttcgtctctaatctgttgacggattccgtgcgcccccaggatatcgcggcccgaatcggtggtgaagagtttgtgttgatgctgacaaataccccttcagacgccgcgcggcaggtggccgagcgcattcgcctcaagctgagcgggtttgataaagccagcagcggcggtcatctgccggaacccattaccatcagcatgggcgtattcaccgcaacctcgccggaaaccagtgcggaaacctgcgtggagagcgcggataaagccatgtatgaggcaaaagagacagggcgcaaccgggtggtggtgttcagataa

SEQ ID NO: 523766 - DNA, 468 bp, Stenotrophomonas maltophilia
atgattttacgtgtactgggcgtttcgctgattggtttaacactggcgggttgtgtgaacgacaattcactctccggcgacgtatatagtgcttctgaagctaaacaggtacagaacgtgacctacggtactatcgttaatgcccgtcctgttcagattcagggtggtgatgacacgaacgtcgtgggcgcaatcggtggtgctgtgctgggtggtttcctgggtaacaccattggtggcggcaccggtcgctctctggctaccgcagcaggcgcagttgcaggcggcgtagcgggtcagggcgttcagggtgcgatgaacaaaactcagggcgttgagctggaaatccgtaaagacgatggcagcaccattatggttgtgcagaaacagggtaatactcgcttctctgcaggccagcgtgttgtactggcaagcaacggtagccaggtcaccgtctccccgcgttaa

SEQ ID NO: 523767 - DNA, 1125 bp, Stenotrophomonas maltophilia
atgaaatcgggtcgctatatcggtgtgatgtctggtaccagtcttgacggtgtggatgtcgttctggccgccattgatgaaaacatggtggcgcagcaggcaagcctgacctggcctattccggtctcgttaaaagaagagatcctgaacatctgccaggggcaacagctgacgctttcccaactgggccaactggatgtgcgtctgggggcgctgtttgctgatgcggtattggccctgatgcagcaagaaagacttcatccgcaggatgtcgtggcaataggctgccatggacagaccgtctggcatgaacctgtcggcgaggcgccgcacacgatgcaaattggcgataataaccagattgtggcaaaaaccggcgtgacggtggtgggggatttccgtcgtcgcgatatggccctcggcgggcagggggcgccgctggttccggcatttcatcaggcgctgctggcgcacccggtggagcgcagaatggttctgaacattggcgggattgccaacctgtcgatgctcattcccgggcagcccgtgcgtggatacgataccgggcccggtaatatgctgatggatgcctggatctggcgtcagaacggtaaaccctacgacaaagacgcgcagtgggccagccaggggaaagtgatccttcccttgctgcaagccctgttaagcgatccattctttgccctgccagcgccgaaaagcacggggcgagagtatttcaactacggctggcttgaacgtcatctggcacgcttccccggccttgcgcctcaggatgtgcaggctacgctgactgagcttaccgccgtgtcgatttctgaacaattgttgctcagcggcgggtgcgagcgtctgctggtatgcggaggcggaagccgcaacccgctcctgatggcacgcctcgccgccttgctgccgggcaccgaagtcacgaccactgacgaagccgggatcagcggagacgacatggaagcgctggccttcgcctggcttgcctggcgtacggttgccggtctgcccgggaatttaccctccgtaaccggtgcgcgggaggcgagcgtcctcggtgctattttcccggcaaatccgcgccataatcagagttaa

SEQ ID NO: 523768 - DNA, 324 bp, Stenotrophomonas maltophilia
atgaaaaaacttcttctcattgctgtaccttttcttatgaccggatgcagcgtctataaccagttcgttgagcgtatgcaaaccgataagctggaatatcgttgtgatgaaaaaccgctgacggtgaagctgaacaacactcgccaggaagccagctttgtttatgacaataagttgttgacgctgaagcaggggatgtccgcctccggggcgcgttacacggatgggatctacgtcttctggtcaaaaggtgacagcgccaccgtctataagcgagaccgcattgtgctgaacaattgtcagctggaaaatccgaagcgttga

SEQ ID NO: 523769 - DNA, 657 bp, Stenotrophomonas maltophilia
atgtcagataacgacgaactacagcaaattgcgcatctgcgccgtgaatacaccaaaggcggtctgcgccgccaggatcttcccgccgaaccgctggtgctttttgaacgctggctgaaacaggcctgcgaagcgaaactggccgacccgacggcgatggtcgttgccacggttgatgaaaacggtcagccgtatcaacgcatcgttcttcttaagcattatgacgagaaagggctggtgttctacaccaaccttggtagtcgtaaagcgcatcacctggaaaataatccgcgtattagcctgctcttcccgtggcatatgcttgagcgccaggtgatggttaccggcaaggcagagcgcctctctacgctcgaagtggtgaaatatttccacagccgaccgcgcgacagtcagattggcgcctgggtttctaaacagtccagccgaatctcggcccgcggcgtacttgaaagtaaattcctcgaactcaaacagaagtttcagcagggtgaagtgccgctgccgagtttctggggcgggttccgcatccccattgagcagatggaattctggcagggcggtgagcaccgcctgcacgatcgctttttataccagcgcgacaacggtggctggaaaatagaccgactggcaccgtaa

SEQ ID NO: 523770 - DNA, 1275 bp, Stenotrophomonas maltophilia
atggcaagcagtaacttgattaaacaattgcaagagcggggcctggtggcccaggtgacggacgaggaagcgttagcagagcgactggcgctaggcccgatcgcgctctattgcggcttcgatcccaccgctgacagcttgcatttggggcatcttgttccattgttatgcctgaaacgcttccagatggcgggtcataagcctgttgccctggttggcggtgcgactggtctgattggcgacccaagtttcaaagccgctgagcgtaagctgaataccgaagacaccgtgcaggagtgggtggataagatccgtaaacaggttgcaccgttcctggatttcaactgtggtgacaacgctgcgattgcggcgaacaactacgactggtttggtggcatgaacgtgctgacgttcctgcgtgacatcggcaaacacttctctgttaaccagatgattaacaaagaagcggtcaagcagcgtcttaaccgtgacgatcagggtatctctttcaccgagttctcctacaacctgttgcaggggtatgacttcgcctgcctgaacaagctgcacggcgtgtcgctgcaaattggcggttctgatcagtggggaaacatcacctccggtatcgatctgacccgtcgccttcaccagaatcaggtgtttggtctgaccgtgccgctgatcaccaaagcagacggtaccaagtttggtaaaaccgaaggcggcgcagtatggcttgatccgaagaaaaccagcccgtacaaattctaccagttctggatcaacacggcggatgccgatgtttatcgcttcctgaaattcttcacctttatggatatcgaagaaatcaatgcgctggaagaagaagacaagaacagcggtaaagcaccgcgcgcccagtatgtgctggccgacgaagtgactaaactggttcatggtgaagaaggtctggcagcggcgaaacgcattacggcgagcctgttcaacgggaccctgagcgatttaagcgaagaggatttcgaacagcttgctcaggatggcgtgccgatggtggagatggaaaaaggcgccgatctgatgcaggcgctggtggactccgagctccagccgtctcgcggtcaggcgcgtaaaaccatcgcctctaacgcgatcaccattaatggcgaaaaacaggccgatccggaatacacctttaccgagaacgaccgtctctatggtcgctacacgctgctgcgtcgcggtaagaaaaattactgcctggtctgctggaagtaa

SEQ ID NO: 523771 - DNA, 426 bp, Stenotrophomonas maltophilia
atgaagaacatcctcgccattcagtcccacgttgtttttggacatgctggcaacagcgctgcggaattcccgatgcgccgcctcggggccaacgtctggcccctcaataccgttcagttctcgaatcacacccagtacggtaaatggaccggctgcgtgatgccgccgtcgcatctgacggagatcgttcaggggattgcggatatcgaccagcttaaacgctgcgatgccgtactgagcggttatctgggttcggcggagcagggggagcatatcctcggcattgtgcgccaggtgaaagcggcaaaccccgcggcgaaatatttctgcgacatccggaaaaaggctgcatcgtcgcgccgggcgttgcggagtttcatgtccgtcatgcattgcctgccagcgatattattgcgcccaacctga

SEQ ID NO: 523772 - DNA, 456 bp, Stenotrophomonas maltophilia
ttgcctgccagcgatattattgcgcccaacctgattgaacttgagatcctgtgcgagcatccagtcaacagcgtagaagaggctgtacgcgcctctcgcgagctcatcgcccaggggccagagattgtactggttaagcacctggcacgcgcagggttgagccaggaccgttttgagatgctgctggtgaccaaggacgaagcctggcacatcagtcgaccgctggtggatttcggtgcacgtcagcctgtcggagttggggatgtgaccagcggtttgctgctggtgaagctattgcagggcgcaagcctgcgcgatgcgctggagcacgtcaccgcagccgtttatgaaatcatgattgcgacgaagacgatgcaggaatatgagctccaggtggtcgcggcgcaggatcgcatcgcgaagcccgagcattatttcagcgcaacccaattgtaa

SEQ ID NO: 523773 - DNA, 606 bp, Stenotrophomonas maltophilia
atgaaactgttctataaaccgggcgcctgctctcttgcttcgcatatcacccttcgcgagagcggtaaggatttcacgctggacggcgttgacctgatgaaaaagcgcctggaaaacggggatgacttttttgcgattaacccaaaagggcaggttccggccctgctgctggatgacggtacgctgctgaccgaaggcgtggcgattatgcagtacctggccgacaacgtgcctgatcgtcagctgctggcaccaacaggcagtatctctcgctataaaacccttgagtggcttaactacatcgcgaccgagctgcacaaaggctttacgccgctgttccgcccggatactccggaagagtacaaaccgaccgtacgtgcgttacttgagaaaaagatgcagtacattaatgactcactgaaagacgatcagtggatctgcggtgcgcgtttcaccattgctgatgcgtatctgtttaccgttctgcgctgggcgcgcgcggtgaagctgaacctggaaggattagatcatattgcgtcgtatatggaacgcgtagcggcacgccctgcggttgcagcggcgctgaaggcagaagggttgaattaa

SEQ ID NO: 523774 - DNA, 1509 bp, Stenotrophomonas maltophilia
gtgtctactgcaaacaataaaccaacagatgagagcgtaagtcttaacgctttcaaacagcctaaagcgttctatctcattttctctatcgaattatgggagcgttttggctactacggcctgcaagggattatggccgtttacctggttaagcaactgggtatgtccgaagccgattccatcacgctgttctcgtccttcagcgctctggtctatggcctggtcgccatcggcggctggttaggcgataaagtcctcggtacgaaacgtgtcattatgctgggcgccgtggttctggcgattggctatggtctggttgcatggtccgggcacgatgcgggcgtggtatacatgggcatggctaccatcgcggtaggtaacggcctctttaaggctaacccgtcctccctgctttctacctgctacaacaaagatgatccgcgtctggacggtgcatttaccatgtactacatgtccatcaacatcggttcattcttctctatgctggcaaccccatggctggccgcgaaattcggctggagcgtagcgtttgcgctgagcttcgtgggtatgctgatcaccgttgtgaacttcctgttctgtcgcagctgggttaaagattatggttctaaaccagacttcgaacccgtgcatatgggcaaactgctggcaaccatcgtcggcattgtgatcctggccgctgtcgcgacctggctgctgcacaaccagggtattgcacgtgccgtactggccgtggttgcgctgggtatcgtgattatcttcgctaaagaagccttcgcgatgcagggtgcggcacgtcgtaagatgattgtggcgttcatcctgatgctggaagcgattatcttcttcgtcctgtacagccagatgccgacgtctctgaacttcttcgcaatccgcaacgttgagcactccatcctgggtatcgcgttcgagccggagcagtaccaggcactgaacccgttctggatcatgattggtagcccgattctggccgctatctataacaagatgggcgaccgtctgccgatgccgcacaagttcgcgatcggtatggtgctgtgctctggcgcattcctggtgctgccgctggggacgaaattcgcgaccgacgcgggtatcgtgtctgttaactggctgatcctgagctatgcgctgcaatccatcggtgaactgatgatctccggtctgggcctggcgatggttgcacagctggtccctcagcgtctgatgggcttcatcatgggtagctggttcctgacgaccgctggcgcagccatcattgcaggtaagattgcgaacctgatggcggtaccggacaacgttaccgacccgctggtctccctgaacgtctacggcaccgtgttcatgcaaattggtatcgcgacagccgtaattgccgtgctgatgctgctcaccgcaccaaaactcaatcgtatgacgcaggacgacgacaaatccgctaaagcgaccaacaccgcgaacgcgtaa

SEQ ID NO: 523775 - DNA, 636 bp, Stenotrophomonas maltophilia
atgaataaagagaaacgcattgcgatcctgacgcgcctgcgcgatgagaatcctcatccaacgacagagctgaattttaactcgccgtttgaactgttgatcgcggtgctgctctctgcgcaggccactgacgtgagcgtcaacaaagccacggccctgctctaccctgtagccaatacgccgcaggccatgctggggctgggggttgaaggggtaaaatcctatatcaagaccatcggcctgtttaacagtaaggccgaaaacgtcattaagacctgccggatcctgcttgagcagcacggcggtgaagtcccggaagatcgcgcagcgctggaagcgttgccaggcgtcgggcgtaaaacggcaaatgtcgtgctcaacacggcgtttggctggccgacgatcgccgtggacactcacatcttccgcgtttctaatcgcacccggttcgcgccgggtaaaaacgtggaagaggtggaagaaaagctattaaaagtggtccctgcggaatttaaggtggattgccatcactggctaatccttcacgggcgctatacctgtattgcacgtaagccacgctgcggctcctgcattatcgaagatctctgtgaatacaaagaaaaagtctatccctga

SEQ ID NO: 523776 - DNA, 687 bp, Stenotrophomonas maltophilia
atgagccaggttaaagaggttatcgtccagggactctggaaaaacaactcggcactggtacagctgttgggattgtgcccgctgctggcggtgacgtctaccgccaccaacgcgctcgggctggggctggcgaccacgctggtgctgaccctgaccaacttctccatttctgttttgcgccgctggacgccatcggaaatccgtattccgatttatgtcatgatcattgcatcggtggtcagcgtcgtgcaaatgctaattaacgcctacgcatttggcctgtaccagtcgctcgggatcttcattccgcttatcgtgactaactgtattgtcgtgggacgcgctgaagccttcgcggtgaaaaacaacccggcaatttccgcgctggatgggttttccatcggcatgggcgcgactgccgccatgttcgtcctcggctctctgcgtgaaattctgggcaacggtacgctcttcgacggtgcggacgcgctgcttggcggctgggcgaaatcgctgcgtatcgaggtgttccatacggacaccccattcctgctggccatgctaccgccaggcgccttcattggccttgggatgatgctggcgttaaaatacctgattgatgaaaaacgtaaacgccgcgccgctgaacgcagcgtacaggaagggatccccgagaaagcagtatga

SEQ ID NO: 523777 - DNA, 621 bp, Stenotrophomonas maltophilia
atgctaaagactatgcaaaaacacggcgtcacgctggcgatcttcgccgccgccctcaccgggctgaccgcgctggtaaatgaactgacgaaaagcaccattgaagagcaggcaatgaagcagcaaaaggcgttgttcgatcaggtgatcccatcagacttctatgataataacctgcaaaaaagctgctttgtcgtgcaggccccgcagctcggtaaaggaacacaccgcgtttatattgcccgtaagggcgagaacccggtgggtgccatcatggaagccaccgcgccggacggttactctggcgcaattcagctgctggtaggcagcgatttttccggcaccgtgctgggtacgcgcgtgacggaacatcacgaaacgccgggccttggcgacaaaattgaaacacgcctgagcgactggattttacactttgccggtaagatgattcatggcgaggacgatcctgctttcgcggtgaaaaaagatggcggtgagtttgaccagttcacgggcgccacgattacgccccgcgcggtcgtcaacgccgtcaaacgcgccggtctgtatgccgaaacgctgcccgcgcagatcaatcatctttacgcctgtgaggagtga

SEQ ID NO: 523778 - DNA, 1053 bp, Stenotrophomonas maltophilia
atggttttcagaattgcaagttccccttacacccataaccagcgccagacatcgcgtattatgatgctggtgtgcctggccgcgttgccaggtattgccgtacagtgttggtttttcggctggggtacgcttttccagttagttctgggttgcgccagtgccgtcgcagcggaagcagcgatcctgaagctgcgcaaaatggaggtgactcgcatcctgagcgataactccgccctgttgaccggcctgttgcttgccatcagcattcccccgttcgccccgtggtggatggtagtattgggtacgatatttgcggtgatcatcgccaagcagctgtacggtgggctgggccataacccgtttaacccggcaatgattggttacgtggtgctactgatctccttcccggtacagatgaccagctggctgccgccgcatgagatcgccgccacggtgcccggctttatggatgccctgaacgttatctttactggcgacaccgcgatgggcgcggatatgaacgcgcttcgcatgggcgtggatggcatcagccaggccaccccgctcgataccttcaaaacctccctgcgtgccggccacagcgtcgagcaggtgatgaaatcgtctatttacagcggcgtactggcgggtgcgggctggcagtgggtcaatctggcctacctgttgggcggtgccttcctgctgcaacaaaaagcgatccgctggcatattccggtgagcttcctggtgacgctggccgtctgttcaacgctcggctgggtcatctcacctgagtcactggccagcccgcagctccatctgctctccggcgcgaccatgctcggggcattctttattctgaccgatccggtcaccgcctctaccaccaaccgaggtcgtctgattttcggcgcgctggcgggcttgctggtctggcttattcgcagctttggtggctatccggacggcgtggcatttgccgtactgctggctaacatcaccgttccgctcatcgactactacacgcgtccacgcgtgtacggtcatcgctaa

SEQ ID NO: 523779 - DNA, 2022 bp, Stenotrophomonas maltophilia
atgcttaagttattttctgctttcagaaaagagaagatctgggacttcgacggcggtatccatcccccggaaatgaaaacccagtcaaacggtacgccgctgcgtcaaattccgctggcgacccgctacgtgatgccattgaaacagcacatcggcgcggaaggcgagctgtgcgtgaaagaaggcgataccgtccttcgcggccagccgctgacctttggtcgtggacgtatgttgccgatacatgccccgacttcgggcaaggtggtggctgttgccccccataccgttgcccatccctcggcgttgtctgagctgagcgtcatcattgaagccgacggggaagatctctggatcgatcgtgacggctggagcgactaccgttcccgcagccgtgaagcgctgattgaacgcattcatcagtttggcgtagcaggtcttggaggcgctggcttcccgaccggcgccaagcttcacggcggcggcgataaaatcgaaacgctgattattaacgccgccgagtgcgaaccgtacatcaccgccgatgatcgtctgatgcaggactgtgccgcgcaggtggtggaaggtattcgcattcttgcgcatatcctgcaaccccgcgaagtgctgatcggtattgaggacaataaaccgcaggccatttcgatgctacgtgcggtactggcggacagccatgatatcgccctgcgcgtgatcccgaccaaatacccgtcaggcggggcgaagcagctgacgcagatcctgaccggaaaacaggtcccccacgggggccgttcgtccgatatcggcgtgctgatgcaaaacgtgggtactgcctacgcggtgaaacgtgcggtgattgacggcgagccattgaccgaacgcgtcgtcacgctgaccggcgagtccgtctcccgtcccggcaacgtctgggcgcgtctgggtacgccggtgcatcatctgctggaacaggctggcttctgcccggggagcgagcagatggtcattatgggcggcccgctgatgggctttaccctgccgtggctggatgtgccagtggtgaagattaccaactgcctgctcgccccttccccaacggagatgggcgaaacgcaggaagagaaaggttgtatacgctgtagcgcctgcgcggatgcgtgtccggcagacttgctgccgcagcagttgtactggtacagcaaaggccagctgcacgataaagcccaggcgcataacctggctgactgtattgaatgcggtgcctgtgcctgggtctgcccaagcaatattccgctggtgcagtacttccgtcaggagaaagccgaaatctacgctatctccatggaagaaaaacgtgccgctgaggcgaaggcccgctttgaagcgcgccaggcgcgactggagcgcgagaaacaagcccgtcaggaacgccataagcaggctgccgtgcagcctgcggcgaaagatcaggatgcgattaacgctgccctcgcccgtgtgcgggagaagaacgcgactgccgctcagccggtagcgatcgtgtctggccaaaagccggacaatagcgaagcgattgccgcccgcgaagcgcgtaaagccgaagcgcgcgcacgtcaggcggagaaggcacaaaacgccaaaccggaagccgacacagacccgcgtaaagcggcggtggaagcggctatcgccagggcaaaagcccgtaaagccggtcaacagacagtggtggttgaacaggaagcgaccgatccgcgcaaggcggccgttgaagccgctatcgcccgcgccaaagcacgtaaagcggcacagcttcagcctgccgaagagagtgaagcgcctgtcgacccacgtaaagccgccgttgaagcggccatcgcccgtgccaaagcacgaaaagcggcacagcaggacgaacggcctgcggccgccaacgacgatccacgcaaagccgcagtcgccgccgcgattgcgcgtgttcaggcaaagaaagccgcgcagcaagccgttaacgaggattaa

SEQ ID NO: 523780 - DNA, 579 bp, Stenotrophomonas maltophilia
atgagtgctatctggattgccatcgcgtccatcagcgtactgggactcgtctttggcatcattctgggttatgcctcccgccggtttgcggtagaggacgatccggtggtagaaaaaattgatgagcttttgccgcagagccagtgtgggcagtgcggctaccctggctgccgtccttacgctgaggcggtgggcgtgcagggagaaaagatcaaccgctgcgcgccgggtggcgaagcggtcatgcttaaaatagctgccctgctgaatgtcgatccgcagcctgtcgacggcgatgaacaggcgcaggagcccgttcgtgcccttgctgttatcgacgaagccaactgcatcggctgcaccaaatgtattcaggcgtgccctgtcgacgccattgtaggcgcaacccgcgccatgcacaccgttgtggcggacctgtgcaccggttgtaacctctgcgtggccccctgcccgacgcagtgtatagaactccgcccggttgaaacgacgaccgaaagctggaaatggaatcttcagaccattccggttcgcaatattcctgtggaacaacatgcttaa

SEQ ID NO: 523781 - DNA, 582 bp, Stenotrophomonas maltophilia
atgaccgattacttactgctctttgtcggaactgtgctggttaataacttcgtactggtgaagttccttggcctgtgcccgtttatgggggtctccaaaaagctggagacggcaatgggcatggggctggccaccaccttcgtgatgacgatggcctccatttgcgcatggctgattgatacctggatcctgatcccgctggacatgctctacctgcgcaccttgtcctttattctggtcattgcggtggtggtgcaatttaccgaaatggtagtgcgtaaaaccagccctgccctgtatcgcctgttgggtatttttctgcccctcatcaccaccaactgtgctgtgctgggcgtggcgctgctcaacatcaaccttgggcataatttcatgcagtcggcgctgtacggtttttccgcggcggtcggtttctcttttgttatggtcctgttcgcgtcgattcgcgagcgtctggcagcggcggatattcccgcgccgtttcgcggtaacgccatcgctctggtgaccgcaggtttaatgtctctggcctttatgggctttagtggtctggtgaagttgtaa

SEQ ID NO: 523782 - DNA, 441 bp, Stenotrophomonas maltophilia
atgaccgcattgcctggagagagaattgggggctggttaatcgccccgctggcatggctgctggtggctttattaagcgcttcgctggcgctgttgctttacaccactgcactggttactcctcatgctatccagacactgatgtctcagagtgcgctcaatattgcgacgtggtttgtgtcgttcgttttcgcaatcgcgatgtggtactacacgctttggctgaccatcgccttcttcaaacgccgcaaaagcgtgccgaaacattacattatctggctgctggtctccgtgctgcttgccgtcaaagcgttcgctttttcgccagtttctgatgcactggcggttcgccagctactctttccgttgcttgcaacggcgcttctggtgccctatttcaagcggtcgacgcgcgttaagaagaccttcgttaacccgtaa

SEQ ID NO: 523783 - DNA, 216 bp, Stenotrophomonas maltophilia
atgacagttcaggactatttattaaaatttcgcaagatcaattccctcgaaagcctggaaaaactgtttgaccatctgaactacacgctgtcggataatcaggacatcatcaatatgtaccgcgcggctgaccatcgtcgcgccgaactcgtctctggcggtcgtctgttcaacgtgggggaagtacctaaatctgtctggcgttacgttgtataa

SEQ ID NO: 523784 - DNA, 1041 bp, Stenotrophomonas maltophilia
atgagtgaaaacatccgcgtcggtcttattggctacgggtacgcaagcaaaacctttcatgcgccgctggttgctggcacgccgggaatggaactggcggctatcacaagcagcgatgaaaccaaagtccatgccgactggccagccgtgccggtggtaacggagcctaagcatctgtttaacgatcctaatattgaccttattgtcattcccacccctaacgacacccatttccccctggcgaaagcggcgctggaggctggcaaacatgtcgttgtcgataagccttttaccgtgacgttgtcacaggcgcgcgagctggatgcgctggcgcgaagcctgggtcggttattgtcggtctttcacaaccggcgctgggatagtgatttcctgacgatcaaagcgctgataaacgaaggcacgctcggcgaaattgctttttttgagtctcacttcgatcgttatcgtccgcaggtgcgagatcgctggcgcgagcaggcgggaccgggcagcggcatctggtatgacttagcgccgcatcttctcgatcaggccgttcatctgtttggtctgcccgtaagcatgacggtcgatttagcgcagctcaggccgggggcgcagaccaccgactatttccacgccgttttgagttatccgcagcggcgcattgtgctgcacgggacaatgcttgcggcggcggaatcggcccgctatatccttcacggggcgcgcggcagctatgtgaagttcggcctggatccgcaggaagagcgcctcaaaaatggcgaacgcttaccgcaggaggactggggctacgacatgcgggacggggtggtgacgcgtgcggagggtgaggtactggttgaagagacggtgttgacccagcctgggaactatccggcgtattacgccgcaattcgtgacgcgctgaacggttcaggtgaaaatccggttccggcgagccaggcaatccagattatggagctcatcgagctggggatcgaatctgccaaacatcgcgcaacgctctgtctggcataa

SEQ ID NO: 523785 - DNA, 999 bp, Stenotrophomonas maltophilia
atgattgatacacgcctgcctttaactgatattcaccgccacctcgacgggaacattcgtgcccaaactattctcgatcttggtcgccagttcaatttaacgcttcctgccgaaacgcttgaaaccctgatcccccatgtccaggtgacgtcgaacgagccggatctggtaagttttctgagcaagcttgactggggcgtgaagatgctggcctcgctcgatgcctgtcgccgtgtcgcctttgaaaacatcgaagatgccgctcgcaacggcctgcactatgtcgaactgcgtttctctccgggctatatggcgatgacccacagtctccccgtagcgggcgtggttgaagcggtcattgaaggcgtgcgtgaaggctgcaaaacctttgacgttcaggcgcgtttgatcggcattatgagccgtaccttcggtgaagcggcctgtcttcaggagctggaagcgttactggcgcatcgcgaccagatcaccgccatcgacctggccggtgatgaattgggcttcccgggcagcctgttcctgtctcatttcaaccgcgcacgtgatgcaggatggcatataactgttcatgcgggcgaagctgcggggccggaaagcatctggcaggccattcgtgaactgggtgcggaacgtattggtcacggcgtgaaagccattgaagatcgcgcgctgatggatttcctcgctgaacaacgtattggaatcgaatcctgcctgacctccaatattcagaccagtacagtggcgtcgctggcgcaacacccactgaaaaccttccttgaacacggggtgctggcttcactgaacacggacgatccggcggttcagggcgtggatattattcacgaatacaacatcgccgcgccgcaggccgggctgagccgcgagcagatccgtcaggcgcaaatcaacgggctggagatcgccttcctgacgcctgaagagaaacaggcgctgcgcgataaagttgctcagtag

SEQ ID NO: 523786 - DNA, 1173 bp, Stenotrophomonas maltophilia
atgtttgatttttctaccgtcgtggatcgacacggcacctggtgtacccagtgggattatgtcgctgaccgttttggggctgccgacctgctgccctttaccatctctgatatggatttcgccaccgctccctgtattaccgatgcgctgcaccagcgcatcaaccacggcgtgtttggctacagccgctggaaaaatgacgaatttctggctgccgtggcgcactggttccggcaacgctttaacagtcagattgataccgaaaccgtagtgtatgggccgtcggtcatttatatggtctcggagctgatccgcatatggtccgcgcctggcgacggcgtggtggttcataccccggcttacgatgccttttataaagccattgaaggcaaccagcgtaccgttgtttccgtgccgatgcagaaaacggcgcgtggctgggacggcaatatggccgcgctggaagcggcgctggcaaaaccggaaaacacggttctgctgctgtgtagcccgcaaaatccaaccggcaaagtctggacgcgggaagagctggccactattgcaacgctttgcagccgtcatgatgtggcggtaatcagcgacgaaattcatatggacatggtatggggcacgcatcgccataccccgtggaatgaggttgcacgcggtaaatgggcgctgctgacctccggttccaaaagcttcaatattccggcactgacgggcgcctgggggcttatcgccgatgacgacagccgtaacgcctatctgaatgcattaaaagggcgggacggactctcttccccttccgtgctggcgctgaccgcgcacattgctgcttaccggcagggcgaaccctggctggacgcgctgcggacctatctcgaagaaaacctgcgctacattgctgacgaactgaatgctgcatttccgacactcaactggcaaccgccagaggccacatatctggcctggattgatctcagcccactcggtattgatgacaaaacgctacaaaacgtgctgattgaacagcaaaaagtggccatcatgccgggatatacttatggggatgaaggaaaaggctatgtgcgactgaacgctggctgtccgcgtagtaagcttgaacagggcgttcagcgcctcatcgcgggcatcaacactctgctgtaa

SEQ ID NO: 523787 - DNA, 1398 bp, Stenotrophomonas maltophilia
atgagcaaggtcggctcttttgcctttagcttcctgccggtaatgttctgtatcgccattcctctgggtctggcgcgcgaaaacaaaggcgtggcggcgtttgcgggcttcgttggctatgcggtcatgaaccttgcggttaacttctggctgaccgccaaagggatcctgcccacgaccgacgcggcggtactgaaagccaataacattcagagcgtgattggaattcagtccatcgataccgggatccttggagccgtgatcgcgggagtgattatctggatgctgcacgagcgctttcataacatccgcctgcccgatgcgctggccttcttcggcggcacccgctttgtgccaatcattacgctggttgtgatgggtctgtttggtctgatcatccctctgatttggccggtttttgccatggggatcaccggaattggccgcattatcaacggcgcgggtgatttcggcccgatgattttcggtacgggtgaacgtctgctgctgccatttggtttacagcacatcctggttgccctgatccgttttactgaagcaggcggtactatggacgtttgcggtcattccgttagcggcgcgctgaccatcttccaggcccagctgagctgcccgaccacgcacggcttctctgaaagtgcgacgcgtttcctctctcaggggaaaatgcctgccttcctcggcggcctgccgggcgctgcgctggcgatgtaccactgtgcccgtccggaaaatcgtcataaaattaaaggccttctgatctccggcgttattgcctgcgtggtgggcggtacaacagaacctatcgagttcctgttcctgttcgtggcaccggtgctgtacctcatccacgccgtactgacgggcctgggctttaccgtgatggctgtgctcggtgtaaccatcggtaacaccgacggtaacgtgattgacttcgtggtattcggtatcctgcacggcctgtccaccaagtggtatctggtgccggttgtggccgccatctggttcgcggtttactacgggatcttccgcttcgccatcacccgctttaacctgaaaacgcctggccgcgataccgatacggccaccagcgttgaacaggcagtggccggtaccgttgggaaatccggatataacacgccggctattctggcggcgctgggcggtgcggataacattacctctctggataactgcatcacccgcctgcgtttgtcggtggcggacatgtccaaagtggataccaacgcacttaaagctaaccgggctatcggcgtggtacagttaaatcaacacaatttgcaggtcgtcattggcccgcaggtacagtcagtgaaggatgagctggcaaccctgatgcgaaccgtcgaagcctga

SEQ ID NO: 523788 - DNA, 654 bp, Stenotrophomonas maltophilia
gtggttgcggcctgcccaacgctacagtttcagaatatggttatctttgcggtaaatacaggcgtcaggcatggcgaactaagcgcgttatcctgggaggatgtggatactgtcaactggactgttacagtgtcacggaactattccctgaagggaaacttcaccctgccaaaaaccaacgccgggattcgaacaatacagctgacccagccagcaattgatgcactcaaggcgcaaatgccactaaccagaatgatggcatcccacaaggtaagcgtcagcctacgggaatacaaaaaaaagagaaccgatgaatgcacctttatattctcgccgtccattacttcaatgaacggtaagaagacgatgtgctacgtccccggatccattaattcagcctggcgcactgccctgcgtcgtgcaggcgtccgacaaagacggtcttatgaaaccaggaacacgtatgcgtgctgggcactggtcgccggagcgaacccaaatttcgttgcgcaccagatgggccattcgtcagcgcaaatgctattcacggtttacggtaaatggatgaccgagaataaccatgaccaggtgggcattttgaacgcatcatttactcaaaatgccccactgatgccccatagaaaaaccgcataa

SEQ ID NO: 523789 - DNA, 870 bp, Stenotrophomonas maltophilia
atggcttccagcaaaactctcgaacaggcaattgccgacatcaccatctggcgcaaaggcgaacagcgtgcgccgcataagcccttattgcttctgtacgtgctggcgaactatcagcaggggcatgtgagactgtttgattacggaaccgaggtccacgagcaactgcttagcctgttagaacgctttggcccacagcggaaggcgcattacccgaatatgcccttctggcggctcaagagggacggattttgggatcttcagaacactgagttctgttcgaccaccggcagtaagcaaccgcccgtcaaagaacttgtggaacataatgtcgcaggtgggtttgatgaagaacactttgcattgctgagtaagaacaaaaacctgatcggctcgctggcgcagcagatccttgaagcgcattttcctgaaagcattcaggaggagatcgcggatgagatgggttttgatattcaacagatccgtaaggttcgcgatccgctgttccgtcagcaggtgctgcgtgcatataattatgaatgtgccatctgcggatttaacatgcggcatgataacgcctctgttggacttgaagccgcacatatcaagtggaagcagtttggcggaccttgtgagatcccgaacggactggcgttatgtgcgattcatcataaggcatttgatatgggatcgattgggctggatgagagtatgcgagtgcttgtgtccgaggcggtgaatgggagtgggatcgttgggcggctattctgggattttgccgagaagcagattgcgctaccgatggtgaaagggaattatccaagggaggggtttgtggagtggcataggaaggaggtgtttaaagaatga

SEQ ID NO: 523790 - DNA, 468 bp, Stenotrophomonas maltophilia
atggctgcgacgaattttaagccagagtttaccgtttgcaaaacagaatcagacgctttcaccggcatgattgaaaaccgcgagctggtacgcaaaaacagcgcccgccgtctgcacggcaacccgcccaacgcggcgcccgtccaccctcgcgcggaaacgccgcaggacagtgccgcttgctgcgaactgtatgcacgcatagacatgaaataccttctcctaggcggcgactggttaacccgtgcaggctttatcaacggtatgcctgtgaaaatccgcgccatgaaagactgcatcgtgattacgccacagcatacaagagaattatggggatgtctggaaggtatgagtgtggtgaatataaataagcagaaagtcgtgcagtggttaaaaacgtttccgggagcgctgaatgatacgggagatatacctatggtgaagcgcggaaatggtctggcaaagtaa

SEQ ID NO: 523791 - DNA, 264 bp, Stenotrophomonas maltophilia
atgcttcatgcaaagttaaaaaataatatcctgattggtctggcatgcctcattgcttccttctttatcgtcctgtttcctctgggaggcttgctcgattacttgtctcaagccagcaatgattttttaaatcgtaccggtctggggtttgctgatggtgaagcagacccatcattcctgtgggtgttgggtgggatgatggccgtcgttaccgcgctactgatgattatcatccgaaagatatgcaacctgaagcagggatga

SEQ ID NO: 523792 - DNA, 1005 bp, Stenotrophomonas maltophilia
atgaacgcacccaccatcctcaccggcgatcgcccaaccggcccgctgcaccttggccacttcgtcggatcgctgcgccagcgtgtggcgctgcagcagacgcacaaccagtttgtgctgattgccgacctgcaggggctgaccgacaacggcagcaacccgcagaagatccgcgacaacatccccgaagtgctggctgactacctcgccgccggtatcgacccgaacctgaccacgatctgcctacaatccgccctggccgccctcgccgagctgacgatgctgtatatgaacatcgtcaccgtcgcccgcgtggagcgtaacccgacggtgaaaaacgagattgcgcagaagggcttcgcccgctcgctgccggtcgggtttatggcctaccccatcagccaggcagcggacatcaccgcgtttaaggccgagtgcgtgcccgtcggcgacgaccagttgccgatgattgagcagaccaacgagattgtgcacaagatgaacagcctgctgcccgctccggtgctgcgccactgcaaggcgatgctgagcgacaccagccgcctgcccggcatcgacggcagcgccaagatgtcgaaatcgctgggcaacacgctacacctgtcggccagcgaagaggctattcaccgtgcggtcagcgccatgtacaccgacccgaaccacctgaaggtgagcgacccggggcagattgaggggaacgtggtgtttacgtatctcgacgcgtttcacccggacaaggacaaagtggcggcgatgaaggcgcactatcaggcgggtgggctgggcgaccgggcgtgtaagaacgagctggaggggtgtttgcaggagctgattgcgccgatgcgggagcggagggcgatgtatatgcaggacaggggggagctgatggcgatgctgaagcgcgggaccgaacgggcgcagggggtgacgcaggcgacgttgagggaggtgaaggttgggctgggggtgccggtgtttagttaa

SEQ ID NO: 523793 - DNA, 426 bp, Stenotrophomonas maltophilia
atgctgcaatctctcaaccacctgaccctcgcggtcagtgacctgcaaaaaagcgtcaccttctggcacgagctgctggggcttgcgctgcacgcccgctggaataccggggcctatctcacctgcggcgatctgtgggtctgcctgtcgtacgacgaggcgcgccagtacgtgccgccgcaggagagtgactacacccactacgcgtttaccgtggcggaagaggattttgagccgttctcgcacaggctggagcaggcgggcgtcaccgtctggaagcagaacaaaagcgagggggcgtcgttctatttcctcgacccggatgggcacaagctggagctgcacgtgggcagcctcgccgctcggctggcggcgtgtcgcgagaagccctatgcgggcatggtatttacttcagacggggcttga

SEQ ID NO: 523794 - DNA, 1008 bp, Stenotrophomonas maltophilia
atgaagcgaaaaacgaaggtgacgatgaacgatattgcgcgggcggcgggcgtgtcgcaggcgacggtatcgctggtgcttaaccagtcccgcaacatcaagctcagcgacgacacccgccagcgggtgatcaacgtcgctaccgagctcggctacgaccgtcttcctgccattcacgctccgcgcaaccaggaggagatcgccctgctggtcagctcgttgcagagcttcgacccatttatcgacgccatcagccaggcgcgtgaagcggcgtggcgcaacgagacgctgctcaccgtctacgactacggcgacgacgtggagctggccctgaacatcatccgccagctggacaagcgcaactgcatcgggattatccttgcctctccggtcacgaacgtcgttgatatgacgccatttcaggactgtacccgcatcccgctggtgctgctcaaccagcgcgaccctggctcgccgctgctgccgtcgtttatcccggacgactacgccaacgctttccaggtgactaaacacctcatcgcctgcggcgccagccgtatcgcccacatcaccggcgagagctggatggaggcctcgcgccagcgtctggcgggctaccaggcggcattgaagcaggccggtttaacgtgtgacgagagcctggtgcgccagaccaactggcagttcagcgagtcctttaccgccaccacgtccctgctggaactgaccgaacgcccggacgccattttctgtgccagcgactggctggcgattggctgctaccaggcgctggcggtgaatggcgtgcgtatcccgcaggacatgctgctggcgggctacgacgaccagaagatttccgagcagctcaccccaccgctgaccagtatccagctgccctacagcgagctgggacggctggcggtggagtacctgtgcaatcaggaagatgccgccacgcacgtgacgctggcgggcaggctgaaggtgcgcgcctcaagccccgtctga

SEQ ID NO: 523795 - DNA, 1089 bp, Stenotrophomonas maltophilia
atgaaagatcagtggagtaaagaacaggcacaggcgtggtatcagcaaaaaggctggctgtgcgggttcaactatctgccgtcgacagcggtgaactggaccgatatctggcaggaagagaccttcgatgccgccactatcgaccgcgagctgggctgggcggcggacgcgggctataacaccctgcgcataaacctgccctttatcgtatgggagcacgaccgcgacgggctgatggcgcgcatcgaccgctttttgacgattgccgacgaccaagggttcagcaccatgctgaccctgatggacgactgcggcttctccggcgacgagccgtacctcggcccgcaaaagccgcccgtaccgggcaaacacaacagccaggcggcggcgagcccggggcgcgacaaggtgtgcgatcgagactgctggccacagattgagcgctatatccgcgacgttgtgcgccagttccgcgaggataagcgcgtattgctgtgggatctgtataacgagccgggaaaccgcggcattttcgcgacgggcacggaagaggtgctgtacgacgagaagctggagacctgcgcgcacgagttgatgaagctggcgttccgctgggtgcgtgaggaagatccgacccagccgcttaccgtctgcgcctggcgtctgccggcggaagaggagggcgagacgttttatcagcacccgctggaccagaccgcgctggaactgtcggacgtggtgagctatcacgcctacaccaataccgggcgcatgacggcgattatccagcaacttcaggcgctgggccgcccaatcttctgcaccgaatggctggcgcgtcacgtgggcggcaccatcgaagagcagctcccgctgatgtacatggcaaaggtcgcgccgtatcagtgggggctggtgcgcggtaaaacccagacctggctgccgtggccggtggtgatgaaggagtccacggactactgccgcctgtggttccacgacgtgtttgaggagaacggtatcccgttttcacgcgctgaaatcgcgctgatgaagaagctgcgcaatatcgccccggatccgcagggctaa

SEQ ID NO: 523796 - DNA, 1395 bp, Stenotrophomonas maltophilia
atggcaatgacaatgaaaataccgtctcgcgagttatggtcctactttggctatggtttaggtcagtgttttagctttggtttagtgggttcgtttataaactatttttacaccgacgtgctggggatctcggcgctggcggcaagtaccatcttcctgattgcccgcgcgtgggacgcggttcacgatccgctgtttgccagcattatggacaccattaacagccggtttggcaagtttcgccactttttactgattgcgccgctgctgattaccggcgtcaccctgctggcgttctataaaatcgaagcggacatgaccaccaaaatcctctacgccggggtaacgtatatcctgtgggggacgctgtacgccatctccgatatcccgttctggtcgatgtcgtcggtgatgaccaacgactccggccagcgcacccgcgcggtaacggcggcgatgctcggggtgaacgccgggattgcctgcgccaacatcttcttcccgaagctggcggcgttctttgcccagtacagcaacgataaaggctactttatggcggcgctggtgatgatgctggtgggcctgccgctgatgctcaacggctttatgcagatcaacgagcgcgtcccgcccagcccggaaaaggtgacgatgcgcgacaccttccacaacctgcgccagaacaagccgctgtttatcgtcctgctgtcgttctttttctgcgtgttccataacgtggcgggcggactctatatctacttctttatcaacaacatgggcgacggcagcctgcaaatggcaattggcgtgatgggaatagtggcggcggtgctgtgcctggtcgccccgctgctgacgcgccggatgcagaagcggaagctgtttatgatcctctgcgggctggacgtggcggtgcgcgtggtgatgtggttcacgggctatcagcacacggcgctgctgtttatcctgctcggcctgagcacgctgttcgtgatgatgaccaacatcctcacctcgtcgatgattgccgacaccatcgagtacgcggaataccacacccacaagcgctgcgcggcgatcactttctccgggcagacctttaccggcaagatgtcggtggcggtgggcggcgggttaatcggcgtgtttctgacgatgatcaactatgtgccgcaggcgcagtcacagagcgaaggcgtactgtcggggctgttctttggcatttgtttgttaccggcgataggctcgctgatccgcatgggctttatgtcgcgctttacctttaccgaagagaagcatgcggagatttgtcggctgctggcggagcggaatgcgtctgcgaaagcgccgggtgccggctgcgccttacccggcctacaggaccagcccttgtag

SEQ ID NO: 523797 - DNA, 822 bp, Stenotrophomonas maltophilia
atggcactgtttaaggcaaaagacggcacgcagatttactacaaagactgcggcgcgggcaaaccgatcctcttcagccacggctggccgctggacggcgacatgtgggacagccagctgaactacctggccgagcgcggcttccgcgccatcgcctttgaccgtcgcggctttgggcgttcggatcagccgtggaacggctatgactacgacacctttgcgtccgacattaacgacctgattactaccctggatctgcgcgacgtaacgctggtgggcttctccatgggcggcggcgacgtgacccgctacatcaacaactacggcagcgcgcgcgtggctggtctggcgctgctgggcgcggtcactccaatcttcggtaaatcggataccttcccgcagggtgtggatcagagcgtgttcgacggcatccgtgacggactgcgtaaagatcgcgcccagttcatcagcgacttcgccaccccgttctacggtaccaacgccgggcagaccgtttccgcgggtgccctgacgcagacgctgaacatcgctctgctggcgtccctcaagggcaccatcgactgcgtgaccgccttcgccgaaaccgacttccgtccggatatggcgaaaatcgacgtgccaacgctggtgatccacggcagcaacgaccagatcgtgccgtttgaaagcaccggcaagctggcggcggagatgatcaaaaacgccacgctgaaggtgtacgacaacgcgccgcacggcttcgcgctgacccaccaggatcagctcaacgaagatctgctggcgtttgtgaagtcgctgtaa

SEQ ID NO: 523798 - DNA, 1620 bp, Stenotrophomonas maltophilia
atgacccaggttaacgacgttcgcgacgcacacgtcgagacgacgcccgcatcggcggcttcgccctggcagccgctgagccagccggtgttccgcatgctgtggatcgccacggtggtctctaacgtcggctcatggatgagcgacgtcggcatcaactggagcatgctgacgctcagcgccgatccgctggatatcgcgctggtgcaggcggccagcagcctgccgatgttcctcttcgccctgccgtccggggtgatggcggacatcgttgaccgacgaaaatacctgctcttctcccagctatgggtattcatcgccgctgccgggctgacgctgctctcttttaccggacacgtcacccccaccgttctgctggcggcaacgtttctgctgagcgtgggcgcggccatgagctcgccgccgtttcaggcgattgtgcctgacctggtgagcaagcccgagctgggttccgccgtggcgcttaactcgctcggggtcaacatcagccgggcgattggcccggcgctgggcggtttcctgctgtcgctggccggaccgtggatggtgtttgcgcttaacgcgctatccgtggtcggcgtggcgtgggtgctgtggcgctggcgtccggcgccttccgtgcagcggctgccgccggagcacttcttctcggcggtgcggtccggcattcgctacgtgcacgccgccccggtgctgcgtaacgtgctggtgcgtaccgtggcgttcttcgttttcggcagcgcgggctgggcgttactgccgctggtggcgcgccgcgagctgggcttaggcccggcgggctacggcgtgatgctggcgtgtatcggcctgggggcgattgccggggcgatcctgctgccgcgcctgcgccagcggctgaatgccgatcggctgatggtggccgccagcctgacgtttgccctcaccatgctggcgctggcgttcatgcgccacgtctggctgctgaacctgtttgagttttttaccggcttcgcgtggattgcggtgctctccaccctcaaccttggcgcacagcgcagcgccgcccgctgggtaaaagcccgggcgctggctgtgtatctgacggtgttcttcggctcgatgaccgcaggcagcgccgtctgggggcagatcgcctcgcagttcggcaccccgacctcgctggtggttgccacgctggggatggtgctggcaagcgcgacggcgttccgctggaagctggagaaagatccgaatttaaatctcgacctgagcgggcagccgctggacggcgtggagattgaactcccgaacgagcgcggcccggtgctggtgtcgcacgagtacatcatcgacccacaggacgcgaaagcgtttttgcaggccgtgcacgagctacgccgggtgcgccgccgcgccggagcgatgagctgggcggtgtacgaggatatcgaacgtccagggctgtttatcgagaccttcctgatgggctcctggattgagcatttgcgccagcaggaacgccacaccatgaatgacctcctgttgcagagccgcgttctggcttttcatcagggcacaacatcaccggcaattcgctatctggtcgcgccggtataa

SEQ ID NO: 523799 - DNA, 408 bp, Stenotrophomonas maltophilia
atgaaacaaaatgacgcttcaccccggatcgatccggggctgttcttcctgcgcctgaccggcagcctgctgctgctttacgtgcacggcctgccgaaggtgctccacttcagcgaagagctgacgcgcatcgaagatccgtttggtttcggaccttacgcgagcctgatcccggcgatcgtcgccgaggtcatctgcccgctgtttatcattgcaggggtttacacccgcctggcgtgcctgccgattatcgccgtgctgctggtggcgatgctggcggtgcacccggactggtcgattgccgaagggcagtttggctggctgctgctgattatcttcaccaccctcgccctcaccggaccgggccagtggcggctgcagcgtaagacgacggagaggttcgcatga

SEQ ID NO: 523800 - DNA, 1872 bp, Stenotrophomonas maltophilia
atggttaccctcggtaaagccgatctcattctggttaacggccagtttcacaccgtcgatcgcgagaaccctctcgcggaagccgttgccgtgcgcgacgggaaattcctggaagtgggcaccgtcgccgaggtgatgcaacaccactgcgacggcactaagatggtcgacttaaaaggccacaccgccatccccggcctgaacgactcgcacctgcacctgatccgcggcgggctgaattacaacctcgagctgcgctgggaaggcgtaccgtccctggcagatgccctgcgcatgctgaaagagcaggccctgcgcacgccgtcgccccagtgggtgcgcgtggtgggcggctggagcgagttccagtttgccgagcgccgtatgccgacgctggatgagatcaacgacgccgcgccggatacgccggtgtttatccttcacctgtacgaccgcgccctgctcaaccgcgccgcgctgaaggtggtcggctacaccagggacacgccgaatccgccgggcggggagatccagcgcgacgccaacggcaacccgaccgggatgctgatcgcccgcccgagcgccatgatcctgtactcaaccctcgccaaagggccgaagctgccgctggagcagcaggtcaactccacgcgccagttcatgcgcgagctgaaccgcctggggctgaccagcgccatcgacgcaggcggcggcttccagaactacccggaagattacgaggtaattgccgagctgcacgagaaaaagcagatgaccatccgcatcgcctacaacctgtttacccagcgtccgggctacgagctggaagactttgaaaaatggaccgacatgctcacgccgggccagggcagcgacttcttccgccacaacggcgcgggcgagatgctggtcttctccgccgccgattttgaagacttcctcgagccgcgcccggatctcgcgccgggcatggaggacgagctggagcgcgtggtgcgccatctggtcgaacaccgctggccgttccgcctgcacgccacctataacgaatccatcagccgcatgctggacgtgttcgagaaggtgaaccgcgacattccgttcaacgggctacactggttcttcgaccacgccgaaaccgtgtcacaggccaacatcgaccgcatcaaagaactgggcggcggcattgccgtgcagcaccgcatggccttccagggggaatacttcgccgagcgttacggcatcgaagccacccgccacacgccgccggtggcgaaaatgctggagaccggcgtgccggtgggcttaggcaccgacgccacccgcgtggcaagctataacccgtggaccgcgctctactggctggtctccggccgcaccgttggcgggatgcagatgtacgatcacagcgcccgtctggatcgcgataccgccctgatgctctggacccagggcagcgcgtggttctccagcgagcagaaccagaaggggcagatcaaaacgggccagctcgcggatctggcggtgctcagcaaagattacttccgcgtgccggaagaggagatcaagggcatcgagtccgtcctcaccgtggtgaacggcgatatcgtctacgccgctggcagctttggcccgctcgcgccgcccgccattccggtcctgcccgagtggtccccggtggtgaaggtgccgggccactaccgcagcgcgccgccgcaggccgcacgcgtcggcatgagcgccgtccaccactgcagcggcccgtgcggggttcatagccaccagcatgatttcgcccgcacgtcagagatgccggtgtccgacgataacgctttctggggggcgctgggctgcagctgctttgcattctga

SEQ ID NO: 523801 - DNA, 687 bp, Stenotrophomonas maltophilia
atgaccactacaaagctcgaagtcttaaccccagccaactgtcagatcatcttcatcgaccaccagccgcagatggcgtttggcgtgcagtctattgaccgccaggtgctgaaaaacaacaccgtggcgctggcgaaagcggcaaaagtgttcaacatcccgaccatcatcaccaccgttgaaaccgaaagcttctccggtaacacctatccggagctgctggacgtgttcccgggtcaggacattctggagcgtacctccatgaactcctgggacgaccagaaggtgcgtgacgcgctgaaggctaacggcaagaagaaggtggttgtcgcgggcctgtggaccgaagtgtgcaacaacagctttgccctgtgcgcgatgctggaaggggactacgaaatttatatggtggcggacgcgtccggcggcacctccaaagaagcccacgacttcgcgatgcagcgcatgatccaggcgggcgtgatcccggtgacctggcagcaggtgatgctggagtggcagcgtgactgggcgcataaagagacctacaccgcggtgatggatatcgtgcgcgagcactccggtgcgtacggcatgggcgtggattatgcctacaccatggtgcacaaagcgccgtctcgccagaagagcgagcaccgtaccttagcgccggttccggcacgctaa

SEQ ID NO: 523802 - DNA, 222 bp, Stenotrophomonas maltophilia
atgagtacagggttgatatccctcgcggcaggcgtgctgattggcctgatgtatgccgtgctgaaggtgcgttcccccgcgccgcccgcgctggcgctgattggcctgctgggtatgctggcaggggaacaggcgatgcgtcatcttttatcccgcgataatcccgctggcgtgcaggtgacggttccccacgttcagcacctgaccggagcgtcatcatga

SEQ ID NO: 523803 - DNA, 261 bp, Stenotrophomonas maltophilia
atgaaggcctggattatttcgctggtgtgcggggtcgcggctggggtaatttacgccctgctcgacgtgcattccccggcgccgccggtcgtcgcgctgcttggcctgttcggcatgctggtgggtgaacaactgatccccatcggacggcgtctggtgagccgcgaaccgctgaccctggcctggtttcgtcatgaatgcgtaccgaaaatcagcggtaccgcgcccccagcgcccgcgaaggaaagccgcgacgcgtaa

SEQ ID NO: 523804 - DNA, 381 bp, Stenotrophomonas maltophilia
atgacgctgccgtggcgcattgccatcattgatgacgaacgctctgttcgcagcgggctcagtaacctgctgcaatcggaagggtatgctaccgataccttcgattcggcagaggtgtttttgagccaccctctcgccctgtccggcgcgtcgctggtgatcaccgacatcaagctgcgcggcatgaacgggatcgagctgtttgagaagctgcggttgctggccacgccgccgccgccaatactgtttatctccggccatgcggatgaaaatatgcagcggtatgcactcagcctgggcgccgctgcatttttgcgtaagccgattaacatcgatattctgctggatcatattcagcgggagctgacccgccgacaataa

SEQ ID NO: 523805 - DNA, 2418 bp, Stenotrophomonas maltophilia
atgaacgaacaaacgtcgcctgcattttggcccgcccggggaagtctccatgaagggcgggcttttgttctgaaagaggatgttatttttaccgtgctggcgcaggagggcggcatctcctggatgaacgggcggcatccccagtccggcggttcgtttattattgccaccgcggtcagcgatgaagaagaggagcgggcaacgcggctgcttaaaaacgagtttgccctgcgcgatcggcttcatgacggctgggctatccggcccgtcgcttcaacccagtaccgcggacgttttgcgctggtctacgcgccgttctgctttgaactgctggcgtgccgggcaggtaaggcgatttccgggatcgcccgctttatcgagatggcgatccgcatctgcggtcccctgcgccagatgcatctgcacaacctgatccacggcgatatcaaacccgggtcgatcttcgttcatcacgacgccaccagccgtctgtgcagctttggtctttcctgcgccacttccgacgcattctcacagtcccggcttgccgcgtctggcggcacgcccgcctacatgtcaccggaacacaccacgcgtacccggcgcgccgtcgacagccggagcgatctctacagtctgggtatcgtgctttatgaacttctgaccgggcgattgccgtttgaactgagcgctgatgaccagactaactgggcgcattaccacattgcctccgagccgcttgcgccgggccgggtgcgtccggacgtacccggcatgctgtcgaccattatccttaagctgctggagaagaatccggagaatcgctatcagaccgtcgacgggctgattgccgacctcaggcgctgccaggcgacgctgaccgccgaaggtgagatcgtcgactttattcccggccagcaggatcgctctccggcgatccatcttgccgattcgcttttctctgcgcatccgcaggccagcgacgtcatcgccgcgtttgagcgggtcagccagagcggtgcgccggaactggtgacgattggcggtccgtcggggatcggcaaatcttccgtgatcgccaccacgctgaaatcgctgcaacagcgcaaggtgctgctggcggtgggcaaggtcgatcaatactctcccacgctgccctacggcgtgctgagttcggcgtttcggacgctcacgctgcacctgctcgggctgccagccggggaggtggcgacgtggaaaatccgcctgtcgcgcgcgctggaaggcttcgaggagctggctgtcagcctggtgccggagctgaatttacttcttgagaacaaaccgcgtttctctgcggatacattttccatcgacgcgcgggcgcgcttcagccatatggtgctggcgctggtgaaaaccttcgccacacagggcgcgccgctggtgctgctgctggatgatgtgcagtggatcgacgccgccagcctgcaaacgctcgattacctgctgcgcgcctgcggcgccatcccgctgctggtggtggtggcgcaccgcgatctcagttcgctttctgatcccagcttgcagaccgcgctggcgagcctgccggaggcggcgcagcatgccatgacgatcgtgccgcagccgctgtcggtgaaggccgtggcacgctggctcggggggatttttcatgcccgcagtaccggcacctccgatcttgccacgctgatccatgaaaaaaccggcggcaacccgctgttcgttcaggaatttttccgccgcatcgtcgatgacggactggtggtgcacaacaaatatcaggggaaatggcattacgatctccaggccatccgcgcccggcattacaccgagaacgtggtgacgctggtgcttgaacagctcaaggagatgcccgacgagacgcgccgcctgctgggcagcatcgcctgcctcggctgcacgggcgagctggagatgctgtgccgcgtggtggggcagtcggcggcggaaatccgctacgcccttcacccggcggttaccgctcagctgattgtgctgacggagaaagagtacgcttttacccacgatcgggtgcaggaagccgcctttgccctgctggatgagggcgagaaaagccatctgcacctgaccaccgccagcctgctggcggatgccgcgcggcagacggcgggtaacgaactactgttccgcgcggttcaccacgtcagcgccgcgctggactgcatccagcctgcgccgcagcgccagagattccgtgagctgagcctccaggccgcgcggcgtgcgaagcgtaccggcgattacctttccgccttaagttacatccagaccgccagagcgctggggaacgcgggtccggtctcggactttatgctggatatcgaagaggcgggctgtgagttcgctggccgctaa

SEQ ID NO: 523806 - DNA, 3111 bp, Stenotrophomonas maltophilia
gtgagttcgctggccgctaacctgctggcggaagtctatatgcgccagtcggagatccgcctggcgctggaggcgtcgttatgctggctgggcgtgttcgggatccagatcagccgctacccggaaaatgccgaatgtgacgaggcctggcagcagttctgtcaacgcaccgccgacgcgccgcagaacccgtttattcagcttaagctgatggagagcgcggagaccgaagcggtaatgaacctgctttacagcgccagtattttcgccagctttacctgcccgcgcctgcactttttactcctgtgccggatgatgcacctcacgctcgatcgcggcataaccggcgcatccaccacggcgatggcctggtttggcgtgctgattggccaccgctacgccgaataccgtctcgggtttgagtacggcacgctggctcgcgagctggtgaaccgccacggctatgatgcctatgaagctaaaactctgctgccgctcgaccagctcagcgtctggacccagccgctgtcgtacactatcgagtgcgccaaggcctgctttacctcggcggtgacccacggcgacatgacgatggcctgcttcgcggcctgtcaccagatcattaacttcctctcccggggcgatcatctggacggcgtgttgaccagcatcgatcgcggtctggcctttgtgcgtaaaacggattatcaggacattgaaaccgttctgcacattcagcgccgctacgtggagtttttacgcacgccggtgacgggcacatggagcgccgcccaggcgctgcctgacgatctgctgcccgcaccgccggagcaggcgcccgagcagacctcgaccatgctgttctggtactggctctatcgcgggatggcgcactttacctgcggcgaatacgccgacgcgcaggcggatttagagagggcgggctggtatgcgtggtccgcaccgggccatatccatctgctggattaccatttttacagcgcgctggcgctctcccgccagcttacgccggagaccttctcggcggattatcgccgcagtattcatcaccattacgacaaaattgccctctgggcgcggatcaatccgggcacgtttgccgataaagaggcgctgatttatgccgaaatcgtccgtctggacggcatgaacagcatcgcgctggagcagtatgaaaaggcggtgcggctctcgcgggagggcgggtttaacccgatcaatgccctggcccacgagctggcagggcgtttctcgctggcctgcggctacccgaccgcctccgacgcccatttccgcggttcgattgccgcctggggccgcgccggggcgcaggccaaggtgcgtcagctggagcaggattttccgcatctgctggcctccgggcagagccgcgcgtacgacaccgtggcatttgcccagaacgaggtgatccgcgatttacagagcgtcatcaaagcctcacgcgccttgtccgaagaaatcaacctcgagcgtttaattgaaaacctgatgacgctgctgcttgaacgggccggggcacagcgtggcctgctgcttcgcgtcagcgataatcacatcccggagatcgaagccagcgcctggaccagcaccgacggggtgcgggttcgcatcctgaaagagacaccgatggcgacggacatgccgctgtcggtgctggccgcggtgatccgcaccgggcaggagatccgcaccggcaaaccggaggaatttcacccgttcagccaggatccttatctggtgacgtccggcgccgccgtgatgtgtgtcccgatgttcaaacaggcgcgactggtgggggtgctgtatctggaaaaccgcctgatgccggaagtgtttaccgccgaacattcgcgcgtggtcagcctgctgggcgcgcaggcggcggtttcgctggagacggcacggctctacgccgagctgctggcggaaaacatccaccgccgacgggtggagaaagagctgcgcgccagccagacctcgctgatgctgggtgagcagatcagccataccggcagctggcgctgggagctggtgcaggatctgatgtttatgtccgaagagtacgcccgtattcttggcctgccggagcagcaaaagatgatctcaatggcggagtttttgaccttcgtgcatgaggatgattatggccggatcggtaacctcgttaatcagagcgtgcgtgacgggctgtcgatgcgcgcggagtttcgcattatccgcaccgacggctccgttcgctacatcctcgggattggcgatccggtgggcgtgggcagcgaggtgaatgagtattacggcatcattaccgacatcaccagccagcgggcggcggaggatgcgatgcgggtggcgcaagcggatctggcgcgagtctcacgggccaccaccgtcgggcaactcacctcctcgatcgcgcacgagatcaaccagccgctgatgtcgattgtctcgaacgccggcgcgagcctgcgctggctcaaccgcgatccggcgcggctggacaaagtgcgagaggggctggaggagatcgccgccgagggcgagcgggcaggggagatcatccgcagcattcagtctctgacgcgcaaacaggaccccacgtttacgcgaatagatctgcacttcctgatccaccacatcattatgctctcccgcagcgaacttgagctgcgacacataagcgttgattatctcctgaacgctgacgacagctttatcatcggcgacagcgtgcagatccagcaggtgctgcttaacctggtgatgaatgcgatggaagcgatggcggaagtgacggatcgcccgtgcagcatcacgatcgccaccgcgaactgcgccgaagggaaggtgatctttgagatcgccgataccggcagcggcattgagccggagctcaccgagcggatctttgactcgttctattcgaccaaagcgcagggaatggggatggggctgaccatcagcgccagcatcattgaacggcatcggggaaaactgagcgcgcgccgcagagagccgtacggcacggtgtttaccttcgcgttgccgcttgccggacaggaggcgtaa

SEQ ID NO: 523807 - DNA, 618 bp, Stenotrophomonas maltophilia
atggaacacattgtttatgtggttgatgacgatgacgcagtcaggcagtccgttgttgggctgctggaatcagcggatatacacgcccttggcttttcctcagcagaagcctttctcagccatccctttgaggatctgccctcctgcgtgatcctcgatatgcaaatgcccacgatcaccgggtttgatgtcgcagatgcgctgaaagccaacgggcgagaaataccgatcatttttctcaccggtcacggcaccatccctatgtccgtccgggcgatcaaaggcggggcctacgaatttctcactaaacccgttgaatccagcgccctcattggctctatcgaatccgcgctcaggctggcacagcacaacgccgcccgcgtcaaagagcactacgccctgaaacagcgccacatgtccctcacgccgcgcgagcatgaggtgcttgagcttgccatcagcggcaagctcaacaagcagatcgccgccgagctgggcgtcagtgagattacggtgaaagtacaccgccgccgggtgatggagaaaatgcaggtccgctccgtggccgagctggtcagggccgtcgagcgcctgacaaaacatcagccagcggaataa

SEQ ID NO: 523808 - DNA, 606 bp, Stenotrophomonas maltophilia
atgcactacacactgaaaagcagtgacgataaagaaaaagcggaaggaacaagcggcgcgggcgctctacagcaaaaactgctggaatcccgttcgattgtcatctccggcgagatcaaccaggagctggcccagaaagtcatcactcagatgatcctgctgcaaagcgtcagcaacgatccgatcaagctgtacatcaacagccagggcggccacgtggaagcgggcgacaccatccacgacttcattaagtttatccgaccggaagtgcacgtcattggcaccggctgggtggcaagcgccgggatcaccatcttcctggcggcgaaaaaagagcaccgctactcgctgccgaatacccgctttatgatccaccagccgctgggcggcgtgcgcggtcaggcaacggatatcgaaatcgaagcgcgcgagattatccgcatgctggaacgcgtgaacaaactgattgctgacgccaccggccagccgctggagaaagtgaagaaggacaccgaccgtaacttctggatgtcaccggcggaagcgctggactacggcatcgtgggcaaactgatcacccattatgacgagctgaacctggattaa

SEQ ID NO: 523809 - DNA, 1122 bp, Stenotrophomonas maltophilia
atggcgtatcaactgaacctcgactggccggaatttcttgagaaatactggcaaaaacaacccgttgtgctgaaaaatgccttcccgaattttgtcgaccccattacccctgatgaactggcgggtctggcgatggagccggaagtcgatagccgcctggtaagccatgctaacggcaagtggcaggcgagcaatggcccgtttgagcatttcgataacctcggtgaaaccggctggtctctgctggcgcaggcggtgaaccactggcatatgcccgccgcagagctggtgcgtccgttccgcgtcctgccggactggcgtctcgatgacctgatgatctccttctccgtcccgggcggcggcgttgggccgcatatcgatcagtacgatgtgtttattattcaggggatgggtagccgtcgctggcgcgtgggtgacaagctgccgatgcgtcagttctgtccgcatccggccctgctgcacgtcgatccgtttgagccaatcattgacgaagatctggccccgggcgatatcctctatattccgcctggattcccgcatgacggcttcacccatgaaaccgcgctcaactactctgtcggtttccgcgggccgaacggtcgcgatctgatcagcagctttgccgattacgcgctggaaaacgatctgggtggcgagcactacagcgatccggatttgacctgccgcgaacacccgggccgcgtggagcagtacgagctcgatcgcattcgccagatgatgatcgacatgattagcaagccggatgattttacaaaatggttcggcagcttcgtctccacgccgcgtcacgagctggatattgccgccgccgagccgccgtattccgcagacgaggtgctcgacgcgctgcaagggggcgaaacgctatcacgcttgagcgggctgcgcgtgctgaacatcaacggctgcttctttatcaacagcgaacagctggagacggcggatgtgaacggggcggacgcgctgtcccgctacacccagctcggccaggccgagctgggtgtagcgctgaataatccggcgtttgtggaagagttgaccggattgattaaccagggatactggtacttcgacgagtaa

SEQ ID NO: 523810 - DNA, 186 bp, Stenotrophomonas maltophilia
atgacgattcgcaacaatcggacagaaatttcgctggctcttggtgaagcggtcttagacatcgtgcaaaaaggccatgaggtatcgcgagaaaatctcgcccaggcgatgaaaattaaagcggaaaaagagcgcgacgatgagcggcttctgaactactggaaggcctgtaatatgctggtttaa

SEQ ID NO: 523811 - DNA, 234 bp, Stenotrophomonas maltophilia
atggtagataaaagcgcaattaaggatcacactcaggttgtcgccagctgcggaacgcatgtcggggttgtggaccatcttgatggtgagcgtatcaagcttgcaaagagcgacccggaatcaggcggcaagcaccactttattcctctcggctgggtcgataaggtcgaagataataaagttgtcctgaccaaaaaccataaagaggtttttgctgagtggcaggaagcataa

SEQ ID NO: 523812 - DNA, 954 bp, Stenotrophomonas maltophilia; identical to SEQ ID NO: 118926

SEQ ID NO: 523813 - DNA, 2091 bp, Stenotrophomonas maltophilia
atgtttgctaaatcgcgtctggcactgctggtgggatgggttaccggtagcgtcgcttttcctttactggcgcaggatgcccaaaaaactgacaccgtggtggtgacctcgcagatgcagtctgcggccaccaagcttgaaacgccggatattgaaaccccgcaatcggtctctatcgtcacccgcgagcagttcgaagagcagggcgcaaccagcgtgcgtcaggccgtgagctacacgccgggggtctacagcaaccagattggggcatcaaaccgcttcgactacatggtgctgcgcggcttctcggacggcagcctggacaacgtctacctcgacggcctgaagatgatgggcgacaccaattcccacagctcgctggtggttgatccgtggttcctggacagtatcgaagtcgtgcgcggcccggcctccgtgctgtacggtcgctcatcgccgggcggcatcgtggcgctcacctcccgtaagccatcgttcgatccgggcggggagatcaagctcttcgccggtaacaataaccagcgtggggcgatgttcgacgtgaccggcccggttgatgataacgaccgcgtggcggtacgcctcagcgggatgacccgctatgccgattcccagttcgatccgctcaaagaagagcgttacgcgctgatgccgagcctgacctggcgtatcaccgataatacccgtctggatctgatggcctacctgcaccgcgatccggaaggcggcagccactccggcctgccgtatgagggcaccgtcgtgccgcacagcggtaagaaaatctccaacaccttttttgaaggtgaagacgattacgacaagtacgatcgtcgggaaaacatggtcggttataacatcgagcacttgtttgacagcggctggtctgtgcgccagaagctgcgctacctgcacaccaaagtcgagctgaaccaggtgtatgccgcaggctggctgaacgacaccgagctgaaccgcggctattccggctccgacgagaagatgaacgccatcaccctggataaccaggtcgacggcagcttcgataccggcgaggtgaaccaccgcgtgctgatcggcatggactaccaggaccgcaccaacaacgtcaccggctactacggcggcttcccgccgattgacgctttccatcctgcttatggcgcgaagccggactacatcacccagtacagcagggaaaagcataagctgcgccagaccggctactacctgcaggatcagatgtccattgaccgctggcgcctcacgctgggtgggcgttacgaccaggtgagcgtgtcgaacgtcgacaacttcaaccatacccgcagcgatctggataaaaacaacttcagcagccgcgcggcgctgctgtatctgtttgataacggcgtcgcgccgtacgtcagttactccaccgcctttacgccgaccagctttgccgacgagcaggggaatatcctggatccgatgaagggcaagcagtgggaagcgggcgtgaagtatgagccggaggggatgaacagccagttcagcgcctcggtgttccgcatcaaccagaagaacattgccactaaagaggagccgaccgatccgtaccgttccatcggtgaaatcgaatccgaaggcgttgagctggaggcgattggacagctgaccgacagcctgcgcatgcaggcggcctacacctatacggatattcgctacaagaagagcagcccggaagaggagggcaagcgcgccgtctatgccccgcgtaacatggccagcgcctggctgagctacgacgtcaaaagcggcccgctggacggtctaaccgtcggctccggcgtgcgctatgtcaacgggatcgccagcgatcgtcagaacacccatacgctaccgtcatacaccctggtggatatggtcgtggggtatgacctgtcgaaagtggggctcacgggcgtgagcgcgcagttgaacgtcaataacctgacggacaaaagctacgttgcggcgtgtaattcgctctcttactgctacttcggtgcagagcgcagcattgtcggcagcgtttcgtggacgttctga

SEQ ID NO: 523814 - DNA, 1557 bp, Stenotrophomonas maltophilia
atggaaaacggccagtacaatacagattcaaaaactgcttttgtttaccatacagatccgctaaaacggtatctgcatggcgttttacccaccaatctgtactggtttattaatctgtatggtgaaaacaaaggatacagcatgacgcgctatcaacatctggccaacctgctggcggaacgtatcgaacaagggctgtatcgcagcggcgaacgtctgccgtcggtacgcacgctgagccaggaacacggcgtgagtatcagcaccatacagcaggcctaccagatcctcgaaaatctccagctgatcacgccccagccgcgctccggttattttgtctcgaaacgcaaagcgcagccgcccgtaccggcgatgacgcgcccggtgcagcgccccgtggacgtcacccagtgggatgaggtgatgatgctgctggacgcccgcgccgacaaagagatgatctcctttggcggcggctcgccggacatcaaccagccgagcctgaagccgctgtggcgcgagatgagccgcattgcgcagcataaccctggcgaaatgctgagctatgacgtgctcgatggtcgtctggagctgcgcgagcagatcgcccgcctgatgctggacggcggctccaccgtggcggcaaacgagattgtgatcaccaacggctgccacggcgcgctgtcgatcgccctgctctcggtgtgcaagccgggggatatcgtggcggtcgagtcgccgtcgtttcacggcaccatgcagatgctgcgcggattcgacatcaaggcgattgaaatacctaccgatcccgagaccgggatcagcatcgaagcgttagagctggcgctggagcagtggccgatcaaagcggtgatcctggtccccaactgcaataacccgctcgggtttatcatgccggaagcgcgtaaaaagcaggtgctggcgctcgcccagcggcacgatattgtgattgtggaggatgatatctacggcgagctggccgcagagtacccgcgcccgcgcaccattcactcgatggacattgatggccgcgtgatcctctgcagctcctttaccaaaaccgtggcgccggggctacgcgtcggttggattgttccggggcgctattacgaccgggtgatgcacatgaaatacgccgcgggcgggtttaacgtgccgggcacgcagatggcggtggcggcgtttattcgcgacggtcattaccatcgccacgtgcggcgcatgcgccagatttatcagcagaatatggagacctacacctgctgggtgcggcagtattttccggcagagatatgcgttacccgcccgcagggcagcttcctgctgtgggtcgagctgccggagatggtcgacatggtgtgcgtcagcaagcagctgtgccgtctgaagatccaggctgcggccgggtcgctgttttccgcctccggtaagtaccgcaactgtctgcggatcaacgtggcgctgccgccgacggataaacatcgcgaggcgttgaagaagatgggtgaggcgattgtgattgcgatggaggggtag

SEQ ID NO: 523815 - DNA, 162 bp, Stenotrophomonas maltophilia
atggaattctacgagaatcgttcaaaacgtccgtttatcgcgtttgtctgggtagcgaaaacgctgcgtaactggtatcgcatcaaccgtacccgccgcattctgagccagatgagcgacgagcagctcaaggacgttgggttatcgcgatatgatgtgtaa

SEQ ID NO: 523816 - DNA, 1389 bp, Stenotrophomonas maltophilia
atgaagccgggctatcatgagatttattcccgctatcgcgacaacatcacgcgcggcgtgctgaagccgggcgataaagtgcctgccatccgcgtgctggccgaagagcttaaggtcgcgcgaaaaaccgtcgagacggcgtatgccattctgacgggcgaagggtatctggtaagccagggcgcgcgcgggacgcgggtgaacccggatcttctgctgcccgcgcaacacgcccccgcagaacaagcgaccggcacgctgccggcgtcgttgattagccagcgcgaacgggccggttttctgcgccccggcattccggcgctcgacagcttcccctataaaaaatggctgctgctggcgggccaggcgacgcgcgccatgcgtcaggatgaaatgctcaacccgccggtgctgggctggtatccgctgcgcgaggcgattgcccgctatctcaatatctcgcgcgggttattctgcaccgccgaacaggtactgattaccagcggctacagcagcagcctgcgcctgatccttgacacgcttgccagccgctgcgacaaggtggtgtttgaggatccgggctattttatgggccagcagttgctcaagcggatcgtgccccgcctgcacaccgtaccggttgatcgctgcggcatcgatacggactacctgctccgtcatcatcgcgacgcgcgttttgccatcgtgaccccgtcgcatcagagtccgctggcggtgacgctctcactgccgcgcaagcagcagctgctcgactgggcgtcacaaaacgaggcgtggattatcgaagacgattatgacggggaatttcactacacccgcaaagtgctgccgtcgatgaaaagcctcgaccagcatgacagggtgatttttatgggcaccttcagcaaaaccatcatgccttcactgcgcatgggctacgtggtgatgcccgccagcaccgtcggggcctttaccgactgcgcggacattaccaccagcggccagccggtgctgacgcaaaaaatcctcaccgcatttctcaacgaagggcatttttttcgtcatctgaaaaagatgcgcgccctgtatcagatccgccgcgactggatgattgccgccctgggtgaggtctatggtgatctgttcttcaccgagcaaaacgacggtggaatgcatattgtcgcgttcctcgcaaagggaagcgctgaccgggagatcgcccgctgctggcaggaacagcaactacaggttaatgcgctgtcggagtggtatcgcgggtcgggcaaacgctacgggctggtgatgggctataacaacgtgcggtcatatcaggaggcggttgagctgctggaaaggccgaaacggcagacgcttgcgctgttgagttga

SEQ ID NO: 523817 - DNA, 480 bp, Stenotrophomonas maltophilia
atgagcacccgcgtaaaccaccacaaagccacacctgcacttgccaacgcgctttctgccctgagcatggaggtggcgaaaacctccatcgacccggcgcttaagcaccttatcgacattcgcgtatcgcagctgaacggctgcaccttctgtctggatatgcactcgaaagaggctaaaatcgccggtgagcgcgagctgcgcctgtaccatctggcggcctggcgcgagtccccgctgtttagcgcccgtgaaaaagcggcgctggccttcaccgaagcgctgacccagattggcgtacatggcgtgagcgatgcgctgtaccgcagcgtggcggagcacttctcggatgtcgagatttcagagctgaacttcgccatcgtagcgatcaacgcctggaaccgcctgggcattacctcccgcatggagccgggcgcgctggatgcggcttacggtctgaacaaggctaacctggaataa

SEQ ID NO: 523818 - DNA, 324 bp, Stenotrophomonas maltophilia
atgatcgcagtcctttttgaagccaaagcggagcctcatcatcaggcgcgctatctgcagcttgccgctgaactcaagcctttgctggcggacatcgacggctttattgatattgaacgttttcagagcctgagcatcgacggcaaaatcctgtccctttcctggtggcgggatgaagaggccgtccgccgctggaagcagaatgtcttccatcaggccgcgcaggccgaaggccgggagtcgattttttctttctaccgtattcgcgtggcgcagctggtgcgggagtacagctctgaaacgagagggcacgcggatgtatga

SEQ ID NO: 523819 - DNA, 396 bp, Stenotrophomonas maltophilia
atgtatgacgttcacgtgatttttagcgacaggcccggcgagctggcgcgctttggacagctgttaggccgcaacggcgtggggctggaggggggcggcgttttcggtacggatgcccatttcctggtggaggacggggaaaaagcccgccgtgtgctgctcgacgccgggtttaccgtgcaggcgctgcgaaagccggtgatcagaaagcttaagcaggagcgtcctggcgagctgggcgagatagcggcggcgctggccgcaaagggcgtgtctatcctgactcagtacagcgaccacgcgaatcaccttattctgctgacggatgatgataagctggccgctgagatcaccacaccctgggcgacaaatgttaaagacgagcttaccctctga

SEQ ID NO: 523820 - DNA, 660 bp, Stenotrophomonas maltophilia
atgctggaaaaggccattgccgctgtagcggctgcaatggccgatccgtcgcgcgtgaaaatgctctgtgcactaatggacggccgggcgtggacggccaccgaactgagtgcggcggcagacgttgcgccgtcgaccgccagcgggcatctcgcccggctgatggacggcaaactgattacctgcctgtctcaggggcggcatcgctactatcgtctggcggggcatgacgtggcggagttagtcgagcagatgatggggctctcctggcgccgcattaccccgccggaaactaccgcgccgaaagccatgcgggaggcgcggacctgctatgaccatctggcgggcgcggtggcggtgcagatctacgatttcatgcaggcagcaggctggctggaggcagacggttcagcgcttacgccgtatggtcgggagcaatttctgaagctcggcgtttcgttaagcgctcattcgcgccgaaaagcgtgctgcgcctgcctggactggagcgagcggcggtttcatctcggaggcgaagccggcgcagcgctgcttctttatctggaaagcaaagggtggatccagcgggtggcggggtacagggaggtggttgtgacggcttcaggacagggcgccatcaccagacattttagccgctaa

SEQ ID NO: 523821 - DNA, 471 bp, Stenotrophomonas maltophilia
atgagtgaagaagaactgtttagccgcaggccgatgggcatgcggatggcgatgatcgtgcgccagtggcgtgccgtcattgacgacgccattctcgataccgggttaacccagtcgagctggacggtgatgatgcagctgcatcagctcggggataacgtctcggtgagtgagctggcggaggtgcagggcattgaactgccgccgctaatgcgcaccctgacacagctggaaaaacagggttacctgctgcgcaccgtctcgccgtatgacaagcgcatccggcttctgacgctgacgcctgagggaaaagctgtacttaacaggctcacccaggtaattgagacgcttcagacgcgcgtatcgcaaaacatcgcgcctgaacatctcgacattttcagcgccaccctgaatcaaatcgcctgcaatttgcggacaatccgcgaagaagataacaagaccgaaaaataa

SEQ ID NO: 523822 - DNA, 1065 bp, Stenotrophomonas maltophilia
atgactcctgaacaaaagtttgcccgctgggtaagggtaagtattgcctctttcctgctgatgtttgtctactttatcgtcgcggatatctggatcccgttgacgccggattccaccgtgatgcgcgtggtgacgccggtgtctgcccgtgtctccggctatgtggcggcggtccatgtccacaacaatagccaggtgaagaaaggcgatctgctgtttgagctcgacgacaccccgtttcgcaataaagtggaagcggcgcagatcgcgcttgagcaagctcgcctttccaacgaacaactggacgcgcagatcgccgccgcgcaggccagcctgaagaccgccgtgctgaccgcgcgtaacgacaaagtgactttcgaccgctaccagaaactgagcaccctgcagaacgtgtcgcaggcggatctggataaggtccgcactacctggcagagcagcgagcagtccgtcagctcgattcaggcgaatattcataacctgcgcattcagcgcggcgagcggaatgaacaccgtaacgtgacgctgcaaaaataccgtaacgcgctggatgaagcggagctgaatcttggctggacgaaggtctacgccgaggcggacggcacggtgagtaatctgcaattaagccccggtttttacgcctcgtccggttcggcagcgctggcgctggtgaatacgcagacggatattgtggcggatttccgcgagaagagcctccgtcatacccaccaggggaccgacgccgccgtggtgtttgacgcctttccgggacgggttttccgcgcccacgtgaccagcagtgacgcggggatcctcgccggtcaggaagccgttaacggtcaactttctgaaccggaaacctctaaccgctgggtgcgcgatgcccagcgaatgcgcattcacgtggcgctggacgaagccttaccgaagtcgctgccgaccggcgcgcgcgccaccgtacagctctacaacagcgaagggccctttgcgcgcttcttctccgggatgcaaatccatctggtgagcctgcttcactatgtctattag

SEQ ID NO: 523823 - DNA, 1077 bp, Stenotrophomonas maltophilia
atgtctattagcaccctggcgcgggtatttaccccgcacggcaacatcgtctacacggcaaacgacttccgccagaccctgcgcattgtctttgccgggatgattgcgctcagtatttcgagcttctataacaccagctacggcgtgttttttgtggtctacccgatcatgctgctgtcgctggtgccggtgtttaaccgccacgtggcgaagcagtttatcttcagcgcatcgctcaactgcgtcgaaatggtgatcatcatcggctttctgtcgcaatggccggtcattatgacgctggtggtctttgccctgtacgtgatgcgctttcgctttatgagcaaggggccgctgtttctgttcggttcgatgggcgtggtgtgccagagcgtaatgctcaactttatgagctaccccaccaccaactggcacacgcttttgttctccaacattgaagcgagcgtgatggcggtgtgtctgagcgcgctgatgaattacctgctgccggacgtggagccacgtaagccgccgccgctgatagagaaagacgatgcccgcgtgcgccacgagtcgctgctctccggcaccgtggcgacgctgattttcgtggtatttcagatgagcgacttaagcgattcgctctcggcgctgatggcgggcattctgatcctgttcccgatgcactaccgcggcgcggtgatgagctctatctggcgcgtggtcggcgtggtgctgggctgtctctatatcctcgtcgttcagcttatcctgtacgatcacagcagccatatgctgctgatgatgccgctgatcggcctcgggctggcatttggcgcgcgcctgcacgtgatggagaaggtcggggccggggtgggattttccagcattaccaccatcggcattatgttcgggcaaaacatgcatccggacagcgatctggtgttcagcgatctgtaccgcatcacctccgttaccttcgcgctggtggtcacgctgacgatggtctttctggtgcacctgatcctgaaccgcttcgaggcgacgcgctacgttatcgcgccgccaaaagcggattaa

SEQ ID NO: 523824 - DNA, 1272 bp, Stenotrophomonas maltophilia
atggaaaaacataccgaactcaaacgcgccaagcttctcgcgctgtcgctgctgctgattgccgctgcggcctttatcactaccctgttcctgccgcaaaccttctgggtacgcggcgcaaaagctattgccgaggcggcgatggtcggcgcgctggcggactggtttgccgttgtcgcgctattccgccgggtgccaattcccgttatctcgcgccatacggcgattatcccgcgcaataaggaccgcatcggcgacaatcttggccagttcgtgcaggaaaagtttctggatacccagtcgctggtcgcattaattcgccgctacgagccggcccagatgattggtgcctggttcagcaagcccgacaacgcccagcgcgtcgggctgcatctgatgcaggtgatgagcggttttcttgagctaactgacgacgggcgcattcagcgcctgctcaaacgcgcggtgcataaggctatcgacaaggtcgatttaaccgagaccagcgccgtcatgctggaaagcatgaccaaaaacaaccgtcaccaggtgctgctggacgccatcatcaaccgtctgattaccctgattcagcgcgagagcacgcgggaatttatctctgaccagatcgtccactggctgaagaccgagcatccgcgcaaggcgatggtgctgcccaccgagtggctgggcgatcagagcgcagagatggtgtcgaacgcggtgaacacgctgctggatgatatcagccacgaccgcacgcaccagatccgtcgggcatttgaccgcgccacgctgaagttcatcgacaacctgaaaaacgacccggagatgacggccaaagccgacaacatcaagcactatctgaagaatgatgaagcatttaaccgctacctgggtgaaatgtgggctgacctgcgccagtggctgaaaaatgacatgcagagcgacgattcccgcgtgaagcaacgtatcgccaacgccgggctgtggtttggtgagacgctgtcgaatgatgccagcctgcgtgcgtcgctgaacgagcatctggagcaggccgcgcaccgcgtcgcgccggattttgcggcattcctgacgcgccatatcagcgacacggtgaaaagctgggacgccaaagatatgtcacgccagatagaactcaatatcggtaaagatcttcagttcattcgcgtaaacggtaccctggtaggcggaacgattggcctgatcctgtttttactttctcagttgcccgccgtgctggggcattaa

SEQ ID NO: 523825 - DNA, 429 bp, Stenotrophomonas maltophilia
ttgattgaattatccggcgcactgtatttgctctggatcggctcgcatcttgtacgcagccgaccgcagacgctggcgctaaatgaaacacatgagcgctgcccctcgctgcgtaagcagatcctgctggggctgggttcggcgctgttgaatcccaaaaacgcgttgttctacctggcgctgatgacggcgttactcgggccggacgtcacgctgcttcagcaggcgacctgcggcgtctggatggtgatggtagtactggtatgggattttgcgctggtgtcgctgatggggttaccggcggttcagcgaaagctcagccgttcgctctggctgatagagcgcacggcgggggtggtattgatggggtttggtgggtgggtgctgtggcggtttttgcacttttcccccgtatccctctatccttaa

SEQ ID NO: 523826 - DNA, 207 bp, Stenotrophomonas maltophilia
atggaactgttcttcccttccgcttttctcgccctggcgctggcgcattttgttgccctgttaagcccgggcccggattttttcctgctgatgggctacgtcgcccgctaccgactgcgcggcagcgccggattgtgcatcgggatagcggcaggaaacgggctttacattttgctggtcattatgggatggagcgcgctgcgttag

SEQ ID NO: 523827 - DNA, 744 bp, Stenotrophomonas maltophilia
atgaccgatacccgccacatccgtcagacctttcaccgcgcctcgggccttgaactacgcagcacgtggcaaagcatgcaggcgtacaaacgccattgccaccctcagctctccatcggcgcaattgtggaaggccagacatgctgcgtgtgtaatggcagagaatacatcctccagcccggggacctgattgtgatcccggcttatgtcccacacagctgcaaccctgttgccgggcagccgcgtagttatcatatgctttatatcgatacggaccttccccttgcggttcaggtgattcgcaacgctacgctgtttatgtattaccgggaagttgttgagaggatgtcccctgcgtccgtggacaggctgcttactgcccttccccattgcatggatgaggcagaaaaacctggatcaaccagccagcaggttcagcaggcatttctttccagtctttccagcccgccttccctcgacgcacttgcgcaacgattctcgctgcgaaaggagacgctgatccgtaccttcaagaaggacacgggcctgacgcctggcagcttcctcaatatctcccgcgttgagtacgccaaagcgcggctgcgtgccggggatgatatcgccgatgtcggctaccagagcgggtttgccgaccagagccattttcataagacctttgtgcgctacaccgccgccacaccgcgccagtacgctacgggccgatcaatatcagacaataaatag

SEQ ID NO: 523828 - DNA, 1371 bp, Stenotrophomonas maltophilia
atggcttatcagacagtaaatcctgccactaaccagctcatcaaagaatatccctcccacactgacgcagatgttgaagcggcgctgaaggcagccgatgcgctctatcactccgactgggcgaaaggcgacataagccagcgcctgccggtactgcataagctggcggacctgatcgacgaacgcgtggaggagctggcgaaaatcgccagccaggagatgggtaagctcatcgaacagagccgcggcgaggtgaaactgtgcgcgcaaatcgcccgctactatgcggacaacgcgaagcagttcctggccccggtgaagtatgactctgaactcggggaagcatgggttgaacatcaccccatcggcgtgctgatggccgtcgaaccatggaacttcccatactatcagctgatgcgcgttctggcgccaaacctggcggcgggtaaccctgtcatcgctaaacacgccagcattgtgccacattgtgcggaaaccttcgcccatctggtgcgtgaggcgggcgcgccggaaggggcgtggaccaacctgtttatctcgtccgatcaggtggcgaacatcatcgctgacgatcgcgtacagggcgcggcgctaaccggttcagaaaaagcgggcagcgtggtagcggcccaggcggcgaagcacattaagaaatccacgctggagcttggcggtaacgacgtattcgtggtgctcgacgatgcggaccttgataaagcggtgaagatcggcgttaacgcacggctcaacaacgccgggcaggtctgtaccgcggcgaagcgctttatcctgcatgaaaagattgccgatgccttcctgagcaaattcaccgaggcatttaagcaggtgaagattggcgatccgctggacgaaagcaccacgctggggccgctgtcctctaaagacgcgctcgacacgttgaccaaacaggttaacgaggcggtgaaaaacggcgctacgctgcactatggcggcaaacctgtgcagcgagacgggagcttctttgagccgaccatcctgaccaacatctcacgcgacaacccggcgtacttcgaagagttctttggcccggtagcgcagatttacgtggtgaaaaacgacgacgaggcggtcgcgctggcgaacgactcccactacggcctgggcggagcggtgttcagccaggatattgagcgcgcgaagaagatggcatcgcgtattgaaaccgggatggtgtacatcaactggctcaccgatacggcggcagaactgccgttcggcggcgtaaaacgttcgggttacggacgcgagctgtcggacctggggatcaaagagtttgtgaaccagaagctggtggtcgttcgcaagtaa

SEQ ID NO: 523829 - DNA, 546 bp, Stenotrophomonas maltophilia; identical to SEQ ID NO: 118913

SEQ ID NO: 523830 - DNA, 1359 bp, Stenotrophomonas maltophilia
atgaaaagaaaaatcattcctgtgctaattggttgtgcgctctctttctctggcctggcggcacagccaaccgcggagcgttacgtcgtcagttttcccgaaggcgcgcatgtcaaatacagcggtgcgtttgccagcgcgtttccgaacgggctgcctgtggggattggctctggcctgctgtttacgggcaagcagggcgatgccttgacgtttacgaccgtgaccgatcgcggtcctaacgcggattcgccaaaaatggggaaaaatgacgctaaaatctttgttaccccggatttcgccccgctgctaatgacgatccgcgtgcaaaacggtaaagcggaggccgtggacgcgcgtcctttgcatgacgataaaggcgaaatcaacggtctgccgctgcaaagtggcgtgattggctccaccaatgaaatcgcgctaagcgacaccttaaaagtgctgaaaggcgataaccgcgggctggatacggaaggcatcacgccggacgggaagggcggctactggctgtgcgatgagtatggtccgttcctgattaatattgacagtaaagggaaaatcctcgcgatccacggcccacaggcggcggaaggggagaaatccatcgccggcggtctgccaaatgttatcaaatggcgccaggcaaaccggggatttgaaggcctgacccgcatgccggacggacgtattatcgccgctgtccagagtacgttggatatcgacgggaagagcaaaaagcaggcgctgtttacgcgactggtcagcttcgatccggcgaccggaaaaaccgcgatgtacggctaccctgtcgacagcgcggcctacagcaaaaacagcgacgccaaaatcggcgatatcgtggcgctggataaccacactatcctgctgattgaacagggcgaagataaaaacgacgtaatgcgtaacctcatctacagggtggatctgagcaaggcgagcgatctggccgccttcgacaagccgggcgaatacccggaatttgacgatgagaaaacgctggcgcagcgcggcatttcacttgcggaaaaaacgcaggtggtcgatctgcgtgcgctgggctggcagcaggaaaaggccgaagggctggcgctgattgacgacaaaacgctggcggtggcgaacgataatgactttggcgtgaaggtggcgatgcacaacccggccgagggcaagaagctcaaggattatcgggtgaacgcggaaggcaagctgacgctggatgacaaagcggttgaaactaccctcagcgtcaagccactgaagaagccggattccgacagcgagctgtggattgtgacgctgccggaggcgttgaaataa

SEQ ID NO: 523831 - DNA, 1848 bp, Stenotrophomonas maltophilia
atggcaatcattattcccacggttagcagctgtagcgagaaaattacggcaggagaaaaaagactggcaaggcttctggagggtgggctcagcgaacaatgtacctgctggtatgatacccgaatgggagacaaagacgatcatcctgattttgtgattctggcccccgataaagggctgctgtttatagaagtgaaagactggtatatcacaaaaataaaatcggctaataaaacccatattaattatgaaaccaaaaacggcatagagccgttgaagaacccactcgaacaagttcggcaatatacctttcatatcatcaatagcctgaaaaaagatcccctgcttcgccagaaacagggagagcatgagggcggttttattatgccgtatggatacggtgtttatttgagcaacatcactcgggcacagctggaaaagagttttacacctgaggagttgaatgaaatattgcccgccagccaggtgatatgcaaagacgaactcaacgagtttatgactcgagaacaaatctctggccggctcgaatcccttctcaaacatcactttgttcataacacaacaccacagcagctcgaccgcatccggtggcatctttatcccgatgtccgcattaacccatccgttacgcgggttgacctggataattttactttccacacccctgatgtggtatgcatgatggacaggaaccaggaacaactcgccagaagtatgggggcgggacacagggtaattcatggcgtggcaggttcgggcaaaacgctcattttgcaccaccgatgtattgagcttgccaacaacattgaaaacaccaaaccgatactggtgatttgctacaacattacgctggctaaaaaactcaaagcgcagctcgaacagcatagcctcagacttcccgtcgaagttatccatttccacgcctggtgttatcagcaattaaacgcgcatcggcgtcttccccccaggagcaaaaactttattgagctgatggaaaatgcgctgacggtggcatttgaagagggagcaatcaaaccggagcagtacagcgccgttttgatagatgaaggacacgattttaaaccggaatggctaagaatcctcgccaaaatgccggacaataaagatagctccctgctgtttctgtacgatgacgctcagtcaatttatcagaaaaagaaagctctcgattttaccctgtccagcgtcgatataaaggctcagggccgtacaactattttggataccaattatcgcaacacccggcaaatactccattttgccagcagcgtagcatttaattatctcaataatcacatagaagcttctctcaaataccagcagcctgccgcaggtggcctgtccgggaagtatcccgcgctggccagctttgataatcaggacgaggagattacgcgcgtcctcgattgggtcacagagcagcgacaggaaggtgttgcgtggtcagaaatcgccatactgtgcccctcaacctacagcatttcaggcatgctcgcgccaaggcttgaagcccgcaagatcccataccagatgattgtctccagcgatgataaaaagcactggtccccgcagaatgattacctctgcgtcatgccgctgcccagcagcaaggggcttgagtttaattcggtcgccattatggatgcggcaaaggaaagggacagtgaagatctgagtgacgatatcaagcgcctttacgtcggcattacccgcgcacgacagaatcttctggtgacaatgcacggaaccggaagcctgcgagatcatctggtcgagacctgggaaaagagcgttaagtcgatctaa

SEQ ID NO: 523832 - DNA, 954 bp, Stenotrophomonas maltophilia
atgaccccgattgccgttaccctgctgaccggttttctcggcgccggtaaaaccaccctgctgcgccacatcctgaatgaacagcacggcttcaaaatcgccgtcattgaaaacgaatttggcgaagtctccgttgacgatcagctgattggcgaccgcgccacgcagatcaaaaccctgaccaacggctgcatctgctgcacccgctccagtgaattagaagacgccctgctggacctgctcgacagccgcgatcgcggtgacatcgtcttcgaccgtctggtgatcgagtgcaccggcatggccgaccccggcccgattattcagacctttttctcccacgatattctgtgccagcgctacctgctggacggcgtcgtcgcgctggtggatgcggtacacgccgacgagcagatgaaccagttcaccatcgcccagtctcagattggctacgccgaccgcattctgctgaccaaaaccgacgtggcgggtgaaagcgaaaaactgcgtgagcgcctgacgcgcatcaactcgcgcgcacccatttataccgtgacgcacggcgatatcgacctgtctcagctgttcaacaccaacggctttatgctggaggagaacgtcaccgcgaaaccgcgcttccactttatggcagacaagcaaaacgacgtagcgtcgattgtggtggagctggactacccggtggacatcagcgaggtctcgcgcgtgatggagaacctgctgctgtcgtttgccgacaatctgctgcgctataaaggaatgctgtggatcgacggcgagccgaaccgcctgctgttccagggcgtgcagcgcctgtacagcgccgactgggatcgtccgtggggcgatgaaccgccgcacagcgtgatggtgtttattggaatacagctgccggaagaggaaattcgggcagcgtttacgggactgaaaaagtaa

SEQ ID NO: 523833 - DNA, 204 bp, Stenotrophomonas maltophilia
atgtttggtaacttaggcgaagcaaaaaaatacctcggtcaggcggcgaaaatgctgattggcattccggactatgacaactacgttgagcatatgaagaccaaccatccggataagccgtacatgacctacactgaattcttccgcgagcgtcaggaagcgcgctacggcggaagtggagaaggcggcgtccgctgctgctaa

SEQ ID NO: 523834 - DNA, 2154 bp, Stenotrophomonas maltophilia
atggatactaaaaaactacttaagcacgtgccctgggccatcctcgggatcatcggcgctttctgtctggcggttgtcgcattacgccggggcgagcacgtcagcgccctgtggatcgtggtcgcgtcggtttccgtctatcttgtggcttatcgctactacagcttgtacatcgcgcagaaggtcatgaagctcgacccgacgcgcgccaccccggcggtcattaacaatgacggcctgaactatgtgccaaccaaccgttacgtgctgtttggtcaccacttcgccgccattgcaggcgcgggtccgctggtcggtccggtgctggctgcacagatgggctacctgccgggtacgctctggctgctggcgggcgtggtgctggcgggagcggtgcaggactttatggtgctgtttatctcctcgcgccgtaatggttcgtcgctgggcgagatgatcaaagaggagatgggccgcgtgccgggcacgatcgccctcttcggctgcttcctgatcatgatcatcatcctggcagtgctggccctgatcgtggtgaaagcgctggccgaaagtccgtggggcgtcttcaccgtctgctctaccgtgccgattgcgctgttcatgggcatctacatgcgcttcctgcgccctggccgcgttggcgaggtgtcggtcatcggtatcgtgctgctggtcgcctccatctacttcggcggcgtgattgcccacgacccgtactggggcccggcgctgacctttaaagacaccaccatcaccttcgcgctgatcggttacgcgttcatctcagcgctgctgccggtgtggctgattctggctccgcgtgactacctggcgaccttcctgaaaatcggcgtgatcgtcgggctggcaatcgggattgtgatcatcaacccggagctgaaaatgccggcggtgacgcagtacattgacggtaccggtccgctgtggaaaggtgccctgttcccgttcctgtttatcaccattgcctgtggtgccgtgtctggcttccacgcactgatcgcctccggcaccacgccgaagctgatggccaacgaaaccgacgcgcgcttcatcggttacggcgcgatgctgatggaatccttcgtggcgatcatggcgctggttgcggcgtcgattatcgagcctgggctgtacttcgcgatgaacaccccaccagcgggtctcggcatcaccatgccaaacctgcatgagatgggcggcgaaaataccgcgctgattatggcgcagctgaaagacgccagcgcacacgcggcggcgaccgtcagctcctggggcttcgtgatttcgcctgagcagattatgcagaccgcgaaagacatcggcgaaccatccgtgctgaaccgcgcaggtggcgcaccgacgctggcggtgggtatcgcacacgtgttccacaaagtgctgccgtgggcggacatgggcttctggtaccacttcggtatcctgtttgaagcgctgttcatcctcaccgcgctggatgccggtacgcgtgcaggccgcttcatgttgcaggatctgctgggtaacttcgtgccgttcctgaagaaaaccgactctctggtagcaggtgttctgggtactgcgggctgcgtaggtctgtggggttatctgctgtatcagggcgttgtagacccgctgggcggcgtgaagagcctgtggccgctgttcggcatctctaaccagatgctggcggctgtggccctggtgctgggcaccgttgtcctggtgaagatgaaacgcaccaaatacatctgggtaaccgtggtgcctgcgctgtggctgctgctctgcactacctgggcgctgggtctgaaactgttcagcaccaacccgcagctggaaggcttcttcttcatggctaaccagtacaaagagaagattgccgcaggcggcgcggatctgaccgcgcagcagattgccaacatgaaccatatcgtggtgaacaactacaccaacgcgggtctgagcattctgttcctggtggtggtgtacagcattatcttctacggcattaaaacctggatgaaagtgcgtaatgccgatggccgtacggacaaagaaaccccgtacgtgccggtgccgaaaggcggcgtgaagacgtcttcacaccattaa

SEQ ID NO: 523835 - DNA, 258 bp, Stenotrophomonas maltophilia
atggcctcttcaccccgaagccgctcggctgaacgtctggttgacatcattattgctctgcaccgcaacggaagcgttaatcgccgcgatctgatgcaaaaatttggcattaccgaacgtacggtgtaccgcgatctacaggccctttccccgattatcgaacacgacggcaaaggacgctatcagctgctgcccgcatatcagccctgccgctgcacgcaatgccctgatgcgaacgacgaaaccccgcagggctag

SEQ ID NO: 523836 - DNA, 510 bp, Stenotrophomonas maltophilia
atgcaatctgaagaacgcctgcgttttcgcgacgcgatggccagcctgtcggcggcggtgaatgtggtcaccaccgagggcgatgcgggccgctgcggcattaccgccaccgccgtctgttcggtcacggataccccgccctcggtcatggtctgcatcaacgccaacagcgccatgaacccggtcttccagggcaacggcaaactgtgcgtcaacgtgctgaaccacgagcaggagatcatggcccgccactttgccgggatgaccggcatggccatggaggagcgctttgctctctcctgctggcagaaaggaccgctggcgcagccggtgctgaaaggcgccctggcaagcctggaaggcgagataacccaggtgcaaaccatcggtacccatctggtctacctggtggagattaagaacatcatcctcagcagcgaggggcacggcctgatctacttcaaacgccgtttccacccggtgatgatggagatggaagccgcggtttga

SEQ ID NO: 523837 - DNA, 1563 bp, Stenotrophomonas maltophilia
atgaagcctgaagatttccgcgctaatgccaaacgtccgttaaccggtgaagagtatttaaaaagcctgcaagatggccgtgagatttatatctacggcgagcgcgttaaggacgttactacccacccggcatttcgcaatgcggcggcgtccatcgcccagatgtacgatgccctgcacaagccagacatgcaggatacactctgctggggcaccgacaccggcagcggcggctacacccataaattcttccgcgtggcgaaaagcgccgacgatctgcgccagcagcgcgacgccatcgccgagtggtcgcgcctgagctacggctggatgggccgcacgccagactacaaagccgcgttcggctgcgcgctgggggctaaccctgccttctacggtcagttcgagcagaacgcccgcaactggtacacccgtattcaggaaaccggcctgtactttaaccacgccatcgtcaacccgcctatcgaccgccataaaccggcggacgaggtgaaagacgtttacatcaagctggagaaagagaccgacgccgggatcatcgtcagcggcgcgaaagtggtggccaccaactctgcgctgacccactacaacatgattggttttggctctgcgcaggtgatgggcgaaaacccggacttcgcgctaatgttcgtcgcgccgatggatgccgaaggggtgaagctgatctcccgcgcctcttacgagatggtggcaggggcgacaggctctccgtacgactacccgctctccagccgctttgacgagaacgacgccattctggtgatggatcatgtgctgatcccgtgggaaaacgtgctgatctaccgcgatttcgaccgctgtcgtcgctggacgatggaaggtggcttcgcccgcatgtacccgcttcaggcctgcgtgcgtctggcagtgaagctcgacttcatcaccgctctgctgaagaaatcgctggagtgcactggcaccctcgagttccgcggcgtgcaggcggatctcggcgaagtggtggcgtggcgcaacatgttctgggcgctgagcgactccatgtgctccgaagccacgccgtggataaacggcgcgtacctgcctgaccacgcggcgttacagacctaccgcgtgatggcgccgatggcctacgcgaaaatcaagaacatcatcgaacgcaacgtgacctccgggctgatctacctgccgtccagcgcgcgggacctgaacaacccgcagatcgaccagtatctggcgaagtacgtacgcggctccaacgggatggatcacgtcgaacgcatcaagattctgaaactgatgtgggatgccatcggcagcgagtttggcggacgtcacgagctgtacgaaatcaactactccggtagtcaggatgagatccgcctgcaatgcctgcgtcaggcgcaaagctccggcaacatggacaagatgatggcgatggttgaccgctgcatgtccgagtacgaccagcacggctggactgtaccgcacctgcacaacaacactgatatcaacatgctggataagctgctgaaataa

SEQ ID NO: 523838 - DNA, 891 bp, Stenotrophomonas maltophilia
atgtgccagagccctatcgccaacattgatatcagcaaggagtacgacgaaagtctgggcaccgacgatgtgcactaccagtcgtttgcccgcatggcggccttttttggccgcgacatgcaggcgcaccgccacgaccagtattttcagatgcattttctcgacaccgggcagattgagctgcagctcgacgaccaccgctactcggtgcaggcgccgctgttcgttctgacgccgccgtcggtgccgcacgcgtttatcactgaatccgacagcgacggccacgtgctgacggtgcgcgaggatcttatctggccgttgttagaagtgctctaccccggcacgcgggaggcgttcggcctgccggggatctgcctgtcgcttgccgacaggcctgacgagctggcggcgctgaagcattactggcagctcattgcccgggaatccacggaacagctgccgggccgtgagcatacgctggtcctgctggcgcaggccgtatttaccctgctgctgcgcaacgcgaagctcgacgaccacgcttcaggcggtatgcgcggcgagctgaagctgtttcagcgctttaaccagctgacagatgcgcattaccacgagcactggacggtgccggaatacgccagcgaactgcatcttaccgaatcccgcctgaccgatatctgccgccgctttgccaaccgctcgccgaaacggctgatcttcgaccgccagctgcgggaagccaggcgcttgctgctgttttccgacagcacagtgagcgaaattgcctggcaactggggtttaaagatccggcctatttcgcccgttttttcaaccgactgacggggtgctcacccagcgcataccgggcgcagaaagtaccggtttcctga

SEQ ID NO: 523839 - DNA, 1347 bp, Stenotrophomonas maltophilia
atgacgacctctaccctgcaagataagaaagctatagaacatcgcgttatcaacaagctgttccgtcgtttgatcgtgtttctctttatcctgtttgtcttttcgtttctcgatcgcatcaacatcggctttgccgggctgacgatgggtaaagatctgggcctcacgtcgaccatgtttggcctggccgcgaccctgttttacgtcacctacgtgctgtgcgggatccccagcaacatcatgctggcgaaaatcggcgcgcggcgctggatcgccgggatcatggtggtgtggggcatcgcctctacctgcaccatgttcgccaccagcccggaaacgctctacgtcctgcgcatgctggtgggcattgccgaagccggtttcctgccggggatcctggtctatctcacctggtggttcccggcgtatcaccgcgcccgcgccaacgcgttgtttatgatcgccatgccggtgaccatgatgctcggctcgatcctctccgggtacattctggcgatggacgggctgtggaacctgaagggctggcagtggctgttcctgttggaggggctgccgtcggtggtgctcggcgtggtgacctggttctaccttaacgacaccccggatcaggccacctggctggatgatgatgaaaagcaggcactcaaaacgatgatcgcccgcgagcaggaactggccattgcgcacgtcgccacgccgcgatcgacgctgcgcgaggtgctgacgcccgccgtactgctctacacgctggcctacttctgcctgacgaatacgctgagcgcgatcaacatctggacgccgcagatcctgcaaagcttcaacaccggcagcagcaatatcgtgattggcctgctggcggcgatcccgcagttttgcaccatcctcgggatgatctggtggagccgccgctccgacaggctgaaagagcgaaaaaagcacaccatcctgccgtatctgtttgcggcggcgggatggatgctggcctcggcgaccgatcacagcctgatccagctgcttggcatcatcatggcctcaaccggatcgtttaccgccatggcgatattctggaccacgccggaccaggtgattagcctgcaatcccgcgcggtggcgctggcggtgatcaacgccatcggcaacgtcgggtctgccgtcagcccattgctgattggtattctgcgcgacgcgaccggcagcttcagctcggggctgtggttcgtggcgggtctgctggtagtgggcgcgctggtgctgacgcgcattccgatgacgcagcgggttcaaaagaggaacgatcatgtgccagagccctatcgccaacattga

SEQ ID NO: 523840 - DNA, 798 bp, Stenotrophomonas maltophilia
atgcaaaacgcattcaaagcggcgctgaaagcgggccgaccgcaaatcgggttatggctggggctaaccagcagctacagcgctgagctattggccggggccggttttgactggctgctgatcgacggggagcacgcgccaaacagcgtgcagaccgttctcactcagctacaggccatcgccccttatcccagccagccggtggtgcgcccgtcgtggaacgatccggtgcagatcaagcagctgctggacgtgggggtgcaaaccctgctggtgccgatggtgcaaaacgccgacgaagcgcggctggcggtcagcgccacccgctatccgcctgccggcattcgcggcgtcggcagcgccctggcgcgcgcctcgcgctggaaccgtatcccggactatctgcatcaggctaacgacgccatgtgcgtgctggtgcaaatcgaaaccctaagagcgttaaaaaacctgccgcagatcctggacgtggacggcgtcgacggcgtgtttatcggcccggcggatctgagtgccgacatgggctttgccggtaatccgcagcacccggaggtgcaggccgccattgagcaggcgatcgcgcagatacgcgccgccggtaaagcgcccggcatcctgatggcgaacgagcaactggcgaaacgttaccttgcactcggcgcgctgtttgtcgccgtcggcgtcgacaccaccctgctcgcccgcggcgcggaagcgctggcggcacgctttatcgaacaaccggttacgtcagttaataacaataaatccgtctactaa

SEQ ID NO: 523841 - DNA, 804 bp, Stenotrophomonas maltophilia
atgctcgacaaacacacccataccctgatcgcccaccgcctgcatcaggcggaacaatcccgggagcagatccgcgcgatctcgcttgagtatccggagatcaccattgaagacgcctacgccgtccagcgcgaatgggtgagcctgaaaattgccgaaggccgcgtgctgaaaggccacaagatcggcctcacctccaaagcgatgcaggccagctcgcagatcagcgagccagactacggcgcgctgctggacgatatgttcttccacgacggcagcgacattcccgtggatcgctttatcgtcccgcgcatcgaagtggagctggccttcgtgctggcaaaaccgctgcgcggcccgaactgcacgatcttcgacgtttacaacgccacggattacgtcatccctgccctggagctgatcgacgcccgctgccacaacgttgacccggaaacccagcgcccgcgcaaggtattcgacactatctccgataacgccgccaacgcgggcgtgatcctcggcggccgcccgattaaacccgacgagctggatctgcgctggatctccgccctgctctaccgcaacggcgtgatcgaagagaccggcgtggccgcaggcgtccttaatcatccggcgaacggcgtggcgtggctggcgaacaaactcgcgccatacgacgtgcagcttgagccaggccagatcatcctcggcggctcgtttacccgcccggtgcccgccagcagaggcgacaccttccacgtcgactacggcaacatgggctccatcagctgccgctttgtgtaa

SEQ ID NO: 523842 - DNA, 381 bp, Stenotrophomonas maltophilia
atgccgcactttattgctgaatgtaccgacaacatccgcgagcaggccgacctgccggggctgtttgccaaagtgaacgaggcgctcgccgccacgggtattttcccgctcggcggtatccgcagccgcgcccactggctggacacctggcagatggccgacggcaagcacgattacgcctttgtgcatatgacgctcaaaatcggcgccgggcgcagtctggagagccgggaagaggtcggtgaaatgctgtttgcgctgatcaaaacgcattttgcagagctgatggccgcccgctatctggcgctgtctttcgagctcgacgagctgcacccgacgctcaattacaagcagaacaacgtgcacgcgttgtttaagtag

SEQ ID NO: 523843 - DNA, 852 bp, Stenotrophomonas maltophilia
atgggaaaattagccttagcagcaaaaatcacccacgtgccgtcaatgtatctctctgaactgccgggcaaaaaccacggctgccgccagtcagccatcgacgggcataaagagatcagcaagcgctgccgcgagctgggcgtcgataccattatcgtcttcgacacccactggctggtgaacagcgcgtatcacatcaactgtgcggaccatttttcaggcgtctacaccagcaacgagctgccgcattttattcgcgacatgacctacgactacgacggcaacccggaactcggccagctgatcgccgacgaagcggtgaagcttggcgtgcgcgccaaggcgcacaacatcccgagcctcaagctggagtacggcacgctggtgccgatgcgctacatgaacgcggataagcacttcaaagtggtctccatctcggcgttctgcacggttcacgacttcgccgacagccgcaggctgggcgaggccatcgtcagcgccatcgaaaaatacgacggcaccgtggcggtgctcgccagcggctcgctgtcgcaccgctttatcgacgaccagcgcgcggaggaagggatgaacagctatacccgcgagtttgaccgccagatggatgagcgggtagtgaagctgtggcgcgaggggcagttcaaagagttttgcagcatgctgccggagtacgccgactactgctacggcgagggcaacatgcacgacacggtgatgctgctggggatgctcggctgggacaactacgacggtaaggtggagtttctcaccgagctgttcgccagctccggcaccggccaggtcaacgccgttttcccgctgcccgcgtaa

SEQ ID NO: 523844 - DNA, 1467 bp, Stenotrophomonas maltophilia
atgaaaaagattaaccactggatcaacgggaaaaacgtcgccggaagtgagtacttccaaaccactaacccggcctccggcgaggtgctggcagaagtggcctccggcggcgaagccgaaatccatcaggccgttgccgccgccaaagaggcgttcccgaaatgggccaacctgccgatgaaggagcgtgcgcgcctgatgcgtcgcctgggggatctgattgaccagaacgtgccggacattgccgcgatggagaccgccgacaccggcctgccgatccaccagaccaaaaacgtgctcattccacgcgcctcgcacaactttgagttcttcgccgaggtgtgccagcagatgaacggcaaaacctacccggtcgatgacaagatgctcaactacaccctcgtgcaaccggtaggcgtttgtgcgctggtgtcgccgtggaacgtgccgtttatgaccgccacctggaaggtcgcgccgtgcctggcgctgggtaacaccgcggtgctgaagatgtccgagctctccccgctgaccgccgaccgtctgggcgagctggcgctggaggcgggcattccggcgggcgtgctgaacgtggtgcagggctatggcgccacggcgggcgacgcgctggtgcgtcatcatgacgtgcgcgccgtctccttcaccggcggcaccgccaccgggcgtaacatcatgaaaaacgccgggctgaagaagtattccatggagctgggcggcaaatctccggtgctgatatttgaagacgcggacattgagcgcgcgctggacgccgccctgttcaccatcttctccatcaacggcgaacgctgcaccgccggctcgcgcatcttcatccagcagagcatctacccggagttcgtcaaacgctttgccgagcgcgccagccgcctgcgcgtgggcgacccgaccgatccgaacacccagattggcgcgctgatcagcaagcagcactgggagaaggtctccggctacatccgcctcggcattgaagagggggcaaccctgctggcgggcggcccggacaaaccgaccgatcttcctgcgcacctgaaaggcggcaatttcctgcgcccgaccgtgctggcggatgtcgataaccgcatgcgcgtggcgcaggaggagatcttcgggccggtggcctgcctgctgccgtttaaggacgaagcggaaggcctgcgcctggcaaacgacgtggagtatggcctggcgtcgtacatctggacgcaggacgtcagcaaagtgctgcgtctggcgcgcaacatcgaagcgggcatggtgttcgttaacacccagaacgtgcgcgacctgcgccagccgtttggcggcgtgaaggcctccggcaccgggcgtgagggcggcgagtacagcttcgaggtcttcgcggagatgaaaaacgtctgtatctccatgggcgaccatccgattccaaagtgggggatctga

SEQ ID NO: 523845 - DNA, 1278 bp, Stenotrophomonas maltophilia
atgaaaggtactgtttttgccgtagcgctaaaccaccagagccagcgtgcggcctgggctgaggcgtttgaaaaagccccctataacgcgccgccaaaaacggcggtgtggtttatcaagccacataacactgttattcgcgcaggcgagccgattcccttcccgcagggagaaaccgtgttaagcggcgcaacggtggcgctggtggtgggcaaaaccgccagcaaagtacgcgttgaagaggcggcggcgtacatcgccggctacgcgctggccaacgaaatcagcctgccggaagagagcttctaccgcccggctattaaagccaaatgccgggatggattttgcccgctcggcgaacctgtcgccgttgataacgtggacaacctgaccatcatcaccgagatcaacggtcgcgaagcggaccactggaacacggccgatctgcaccgcaacgccgccgaactgctgagcgccctgagcgaatttgccaccctgaaccccggcgatgcgatattgctcggtaccccgcaaagccgcgtcgaaattcgcccgggcgatcgggtacgcattctggcagagggatttccgccgctggaaaacccggtggtggaggaacgcgacgttgccatcgcttcgcgcacgccgccgcacgccacgctgttcgccctcggcctgaactacgccgatcacgccagcgagctggacttcaagccccccaccgagccgctggtgtttatcaaagcgccgaacacctttaatggcgacaaccagacctcggtgcgcccaaacaacattgaatacatgcattacgaagccgagctggtggtggtcatcggtaaaaccgcgcgtaaggtcagcgaagccgaggcgatggactatgttgcgggctacacggtgtgcaacgactacgccatccgcgattatctcgaaaactactatcgcccgaacctgcgggtgaaaagccgcgacgggctgacccccatcagcctgaacgtagtgccaaaagaagccatccctgacccgcacaaccttcgtcttcgcacctacgtcaacggtgaactgcgtcaggaaggcaccaccgccgatctcattttcagcatcccattcctgattgcgtatctgagcgatttcatgaccctgcaaccgggcgacatgattgccaccggcacgccgaaggggctgtccgacgtggtaccgggcgatgaggtggtagtggaagtggaaggcgtaggccgtctggtaaaccgaattgtcagtgaggagactgcaaaatga

SEQ ID NO: 523846 - DNA, 441 bp, Stenotrophomonas maltophilia
atgcatgactcattaaccatcgcgctgttgcaggcgcgtgaagcggcgatgggctacttccgcccgatagtgaaacggcataatctgaccgaacagcagtggcgtatcgtccgcgtgctggccgagcatccctccatggattttcacgatctggcgttccgcacctgcattttgcgcccaagcctgaccggcattctgacgcggatggagcgcgacggtctggtgctgcgcttaaagccggtgaatgaccagcgcaagctgtacgtatcgctgacgaaagaaggcaacgcgctgtaccagcgtgctcaggctcaggtggaagaggcgtaccagcagattgaggcggaatataccccggagaagatgaagcagctcacggcgctgctggaagagtttattgaactcggaaaccgacatattgccgcgcgggacgaagagtaa

SEQ ID NO: 523847 - DNA, 1665 bp, Stenotrophomonas maltophilia
atgttaaatcgtatcaagattgtcaccagcttactgctggttttagcgatatttggccttttacaactcacatccggtggtcttttcttcaatgccctgaagcatgacaaagagaatttcaccattctgcaaaccattcgccagcaacaatccaccctgaacggtagctgggtggcgctgctgcaaacccgtaacaccctgaaccgtgcgggtatccgctatatgatggatcagaacaatatcggcagcggctcaaccgtcgccgagctgatgcagattgcctctgcgtctctgaaacaggcggaaaaaaactgggcggattacgaagcacttccgcgtgacccgcgtcagagcgacgctgcggcactggaaatcaaacgtaattacgatatctaccacggcgcgctggccgagctgatccagctgctgggggcgggcaagatcaacgagttcttcgaccagccgacccagagctatcaggatggctttgagaagcagtacgtcagctatctgcaacaaaacgacgcgctctatcagaccgcggttgaagacagcaacagctcttaccgccaggctatctgggtgctgattagcgtgctggctgcggtgctggtggtgattgttgccgtctggctgggtattcgtcaggcactgatttcgccgctgaaccgtctgattgacagcattcgtcatatcgccagcggcgacctggtgaagcgcatcgacgtggaaggctccaacgagatgggtgaactggctgactccctgcgccatatgcagggcgagctggtgcgtaccgtgggtgacgtgcgtaacggcgcaaacgccatttacagcggtgcgagcgaaatctcgatgggcaataacgatctctcatcccgtaccgagcagcaggctgcctctctggaagagaccgccgccagtatggaacagctgaccgccaccgtgaagcagaacgccgagaatgcccgtcaggcgagcaacctggccctgagcgcgtctgaaaccgcgcagaaaggcgggaaagtggtggataacgtggtgcagaccatgcgcgacatcgccggcagttcgcagaaaatcgccgatattatcagcgtgatcgacgggattgctttccagactaatattctggcgctgaacgcggcggtagaagcggcacgtgcgggcgagcagggccgcggctttgcggtggttgcaggtgaagtacgaaacctggcgcagcgcagcgcccaggcggctcgcgagatcaagagcctgattgaagactccgtggggcgcgtggagttgggttcaacgctggtagaaagcgccggtgaaaccatgggtgagatcgtgaatgcggtaacgcgcgtgacggacatcatgggcgaaatcgcgtctgcgtctgatgagcagagccgcggtatcgaccaggtggggctggcggtggctgagatggatcgcgtgacccagcagaacgcctcgctggtggaagagtctgcggcggcggcggcggcactggaagagcaggcgagccgtctgacgcaggccgttgcggtgttccgtattcagcaggaacagatgaaggcgcgcgagttcgcctccgcgaaaagcgttgccgcaccggtagtggcgcgtaaaccggcgaccgcagatgcgggcgataactgggaaacgttctga

SEQ ID NO: 523848 - DNA, 510 bp, Stenotrophomonas maltophilia
atgacggcgttcaccctccgcccgacgcgcatcgacgacgtcgctgccctgcccgccattgaacgcgcggcggggcagcgatttcgcgacgttcctgagctggcctggctggcagacagcgaggttatttccgttgaagatcacctcggttacgccggacgcggattaagctggctggcgctggctgacgacaggcccgtgggctttattctcgccgaagcccagccatcttcgctgtttattgtggaactttcggttcatctggactggcagggacgaggtctcggacgccggttgattaaccgtgtcgcagagcatgcccgcacgctggggctaacctcgctgacgttaacgacgtttcgtgatgtcccgtggaacgcgccctactacaggcgattagggtttgaaatgatgacgacgctgacgccggaaatgcgccagaaacgtgaagaagagacggcgcacggtttagcgtatggttcccgctgcgccatgcgcctgcctctgtaa

SEQ ID NO: 523849 - DNA, 2280 bp, Stenotrophomonas maltophilia
atgtcccttgtccttttcctggcttccatcggcgtttatgcctggaaagccggtcgtcacacctggtggtttgtggccaccctggtggtgctcggtatttttattgttttaaacattacgttatatgccagcgattactttaccggcgacggtattaacgacgcggtgctctacacattgaccaacagtctgaccggcgcaggtgtgggtaagtacatccttccgggtctggggctggtggtcgccctggtgggcatcttcgccgcgctggcctgggttctgcgccgtcgccgtcaccgtccgcatcatcatggctacagcctgctggcgctgtgcctggcgctggcctccgtggatgccagcccggcattccatcaaattaccgagctggtaaaatcccagtcgcgcgatggcgatccggactttgcggcctattacaaagaaccctcgaagaaaatcgacaaccctaaactcaacctggtctatatctacggcgaaagtctggaacgcacctggtttgataacgatgctttcccgaacctgacgccagagctcggcgcgctgaaaaaccagggcctcgacttcagccacaccatgcaactgcctggcacggattacaccatcgccgggatggtggcatcccagtgcggcattcccctgttcgccccgtttgaaggtaacgcctccgcctcgatgtcgagcttcttcccgcagaacatttgcctcggcgatatcctgaaaaactcgggctatgaaaactactttatgcagggcgctaacctgcgttttgccgggaaagatgtgttcctgagatcccacggtttcgatcacttatatggttccgaagagctgaaaaccacggtcgccgatccggcctaccgcaacgactggggcttttacgacgataccgttctggatgaaacctggaagaaattcgaggagctttcccgcgccggtaaacgcttctcgctgtttgcgttgaccgtcgacacgcatcatccggatggtttcgtctcacgcacctgtaaacgtcagggctacgacattgacggtaaaaacaacaagtcgttcagcgctgtgacctgtagccaggaacatatcgcggcgttaatcgagaaaatcaaagcgtcaccgtatttcaaaaatacggtcatcgtcgtttcatctgaccatctggcgatgaaaaacagcgcctgggatgagctgaataagctggatcgcagcaacctgttctttgtgctgcgcggcgataaaccgcagcaggagatcattgccgctaaacgtaactcgatggataacggcgctaccgtgctggatattctgggtggcgataacttcattggcctgggccgcagtacgttgtcgggccagtccctgtcggaaatcttcctcaacatgaaggaaaaaatcctcgcctggaagccggatatcattcgcctgtggaacttcccgaaagagataaacgacttcaccatcgatcaggataaaaaaatgatcgcgttctccggcagccatttccgcctgcctctgctgctgcgcgtgtcggataaccgcgtcgagccgctgccggaaagcgaatactccgcgccactgcgcttccagctggcggaattcgccccgcgcgataatttcgtctgggtcgataaatgctacaaaatgggccagctctggtcacaagagctgtcactgtccaccgactggtgcgtctcacaggggcaactcggcggcgagcagaccgtgcaacacgttgataaaccgcagtggcaggggaaaaccgcgtttaaagatacggtcattgataccgcacgctatcagcgcaacgttgacctgctgaaaatcgtcgacaacgacatccgttataaagctgacagctttatctttaacgttgccggcgcgcctgaagaggtgaagcagttcagcggtatttcacgtcccgaatcctgggggcgctggtctaacgcgcagttaggtgatgaggtgaaaattgagtatacccatccgctgccggagaaattcgatctggtgatcaccgccagggcatttggtcccaacgcaaaccgtcctgtgccggtgcgcgtcggcgataaagaacagatgctgacgctgagcaatgatgtcaccaccagcacgctgcatttcgataaccccacacgcagcaatacgctggtcattgtgccgcccgagccgcagtccactaacgaagggaatattctcggtcacgctccgcgcaagctggggatcggcatggtggagattaaaattgtgagcagcgctggctga

SEQ ID NO: 523850 - DNA, 483 bp, Stenotrophomonas maltophilia
atgaaaaaacaatttcttatcagcatccttactggcgccctgctggtgactggcgcagcgcaggccgcatcatggcaggagtcgctctccagcgcagcaagtgagttaaccaaagagagcggcacgtcccagggcgggctgtcagcctcgtccctcaccggcctgctgggcaacagctcccaaagcctgagtgccggaacgatgaacaacgccgcgggtattctggaatactgcgcgaagcagaaactggcttccgtcaccgataccgaaaacatcaaaaaccaggtgttgggtaaactgggactggacacccaggagcagaaagcggacaccaactatatggacggtatacagggcctgctgaacgcgcaaaatggtcagcagctgaacctcaacacccttggaaattcatctctggcgaaacaggtgaaaacgaaagcctgcgatctggtgctgaaacaaggcgttaatttcctctcctga

SEQ ID NO: 523851 - DNA, 738 bp, Stenotrophomonas maltophilia
atgaaaaacgtcggcgacctgatgaaacgtttgcagaagatgatgcctgccaacgtgaagcccgccttcaccaccggtgaagagctgctggcatggcaaaaagagcagggtaaaattcgcgcggcagccctcgcccgcgaaaaccgcgcgatgaaaatgcagcgcacctttaaccgctcgggcattcgccctctgcaccagaactgctccttcgagaattataaggtcgagtctcaggggcagatgaacgcccttaaccaggcgcgccagtacgtggatgaatttgacggcaacatcgccagcttcatctttagcggaaaacccggcaccgggaaaaatcacctcgccgccgctatctgcaacgagctgctgctgcgcgggaagtcagtgctgattatcaccgtggccgatattatgtccgccatgaaagacaccttcagtaatcgcgaaaccagcgaagaacagttgctgaatgatttaagtaacgtggatttgctggtcatcgacgagatcggtgtccagacggagtcccgctacgaaaaagtgatcatcaaccagattgtcgatcgccgttcgtcgtcaaaacgcccaaccggtatgttgacgaaccacaatatcgacgagatgacccgacttcttggcgagcgggtgatggatcgcatgaagctgggtaacagcctgtacgtcatcttcgactgggacagctaccgcagccgcgtcaccggcaaagagtattaa

SEQ ID NO: 523852 - DNA, 546 bp, Stenotrophomonas maltophilia
atgtcctccagaattctgaccaccagcattgctggcattgatgcctttatgcgcgatcctcgcggtgtgttgacgcacgccgaaggcggcacgctcgcggtatttgccgacaacgccccggcgttttatgcggtcacgccggaacgtctggcgcagcttctggaaattgaagcgaagctgtcgcgcccggcgagcgatgtcatgctggataatcagttttttgacgaacccgccagcgccccggtggccgttccaatggggaaatttcccatgtacgccggttggcagccggacgccgattttcagcggcaggcggccttatggggaatagccctctcgcagcccgcaacaccggaagagctggcagcctttaccgcatactggcaagctgaaggaaaagtcttccaccatgttcagtggcagcaaaaattcgcgcgcagtctgcaaatcaaccgcgccagcaacaacggccagccaaaacgtgatatcaatgctttttcagaaccggacaaaaaaatccctgatggattccgaggtgcgaaatga

SEQ ID NO: 523853 - DNA, 429 bp, Stenotrophomonas maltophilia
atgtctttagaaaaagttgtctacactgccaaagccaaagcaaccggaggccgtgatggccgcgccacgtcttccgatggcgttctggatgtcaaactgggtgtgccaaaagagatgggcggcatggggggtgaagtaaccaaccctgaacagctgttcgctgcgggctactccgcctgcttcctgggcgcaatgaagttcgttgcggcacgcgataaattcgctctaccaaaagacgcctttattgaaggcgaagtagggattggcccgctgccaaccggttttggtatcgaagcgaagctgaacatccacgttgaagggatggacgcagcggaagccaaaaaactggtggatgcggcgcacatcgtctgtccgtactctaacgcgacgcgcggcaatatcgacgtgacgctgaacatcatcgcgtaa

SEQ ID NO: 523854 - DNA, 453 bp, Stenotrophomonas maltophilia
atggacgcaaaaacgaacgacaccaccaacgcgcttctgctggataaccagctctgttttgccctctattcggcaaatctggcgcttaacaagctgtaccggcaactgctggcgccgcttaatctgacctacccgcaatacctggtgatgctggtgctgtgggaacaggatgatattacggtgtcagacattggcgagcggctgttcctggattccgccacgctgactcccctgctgaaacgcctggaaagcgcaggattgatcctccgccagcgttcccgtcaggatgagcgtcaggtcgccgtcaccctgagcgacgcgggtcgggcgctgcaacagcaggccgtgacgataccccacgccgtgggctgtgcagcgcagtgtgataccgacaccatgctggcgctcaagcaacagctcgaaagtttgcgccaacagctgcatcgcgcgtaa

SEQ ID NO: 523855 - DNA, 465 bp, Stenotrophomonas maltophilia
atggattttatgctcgcactggcacaggacatgctcttgtctgcccttcccgccgttggttttgcgatggtgtttaacgtcccacagcgtgcattaccctggtgtgcgctgctgggtgccattggccacggctctcgtatgatcatgatgacagcgggctttaatattgaatggtcgacgtttatcgcctccatgctggttggcagcatcggtattcagtggtcccgctggtatctggcgcacccgaaggtattcaccgtggcggcagtgattcctatgttcccgggcatttcagcctatacggcgatgatctccgccgtcaaaatcagccattttggctacagcgaaccccagatgatcctgctcctgagcaacttccttaaagcctcgtcgatcgtgggtgcgctctccatcggcctgtcgatccccggcttatggctttaccgcaaacgtccacgcgtataa

SEQ ID NO: 523856 - DNA, 777 bp, Stenotrophomonas maltophilia
atgcaggcagatcggtctacgcaacgtgccaccacgcggctatgtattcagtgcgggctttttctcttacagcacggcgcagaaagcgccctcgtcgaagagctctccacacgccttgggctggcgctggggatggacagcgttgagagttccatctcgtcaaatgccattgtgctgaccaccattaaagacggacagtgcctgacctccacccgtaaaaatcatgaccgcggcattaacatgcacgtcgtgacggaagtgcagcacatcgtgatccttgctgaacacaagctgctcgatctccgggagatagaaaaacgtttcaatcaaatcaaacccctccggtatccgcgctggctggttgtgctgatggtgggactgtcctgcgcctgcttctgcaagctcaacgcgggcggctgggacggcgctgtcgtgaccttctttgccagcagcatcgcaatgtatgtccgccagctgttgacgcacagacagctacatccgcaaattaacttctgcatcacggcatttgtggcgacaaccgtatccggcctgcttttgcgccagccctacttcgccagcacgcctactgttgcgatggccgccagcgtattgctgctggtgccgggttttcccttaattaatgccgtcgctgatatgttcaaaggccatatcaacaccggtctggcgcgctgggcgatagccagcctgctgacgctggcgacctgtatcggggtggttatggccatgacactctgggggttacgcggatgggcgtga

SEQ ID NO: 523857 - DNA, 519 bp, Stenotrophomonas maltophilia
atgttgccattgaatggtaaacacggagtggtgatcagcagagtaccggttatgcaaaatgggttaggtggcgtcatgtcgcgtcattttcccgattttgagataacgtactgccgttcgatgcaggagttgacgttattacaattgcgtcgcgctggggtcgttattgccgatatttcgggtgagtatcgtaatccacgcggcacgcttgagcaatattatgggttaatgaatcagtaccgggatattcactggatattcctcgtttcgcgccccctttatccacttgcagtagagcttcttatgcgtccggaaagcacgctgctttcggatatggaacccattgaaggcgtaattaacgctattcgcgcggggagtgaacgtgccgagcgaataagccagacgttattgataccggaaaatcctgatattgaagaggagagtgagcaaatgattgcgcttacccactctgaacgcaaagtgttgcgtttgttagggaaggtgcgaacaagttcctga

SEQ ID NO: 523858 - DNA, 540 bp, Stenotrophomonas maltophilia
atgccggacgatctgcacgccgaaatgcccgttatacgcgcggcctttgaacagcgcggcgttccgtgctggggcgcacacggtaatgaggctgatgatttagccgcaacgctggcggttaaagtggcgagcgccgggcatcaggcgactatcgtttcaaccgacaaaggctactgccagctgctctctccaacggtccgcatccgcgactacttccagaaacgctggctggacgcgccatttattgccagcgagtttggcgtatcgcctgagcaattgccggattactgggggctggcggggatcagcagctccagagtgccgggtatcgccggtattggacccaaaagtgccgcacagctgctgacggagtttcagaatatggaagggatttacgcaaggcttgaggaagtgccggaaaaatggcgcaagaagctggaggcgaataaagagatggcgtttatctgccgggaaatcgcaacgctacagacggatttacagctggacgggaatttacagcagttaaggttagaacgttaa

SEQ ID NO: 523859 - DNA, 1101 bp, Stenotrophomonas maltophilia
atgaataaggttgttttatattgtcgcccggggtttgagaaagagtgcgccgcggaaatcaccgataaagcggcgaagcgtgaagtcttcggattcgctcgcgtcaaagagaacgcgggctatgtggtatttgaatgctatcagcctgatgatgccgacaagctggcgcgcgaactgccgttcagctcgctgattttcgcccgtcagatgtttgtcgcgggcgaactgctgaaagatcttccgccggaagatcgcatcacgccgattgttggcctgttgcagggcgtggtggagaagggcggcgatttgcgcgtggaagtggctgacaccaatgaaagcaaagagctgatgaagttctgccgtaagtttaccgtgccgctccgcgcggcactgcgtgatgcgggagtgctgacaaactacgaaacgccaaagcgtccagtcgtgcatatcttctttattgcgccaggatgttgctacaccggctactcgtataccaccaataactcgccgttctttatggggatcccgcgtctgcgcttcccgtcagacgcgccgagccgttcaaccctgaagctggaagaggcgttccacgtctttatcccggcggacgagtgggacgaacgtctggcaaacggcatgtatgccgtcgatcttggcgcgtgcccgggcggctggacctatcagctggtgaaacgcaacatgtgggtttcgtctgtggataacggcccgatggcgcaaagcctgatggacaccgggcaggtcacctggctgcgtgaagatggtttccgctaccgtcctacccgtaacaacatctcctggatggtgtgcgacatggtagaaaaaccggcgaaagtcgcggcgctgatggcctcctggctggtgaacggctggtgtcgtgagacgattttcaacctcaagctgccgatgaaaaagcgttacgaagaggtgtcgcagaacctggcttatattcagcagcaactggacgaacacgggattaacgcggaaatccaggcgcgtcagctgtatcacgaccgtgaagaagtgacggtgcatatccgtcgctggtgggcggccgtgggtgggcgtcgcgacgagcgataa

SEQ ID NO: 523860 - DNA, 396 bp, Stenotrophomonas maltophilia
atgaccagccgattcatgctgattttcgccgcggtgagtggctttatttttgtagctctgggcgcgtttggcgcgcatgtcttaagcaagtctttgggcgttgtggagatgggctggatccagaccggccttgaatatcaggcgttccacacgctggcaatttttgggctggcggtggcgatgcagcgccgtatcagcatttggttttactggagcagcgtctttctggcgctgggtaccgtactgttcagcggcagtctctactgtctggcgctgtcgcatttacgcctgtgggcgtttgttacacctgtcggcggcgtcagcttcctggcgggttgggttttaatgtttatcggagctatccgtctgaaacgcaagggcgttgttcatgaataa

SEQ ID NO: 523861 - DNA, 918 bp, Stenotrophomonas maltophilia
atgtccaagcgattgccacccctaaatgcattacgtgtttttgatgcagcagcacgccacctcagcttcacccgcgcagccgatgagctttttgtgacacaggccgcagtaagtcatcaaatcaagtctctggaggattttctggggcttaagctgttccgtcgccgcaaccgttcgttgctgttgaccgaagaagggcagagctattttcaggatattaaagagattttctcccagctgacggaagccacccgtaagcttcaggcacggagcgcaaaaggcgccctgactgtgagtttattgcccagttttgccattcagtggctggtgccgcgactctcaagctttaactcaacttatccgggaatcgatgtccgaatccaggcggtggaccgtcaggaagacaagcttgcagacgatgtggatgtggcgattttttacggtcgtggtaactggccgggcttgcgtgttgaaaaattatacgcagaatatctgctgccggtctgttcaccactgctgctgacgggggagaaagcgctcaaaacgcccgccgatctggcgcaacacacgcttttgcacgatgcctcgcgtcgcgactggcaaacttatacccgccagttaggtcttaatcatataaacgtgcagcaggggcccatttttagccacagcgcgatggtgttacaggctgccattcacgggcagggcgtggcattagcgaataacgtcatggcgcagtccgaaattgaggcaggccgtctggtttgcccatttaacgatgtactggtcagcaagaatgcattttatctggtttgtcatgacagtcaggcagaactgggtaaaatagccgctttccggcagtggatactggcgaaagcggcaagcgagcaagaaaaattccgcttcaggtatgaacaataa

SEQ ID NO: 523862 - DNA, 228 bp, Stenotrophomonas maltophilia
atgaaaaagacagctgcaatcatttctgcctgtgcgttgacctttgccctgagcgcatgttctggtaataactacgtaatgcataccaacgatggtcgatctatcgtctctgaagggaaaccgacaaccgataatgataccgggatgatttcatacaaagatgctaacgggaacaaacagcagatcaatcgcagtgacgtgaaagagatgaaggaaatcgagcattaa

SEQ ID NO: 523863 - DNA, 1206 bp, Stenotrophomonas maltophilia
atgaacgctttcagtcctgcgcagtttcgcgcacagtttcctgcgctggccgatgccggcatttatcttgatagcgccgccacggcccttaagccgcaagcggtgattgaggcaacccgccagttttacagcctgagcgccgggaacgtgcatcgcagccagtatgccgacgcgcagcgcttaacggcgcaatacgaagccgcacgggatcaggtcgcgcgcctgatcaatgctgacagcggtaagaacatcgtctggacgcggggcactaccgaggccattaacatggtggcgcaatgttacgcgcgtccgctgttgcagcccggggatgagatcatcgtcagcgaggcggaacaccacgccaacctggtgccctggctgatggtggccaaacaaaccggggcacgggttgtaaaactcccgttgggtacagacttcctgcctgacgtggcgcgtctgcctgagctgattacgccgcgcagccgtattctggcgctggggcagatgtccaacgtcaccggcggctgtccggatctggcgcgcgccattgagattgcccatgccagcggcgtggtggtaatggtcgacggtgcgcagggtgtggtgcattttccggctaacgttcaggcgctggatatcgacttctatgccttctcagggcataaattgtacgggccaaccggtatcggcgcgctgtacggcaaacctgaactgctggcccggatgacgccgtggctcggcggcggcaagatgattaccgaagtcaccttcgacggtttcaaaacgcaggatgtgccttaccgcctggaagccggtacgccgaacgtggcaggggttatcggtctgagcgcagcgctcgaatttctcgcagatacggacgtggctcaggctgaaagctggagccggggcctggcgacgctggcagaagaagagcttaagaaacgccccgggtttcgctcgttccgcgtccaggactccagcctgctcgcctttgattttgcgggcgtacaccatagcgacatggtgacgctgcttgccggatacggcattgccctgcgcgcaggacagcactgcgcccagccgctgctggcggccatgggggtgagcggtaccctgcgcgcctcgtttgcaccgtacaacacaaaaagtgacgtcgacgcgctggtttccgccgtcgaccgcgccctggaattactggtggattaa

SEQ ID NO: 523864 - DNA, 447 bp, Stenotrophomonas maltophilia
atgacaagttcagccttagccgggcatccgttcggcaccgttatcactgaagagacgttaaaacagaccttcgtcccgctcacgcagtgggaagataaatatcgtcagttgatcctgctgggcaaacagttgcccacgctgtcagacgaactgaaatcgcaggcgaaggagatagctggctgcgagaaccgcgtctggcttgggtttagcatatccggtgagaaactgcatttcttcggcgacagcgagggacgcattgttcgcggtctgctggcggtgctgttgaccgcaatcgaagggaaaagcgccgcagagctgctggcgcattctccgctggcgctgtttgatgagctgggacttcgcacgcagcttagcgcctcgcgcggtcagggactgattgcgctaaacgacgcggtgctggatgccgcccgtcaggctcaggcctga

SEQ ID NO: 523865 - DNA, 807 bp, Stenotrophomonas maltophilia
atgtctgtggtaatcagcgatgcctggcgccagcgtttcggcggcacggcacggttatacggtgaaaaagccctgcaactgttcgcggatgcgcatgtctgcgtggtgggcattggtggcgtgggttcgtgggcggcagaagcgctggcgagaaccggcattggcgcaattacgttgattgatatggatgacgtctgcgtcactaacactaaccgtcagatccacgccctgcgtgataacgtcggtctggcgaagtccgaggtgatggcggagcgtattcgtctcatcaacccggagtgccgcgtaacggtgattgacgactttgtgacggcagataacgtcgcggagtacatgagcaaaggctacagctatgtgattgacgccatcgacagcgtgcggccaaaagcggcgctgatcgcttactgtcgtcgttacaaggtgccgctggtgacaacgggcggcgcgggtgggcaaattgatccgacgcagatccaggtggcagatctggcgaaaaccattcaggatccactggccgctaagctgcgcgagcgcttaaaaagcgacttcaatgtggtgaagaacagcaaaggcaagctgggtgtggactgtgtgttctcgacagaagcgctggtttatccgcaggcggatggttcggtctgtgcaatgaaaagcacagcggaagggccaaagcggatggattgtgcctcagggtttggagcggccaccatggtgaccgcctccttcggctttgtggcggtctctcacgccctgaagaagatgatggcgaaggcggaacgtcaggcctga

SEQ ID NO: 523866 - DNA, 1098 bp, Stenotrophomonas maltophilia
atgaaaggacgttgggtgaagtatctgatgacaggcgcaatggtagcgattcttgcggcctgctcttccaaaccgaccgatcgcggtcaacagtataaagacgggaagttatcccagcctttctctttagttaaccagccagatgccgtgggtgctccaatcaatgccggggatttctccgagcaggtataccagatccgcaaagcgtcgccgcgcctgtatggctcacagaacaacgtttatagtgcagtgcaggactggctgcgtgctggcggtgatacgcgcaatatgcgccagtttggtatcgatgcgtggcagatggaaggggcagataactacggtaacgttcagtttaccggctactacaccccggttgtccaggcacgacacacgcgtcagggcgaattccagtatccgatttaccgcatgccgccaaaacgcggtcgtctcccgtcccgcgctgaaatctatgccggtgcgcttagcgaaaattacgtgctggcctacagcaactcgctgatggataacttcatcatggacgtgcagggcagcggctatattgattttggcgacggctcgccgctgaacttctttagctatgccgggaaaaacggccatgcctatcgcagcatcggtaaggtgctcatcgaccgtggtgaagtgaaacgagaagatatgtcgatgcaggcgatccgcgagtggggcgaaaaacacagcgaagcggaagtgcgtgagctgcttgagcagaatccatcgtttgtcttcttcaaaccgcagaactttgcgccggtgaaaggggcgagcgccgtcccgctgattggccgcgcttctgtggcatcggatcgttcgattatcccggcgggtaccacgctgctggcggaagttcctctcctcgacaacaacggcaaattcaacggcaagtatgaattacgcctgatggtggcgctggacgtgggcggggcgattaaaggccagcacttcgacatttatcagggcatcggcccggatgccggccaccgtgcaggctggtataaccactacgggcgcgtgtgggtgctgaagacagcgccgggtaccgggaacgtatttagcggctga

SEQ ID NO: 523867 - DNA, 1254 bp, Stenotrophomonas maltophilia
atgtcgggatccaattcagcaataagccgccgccgcctgttaaaaggggccggggcgatgtggttgcttagcgtcagccaggtgggtcttgccgccacaagccaggtagtcgcggtgcgcgtctggccgtcgtcgacctatacgcgcgtgacggtcgagtccaaccgcgtgctgaaatacaaacaatttgccctcagcaatcctgaacgtgtggtggttgatctcgaaggtgtgaatctcaactccgtgcttaaaggcatggcggcgcagatccgtggcgacgatccttttatcaaatcggcgcgcgtcgggcagttcgatccgcaaaccgtgcgcatggtgtttgagctcaagcagaacgtgaaaccgcagctctttgcccttgcgcctgttgccgcctttaaggagcgcctggtaatggatctctatccggcgaatgcaacggatattcaggatccgctcctggcgttacttgaagattacaacaaaggcgatctccagcggcaggtcccacctgcgcaaagtggtcctaagccgggcagggcggggcgcgatcgtccgattgtgatcatgctcgatcctggccacggcggagaagattccggcgccgttgggaaatatcacacccgcgaaaaagatgtggtgctgcaaattgcccgtcgtctgaaggcgttaatcgacaaagagggcaatatgcgcgcctacatgacgcgcaacgaagatgtctttatcccgctgaaggtccgcgtggcgaaagcgcagaagcagcgcgcggatctgtttgtctctattcatgcggacgccttcaccagccgccagccgagcggatcgtcggtgtttgccctgtcaacgaaaggggcgaccagtaccgccgcgagatacctggcggacacgcagaacgcctcggatttaatcggtggcgtgagtaaaagcggggatcgttacgtcgaccatacgctgtttgatatggtgcagtcgctgaccattaccgacagtctgaagtttggtaaagcggtgctgggcaaactgggccgggtcaacaagctgcacaaaaacagcgtcgagcaggccggatttgcggtactgaaagcgccagatattccgtccattctggtcgaaaccgcgtttatcagtaacgtgcaagaggaacgcaagctcaagacggctaaattccagcaggaagtggcggagtcgattctggcgggtattcgggcctatttctcagacggggaaacgctggcgcggcggggatag

SEQ ID NO: 523868 - DNA, 1332 bp, Stenotrophomonas maltophilia
atggttaaggaacgcagaaccgaactggtccagggattccgccattctgttccctatatcaacacccatcgggggaaaacctttgtcatcatgcttggcggcgaagccattgagcatgagaacttttccagtatcgtcaatgatatcggcctgctgcacagcctcggcatccgtctggtggtggtgtatggcgcacgtccgcaaatcgaagccaacctggccgcccatcaccatgagccgatctaccacaaacatacccgcgtgacggatgcgaaaaccctcgaactggtcaaacaggcggcgggtctgttgcagctcgatatcaccgcccgcctgtcgatgagcctgagtaatacgccgctgcagggcgcgcacatcaacgtggtgagcggcaactttatcatcgctcaaccgctcggcgtggacgatggcgtggattactgccacagcggccgcatccggcgcattgatgaagaagccattcaccgccagttagacaatggcgcgatcgtcctgatgggacccgttgccgtttccgtaacgggtgaaagttttaatctgacctcggaagagattgccacccagctggccatcaagctgaaagcggaaaaaatgatcggcttttgctcctcacagggtgtcgtgaacgatgagggcgtgattgtgccagaactttttccgaatgaagcccaggcgcgcgtcgaagcgctggaagcacaaggcgattactattccggtaccgtgcgttttctgcgcggcgccgtcaaagcgtgccgcagcggggtacgccgcagccacctgattagctatcaggaagacggcgcgctgttgcaggaactgttctcccgggacgggatcggtacgcagatcgtaatggagagcgccgagcagatccgccgtgccaccatcaatgacatcggcggcattctggagctgatccgtccgctggaacaacatggcattctggttcgccgctcccgcgagcagctggagatggagatcgacaagttcaccatcatccagcgagataacctgaccattgcctgtgcggcgctttatccgttcccggaagagcagattggcgaaatggcgtgcgttgccgtgcacccggattaccgtagctcctcgcggggggaactgctgcttgaacgcgtggcggcacaggcgcgccagatgggtctgagcaagctgttcgtgctcaccacgcgcagcattcactggttccaggagcgcggcttcacgccggtggatattgattctctgccggaaagtaagaaagagatgtacaactaccagcgccgctcgaaggtgttaatggcggacctgggataa

SEQ ID NO: 523869 - DNA, 1821 bp, Stenotrophomonas maltophilia
atgacgatgcaggacttattgctggaatcggtagagcaacgcgtgctgcgtcagctggatgtgcagtttgccatgatgattgccgctgaccagcccgccgtgatgcttgccgctgccctattgagtaaagacgccggagaggggcatgtgtgtctgccgctctcgcgtctggttgttgacgagaaaatgccgcctgtcctccagtcctgctttgcgctgctgggtgagagggtggactggcagaaaattttgcgcgaatcgtcggccatcgggccgggagaaaaccaggcgccgctgatcctgacgggggagcgcttatatctgaaccgtctgtggcgaaacgaactgacggtagcgcgtttctttagtgagaccaacgcgccgcttccctgcgacgaagcgcagcttcgccagacactggacaggctgtttgactccggtgagcctacagactggcagaaagtggcggcggccgtcgccctgacgcggcggatttcggtgatttcaggtggcccggggaccgggaaaaccacgaccgtcgcaaagctgctggcagccctgatccagctatcaggcgagcagcgatgtcgtattcgtctggcggcgcccaccgggaaagcagcggcgcgactgaccgaatcactgggcggtgcgatgcaacagctgccgctcactcaggagcagcttgcgcttttcccgggtgaagcgagtaccctgcaccgtctgctcggcgcgcagccgggtagccagcggctgcgctaccatgcgggtaatccgctgcatctggacgtgctggtggtggatgaagcctccatgattgacctgaccatgatgtcgcgcctgatcgatgctctgccgccgcatgcgcgcgtggttttcctgggcgatcgcgaccagctcgcctccgtggaagccggggcggtactgggggatatctgtacctacgccagctacggttataccgccgcgcgggcgcaggagcttgcccgcctgaccggctgctcgcttgaacccgatcactcgccggtcgcaggcgcactgcgtgacagcctgtgcctgctgcaaaaaagctaccgtttcggtagcgactccggcatcggccagctggctgcggcggtcaaccgtggcgatcggcatgccacgcgcacggtgtttgacggctctttcactgacattgaaaagaaatcgctgcaaagcggggaagagtatcaggctatgcttgaggaggctctccagggataccagcgttttctgagctgcgtgcagcagcgcagtcagcccgggcaggtcattgccgcatttggcgaataccagcttctgtgcgcattgcgggaagggccgttcggcgttgcgggcctgaacgacaggctggagcagctgcttgtgcagaaacgcaaaattaaccgtcagcagcattcgcgatggtatgaaggccggccagtgatgatctcccgcaacgacagtacgctggggctgttcaacggggatatcggtattgcgctcgatcgcggtaacggtttgcgcgtctggttccagctaccggacggcagcgtgaagtccgtccagcccagccgtctgccagagcatgaaacggcatgggcgatgacggtacacaagtctcagggctcagagttcaaccatgcggcgctgatcctgccgacacagctttcgccggtcgtaacccgtgagttggtctacaccgccgttacccgtgcgcgccagcgtctgtcgctgtatgcggatgaacgcgtgctgggacaggcgattgccactcgcaccgagcgcagaagcggattaagcgcgatttttgaatctgtctga

SEQ ID NO: 523870 - DNA, 3561 bp, Stenotrophomonas maltophilia
  misc_feature (2557)..(2566): n is a, c, g, or t
atgacctataccgctgagccgcttgatcccctaagtttacctctacagggtgagcgactgattgaagcctcagcgggaacgggaaaaacctataccatcgccgcgctctatctgcgtctgctgttggggctcggcggcaacgccgctttttcgcgcccgttaagcgtggaagagctgctggtggtaaccttcaccgaagcggccactgccgagctgcgtggccgtattcgcagcaacattcatgagctgcgcatcgcctgtctgcgtcagacgacggataaccccctctatgcgagcctgctggacgagattgcggataagcaacaggctgcgcaatggctgctgctggccgaacggcaaatggatgaagcgtccgtcttcaccattcacggtttttgtcagcgcatgctgagcctgaatgcgtttgaatccggcatgctctttgagcagcagcttattgaagatgaatccgagcttcgctatcaggcctgtgcggatttctggcgtcgtcactgttatccgttgcagcgcgacattgctgaagcggttcacgccctgtggaaaggtccggaagagcttcttcgcgccatcgaccgttacctgcaaggcgaagcgccggtcattaaatctcctccgcctgccgatgaaacgctggcctcgcgccatgaaaagatcgtcgccaaaattaccgcgcttaagcagaagtggaatgagtcggttggtgaaattgatgcaatcatcgaaaactcaggcatcgacagacgcaagttcaaccgtgggaaccaggggaagtggatcgaaaagatcagcgcctgggcccaggaggagacgcggggttaccagcttccggacgcactggaaaaattttcgcagcgctttttgaccgagcgaaccaaagccgacggtattgtgcctgagcatcccctgtttgtggcgattgaagcgctgcttgcggagccattaacgctcaatgacctgatgatcacccgcgccatgacggagatccgccaggccgtcgcgcgcgaaaaacgtcgccggggcgagctggggtttgatgacatgctgagccgcctggacgaagccctgtccagcgagaatggtgaagcgctcgccagcgcgatccgtacccgttttccggtggcgatgattgacgaatttcaggacaccgacccccagcagtaccgcatttttcgccgcatctggcgacagcagcccgacactgccctgctgctgataggcgaccctaaacaggccatttacgccttccgtggggcagatatcttcacctatatgaaagcccgtagtgaggtggtcgcgcattacacgttagataccaactggcgctccgctccggggatggttgagagcgtcaatgcgctgttcagccgtatggagacggcattcatgttcaatgaaatccctttcctgccggtgaaatccgccccaaacaacgcgacgctgcgctttgaagtcagcggtgcggtgcaacccgccatgaccttctggctgcttgagggggaaggctatggcgttgccgattatcaggcggcgatggcccagcactgcgccgcgcaaatccgtgactggctaagcgcaggcgcgcgcggcgaggcactgctgtggaagggggaacaggcatatcctgtaaaggcctctgatattaccgtgctggtgcgcagtcgtcaggaagcggcgttaatccgtgatgcgctaacgttgctggatattccgtcagtgtatctctctaaccgcgacagcgtgttcgacacgctggaagcccaggaaatgctctggttgcttcaggcggtgctggcgccggagcgcgaaaatacgcttcgaagcgcgctggccagttctatgctggggttgaacgcacgggatattgatgaactcaaccatgacgaaaacgcatgggatgcggtggtagaagagtttgtccattaccgtgaacgctggcaaaagcgcggcgtcatggcgatgctgcgcgagctgatgacacggcgtcagattgccgaaaatatgctggcgacatccggcggtgaaaggcgtctgaccgatattttacacatcagcgaactgttacaggaagcgggtacccagcttgaaagtgaacatgcccttgtgcgttggctggcgcagcaaatcgcggatccaaacagtaactcttcaagccagcagatgcgtcttgagagcgataagcatctggtgcaaatcgtcaccattcacaaatccaaaggtctcgaatatccgctggtctggctgcctttcatcgcgaactaccgggttcaggatcaggccttttaccatgaccgcgagactttcgatgcggtgctcgatctcagcaaggcggagaccagcgttgaactggcagaagcggagcgtctggcggaggatttgcgcctgctttacgtggcgctgacccgttctgtctggcattgcagcctgggcgtcgccccggttttccgccgtcgcggggagaaaacaggggaaagcgatttccatttaagcgcgttagggcggcttattcagcgtggcgagccgaaagatgcggcggggnnnnnnnnnncggcggggttgcgcctctgcattgagtcgctctgcggtgacgatatcgcgctgcatatcccgtctctgccagacaatagccgctggcaaatggcgcaagagcccgcgaccgatcttaatgcgcgccagatcacgcgggtgcttgccgacgactggcgcgtcaccagctattctggcctgcaacagcatgggcgaagtattgcgctggatctcatgccgaagctggacgtggatgccgcaggggtgggtgatattccggttgaaccgacgttaactccgcatcagttcccacgcggcgcgtcgccgggcacctttttgcacagcctctttgaagagcttgattttactcagcctgtcagtgaggagtgggtgctgaagatgttacagagcgggggctatgacgcgcactggcagcccgttctcactgactggatcaacgccattttgcaggcgccgctgactgagcagggcttcgctcttcgtcagctaacggccagaaataaacaggttgagatggagttttatctgcctgtcgcaggcccgcttaaggccgacgcgctcgatgcgcttatccgtcagtacgatccgctctcagccggttgcccgccgctgaacttccgtcaggtgcagggcatgctgaaaggctttatcgacctggtcttccgtcacgaaggacggtactacctgctggattacaaatcgaactggctgggcgagaacagcgaagcctatacccagcaggcgatggcggcagccatgcaaatgcatcgctacgatctgcaatatcagctctacacgctagcgctgcaccgctatttgcgccaccgtattgcggattaccgctacgacgatcattttggtggcgtcatctacctcttcttgcgcggggtcgacgctgccgatccgcgctccgggatcttcagcacccgtccggatgcggaattgattaataaaatggataacctgtttgcagcaaacacggaggagatggcatga

SEQ ID NO: 523871 - DNA, 2868 bp, Stenotrophomonas maltophilia
  misc_feature (1750)..(1759): n is a, c, g, or t
atgccaggcagcaccttgttcaaagcgtttgttttgtttatcgccctttgggctcccgtcactcaggccgattccggttggcaacctgtccaggaaacaatccgtaagagcgataaggacacccgtcagtatcaggcgattcgtcttgataacgggatgaccgtgctgctggtttccgatcctcaggcggttaaatcgctctccgcactggttgtgccggtcggatcgctggaagatcctgatgaccatccgggactggcgcactaccttgagcacatgacgctgatggggtctaaaaaatacccacagcctgacagcctgtccgaatttctgaaaatgcatggcggcagccacaacgccagcactgcgccgtatcgtaccgcgttttacctggaagtggaaaatgatgcgcttgacggggcggtggaccgtctggcggatgccatcgccgcaccgctgctggataaaaaatatgctgaccgggaacgcaacgccgtaaacgccgaactgacgatggcgcgcacgcgagacggtatgcgcatggcgcaggttagcgctgaaaccatcaatccggcgcatccgggttcgcgcttctcaggcggcaaccttgaaacgctgagcgacaagccgggtagcccggtgctcgatgcgctgcatgcgtttcgtgaaaaatactattccgccaatctgatgaaagcggttatctacagcaataaaccgttgccgacgctggcaaacatggctgcgcagacctatggcagggtgccaaataaaaatatcgatctgccgcagattaacgtgccggttgtcacggacgcgcaaaaaggcattgttattcactatgtgccggccttgccgcgcaaggtgttacgcgttgaattccgtattgataacaacacggcgcagttccgcagcaaaaccgacgagctggtgacttatcttatcggtaaccgcagcccgggtacgctctccgactggctgcaaaagcaggggctggtggaaggtattcgcgctgactccgatcccgtcgtaaacgggaatagcggcgtgctggccatctccgcgacgctgaccgataaagggctggctcaccgtgacgacgtcgttgcggccattttcagttatctctctctgctgcgcgacaaaggcgtcgataaacgctacttcgacgagctggcgcacgtgctggatctcgatttccgctatccctctattacgcgtgatatggactacgtcgagtggctggcagataccatgatccgcgtgccggtggaacatacgctggatgcggtaaatattgccgatcagtatgacgccggggcgctcaaagcgcgtctggcgatgatgactccgcagaatgcccgcgtctggtatatcagcccgaacgaaccgcataacaaaatggcctacttcgttgatgccccgtatcaggttgaaaaaatcagcgaacagaccttcgcgggctggcagaaaaaggcgggggaaattgcgctgaagttaccggagcttaacccctacatcccggacgatttctcgctgatcaaacctgcaaaggcctatccgcatccggagctgattgttgatgagccgacgctgcgcgtggtctacaccccaagccgctatttcggcgacgagccaaaagcggatgtcagcgtagtgctgcgtaatcctaaagcaatggacagcgccagaaaccaggtgctgtttgcgcttaacgattatctggccggtattgccctcgatcagctcnnnnnnnnnntcagtttctccaccaatgccaataacggtctgatggtgaatgccaacggctatacccagcgtttgccgcagctgttccaggcgctgctggacggttatttcagctatacgcctacggaagaacagctcgagcaggctaagtcctggtatgcccagatgatggattctgccgagaagggtaaagcctacgatcaggcgattatgccagcacagatgttgtcccaaattccttatttccagcgcgaagatcgccgcgcgttattgccctcagtcaccttaaaagaggtgctggcttaccgtgattcgctgaaaaccaatacccgtccggagttcctggttgtagggaacatgagcgaagatcaggctaaaaagctggcacaaaacgtgcgtgcgcaactgggttcaaaaggcgatgagtggtgccgtaaccaggatgtgctggtagagaaaaagcagaatgcgatcttcgaaaaagcgggaagcagcacggattccgcgctggccgcggtgtttgtccctgtcggatatgacgaatttaccagctctgcccagagtgcggtgctcggtcaaattattcagccgtggttttacaaccagctgcgcaccgaagagcagctgggttatgcggtattcgctttctcgatgaatgtgggccgtcagtgggggttgggcttccttctgcaaagcagcgacaagcaacccgcttacctgtggcaacgttatcaggcattcttcccgcaggcggaagcaaaactgcgcgccatgaagccggaagagtttgcccagatccagcaggcggttatcgcccaggtgatgcaaccgccgcagacgctgggtgaagaggcctcgcagctgagcaaagattttgatcgcggtaatatgaaatttgattcgcgtgataaaatagtggccgaaataaaacagctgacgccacaaaaagttgccgatttcttccatcaggcggtagtaaaaccgcagggtatggccatcctgtctcaggtttctggcagccagaacgggaaaacggactacgtaaaatcaaaagagtggaccgtctggaagagcgtcagcgcgctgcaacaaactatgccctggagtaagaaagaatga

SEQ ID NO: 523872 - DNA, 3375 bp, Stenotrophomonas maltophilia
atgctaagggtttaccactcaaatcgtctggatgtgctggaagcactgatggagtatatcgttgagcaagagcgtcttgacgatccgtttgagccagaaatggtgctggtgcagagcaccggtatggcgcagtggctacaaatgtccctttcgcagaagtttggcattgcggcgaatatcgattttccgctgcccgcgagctttatctgggagatgtttgtacgcgtcctgccggatattcctgagcagagtgccttcaacaaacaaagcatggcctggaaactgatgacgctgctgccggacatgctggcgcatgatgagttcgccatgctgcgccactatctgaatgacgacaccgacaagcgcaaactttttcagctggcctcacgcactgctgacctctatgaccagtatctggtttaccgcgcagaatggctgattcgctgggaagcgggagaattagtcgatgggttaccggaagcgcaaatctggcaggcgccgctctggaaagcgctggtcgagcataccgggcagctcggtcagcctaaatggcaccgtgctaacttgtacgatcgctttatctcaatactcgagaacgctgcagaacggccagcccgtttgccgtcacgcgtgttcatttgcggtatctccgcgttgccgcctgtctacctgaacgcgctaaaagcgctcggtaagcacattgatatccatatcctctttaccaacccatgtcggcactattggggagatattcaggatccgcgctggctttcacggctggtcacccgccagcgtaaacgcctatttgaggaacgcgccgtgccgctgtttaaagacagtgaaaacgcggcgcagcttttcgatgaagaggggattcagaacctgccgaacccgctacttgcctcgtggggcaagctggggcgcgactatatttatctgctttcagatatcacctcctcgggagagggggacgtggacgcgtttgcggatattacgccggacagcctgctgcacaatattcagcttgatattctggatttagaaaaccgtgccttggccgggatcactgccgaggagtttgcgcgaagcgataagaagcgaaaactggatcctgacgatcgcagtatcgcgatccacgtttgccacagcccacagcgtgaagttgaaattcttcatgaccgcctgttggctatgttgcagggcgacccaaccctgacaccccgcgatatcgtggtgatggtggcggatatcgacagctacagcccgtttattcaggctgtatttggcagcgcaacgggcgaccgctatcttccctacgcgatctctgaccgccgtgctcgtcagtcacacccggcgctacaggcctttatcagcctgctttcgctgcctgatagccggtttatctctgaggatgtgctggcattactggatgtgcctgttctggccgcacgcttcagcattaacgaagagggcttgcgctacctgcgccagtgggtcaacgaatccggcgtccgctggggaatcgacgatgataacgtccaggagtttgagctgcccgcgactggccagcatacctggcagtttggcctgacgcgtatgctgctggggtatgcgatggagagcatccacggcgaatggaatgacgtgctgccgtacgatgagtccagtgggttaattgcggaactggttggtcacttagcctcgctgctgatgcagctcaaccgctggcgccgtgcattgatgcagccccgtccactcgaagagtggctgccgatttgccgcgaaatgctaaatgacttcttcctgccggacagcgaaacggaagccgccatggcgcttatcgagaagcagtggcaggccatcgttgatgagggggttaattcgcactatcacgaggcggttcccctttcgcttctgcgtgatgagctgacgcaacgtctcgatcaggagcgcatcagccagcgcttccttgctgggccggtgaatatctgcaccctgatgccgatgcgttcaatcccgttcaaagtagtctgtctgcttggcatgaacgacggtatttatccacgtgcgctgccacccctgggctttgatctcatgagcgcacagccgaagcggggcgaccgcagccgccgcgatgatgaccgttatctcttccttgaggcgctgatgtctgcgcaaagcaggctttatatcagctatatcggccgttcaattcaggacaacagcgagcgtttcccgtccgtgctgctgcaggagctggtggactacatcgggcagagtcactatctgccgggcgatgaggcctgtaactgcgacgagagcgaacgtcgggtgaaagcgcatattacctgtcaccatagccgtatgccgtttgatcctgttaattacgttcctgatgaactgcaaagctacgcccgcgagtggcttcccgctgcgaagaacgcgggcacaccgcaaaccgatttcattcaggcgctcgaaccgcgcgccatagacacccttacgtttgagcagctgcagcgcttttgggcccatccggttcgggcttttttccagcaacgcttgcaggtgaacttccgctcggaagagagcgaaatccctgatgcggaaccgtttattcttgatggactggagcgttttaagcttaattcccagcttttgaatgcgctggttgacgaagaagacgccagtaaactgttccgacgttacagggcgtcgggattactgccgtatggtgcgttcggcgaaatcgtctgggatgcccagtgtgaggagatgcaagcgcttgctgaccgggttatcgcgtgtcggcaaccggcgagcagcattgaaattgatctcgattgtaacggtatgcacctcagcggctggctcacgcacgtgcagtctgacgggctgctacgctggcgcccatctatgctcagcgtttcacatggcctgcaactctggctcgaacatcttgtctacagtgcgagtggtcacgaaggcgaaagccggttgtttgtacgtaaggacggcgagtggcgcttcccgccgatggagcctgagcaggcgttgacgtatctgtcgctttatattgaaggttatcgtcagggcatgaacaagcctctgcttttgctgcctgaaagtgggggggcatggataaaagcctgttacgacgcgcagaatgatgccatgttaacggatgaggcttcgctccagaaagcgcgcagcaagtttttgcaggcctacgaagggaacatgatggtacgtggcgagggcgacgatgtctggtatcaacgtttatggcgaacgctggagccagaatatttcgacattatcacggaagaggcgcaacgctacctgttaccgttgttcaaatttaagcagtcctga

SEQ ID NO: 523873 - DNA, 324 bp, Stenotrophomonas maltophilia
atgtcagttaccctgagcagacaaaaaggatttagcatggttgaggttttgctggcaatgatgttgctggttgtagttgtgacggcgttatccggatatcatcgcgcgctggcagcccggtatgcggcgcttagccagtatcgccagctatggcatcatgcgtggaatcagtcgcagatctcaacattaacgctcccgccgggctggcaggtcagtcgggggcagacaacacagtccggatgtgtcagcatcacggtcacacttatttctcctctggggcggcagggcgcgttgacgcgtctgcattgcccggttagccgctag

SEQ ID NO: 523874 - DNA, 381 bp, Stenotrophomonas maltophilia
atgtcatcgctggcgctggtcttgctattgctggtgctcggcacgctgatcctcaccgggttaaaccagcagttgcaaacctttagtacgttggtgaatggcgagagtttgtctgttcgccagcaggctgccttgcaatctgcactggagtggggacgcgttcaggactgggctttacagccagaggttcagtgcaagcagacacaaggtctgcgggtctgtgtaaggctgtttgaggagcgtgttttgcttattgccggaaatgacgatctgttgctatggcgaggcggggatatcgcggaaggacaaatacgcttttctgcccacggctggagcgacttctgcccccttaaggaaagtgcgctatgtcagttaccctga

SEQ ID NO: 523875 - DNA, 561 bp, Stenotrophomonas maltophilia
atgccagtaaaacaaaaagggttctcccttctggaggtcctgattgcgatgacgataagcagtattctgttactcagcacgtcacgttttttaccggggctacagcggggtgttttactgcaatccgggcaacgggagctggaagatgaggtgtggcaacgcctgcttgcgatgggtaaacagctccagcgagcaggatactgtgcagggcattgtcaggggcaagggttaattatcggcaggcaagggcgatgtgcaattgtgcaatgggatgcaaacagcaacggccagtgggctagcaccgcgtcagaaaatgacagcacgggattccggcttgagtccggaacgctcgaaacgctgcggggcgcgacatcctgtgaaggtaagggatgggataagctcactgacccgaatcgggtcctgatagagcagtttatggtcactaaaaccgatcgtgctggctttgcgccggtcatcagtatcgagctgcgtgcccgccgcaaaggtgaactgactgcacccttttcggctcgccacaccgtaacggggtttaatctgtga

SEQ ID NO: 523876 - DNA, 465 bp, Stenotrophomonas maltophilia
atgaaaaacgaacatggctttacgcttatcgaaacccttttcgccatctcgctggttgtgatcctcagcgcgacgggtctttatggctgggacagctggcaacagcggcagcggctctggcagatagcctgtcaggtgcgggattacctggcgttcttgcgaaacgacgcaaatcgtcacaacagcgagcacaggatcgcgctgcataaagacggtgaaagggactgtctggtgagttcagcggctgcaggttgtgacagcggcagcccgtacgtgatgaagccgatgtggcccggggtcacaataagcgacataacaccggggctgggattttacggcttaagggataccgcatgggccggacatattcgcgtgcagagccgcgccggtgcgtggtgggttattgtctcaaatggcggacgtatcaggctgtgtaatgccgcaggagaaagtctatgccagtaa

SEQ ID NO: 523877 - DNA, 795 bp, Stenotrophomonas maltophilia
atgaaacagtatcttgaattgatgaaaaaagtgctcgacgagggcacgccgaaaaacgaccgcaccggcaccggtacgctctccatttttggccaccagatgcgcttcaatctgcaagaaggcttccctctggtgacgacgaagcgctgccatctgcgctcgatcattcatgaactgctctggttcctgcaaggcgataccaacgttgcttatctgcatgaaaacaatgtctccatctgggacgagtgggcagatgagaacggcgacctggggccggtttacggcaagcaatggcgcgcgtggcctaccccggacggccgccatatcgaccagatcacgaccgtcatgaaccagctgaaaaatgacccggactcgcgccgtatcattgtttctgcctggaacgtgggtgaactggataaaatggcgctggcgccttgccacgcgtttttccagttctacgtggcggacggcaaactctcctgccagctgtatcaacgctcctgcgacgtgttcctcggcctgccgtttaacatcgccagctacgcgctgttagtgcacatgatggcgcagcagtgcgatcttgaagtgggcgattttgtctggacgggcggtgatacccacctctacagcaatcatatggaacagacgcatctccagctgacgcgcgaaccgcgtgcattgccgaagcttgtgatcaaacgcaaaccggactcgatcttcgattaccgttttgatgacttcgagattgaaggctacgacccgcatcctggcatcaaagcccctgtcgccatctga

SEQ ID NO: 523878 - DNA, 876 bp, Stenotrophomonas maltophilia
atgaacagtggttatctgcattttccggaattcgatccggttattttctcaataggacctgtagcgcttcattggtacggactgatgtacctggtgggcttcgtctttgccatgtggcttgctggtcgtcgcgccagtcgtccgggcagcggctggacgaagaacgaagtggaaaacctgctttatgctggctttcttggcgtattcctgggcgggcgcatcggctatgttctgttctacaacttcccggtattcctgaacgacccgctctatctgttccgcgtctgggacggcggcatgtccttccacggcggactgattggtgtgatcctcgtgatggtgatcttcgccaaacgcaccaaacgtaacttcttccaggtggctgattttattgcgccattaatcccgtttgggctgggtgcagggcgtctgggcaacttcatcaacggtgaactctgggggcgtgtcgatccgagcgtgccgtttaccatgctgttcccgggctcccgcgcagaggatatcgcgctgctgccttcgcatcctgagtggcagtccattttcgatacctacggcgttctgccgcgtcatatgtctcagctttatgagctggcgctggaaggtgtggtgctgtttatcatcctgaatctgtatatccgcaaaccgcgcccaatgggggcagtatctggtctgttcctgattggctacggcgcgtttcgtatcatcgtcgagttcttccgccagccggatgcacagtttaccggcgagtgggtacagtacatcagcatggggcagatcctctccattccgatgattgtcgcgggtgccattatgatgatttgggcgtatcgtcgtcgtccacagcaacaactttcctga

SEQ ID NO: 523879 - DNA, 2247 bp, Stenotrophomonas maltophilia
atgctcacccgcttgcgagaaatagttgaaaaggtcgccagtgcgcctcgcctcaacgaggcgctgaatattctggtgacggacatctgtcttgcgatggaaaccgaggtctgttcggtctacctggccgaccatgaccgacgttgctactaccttatggcaacccgcggtttaaaaaaaccacggggacgtaccgtcacgctcgcgtttgatgaaggtattgttggcctggtcgggcgactggcggagccaatcaaccttgccgatgcgcaaaaacaccccagcttcaaatatatcccttccgtcaaagaagagcgtttccgcgcgtttcttggcgtaccgattattcagcgccgccagctgcttggcgtgcttgttgttcagcagcgcgagctgcgccagtacgatgaaagcgaggagtccttcctcgtcacgctggcaacgcagatggcggcgatcctctctcagtcccaactgacagccctttttggtcagtatcgtcatacgcgtattcgcgcgcttccggcctcgccgggggtcgctattgccgaaggctggatggatgccacgctcccgctgatggagcaggtctacgaagcctctacgctggatgaggcgcttgagcgcgaacggctcaccgctgcgctggaagaggcggcgaatgagtttcgtcgctacagcaaacgctttgccgctggcgcgcaaaaagagacggcggccattttcgatctctactcacacctgctttccgatgcgcgtttgcgtcgtgagttatttgccgaggtcgataaggggtcggtggcagagtgggcggttaaaaaggtcattgaaaaatttgccgagcagtttgcggtactgactgacggctatctgaaagagcgcgccggcgatttacgcgcgcttgggcaacgtctgctgttccacctcgatgatactattcagggggcgaatgcctggccgaaccggtttgtgctggtggccgatgaactctcggcgacgacgctggcggaattaccgcaggacaggctggcgggcgtggtggtgcgcgatggcgcagctaactctcatgccgccattatggtgcgtgcgctcggtattccgaccgtgatgggggcggatattcagccctccgtactgcatcgccgcacgctggtggtggacggatatcgcggtgagttgctggtggatcctgagccggttctccttcaggagtaccagcgtcttatcagcgaagagaatgaattaagcaagctggcggaagatgacgtcaacctgcccgcgcagctcaagagcggtgagcgggtgaaggtgatgctcaacgcggggttaagccccgagcatgaagagaagctcggcagccgcatcgatggcattggtctctaccgcaccgaaataccgttcatgctgcaaagcggcttcccgtcagaagaggagcaggttgcgcagtatcagggcatgttgcagatgtttaacgacaaacccgtcacgttgcgcaccctcgacgtcggcgcggataagcaactgccctatatgcccatcagtgaagagaatccctgcctcggctggcgtgggatccgcattaccctcgatcagccggaaattttccttatccaggttcgtgcgatgctgcgtgccaacgcggccacggggaatctcagcattttgctgccgatggtcaccagtattgacgagatcgacgaagcgcggcggttgattgaacgtgcagggcgcgaagtggaagagatgatcggctacgcgatccctaaaccccgtattggcgtgatgctggaagtgccttcgatggtctttatgttaccgcagctggcgacccgcgttgattttatctccgttggcaccaacgacttaacgcaatacattctggcggtcgatcgcaacaatacgcgcgtggccagtatctacgacagcctgcatccggcgatgcttcgtgccctggcgatgatcgcccgcgaagccgagcagcataatatcgacctgcgcctgtgcggtgaaatggccggcgatccgatgtgcgtggcgatcctgattggcctcggtttccgtcacctgtcaatgaacggacgttccgttgcgcgtgtgaaatacctgttacgtcacatcgaacaagatgaggcgcatgagctggccgcgcgaagcctggaggcacagctggcagccgaagtgcgccatcaggtggcggcgtttatggagcgacgcggcatgggcggtttgatccgcggcggccgctga

SEQ ID NO: 523880 - DNA, 465 bp, Stenotrophomonas maltophilia
atgtgggcccggcgatatggtcagcactcctggcagttcccgcaaggcgggatcaatcctggagagtccccagaacaagcgatgtaccgggagctgtttgaagaggttggtttaagccgaaaagatgttcgcatcctggcttcgacccgcaactggttgcgttacaagttaccgaaacgtttggtgcgttgggacacaaagccggtttgtatcggccagaaacagaagtggtttcttttgcagttggtgggcaacgattcagatatcaatatgcaaaccagcagcacgccagagtttgatggctggcgctgggtaagctactggtatccggttcgtcaggtcgtgtcattcaagcgcgatgtataccgtagggtgatgaaagagttcgcaagtgtcgtgatgcagcttcaggagacgactccgaagccacagagcgcacctgcctggcgacgtaaaagaggttaa

SEQ ID NO: 523881 - DNA, 693 bp, Stenotrophomonas maltophilia
atgcattctctcgccccactgctctctcctcccgtcagtgaagcccagttgctccagcaggcacaccgtctggcaggctatgcactgggcgagctggccgtgatggcggggttgacgatacccaacgatctgaagcgcgataaaggctggatcggcgtgttgcttgaacgttggctgggcgcaagcgcgggcagtaaacccgagcaagattttgcggcgctgggggtggaactgaagacgatccccattgatagcctggggcggccactggaaactacctttgtctgcgttgcgccgctaacgggtaatagcggagtgacatgggaaaccagccacgtcaggcataagctgaagcgggtgttgtgggtacccgttgagggtgacaggcagatcccgctggcagagcgtcgcgttggcgccccgctgctctggagcccggatgaagaagaagagagacagctttcccaggactgggaagagctgatggacatgattgtgctgggacaggttgagcagatcaccgcccggcatggcgaagtgctgcaactccgtcccaaagccgccaacagcaaagcgctcactgaagcggtaggtgcacagggcgaaccgatcctgacgctgccgcgcggcttctatcttaaaaagaatttcaccggtgcactgctggcacgacacttcctgttgaaaacatag

SEQ ID NO: 523882 - DNA, 219 bp, Stenotrophomonas maltophilia
atgaaaaaatgggcagtaattatctcagcagtcggtttagcgtttgcggtatcgggttgtagcagcgactatgtcatgtcaacgaaagatggtcgtatgatcctgaccgatggcaaacccgaagtcgacgacgataccggtctggtgagttaccgcgatcgcgaaggcaatcaaatgcaaattaatcgcgacgaagtctcccagatcatcgagcgttaa

SEQ ID NO: 523883 - DNA, 1041 bp, Stenotrophomonas maltophilia
atgcattatcaccgtatcccccatagcgctctggagatcagccagctggggttaggcaccatgacatttggtgaacaaaacagcgaagccgatgcccatgcacaactcgattacgccgtcagccagggcattaacctgattgacgtggcggagatgtacccagttcctccccgcccggaaactcaaggtcttaccgaaacgtatgtcggcaactggctggcgaaacgcggcaatcgcgaaaagctggtcatcgcttctaaggttagcggcccttcccgtaataacgatgccgggatccgccctaaccagatcctcgatcgcaagaatatccgtgctgcgctggatgccagcctcaagcgcctgcaaaccgactatctcgatctttatcaggtgcactggccgcagcgtccgacgaactgcttcggtaagcttggctacacctggaacgagagtgctccggccgtcaccctgctggaaacactggaggcgcttacggaatgccagcgcgcgggtaagatccgctacatcggcgtttccaacgagacggcgtttggcgtaatgcgctatctgcatctggccgataaacacgacctgccgcggatcgtgaccatccagaatccgtacagcctgctgaaccgcagttatgaagtgggtctcgcggaagtgacgcagtacgaagaggtggagctgctcgcctactcttgcctgggcttcggaaccctgacgggcaaatacctgaacggcgcgaaaccggctggcgcgcgtaacacgcttttcagccgcttcacccgctatagcggcgagcagacacaaaaagccgtggcggcctatgtggatatcgcgaagcgtcacggactcgattcggcgcagatggcgctggccttcgtgcgtcgtcagccgtttgtggcaagtaccctgctcggcgcaacgacaatggatcagttaaaaaccaatattgagagtttccacctgaacctgagtgaagaggtcttagcggagattgaagcggtgcatcaggtttatacttacccggcaccttaa

SEQ ID NO: 523884 - DNA, 1194 bp, Stenotrophomonas maltophilia
atgcgtgagtcagtacacactaacacttcaatctggtcgaaaggcatgatggcggttatcgccgcccagtttctttccgcgttcggcgataacgcgttgctgtttgctacgctggcgttgctgaaagctgagttttatcccgactggagccagccgatcctacagatggtgtttgtgggtgcttacattgtatttgcgccgtttgtcggccaggtggcagacagcttcccgaaaggtcgtgtcatgatgtttgccaacagccttaagcttctgggcgcggcaagcatctgctttggtatcaacccgtttgtcggctacacgctggtgggcattggcgcggcagcttactccccggcgaagtacggcattctgggtgagctcaccaccggcgataagctggtgaaggccaacggcctgatggagtcctccaccattgcggctattctcctgggttcggtggcgggaggtgtactggcagactggcatgtactcgccgcgcttggcatctgtgccctgatgtacggtggcgcggtgatcgccaacctgtttatccccaaactggccgtggcgcgtccgggacaatcctggcgcttcgggccaatgaccggcagcttcttcaacgcctgccgcgtactgtggcgtaacggtgaaacacgcttctcgctgatgggcaccagcatgttctggggggccggcgttacgctgcgtttcctgctggtgctgtgggtgccggtggcgctgggtataacagacaacgccacgccgacctacctgaatgccatggtcgccgtcgggattgtggtcggggccggggctgcggccaaactggtaacgcttgaaaccgttgcgcgctgcatgcctgcagggatcctgatcggcgtcggcgttctgttcttctccctgcaacatgccatattgccagcctatgccctgttgttactgatcggcgtattaggcggtttctttgtggtgccgctcaacgcgcttttgcaggagcgcggcaagcagaccgtcggggctggcaacgccattgcggtgcaaaaccttggcgaaaacatggcgatgctgctgatgctggggatttactcgctggcggtaaaagcaggtgcgccggttgtggcaatcggggtggggtttggcgcactgtttgcgctggcgattaccgggctgtgggtctggcagcgtcggcggtga

SEQ ID NO: 523885 - DNA, 2160 bp, Stenotrophomonas maltophilia
atgctttttgggttcttccgcacactgtttcgtgtcctgtttcgcattcgcgtgactggcgatacgcaggcactctatggcgagcgtgttcttatcacaccgaatcacgtctcttttcttgatggcgtattgctggcgctttttttgcccgtgcggcccgtctttgcggtgtacagctccatcagtgaaaaatggtacatgcgctggctcaggccgctgattgattttgtcccgctcgaccctaccaaaccgatgatgattaaacatctggtgcgtctgattgggcaggggcgtccggtggttatcttcccggaagggcggatttcagtgacgggctccctgatgaaaatttacgacggcgccggttttgtcgcggcgaagtctcaggccaccgtcgtgccgctacgcatcgacggggctgagctgacctttttcagccgtctgaaagggctggtgaagcagcgtctgttcccgaaaattacgctgcatatattaccgccgacgtcactgccgatgcccgaggcgccgcgcgcgcgcgaccgccgtaaaatcgccggggaaatgctgcaccagattatgatggaagcgcgcatggccgttcgcccgcgcgaaacgctgtatgaatcgttgctgtcggcgcagtatcgctacggtgcgaagaaaaactgcatcgaagacatcaactttacgccggatacctaccgtaagctgttgaccaaaacgctgtttgtcgggcgtatcctggaaaagtacagcaaacagggcgaaaagatcggcctgatgctgccaaacgcgggtatcagcgcggcggtgatctttggtgccgtctcccggggccgcattccggcgatgatgaactacacggcgggcgtgaaagggctctccagcgcgattaccgcagcacaaatcaacaccatctttacctcccgccagttcctggacaaaggcaagctgtggcacctgccggaacagctgacgcaggtgcgctgggtgttcctggaagatctgaaagcagacgtcacgaccgccgacaagctgtggattttcgcgcacctgctgatgccgcgtctggcgcaggttaagcagcagccggaggatgatgccattatcctctttacctccggctctgaaggcaacccgaaaggtgtggttcatagccacaaaagcattctggcaaacgtcgaacagattaaaaccatcgctgattttaccgccaacgatcgctttatgtcggcgctgccgctgttccactcatttggtttgaccgtgggtctctttacgccgctgctgaccggtgccgaggtgttcctctacccaagcccgctgcactaccgcattgtgccggagctggtttatgaccgtaactgcacggtgctgttcgggacgtccaccttcctcggaaactacgcgcgcttcgccaacccgtatgatttcttccgcgtgcgctacgtggtggcgggggcggaaaaactccaggacagtacgcgccagatctggcaggacaagtttggcctgcggattctggaaggctatggcgtgacggagtgcgcgccggtggtctccatcaacgttccgatggcggcaaaaccgggaacggttggccgtattctgccggggctggacgcgcgtctgctggcggtgccgggtattgaagacggcggacgtcttcagctgaaagggccgaacgtcatgaacggctatctgcgtgtggaaaacccgggcgtgcttgaggcgcagacggccgagaacgtcaatggcgaggttgaaacgggctggtacgacacgggcgatatcgtgcgcttcgacaatcagggcttcgtgcagatccagggacgtgcaaaacgcttcgccaagatcgccggggaaatggtctctcttgaaatggtcgagacgctggcgaccgcagtctcggcggagaaaatgcatgcgaccgtggtgaaaagtgatgccagtaaaggcgaggcgctggtgctctttactactgacggtgaactgaagcgtgatgcgcttctcaggtatgcgcgcgaacatggtatccccgagctggcggtcccccgcgatattcgttacctcaaacagttaccggtgctgggcagcggtaaacccgattttgtgaccctgaagggcatggttgaagaggcggaacagcataatgcgtga

SEQ ID NO: 523886 - DNA, 1023 bp, Stenotrophomonas maltophilia
atggcgacaattaaggatgtggctcgtctggccggtgtttccgtcgcgaccgtctcccgcgtgatcaacaactcccctaaagcgagtgatgcatcacgccaggccgtgcaggacgccatggaaaacctgaattatcaccctaacgccaacgcacgcgcccttgcccaacagtcgacagaaaccatcgggcttgtggtcggggatgtatccgatccgtttttcggtgcgatggtcaaagccgtagaacaagtttcttatcacaccggtaatttcctgctgattggtaatggctaccacaatgaacagaaagaacgccaggccattgagcagttgatccgtcatcgctgtgcggcgctggtggtccatgccaaaatgatccccgacgccgagctgatccatctgatgaaacagatgccggggatggtgattatcaaccgtattattcccggatttgaaacccgctgtgtggcgctcgacgaccgttacggcgcatggctcgcaacccgtcacctgatccagcagggccattcccgaattggttatctgtgctccaaccacccaatttccgatgcggaagatcgccttcagggctattacgacgcgctgcgcgaagccggtttgccgtgcaacgatcgtcttgtggcgtacggagaaccggatgagagtggcggcgagcaggcgatgaccgagctgctgggccgcgggcggaatttcaccgccgtagccagctataacgactccatggccgccggcgcgatgggcgtgctgaatgataacgggattgacgtcccggcagaaatttcgctgattggctttgatgatgtgctggtgtcgcgctacgtgcgccctcgcctgaccaccgtgcgctacccgattgtgaccatggcaacgcaggcggcagaactggcgttagcgctggccgagcatcgcccgccaccggaaattacccacctgttcagcccaaccttagtgcgccgtcactcggtggtatcgcccgcggaagccgtgagtgaacagcgatag

SEQ ID NO: 523887 - DNA, 477 bp, Stenotrophomonas maltophilia
gtgaatatactgccgcttcacgctgcgccgcagtttacacagcaggtgatcgactggatctggaacgcgtttggtgaaggtatgccgcgtgcctttttccagagcattgtcgagcacagcctgacgccaggcgagttaccgctcacctttattgccgttgaggatgaccagctgctgggcaccgttgggttgtggcgttgcgatttaatttcccggcaggatcttcatccctggctggctgcgctgtatgtcgatgaagccgcgcggggaaacgggctggcgggaaaacttcagcagcatgttatcggctacgcgcgacgcgccgggtatcacgagcttcatctctggtctgcctgccgcgacttctacgaacgttacggctggcactacatcggtgatgcgctggaatacccggataaaaccgtccatctctatcgctgttcactcacggcttccgcgggcgataccaccgagtga

SEQ ID NO: 523888 - DNA, 774 bp, Stenotrophomonas maltophilia
gtggataaggctgtcatcctgccggaaaaaaaacagtaccaggaaattggcgaggatttacgggcgcagattatccaggggcattatcccgtgggatcgcgtctgccgccggagcgcaacatcgccgagacgtatggcgtcagccgcactatcgtgcgcgaggcgctgctgatgcttgagcttcaggggacggtggatattcgccaggggtctggcgtgtacgtgatgcgcattccggaagagcatgaaaacgaggaagagcgttttctgaacagtgacgttgggccgtttgaaattctccaggcgcgtcaactgcttgaaagcaacatcgctgcctttgccgcaaaaatggcgacacgggcggacatcgacaacctgcgccgcattatcgagcaagagcaacgggcgattgccgtcgacgatcgcagccaggacaacaacaaaatgttccacctggtgctggctggggccacacaaaaccagatgctgctggcgacggttgagagcgtctggcatcacatggacagcagtccgctgtggcagcagttcaatggccatatcgccagccgcgcctggcgcctgaagtggctcggagacaggcaaaccattctcgctgcgctccgccgccgcgacgtgatgggggcgtggcaggcgatgttccagcaccttgaaaacgtcaaaaagagcctgctcgagctgtcagacgaagacgcgcccgattttgacggctatctcttcgaatcggtccctcttttccaggggaagctggtgtga

SEQ ID NO: 523889 - DNA, 1428 bp, Stenotrophomonas maltophilia
atgagcacaaaacagatagccataccgcaagattttattctgggcgcggcggcatcggcctggcagaccgagggctggagcggcaaaaagccggggcaggattcgtggatcgatctctggtacatgaacgatcgtcacgtctggcataacggctatggtccggcggtggcaaccgactttatcaatcgcttccgcgaagatgtagcgctgatgaagcaggcgggactgacgcactatcgcacttcgatcaactggtcgcgctttttaaccgactatgaaaatgcgacggtagatgaagagtacgccgcgtattacgacgcgctgttcgatgaaatgcaccgtcagggcattgagccgatgatctgcctggaacactacgaattgccgggcgtgctgctggagacctacggcggctgggcgtcaaagcacgtcgtcgagctgttcgttcgctatgcggaaaaggtatttgagcgctttcacggcaaagtcacccgctggtttaccttcaacgaaccgattgtggtccagacgcgcgtctaccttgacgcgctgcgctggccctatgagcagagcaccagcacctggatgcagtggaaccaccataaggtgctggcgacggcgaaagtggtgaagctgtttcgcgagaaagggtatgacggcacggtgggctgtattcttaacccggaagtgacctatccgcgctcccgcgcgccgcatgacgtgcgagcggcagagatgtacgatctgttctacaaccgcgtctttctcgacccgctggtgcacgggcgctatccgcaggcgctctttaccctgctggcgcagcatcaggtgcagtgggactacacggctgacgagctggcgctgattgccgacaacaccgtcgatgagctgggcattaacctctattacccgcatcgcgtcaaagccccgtcccgcgcctggcacccggagacgccgttccatccggcgtactactacgagccgtttgagctgcccggacggcgaatgaacacctcccgcggctgggagatctttccgcgcattatttacgacatggcgatgcggattaaaaacgactatcgcaacattgactggtttgtggcggaaagcgggatgggcgtggagaacgaagcgcagtatcgcaatcgtgacggcgtcattgacgacacgtaccgcatcgcgtttatcagcgaacatctctactacacgctgctggcgcgggaggcgggggcgaactgtcacggttatatgctgtgggccttcaccgacaatgtctccccgatgaacgcgtttaaaaaccgctacgggctgattgagatcgaccttgaaaatcaacgcgcacggcgggcaaagaaatcagcgtcctggttccgccagctgcgcgatgagcgtgtgctgacgctcagggtagacgatgaatggaagtaa

SEQ ID NO: 523890 - DNA, 1326 bp, Stenotrophomonas maltophilia
atggcatttcaggaaaaactgatcgacgctctgggcagttttgccactaccttcaacagctatcgctatatccaggcgatcaagtctgcgtttattaccttaatgccagtcatcatagtgggggcgttctcggtattgatctccaatatggtgctggatccgaaaaacggtctggcgagctttcagtcgctgtcgtttctcgcggccttaaagccgatcaccagcgcgctcaactatgccacgctgaactttcttaacatcggcgcggtgtttttaatcggcattgagctggggcgtattaacggcattaagtccctgttccccggcctgctggcggtgatctgctttatctgcgtgacgccgaccacggtggaaatgctggtggacggtgagatgcacgtggtgaaagatgtgctgctgcgccagttctcagatacccgcagcctgttcctcggtatgtttatcgccatcctgtcggtggagatctactgctggctggaaaaccgcaaggggctgaaaatcaggatgccggacacggtgccgccgaacgttgccgcgtcgttctctgcgctgatcccggccattatcaccaccaccgccatcgccacctttggcttcgtgtttcatcaggttaccggcatgtatctctacgacgcggtataccaggtggtgcaacagccgctggagcgcgtggtgcaaagcctgccggggatccttctgctgatgtttgtcgcccagctgttctgggtgattggtattcacggcaaccagatgatcaagccgatccgcgagccgctgctgctgggggcaatcaccgttaacatgagcgcgttcgagcagggcaaagaggtgccaaacatcatcaccatgccgttctgggacgtctatatgagcatcggcggctccggcctgaccatcggcctgctgatagccgtcatgattgccaccaaacgtaaagagatgaaggagatagccaagctctccatcgggccgggtatttttaatatcaatgagccggtgatcttcggtatgccaatcatgctcaacccgatcctggctatccccttcatcatcacgccgctggtgacgggctcgattggctactttgccaccgtgaccggatttgccgggaaagccgtggtgatggtgccctggaccacgccgccgctgatcaacgcctggctgtcaacggcgggctccatgggggcggtgatcacccagtttatctgcatcgtgaccgcggtgattatctatctgccgtttgtgaaaattgcttcacgccgcgcagagcaggccgcactgcaacaagccaccgataacgcatga

SEQ ID NO: 523891 - DNA, 1038 bp, Stenotrophomonas maltophilia
atggcaacaatgctggatgtctcactgcgtgcgggcgtgtcgaaggccaccgtttcgcgcgtgctgaacggcacaggtcaggttaaagagagcacgcgccagcaggtatttcgcgcgatggaggagctgggctatcgtccgaactttctcgcgcgctcgctggctaaccagaccagcaacagcatcggtctggtcgtctcgacgttcgacggtttttactttggtcgtttgctacagcaggcgtcacggcagaccgaaacgcacggtaaacagctgattgttaccgacggtcacgatgcccctgaacaggaagaactggcggtgcagatgctcgccgaccgcaagtgcgacgccatcgtgctttacacgcgatacatgagcgaaaagacgatcctgaagctgatcaacagcgtgcagacgccgctggtgatcattaaccgcgaagtgagccaggcggcggatcgctgcgtcttctttgaacagcaggacgcagccttcaaagcggtggattacctgataagccagggccatcgggagatcgcctgtatcaccgtcccgatccacaccccaacgggtaaagcgcggctgatgggctaccgtaaggcgctggagaagcacggtattcgtctcgatgagcggcggattaaatacggcgatgcaggcatgatgcggggttacgagctgtgcaaggagctgattgcggaaaagacatcgttcagcgccctgtttgcctgtaacgatgacatggccctgggcgcctccaaagcattacaccaggccgggctgaagatcccgcaggatatttcgctgtttggttttgacgatgcccccagcgcaaagtggctggagcctgccctgtcgtcggtgtatttgccgatcgacaacatgatcgtgacggcgatcgaccaggcgatccggctggcaaaaaaccagccggttgaagcgatcccaccgttcaccggcacgctggtgttacgcgattcggtgacaacagggccctggtttaatcagaccagctctaacgccagcagctcctga

SEQ ID NO: 523892 - DNA, 1263 bp, Stenotrophomonas maltophilia
atgccacgcccgctcaaccagaccgaaaccgatttaaacgccgataacctgctgcgcctgcctgccgaattcggctgtccggtgtgggtctacgatgcgcagattgttcgcgagaaaatcgccgcgctgcatcagtttgacgtggtgcgttttgcgcagaaggcctgctccaatattcatattctgcgcatgatgcgcgagcagggcgtgaaggttgactccgtatcgctgggtgaaatcgaacgtgcgctggcggccgggtttgatccaaaggccgatagcgacgcgatcgtcttcaccgctgacctgatagacgacgccacgctggcgcgcgtgcacgagctgcaaaccccggtgaatgccggttcggtggatatgctggaacagcttgggcaggtttccccgggccatcgcgtctggctgcgcatcaacccgggctttggtcacggtcacagtcagaaaaccaacaccgggggcgaaaacagcaagcacgggatttggtatgccgatatgcctgcggcgctggaggttttacaacgttacaaccttaagctggtgggtattcacatgcatatcggatccggcgtggattatggccatcttgagcaggtctgtggcgcgatggtgcgtcaggttatcgattttggtcaggatctggaggcgatctccgccgggggagggctttcgatcccttaccgcgaaggggaagaggcgatcgacacggatcactattacggcctgtggagcgccgcgcgtgacagcatcgccgctcatctgggccatgcggtgaagctggagattgagccgggtcgtttcctggtcgccgaagctggcgtgctggtggcgcaggtgcggagcgtgaaggagatgggaagccgtcactttgtgctgattgatgctggcttcaacgacctgatgcgcccgtccatgtacggcagctatcatcacatcaccgcgcttgccgccgatggccgcgatctggtcaacgccccgcgcatcgagaccgttgttgccggcccgctgtgtgaatccggtgacgtctttactcagcaggaaggcgggaaagtcgaaacccgttcgctgccagaggtaaaaccgggagattatctggtgctgcatgataccggtgcgtacggggcgtctatgtcttcgaactacaatagccgtccgctgctgccggaagtgctgtttgataacggcgtggcgcggctgattcgccgtcgccagaccattcaggagctgctggcgttagagctggtctga

SEQ ID NO: 523893 - DNA, 927 bp, Stenotrophomonas maltophilia
atgcccgccgttaacctacgccatatcgagatttttcatgcggtgatgaccaccggcaatctcactgaagccgcgcagatgctgcacacctcgcagccgacggtcagccgcgagctggcgcgttttgagaaagtgctggggctgaagctgtttgaacgcacccgcggcaggttgcatccaacggtgcagggtttacgtctttttgaggaggttcagcgctcctggtacgggctggacaggatcgtgagcgcggcggagagcctgagggagtttcgccagggcgagctgtccatcgtctgcctgccggtcttttctcagtcattcctgccggtactgctacagccgtttctggcccgctatccggaggtcagcctgaccatcgtgccgcaggagtcgccgctgctggaggagtggctttcggcccagcgccacgatctgggtctgaccgaaaccctcgtcacgccagcgggaacggaacgcacggagctgctctcgctggatgaggtctgcgtgctgcctgccagccacccgcttgctttcaaagcagttctgaccccggcagattttcacggtgagaactatatcagcctgtcgcagaccgacagctaccggcagcttctggatggcctgtttgccgaacatcaggtgaagcggcggatggtgatggaaacgcacagtgcggcatcaatttgcgcgatggtgcgcgcgggcgtgggtatttcggtggtgaacccgctcacggctatggactacgccagcagcggcgtggttctgcgccgttttagcgtttccgttccctttaccgtaagcctgatccgcccgctgcaccggcccgcctcagcgctggttgatgcctttagtgaacacctgattgcgcacgcgcgtcaggtggcgcttcgcttacctgacctgcaaaaacctttatga

SEQ ID NO: 523894 - DNA, 693 bp, Stenotrophomonas maltophilia
atgaaaacgatcggtctgttagggggcatgagctgggaatcaacgatcccgtactaccgcctgattaatgaaggcgtcaaacagcgtctgggcggtctgcattcggccagcctgctgctgcacagcgtggatttccatgaaatagaagcctgccagtcgagcggggagtgggacaaagccgggcaaatgctggcagacgccgcacttggcctggagcgtgcgggcgcgcagggtattctgctgtgtaccaacaccatgcataaggtggcgtcgcatattgaagaccgctgttcgctgccgttcttacatatcgcggatgccaccgggcgtgccatacgtgccgccggcatgacgcgcgtggcgctgctggggacgcgctacaccatggagcaggatttttaccgcgggcggctgagtagccagttcgggattgaaagcctgatcccggaggaggcagaccgggcgcgcattaaccagattatttttgatgaactgtgcctcggcaccttcagcgaagcttcgcgcgcctggtacgtcagcgtgattgagaaactggcgcagcagggggcggaaggagtcatcttcggctgtaccgaaattggcctgctggtgccggcagaccaaagcccgataccggtctttgataccgccgccatccatgccgcggatgcggtggagtttatgctgtcataa

SEQ ID NO: 523895 - DNA, 324 bp, Stenotrophomonas maltophilia
atgtttattttccataaagagaccacgcttgaggatttgggcaacggcgtgacgcgtcgtattctggcgcacgatggcaggatgatggcggtggaagtgaatttcgagcaaggtgcgattggcccgctgcataaccacccgcatgagcagctcacctacgttctctcgggggaatttgagttcaccattggcgaggaaaagcatgtggtgacggcgggcgacactctctataaaaagccgcacgtgatgcacggctgcgtttgcctcaaacccggcaccttgctggatacctttacgccggtacgcgaggatttcctgaaataa

SEQ ID NO: 523896 - DNA, 1137 bp, Stenotrophomonas maltophilia
atgtcagcaatggatttcaaacaacatacggatctcaactttcctcactatgctcccccggcggtcagcgctaaagaaatagatctcctgggtctgctggacgtcctgctggcagcaaaaaaacgcatcattaccattgtgtttgcatttgcactggtcggcctggcaatcgccttcctgataccgcaaaaatggaccagtaaagcggtcattacgccagcggaacagacgcagtggagttcgctgcgccagatgatggtgacgctgcaggtgcttgatgtggacgttaaagttacccgtgcggatgtatttaatctgtttatcaaaaagtttcagtctcagtccctgcttgaagagtacatgaagagctctccttacgtgatggctcagctcgatggcgccgaggttgacccgctggagctgcaccgcgcggtggtcaatatcgccgaaaagatgaaggctattgataacacccaggaaaaaaatgctgataaagcaccgtatctctcctggacgttaagcttcactgccccaacggcagaggacgcgcagaaagtgttgaatggttacattcagtacatttcccgcatcgtcgagcaggagaccatgcaaaacatccgcgatcagctgatcctgagaaccaaaacggttcagcagcagctggagctggatcgggttcgactgaccaatatccacaataccaacctgcaacgccttaactactcgctggaagtggcgaacgcggcagggatcaaaaagccggtttacagtaacggacaggcggtgaaagacgatccggattactccgtcgcgctcggcgcggacgggattgcgcagaaattgcagattgaaaaaaatctgaaggatgtttctgagctgaacgccgatttccagaaccgcgaatactatctggcgcagctgcaaaaactctccttcgaagacgtgagcctggagccgttcaaataccagctctctccttctatgccggtgaaaaaagatggcccgggcaaagcactgatcgtgctgctggcgggtattctgggtgggctgttcgcctgtggcagcgtgctgctgcgcgaagcaatgcgctcccgcaacccgctgccggaacaacttcctgagccggttacggaataa

SEQ ID NO: 523897 - DNA, 585 bp, Stenotrophomonas maltophilia
atgaatgaaaacaagctgctggggctcgcatggatatcaccctacatcatcgggttgatactctttacggcattccccttcgtctcatcatttttcctcagctttacggattacgatttgatgagtccgccggtgtttaacggcatcgaaaactatcgctacatgtttaccgaagacacgctcttctggaaatcaatgggcgtgacctttgcatacgtatttttaaccattccgttaaagctcgccttcgcattagggattgcctttgtcctgaactttaaattacgcggcatcggatttttccgtactgcctactatattccgtcgatcctcggcagttccgtcgccattgccgtattgtggcgcgccttatttgcgatcgatggcctgctgaacagctttatcggcgtatttggttttgacccggtgaactggctgggtgaaccgtcactggcactaatgtccgttaccctgctgcgcgtctggcagttcggttccgcgatggtcatcttcctggccgcgctgcaaaacgtaccgcagtcccagtatgaagcggcgatgatcgatggcgcatcgaaatggtag

SEQ ID NO: 523898 - DNA, 306 bp, Stenotrophomonas maltophilia
atgttcatgaaggtgaccgtgccgctgattacgccggtgatcttcttcaacttcatcatgcagaccacgcaggcgttccaggaatttaccgggccgtacgtgatcaccggcggcgggccgacctattcgacctacctgttctcgctctacatctacgacaccgcgtttaagtatttcgatatgggttatggcgcggcgctggcgtggatcctgttcctggtggtggccgtcttcgccggtatcgcctttaagtcgtcgaaatactgggtgttctactccgccgataaaggaggcaaaaatggctga

SEQ ID NO: 523899 - DNA, 903 bp, Stenotrophomonas maltophilia
atggctgatattcaacaactctccacggcaagaagcatcgccgaacgcgaagtagcccgcacgctgcgcagagagaaaatcaatgccaccgttcgctatgcgatcctgctgtttgtcggcctgctgatgctttacccgctggtgtggatgttctccgcgtcgttcaaaccgaaccacgagatcttcaccaccctgagcctgtggcctgcccatgccacctgggacggcttcatcaacggctggaaaaccggcaccgagtacaacttcggccactacatgctgaacacctttaagtatgtgatcccgaaagtgatcctgaccattatctcctccaccatcgtggcgtatggctttgcccgcttcgagatcccgtggaagaagttctggttcgccacgctcattaccaccatgctgctacccagcaccgtgctgctgatcccgcagtacctgatgttccgtgaaatgggcatgctgaacagctatatgccgctgtacctgccgctggccttcgccacccaggggttcttcgtcttcatgctgatccagttcctgcgcggcgtcccgcgtgacatggaagaggcggcgcagattgacggctgtaactcccttcaggtgctgtggtacgtggttgtgccgatccttaaaccggccattatctccgtcgccctgttccagttcatgtggtccatgaacgactttatcgggccgctgatttatgtctacagcgtggataaatacccgattgcactggcgctgaaaatgtccatcgacgtcaccgaaggggcgccgtggaacgaaattctggcaatggcgagcatctccattctgccatccatcattgtcttcttcctggcacagcgctacttcgtacagggcgtcaccagcagcggaattaaaggttaa

SEQ ID NO: 523900 - DNA, 1128 bp, Stenotrophomonas maltophilia
atggctgaagttattttcaacaagctggaaaaggtctactccaacggttttaaagcggtacacgctatcgatcttaaaatcgccgaaggggaattcatggtgatcgtcggcccatccggctgcgccaaatccactactctgcgcatgctggcgggactggaaaccatcagcggcggcgaggtgcgtatcggcgacaagatcgtgaacaacctcgcgccgaaagagcgcgggattgcgatggtgttccagaactacgccctctatccacacatgacggtgcgcgagaatctggcctttggcctcaagttgagcaagctgccgaaagatcagattgagtcccaggtgaatgaagccgctaaaattcttgagcttgaagagctgcttgaccgcctgccgcgccagctttccggcggccaggcgcagcgcgtggcggtaggccgtgcgattgtgaaaaagccggatgtgttcctgttcgatgagccgctttcaaacctcgacgccaaactgcgcgcctcaatgcgtatccgtatttccgacctgcacaagcagctgaagaaatccggaaaaccggccaccaccgtttacgtgacccacgaccagaccgaagcgatgaccatgggcgaccgcatctgcgtgatgaagctcggccatatcatgcaggtggatacgccggacaatctctaccacaagccgaagaacatgttcgtagcgggctttatcggcgcgccggagatgaatatacgcaaaagcgtgctggtcgaaaaagcgggacagctgcacatcgccattggtgatgaaagcatgccgctgaacgcggagaagcaggagaaagtcgccgcttacgcgggtcaggagatcttcttcggcgtgcgtccggaatttgtgtcgctctctgatgagcccttcccgaacggcggctgtagtggggagatggtgcgcgttgagaacatgggccacgaattctttgtgtacctgaaggtcgcggactacgaactgaccgccagaatcccgtccgatgaagctaaaccaatgattgataagggacttcatcgtaaggtgtatttcacgtttgatatgaataagtgtcatatttttgacgcaaaaactgaacagaacctctctctctga

SEQ ID NO: 523901 - DNA, 1161 bp, Stenotrophomonas maltophilia
atgaaaaaagtgcttttaagcgcagctatctccgcgaccctgggccttaccgctttgccatcgatggcgcagaatgtggatttacggatgtcctggtggggcggcaacggccgtcaccaggtcaccctgaaagcgctggaggagttccataagcagaacccggacatcaacgtgaaagcggaatacaccggctgggacggtcacctctcccgtctgaccacccagattgcgggtggaaccgagccagacgtaatgcagacgaactggaactggctgccgatcttctccaaaaccggtgacggcttctacgatctgaacaagttgaaggaagcgggtattgcgtacccgaaaacctgggacgagctgatggcggccggtaaaaccttcgagagcaagctcggtaagcaatactatccggtgatcctggagcaccaggatacgctggcgctgctgaattcgtacatgatccagaagtacaacattcctgcggtggatgagaaaaccaaaaagttcagctacacaaaggaacagtgggtggagttcttccagacctacaaaaagctgatcgacagccacgtcatgccggacaccaaatattatgcctcatttggtaagagcaacatgtatgagatgaagccgtggatccagggagaatggggcggcacctatatgtggaactccaccatcaacaaatattccgacaacctgaagccaccggcgaaactggagctgggcagctacccaatgctgccgggcgccaccgacgcgggcctgttcttcaaaccggcgcaaatgctgtcgattggtaagtcgaccaaaaacccggaagcggcggcgaagctgattaatttcctgctcaacagcaaagaaggggtcgatacgctgggccttgagcgtggcgtaccgctgagcaaagtagcggtgcagtatctgactgaagacggcaccattaaagaggacgatccttccgtggcaggcctgcgtctggcgcagtcgctgccggcgaaactcaccgtctcgccatactttgacgacccacagattgtggcgcagttcggtacttctttgcagtatatcgactacggccagaaaaccgtggaagagacggccgctgacttccagcgtcaggcggagcgtattttgagacgtgcgatgcggtaa

SEQ ID NO: 523902 - DNA, 1416 bp, Stenotrophomonas maltophilia
atgacatctataaatgactctacccttatgcccgctgcgctgcgcgatacccgacgcatgaaccagtttgtttctgttgcggccgccgtagccggtctactgtttggtctggatatcggcgttatcgctggcgcactgccctttattaccgaccactttacgttaagcaaccgcctgcaagagtgggtggtgagcagcatgatgctgggcgcggccatcggcgcgttgtttaacggctggctgtcgttccgtctcgggcgcaaatacagcctgatggttggggcgatcctgttcgtcgcaggctccatcggctccgcgtttgcgacaaacatagaagtgctgctgctttcacgcgtgttgcttggcgtagcggtgggtatcgcgtcctacaccgcgccgctttatctctctgaaatggcaagtgagaacgtgcgcgggaagatgatcagtatgtatcagctgatggtgacgctcggtatcgtgctggcgtttctgtcggatacgtacttcagctacagcggcaactggcgggcaatgcttggcgtgctggcgctgcctgcgctgctgctgattgtgttagtcattttcctgccgaacagcccgcgctggctggcgcaaaaagggcgtcacgtggaggcggaagaggtgctgcgcatgttgcgcgacacgtctgaaaaagcgcgtgaagagctgaacgaaatccgcgaaagcctgaagctgaagcagggcggctggtccctgtttaaggcgaaccgcaacgtgcgccgcgcagtgttcctcggcatgctgttacaggcgatgcagcagtttacggggatgaacatcattatgtattacgccccgcgcatttttaaaatggccggttttaccaccaccgaacagcagatgatcgccacgctggtggtggggctgacctttatgttcgccacctttatcgcggtgttcaccgttgataaggccggacgtaaacccgccctgaaaattggctttagcgtgatggcgctcggcaccttaatccttggctactgcctgatgcagttcgataacggcacggcgtcaagcggcctctcctggctctccgtgggcatgaccatgatgtgtatcgccggttacgcgatgagcgccgcgccggtggtgtggatcctgtgctctgaaatacagccgctgaaatgccgcgactttggtatcacctgttccaccaccaccaactgggtgtcgaacatgatcattggcgcgaccttcctgacgctgctggatgcgattggcgcggcaggcaccttctggctctatacggtgctgaacgtggcgtttatcggtgtgaccttctggctgatccccgaaaccaagggcgtgaccctggagcatattgaacgcaagctgatgagaggggagaaactacgtaatatcggcgtgtaa

SEQ ID NO: 523903 - DNA, 762 bp, Stenotrophomonas maltophilia
atgattctggatgcattttctctgcagggtaaagtggctgtggtttccgggtgtgacaccgggctggggcagggtatggcgttaggtctggcggaagcgggctgtgatatcgtcgggattaacatcgtagagccaacggaaaccatcgagcgcgtcaccgcgctgggccgtcgtttcctgagcctgaccgcggacctgcgcaaaatcgatgcgatccctgaactgctggatcgcgcggtggcggagttcgggcatatcgatattctggtcaacaatgcgggcctgattcgccgtgaagatgcgattaacttcagcgaaacggactgggacgacgtgatgaacctgaacatcaagagcgtgttctttatgtcccaggcggctgcgaagcacttcatcgcgcaggggaaaggcggcaagatcatcaatattgcctccatgctctctttccagggcggcatccgcgtaccgtcttacaccgcatcgaagagcgccgtgatgggcgtgacccgtctgctggcgaacgagtgggcgcagcacaatatcaacgtcaacgcgattgcgccgggctacatggccaccaacaatacccagcagctgcgtgctgatgaagagcgcagcgcggcaattctggaacgtattccagcgggtcgctggggtctgccgagcgatctgatgggcccggttgtgttcctggcttctccggcttcggattacattaacggctataccgtcgccgttgacggcggctggctggcacgttaa

SEQ ID NO: 523904 - DNA, 837 bp, Stenotrophomonas maltophilia
gtggacgtcagacaaagcatccacagtgcgcacgcaaaaacgctggatactcaggggctgcgcagtgagtttttagttgagcaagtgttcgaagccgacaagtacaccatggtctacagccatattgaccgcattattgtgggcgggattatgccggtggcgaaaaccgtctccgtgggcggtgaagtgggcaaacagctgggcgtgagctacttcctcgaacgccgtgaactgggcgtgattaacattggcgggccgggcaccataaccgtcgatggccagtgctacgaaattggtcaccgtgacgcgctgtacgtcggcaaaggcgcgaaagaagtggtgttcgccagcatcgatggctgcaaaccggcgaagttctactacaactgcgccccggctcatacgacttacccaaccaaaaaagtcacgccagcggacgttgccccggtgacccttggtgacaacctcaccagcaaccgccgcaccatcaataaatacttcgtaccggatgtgctggaaacttgccagctcagcatggggctgaccgagcttgcgccgggcaacctgtggaacaccatgccgtgccatacccacgagcgccgcatggaagtctatttctacttcaacatggatgaagatgcctgcgtgttccacatgatgggacagccgcaggaaactcgccatatcgtgatgcacaacgagcaggcggtcatttcgccaagctggtccatccactctggcgtgggaacgaaagcttatacctttatctggggtatggtcggtgaaaaccaggtcttcgatgacatggaccacgtcgctgttaaggatctgcgctag

SEQ ID NO: 523905 - DNA, 1176 bp, Stenotrophomonas maltophilia
atggctaaaggtatgcgggtcaagctgaactacgaggtcagccgcgatccggatacaggcgtggaagttacccgcctgaccccaccggaagtaacctgtcatcgcaactacttttaccagaagtgcttctttaacgatggcagccacctgctgttcgccggggagttcgacggtcactggaactattacctgctggatctgaaaaacgccgaagcggtgcagctgaccgaaggcgcgggcgataacacctttggcgggttcctctctccggacgatcaatccctctactatgtgaaaaacgatcgcaccctgcttgaggtggatttacagacgctggcagagcgcgaagtgtaccgcgtcccggaagagtgggttggctacggcacctgggtcgcgaacagcgactgcaccaaactggtaggtattgagattgccagacgtgactggacgccactcaacgactggaaaattttccacgacttcttccacaaagggccgcactgccgcctgctgcgcgttgatctaaaaacgggtgaaagcaccaccatccatgacgagaagatctggctgggacatccgatttatcgcccgttcgatgacaataccgtggccttctgtcatgaagggccacacgacctggttgacgcccgcatgtggctggtcaacgaagatggcagcaacgtgcggaaagtgaaaacgcacgcggaaggggaaagctgcacgcatgaattttgggtgccggacgggtccgcgctgatctacgtctcttacctgaaaggtcagcaaggtcgtaccatctcccgcttcaatccggacaccggcgtgaatgaagcggtaatgaacatgcccgcctgttcgcacctgatgagcaacgttgacggcaccatgctggttggcgacggttccggcacgcctgtcgatgtgaaagacaccggcggctacaccattgataacgatccttatctgtatgcctttgacgtggcgaagaaagcctattaccgcattgcccgtcatgacacttcctgggctacggtggcgaacagccgccaggtaacccacccgcatccgtccttcacgccggacgaaaaagcggtgctgtacagttccgataaagacggcaaaccagccctctatatcgcgaaactccccgagcaacctgaaatgttgcatgcctga

SEQ ID NO: 523906 - DNA, 684 bp, Stenotrophomonas maltophilia
atgtttaagaaatctctgctccttgcttcccttattagtgcctcttttgcggctagcgccgttaccgtcgatctgcgtcacgaatatattgacagcggctcgaatgccgaccgtgttgccgtctcgcaccgctttgacaatggcttcggtttttcagtcgaggcgaagtggaaatcaggcggggacaaggcagatcagccattcgcggatgtggtggggaacggtcacgaagatcagattagctggcgctggaaagcgacagacaatatcgccctgacgcctgcgtttacgattgaaagcacagacagtcgtaccatttataaaccgaatctgcatgtgcaatatagtttcgataatggcttctacgtggccgcgcgttaccgttatgaatatacccgctacccgtcaagctcaaataaggacgatgataaagttaaccgtggtgatgcgtgggtcggttgggtatttggtgactggcgtaccgagctgaactatgtttacgcgaaaagctctgaaggcgtggcccgaaataacaataaagattattccaatgaatataacgccaagctcgcctacaaatgggataaaaactgggcaccgtatgttgaggtgggcaacgtgggggttaaagacactgacgaacgccagacccgtttccgtttaggcgtggcgtactccttctga

SEQ ID NO: 523907 - DNA, 1179 bp, Stenotrophomonas maltophilia
atgaaagatgtcgttatagtgggtgcgttacgtacggctatcggctgttttcagggagcgcttgcgcgtcactctgcggttgatctcggcagcgtggtggtaagagcgctggtggaacgcagcggggttgccgcacatgaaattgatgaggtgatcctcggccaggtgctgaccgcgggcgcgggacaaaaccctgcgcgccaggcggcgctgaagggcggcctgcctaataccgtttcggcgattaccatcaacgacgtctgtggttcaggtttgaaagcgctccaccttgcgacgcaggccatccagtgcggtgaagcggacgtggtcattgccggagggcaggaaaacatgagccgcgccccgcatgtcctgaccgacagccggaccggcgcgcagctcgggaacagtcagctgcttgacagccttgttcatgacgggctgtgggacgccttcaacgactaccatatgggcgtaacggcggaaaacctggcgcgggaatacggcatcagccgcgaacttcaggatgcgtatgcgcttagctcgcagcaaaaagcgcgtgcagcgatcgactccggccgttttcgcgatgaaattgtcccggtcagtacccaacgccagaacggcgaagcgctcatcgttgataccgacgagcagccgcgcaccgatgccagcgcagaagggctggcaaaactcgatccggccttcgaaacgctcggttctgtaacggcaggtaacgcatcatccattaacgacggtgcggcggcggtgatgatgatgagtgaaagcaaagcccaggagctggcgctgccggtgctggcgcgcatcaaagcgtttgccagcgtgggtgttgatcctgcgttaatggggatcgccccggtctatgccacgcgccgctgtcttgagcgggcgggctggcagctgaacgatgtagatctgattgaagtcaatgaagcctttgctgcacaggcgatctcggtcgggaaaatgctggaatgggatccgctacgggtcaacgtcaacggcggtgcgatcgcgctcggtcatcctattggcgcttccggctgccgcattctggtgtcgctagtccacgaaatgaaaaagcgtaacgcccgaaaagggatcgcaacgctctgcattggcggagggcagggggtagccctggctatcgaacggtaa

SEQ ID NO: 523908 - DNA, 867 bp, Stenotrophomonas maltophilia
atgcgttattctcccgaagcactgaccgcgtttgttgaaactgtcgccgcaggttcgttttcagctgcggcacgacggctgcgtaaaagccagtccaccatcagcacctccatcgccaaccttgaagctgaccttggctttgagctgtttgatcgctcggcgcgtcacccggtgttaaccgcccagggtgaacaggtgctgggctatgtccagtcaatcctcgccgccagcgcgcgccttgatgagctggccgtatccttaacagcgcaaacggaggcgcgttttacctttgttctctccgatacgcttaacccgaccgtgctggaagagatgatgagccagttcgaccagcgttttccgcacaccgaatttgagtgcctgattggggaagaggaggacgtgatcgatctgctgcaaaaggagcgggcgcaaattggcctgacggaagcacgcgacagctacccgaccgatattggcgcgacccgtctgcctatgcagacgcggatggctatttacgtttctgccggacatcctctggcagggcaacatgagacgcaggcggacgagctgcatggctggcgcgagctgcggctgagtacctatcttgaacgggaagcgccccttgcgcgcgggccggtctggtctgcgccgaactacctgctgctgctaagcatggcggtacagggctttggctggtgcgcgttaccctgcgcgctggtcgacgaatttgccgcatcgaaatcgctggtgcagctgaacgtgccgggttggccgaggtcgattgccatcgatctggtatggaacaaaagaaccccgcccggcgtcgccggaagctggctgcgccagtacttgcaggacgcacgataa

SEQ ID NO: 523909 - DNA, 465 bp, Stenotrophomonas maltophilia
atgcaacatcaggatgcactccaacgtaaattgccggagcggatcttccatgccgtctgttttgaaggtattgctacggcgatcctcgcccctacggccgcgtggctaatgcagcgctcggtggttgaaatggggggtctcactattattctggcgaccacggcaatgctctggaacattatctataactttggcttcgaccgtttctggcccgttcagcgggtgaagcgcacggcaaaagtgcgcgccctgcatgcgctgggttttgaatgcggctttattgtgattggcgtaaccatcgttgccgccgtgctgggcgtgacgctgctccaggccttcacgctggagattggtttcttcctgttcttcctgccgtacaccatgctctacaactgggcgtatgacaccctgcgggagaaaattatcaagcgccgccagcaacgtcgcgccctggcaagcgaatga

SEQ ID NO: 523910 - DNA, 1230 bp, Stenotrophomonas maltophilia
atgtcgaaaatttggtcaaaagaagagactctctggagtttcgccctctacggcactgccgtgggcgcaggaaccctgttcttgcccattcagctcggctctgctggcgcgattgtcctgctgatcaccgcccttgtggcgtatcccttaacctactggccgcataaagcgctggcgcaatttattctgtcgtcgaagacgaaaggcaacgaagggatcaccggtgccgtttcccattactacggcaaaaagatcggcaacctcattaccacgctctatttcgtggccttctttgtggtggttctgatttacgcggtggcgataaccaactcacttactgaacagctggcgaaacggatgacggtggataccagcgtgcggatgctggtgagttttggcgtggtgctgattttgaatctgatcttcctgatggggcggcacatcaccattaaggtgatgggtttccttgtctttccgctgatcgcctatttcctgtttgtctcgctgtatctgacgggcagctggcagccgtcgctgctgaccagccagatggccttcgaccagcatacgctgcaccaggtgtggatatcgatcccggtgatggttttcgcttttagccataccccgatcatctcgaccttcgccgtagatcgtcgcgagaaatacggtgaagaggctatgggtaaatgcaaaaaaatcatgaaagtggcgtacctgatcatctgcctcagcgtgctgttctttgtgttcagctgcctgctttcgattccaccgtcctatatcgtggcggcaaaagaggaaggggtgacgatcctgtccgcgctgtcgatgatgccttcgtccccggcatggctgggcatttccggcattatcgtggcaattatagcgatgtcgaaatcgttcctcggcacctattttggcgtgattgaaggggcaacggaaattgtgaaatcgtcgctgaatcaggtgggggtgaagaaaagtcgcgcctttaaccgcgcggtttcgattctcggcgtgtcgctgattacctttgcggtctgctgcatcaacccgaatgcgatctccatgatttacgccatcagcggtccgcttatcgccatgatcctgttcatcatgccgacgctgtcgacgtacctgatcccgtcgttaaaaccgtaccgctccatcggcaacctgctgacgctgattgtgggtgtgctgtgtgtgtcggtgatgtttgtcggttga

SEQ ID NO: 523911 - DNA, 273 bp, Stenotrophomonas maltophilia
atgaatattcttgaaggccataacaatttttatgtcaacgacgccgaaggcaatcaggttgcggagatcgtctttgtcccgaccggcgagcatctgagcatcatcgagcacaccgatgtggatccgagcctgaaagggcagggagtgggtaaacagctggtggcaaaggtggtagagaagatgcgcggggagaaccgtaaaattatcccgctgtgtccgtttgcgaagcatgagtttgataatacgcgggagtatgacgatattcgggcgtaa

SEQ ID NO: 523912 - DNA, 231 bp, Stenotrophomonas maltophilia
atggatcaggagctactggatgcagggtaccgggcctataccggtgagaaaatcgatgtctacttcaacacagggatctgcaaacactcgggcaactgcgtacgcggcagcgcggcgctgttcgacctgaagcgtaaaccctggatcgcaccggatgaagtggatgcagaaactgttgcgcgcgtaattgatacctgcccgagcggtgcgctgaagtaccgcctaaaataa

SEQ ID NO: 523913 - DNA, 315 bp, Stenotrophomonas maltophilia
atgataatttataggctgacgcttggttcaatgctgtgccttgtcgcaactgcgggttgttcggcgcgagaggtaaaggagggcgggcatgttgatgcatgtatgtcggtaatagctgactacgtgaagacctcgcgggggtggggcagagatctctacgacattgttcctgagggtaaggaggggccgcttcggggatatgcagtaatgcatcgtgacgacaagggcaggttgccctcagaagagcttaaatcatttcacgtcgatttggattcgagctgcaaggctgtcgtcgctgaactgggttatcagtga

SEQ ID NO: 523914 - DNA, 828 bp, Stenotrophomonas maltophilia
atggttacgaccgttcccgctaaacgcggcagaaaacctgctgcaaccaccgctgcacaacctggcggacaggttcaatccctgacgcgcggcctgaagctgctggaatggatagccgaatcgcatggtagcgtggccctgacggagctggcgcagcaggcgggactgccgaactccaccactcaccgcctgttaaccaccatgcagcagctgggcttcgtgcgtcaggtgggcgagctgggacactgggcggtgggcgcacatgcgtttattgtcggcagcagcttcctgcaaagccgcaacctgctggcgattgtccacccgattctgcgcaagctgatggaggagtccggcgagacggtaaacctggccgtgctggatcagagcgatcatcaggcgattatcatcgaccaggtgcagtgtacgcagctgatgcgcatgtccgcaccgattggcggcaagctgccgatgcatgcctctggcgcagggaaagcgtttctctcgcagcttagcgaagagcaggtgacgggtctgctgcaccgtaaaggtctgcacgcctacacccacgccaccctggtgtcgccggtgcatctgaaagaagatctggctctgacccgcaagcgcggctattcgtttgatgacgaagaacatgccctcgggctgcgctgcctcgcgtcctgtattttcgacgaacaccgcgagccgtttgccgccatctccatctccgggccgatttcacgtatgaccgacgaccgcgtcaccgagctgggtgcgctggtgattaaggccgcaaaagaggtgacgctggcgtatggtgggattcgctag

SEQ ID NO: 523915 - DNA, 3684 bp, Stenotrophomonas maltophilia
gtgagcagcaaagtagagcaactgcgtgcgcagttaaatgaacgaattctggtgctggacggcggcatgggcaccatgatccagggctatcgtctgagtgaagacgatttccgcggcgagcgctttgccgactggccttgtgacctgaaaggaaacaatgacctgctggtgttgagcaaaccctctgtcatcagggatatccataacgcctacttcgaagcgggtgcggatattgtagaaaccaacaccttcaactcgacaaccatcgccatggcggattaccagatggaatccctgtcggcggagatcaactttgaagcggcgaaactggcgcgcgcctgcgccgacgagtggacggcccgcacgccggacaaaccgcgctatgttgccggggtgctgggcccgaccaaccgcaccgcgtcgatttctccggacgtgaacgatccagccttccgcaatatcacctttgaccaactggtggccgcgtatcgtgagtccactaaagcgctggtggaaggcggttccgacctgatcctgattgaaaccgtattcgacacactcaacgccaaagccgcaatttacgcggtgaaagaggagttcgaggcgctgggtgttgacctgccgatcatgatttccggcaccatcaccgatgcctcggggcgcacgctttccggccagacaaccgaagcgttttataactctctgcgccatgccgaagcgctctccttcggcctgaactgcgcgctggggccggacgagctgcgccagtacgtgcaggagctttcgcgcatcgcagagtgctacgtcaccgcccacccgaacgccggtctgccgaatgcattcggtgagtacgatctggatgccgataccatggcggcgcaaatacgcgagtgggccgaatctggcttcctcaacatcgtcggcggctgctgcggcaccacgccggagcacatcgccgccatgagccgcgccgtcgccgggcttgcaccgcgcaagttacccgagcttccggtagcctgccgtctgtccggccttgagccgttgaccatcggtgacgacagcctgtttgtgaacgtgggtgaacgtaccaacgtcaccggttctgcgaagttcaagcgcctgatcaaagaagagaagtacagcgaagcgctggacgttgcccgccagcaggtggagagcggcgcgcagattatcgatatcaacatggacgaggggatgctcgacgccgaagcggcgatggtgcgtttcctcaacctgattgccggtgagccggatatcgcccgcgtgccgatcatgattgactcctccaaatgggacgtcatcgaaaaggggctgaagtgcattcagggcaaaggcatcgttaactccatctcaatgaaagagggcgtcgatacctttatccaccacgcgaagctggtgcgtcgctacggggccgccgtggtggtgatggccttcgatgaagtgggccaggccgatacccgcgagcgcaaaattgagatttgccgccgggcgtacaaaattctgaccgaagaggtgggcttcccgccggaagacattattttcgacccgaacatctttgctgtcgcaaccggcattgaagagcacaacaactacgcccaggactttatcggcgcgtgtgaagacatcaaacgcgagctaccgcatgcgctaatttccggcggcgtgtcgaacgtctcgttctcgttccgcggcaacgacccggtgcgtgaggccatccacgccgtgttcctctactatgccatccgcaacgggatggacatggggatcgttaacgccggacagctggcgatttacgacgacctgcccgcagaactacgcgacgcagtagaagatgtgatcctcaaccgtcgcgacgacgccaccgaacgcatgctggatctggcggaaaaataccgcggcagtaaagctgacgaatcagccaacgttcagcaggccgaatggcgttcctgggatgtgagaaagcgtctggaatactcgctggtaaaaggcattactgagttcattgagcaggataccgaggaagcgcgtcagcaggcagcccgtccgattgaagtgatcgaagggccgctgatggacggcatgaacgtggtcggcgatctgttcggcgagggcaaaatgttcctgccgcaggtggtgaaatccgcccgcgtcatgaagcaggccgtggcttatcttgagccgtttatcgaagccagcaaagagaagggctccagtaacggtaagatggtcattgccaccgtgaagggcgacgtacacgacatcggcaaaaacattgtcggcgtggtactgcaatgcaataactacgaaattatcgatcttggcgtgatggtcccggcggataaaatcctcaggaccgctcgcgaagtgaatgcggatctgattggtctttccgggctgattacgccgtcgctggacgaaatggtcaacgtggcaaaagagatggagcgccagggcttcactattccactgctgattggcggggcaaccacctcgaaagcccacaccgcagtgaaaatcgagcagaactacagtgggccgacggtgtatgtccaaaacgcctcgcgcaccgtgggcgtggtctccgcgctgctgtctgacacccagcgcgatgactttgtcgcccgcacccgcaaagagtatgaaaccgtccgcattcagcatggacgtaagaaaccgcgcacgccgccggtttcgcttcaggcggcacgcgataacgatctggcgttcgactggtccagctatacgccgccggtcgcgcaccgtctgggcgtgcaggaggtgacggccagcatcgaaacgctgcgtaactacatcgactggacgccgttcttcatgacctggtcgctggcgggcaaatatccgcgcattcttgaagatgaggtagtaggcgaagaggcgaaacgcctgtttaaagatgccaacgatatgctcgacagactgagcgcagagaaagccctcaacccgcgcggcgtggtggggctgttcccggcgaaccgcgtgggcgacgatgtcgaaatttaccgcgatgaaacccgcacccatgtgctggccgtgagccaccatctgcgccagcaaaccgagaaagtgggctttgccaactactgcctggcggatttcgtcgcaccgaaactctccggtaaagccgactatatcggcgcctttgcggtgaccggcggtctggaagaagacgcgctggcggacgcgtacgacgcacagcacgatgattacaacaaaatcatggtgaaagcgattgccgatcgcctggcggaagcctttgccgagtatctgcatgagcgcgtacgtaaggtgcactggggctacgcggcgaatgagaatctcagcaacgaggagctgatccgcgaaaactaccagggcattcgtccggcgccggggtatccggcctgcccggaacacaccgagaagggcactatctggaaactgctcgacgtggaagcgcataccggcatgaaacttaccgagtcgttcgccatgtggccgggcgcgtccgtttccggctggtatttcagccacccggacagcaagtacttcgccgtggcacagcttcagcgggatcagattgaagactacgccctgcgaaaaggcatgagcgtgtctgaggtggaacgctggctggcgccgaatttaggctacgacgcagactaa

SEQ ID NO: 523916 - DNA, 1632 bp, Stenotrophomonas maltophilia
gtgttgacgttgttacacctgctctccgcagtcgcactgctggtatggggcacccatatcgttcgtaccggcgtgatgcgcgtgtttggcgcacgtttacgtaccgttctcagcggcagcgttgagaagaagccgctcgccttctgtgcgggtattggcgtcacggcgctggtgcaaagcagcaacgccaccactatgctcgtcacctcgttcgtggcgcaggatctagtggcgctcgccccggcgctggtgattgtccttggcgccgacgtcggtaccgcgctgatggcacgtatcctgaccttcgatctctcctggctgtcgccgctgctgatttttattggcgtcattttcttcctcggccgtaagcaaagccgtgccgggcagcttggccgcgtcggtattggcctcgggctgatcctgctagcgctggagctgattgtgcaggcagttacgccgattacccaggccaacggtgtgcaggtcattttcgcctcgttaaccggcgatattatgctggatgcgctgatcggcgcggtgtttgccattgtcagctactccagcctggcggccgtgttgctgacggccacgctaaccgctgcgggcgcgatctctttcccggtggcgctatgcctggtcatcggtgcgaatcttggctctggcctgctggcgatgctcaacaacagcgcagccaatgctgccgcccgccgggtggcactggggagtttgctcttcaagctggtgggtagcctgatcattctgccgtttgtgcacccgctggcgaacctgatggacaacctctctctgccgaaagcggagctggtgatctactttcacgtcttctacaacctggtacgctgtctggcgatggtgccgtttgccgcgccgatggcccgcttctgcgagcggctaattcgtgatgaaccggagctggacgcgcgccttaaaccgaagcatctggacacctcggtgctggacacgcccgcgctggccatcgcgaatgccgcccgcgaaacgctgcgcatgggtgacgcgatggaaaccatgctggaagggttgcaaaaggtgatgcacggcgagccgcgcgaagaaaaagagctgcgcaggctggcggacgatatcaacgtgctgtataccgccatcaagctctatctggcgcggatcccacaggacgagctggcggaagaggagtcgcgccgctgggcggaaatcattgagatgtcgcttaacctggagcaggcttcggatattgtcgagcgtatgggcagtgaaatcgcagacaaatccctggccgcacgtcgggcgttttctgtcgaagggctgaaggagctggaagcgctccacgaacagctggtcagcaacctgaagctggcgatgtcggtcttcttctccagcgacgtgccgagcgcgcgccgcctgcgccgcaacaagcaccgtttccgcatcctcaaccggcgctactcgcacgcccacgttgagcgtctgcaccagcagaacgtgcagagtatcgaaaccagctcgctccacctggggctgctgggcgatatgaagcgtcttaactcgttattctgtgcggtggcatacagcgtgatggagcagccggatgaagacgatgagcgggatgagtattaa

SEQ ID NO: 523917 - DNA, 261 bp, Stenotrophomonas maltophilia
atgcgcattccaatgggggttctcatgcgcggtgctaatagtattaaaaaatcagtgaatgtttccctgtcgcaggacatccttgaagaggcgcgaaggcttaaacttaacctttctgccgtgctaacggcggctttgcaggagcaatttcgtgaacatcggcgcgcagagtggcttgaagaaaataaagcttctattgacgccattaaccagtgggttgatgaaaacggctcctttagtgactttcagaggtcgttctga

SEQ ID NO: 523918 - DNA, 174 bp, Stenotrophomonas maltophilia
atgaagcatgtactggtcgctcccgccgttgaggtcgcgggaaaaccctgcgtggtgatgatgcacatgatggcaggcatatcgctaaaagagttaggtgaacgcgttgccgatcttactaacagcagtgcttcattgcgggatgcactcgattttctgatcagcggttactag

SEQ ID NO: 523919 - DNA, 873 bp, Stenotrophomonas maltophilia
atgctgccaactcaatcaacccgattaaacaaatacattagcgagagcgggatctgctcacgtcgcgaggctgaccgttacattgaacagggtaacgtgtttcttaacggcaaacgcgccaccattggcgatcaggtggtacctggcgatgtggtgaaagtgaatggtcaggtcatcgaaccgcgtgatgccgaagacctggtgtttatcgcgttgaacaaaccggttgggattgtcagcaccacggaagatggcgagcgggacaacattgttgatttcgtgaaccacagcagccgcattttcccgattggccgtctggataaagactctcaggggctgattttcctcaccaaccacggcgatctggtcaacaaaattctgcgtgccggtaacgaccacgagaaagagtacatcgtgacggtgaacaagccggtgacggacgagtttatccgcggaatgggcgctggcgtgccgattctgggcaccgtgacgaagaagtgtaaagtcaaaaaagaagcaccgttcgcgttccgcatcacgctggttcagggcctgaaccgccagatccgccgcatgtgcgagtacttcggttatgaagtgacgaagctggaacgcacgcgcatcatgaacgtcagcctgtccggcatcccgctgggcgagtggcgtgacttaacggatgatgagctgatcgagctgttcaaacttatcgagaactcctcgtccgaagcgaagccgaaagctaaagccaaaccgaaaacgcaggcaattaagcgtccggtggtgaaggcaccgcaggcggaagagaaagggcgaggcaagccgggcaacggaaaacgctttacccagccggggcgcaaaaagaaagggcgctga

SEQ ID NO: 523920 - DNA, 273 bp, Stenotrophomonas maltophilia
atggctacaccacgtttgacccagaaagacatgaccgaagccgagcagcgcgaacttaaaacgcttctcgaccgcgcccgcatcgcgcatggccgcacgctgacgaacgccgaaaccaatcaggttaaaaaagagtacatcgataagctgatggcgcaacgtgatgccgcggcgaaaaaagcccgcaagctgaaaaaagagcaggcgtataaacccgacgcagaggcgactttttcctggtccgccagcacatcaacccgtggaaggcgctaa

SEQ ID NO: 523921 - DNA, 945 bp, Stenotrophomonas maltophilia
atgctctccgctatcacccggctgttcccgttatgggcgctgctgctctccgtactcgcgtattacactcccaccacgttcacgggcattggtccgtgggtcaccacgctactgatgctgattatgttcggcatgggcgtgcatctaaaaattgacgatttcaaacgcgtgctgtctcgcccggcaccggttgccgcagggattttcctgcactacctggtgatgccgctcgcggcctggctgctggcgatggcctttaagatgccgcccgacctttccgccgggatggtgctggtggggagcgtcgccagcggcacggcatctaacgtcatgatctatctggcgaaaggcgacgtggcgctctccgtcactatctcttccgtttccacgctggtgggcgtgattgccacgccgctgttaacccgcctgtacgtggacgcgcatatccaggtggatgtgatgggcatgctgctcagcattctgcaaatcgtggtgatcccgattgcgctgggactggtgatccaccatctcttcccgcgggtggtgaaagcggttgagccgtatctgcccgcgttttcgatggtctgcattcttgccattatcagcgccgtggtagccggttccgcatcgcacattgcttcggtgggctttgtagtgatcgtcgcggttgtgctgcataacaccattggtctgctgggcggatactggggcggaaagctgtttggtttcgacgaatccacctgccgcacgctggcgatcgaagtggggatgcagaactctggcctggcggcggcgctgggtaaaatttacttctcaccgctggcggcgctaccgggagcgctgttctccgtctggcacaacctgtccggttcgctgttagcagggtactggtccggtaagccgattgatgaccaaccgaaaaaagatgcggtgaaacagggttaa

SEQ ID NO: 523922 - DNA, 1350 bp, Stenotrophomonas maltophilia
atgacgagttttgtggtcgccaagtttggcggcaccagtgtggcagactacgctgccatgaaccgcagcgccgatgtggtgctggccgatgcgaatacccgcctggtggtgctctccgcctcagccggcgtgacgaacctgctggtttctttgtctgaaggactggaagcgaccgagcgtttcgtgaagctggatgcactgcgcaaaattcagttcgacatccttgagcgtctgcaaaacccgaacgtcattcgtgaggaagtggaacgcctgctggaaaatatcactaccctggcagaagccgcttcactggcaacctctaccgccctaaccgatgaactggtcagccacggcgaactgatgtccaccctgctgttcgttgagatcatgcgcgagcgcaatattcaggcgcagtggttcgacgtgcgtaaagtaatgcgcaccagcgaccgctttggccgcgccgagccggacgttgaagctttggcagagctcactaaccagcagcttgccccgcgtctggatgaaggcatagtgatcacccagggctttatcggcagcgaagccaaagggcgcacaaccacgctgggccgtggcggcagcgactataccgccgccctgctgggtgaagccctgcatgccacccgcgtggatatctggacggacgtgccgggcatttacaccaccgacccgcgcgtggtctctgcggcaaaacgcattgacgtgatcgcctttgaagaagcggctgaaatggccaccttcggcgcgaaagtgctgcatccggccacgctgctgcccgccgtgcgcagcgacattccggtcttcgttggctccagtaaagatccaaaggcgggcgggacgctggtctgcaagaaaaccgagaacccgccgctgttccgcgcgctggccctgcgtcgtaagcagacgctggttaccctgcacagccataatatgctgcactcccgcggattcctggcggaagtgtttggcatcctggcgcgccacaatatctccgtggacctgatcaccacgtcagaagtcagcattgcgctgacgctcgacaccaccggctccacctctaccggcgacaccctgctgacgcagtcgctgctgattgagctttccgagctgtgccgcgtggaggtggaagaagatctggcgctggttgccatcatcggtaataagctgtcgcgcgcgtgcggcgtgggcaaagaggtgttcggcgtgctcgacccgttcagcatccgcatgatttgctacggcgcgtccagctacaacctctgcttcctggtccctgccgatcaggccgagcaggttgtgcagaaacttcatcagaatttgtttgaataa

SEQ ID NO: 523923 - DNA, 1650 bp, Stenotrophomonas maltophilia
atgaaaaacatcaacccaacgcagaccgctgcatggcaggcactacagaaacattttgatgaaatgaaagacgtcactatcgcggatctgttcgcgaaagatgccgatcgtttcagcaagttttccgccaccttcgatgacctgatgctggtggatttctccaagaaccgtatcaccgaagagacgctggcgaagctgcaagatctggcgaaagagactgagctggcagatgccatcaaatccatgttctccggtgagaagatcaaccgcaccgaagaccgtgccgtgctgcacgtggcgctgcgcaaccgtagcaatactccaattatcgttgacggcaaagatgtgatgccggaagtgaacgcggtgctggaaaagatgaaaaccttctctgaagcgatcatctcaggtcagtggaaaggctacaccggcaaagcgatcaccgacgtcgtaaacatcggtatcggcggctctgacctcggcccgtttatggtgaccgaggcgctgcgcccgtacaaaaaccatctcaacatgcacttcgtgtccaacgtcgatgggactcacatcgctgaagtgctgaaaaaggtgaacccggaaaccacgctgttcctggtggcgtctaaaaccttcaccactcaggaaaccatgaccaacgcccacagcgcgcgcgactggttcctgaaaaccgcgggcgacgaaaagcacgtggcgaaacacttcgcggcgctgtccaccaacggtaaagcggtgggtgagttcggtattgatactgcgaacatgtttgaattctgggactgggtaggtggccgctactcactgtggtctgcgatcggtctgtccatcatcctgtccgtcggcttcgacaacttcgttgagctgctctccggcgcgcacgcgatggacaaacacttctccaccaccgcgcctgagaaaaacctgccagtgctgctggcgctgattgggatctggtacaacaacttcttcggcgctgaaaccgaagcgattctcccgtacgaccagtatatgcaccgctttgcggcctacttccagcagggcaacatggaatccaacggtaaatacgttgaccgtaacggtaacgcggtggattatcagactggcccaatcatctggggcgagccgggcaccaacggtcagcacgcgttctaccagctgatccatcagggcaccaaaatggtaccgtgcgatttcatcgccccggcgattacgcacaacccgctgtccgaccaccatccgaagctgctgtctaacttcttcgcccagaccgaagcgctggcgttcggtaaatcccgcgaggtggttgagcaggagtaccgtgaccagggtaaagatccggctacgctggaacacgttgtgccgttcaaagtgttcgaaggcaaccgtccaactaactccattctgctgcgtgaaattacgccgttcagcctgggcgcgctgattgccctctacgagcacaagatcttcactcagggcgctattctgaacatcttcacctttgaccagtggggcgttgagctgggcaaacagctggcaaaccgcattctgccagagctgggtgacgataaagcaatcgacagccacgacagctccaccaatggtctgattaaccgttataaagcatggcgtgcgtaa

SEQ ID NO: 523924 - DNA, 639 bp, Stenotrophomonas maltophilia
gtgaagcgacctgcaatcatcctgatttgcctgctgttgcaggcgtgctcagctaccaccaaagggctgggccactcactgtgggacagcatgttcggcacgccgggcgtgcatctgaccgatgacgaacttcagaacatgccgtatgccagccagtacatgcagctaaacgatggtccgcaactgtttgtggtgctcgctttcgatgaaaacgggcagcagaaatgggtgacgcaggatcaggccaccatcgtgactcagcattcccgaatcgtgaaaacgttgcttggcggcgacaacctgcttgaggtaaacaacctggctgaagatccgctcatcaagccgaatcagatcgtcgatggcgcaagctggacgcgcacaatgggctggaccgagcacaaacaggtgcgctacgccacggcccgctctaccttccgctgggatggtacggacagcgtcaaagtgggcagcgacgaaacgcaggtgcgcgtgctggatgaagaggtgacaaccgatcaggccacctggcataaccgcttctgggtggacgaagaggggcaaatccgccagtccttacagtatctcggtgccggtttcttcccggtgaagaccaccctgatcaaggcggcgaaatcatga

SEQ ID NO: 523925 - DNA, 738 bp, Stenotrophomonas maltophilia
atgaaaatgttcattcacgttgcgcttctcgccagcctggcctcgccgctggcgtggtctgcgggaacggtacaggtctacaccccggacagcgaaaaacctaaaaccttaaccaacgccgggcatctgctcgatctggtggggcagccgaggctggcgaaaagctggtggaccggggcggttatcagcgagcgtcaggcgacgattgtagcggaacaaaaacatcaggcgctgctcgcccgactgagcgggctggcacaacaggaagatgctgacgatgccgcggccattactagcctgcgtcagcagcttcaggcggttaaggtgacgggtcgccagaaggtgaatctcgatccggatgaggtgcgcgtcgccgaaaacggcaatccgtcgctggaaggggactataccctgtggctgccggctcagccttccaccgtcaccgtgatggggcttatcagcagccctggcaaaaagtcgtttacgccgggccgggacgtcgtgagctatctcgacgagcaaagcttgctcagcggtgcggataacagctatgcctgggtggtctatccggacgggcatacgcaaaaagcgccggtggcttactggaataaacgccatatcgaacctatgccaggcagcatcatttttgtcggttttgccgaccatttctggacgaaagcgtatgacgggcttaatgccgatatccttcgctccctgatacagcggataccggaataa

SEQ ID NO: 523926 - DNA, 2097 bp, Stenotrophomonas maltophilia
atgaaaaaaacctatctctacagcatgcttgcactgtgcgtgagtgccgcctgtcatgcagaaacgtatccggcacccatcggcccgtcgcagtccgattttggcggcgtgggcttactgcaaaccccgaccgcgcgtatggcccgcgagggggaaatcagccttaactatcgcgataacgatcagtaccgttactactctgcgtccgtgcagctgttcccttggctggagaccacgctgcgctacaccgacgtgcgtacaaaacagtacagcagcgtggacgccttctccggcgatcagacctataaagacaaagccttcgacgtgaagctgcgcctgtgggaagagagctactggatgccgcaggtctccgtcggggcgaaagacattggcgggaccggcctgtttgatgcggaatacatcgttgccagcaaagcctggggaccgtttgatttctcgctgggtcttggctggggctacctcggcaccagcggcaacgtaaccaacccgttctgtacctacagcgacaaatactgctaccgcgataacagctataaaaaagcgggttccatcaacggcgaccagatgttccacggcccggcctcgctgtttggaggcgtagagtatcaaacgccatggcagccgctgcgcctgaagctggagtacgaaggcaataactacagcgaagattttgccggcaagattgagcagaagagcaagtttaacgtcggcgccatttaccgcgtcaccgactgggccgacgttaacctcagctatgagcgcggtaataccctgatgtttggctttacgctgcgcaccaactttaacgacatgcggccgcgctacaatgataacccgcggcccaaataccagccggagccgcaggatgcgatcattcagcactccgtggtagcgaaccagctgacgctgctgaaatataacgcgggcctggcggatccgaagatccagaccaaaggcgatacgctgtacgtcaccggcgagcaggtaaaataccgcgactcccgcgaagggatcgagcgcgccaaccggatcgtcatgaacgatctgccggaggggatccgcacgatccgcgtgacggagaaccgtctcaacctgccgcaggtcaccactgaaaccgatgttgccagccttaagcgtcatcttgaaggcgaaccgctgggacatgaaaccgagctggtgcaaaaacgcgttgagccggtggtgccagagagcaccgagcagggctggtatatcgataaatcccgcttcgatttccatatcgatccggtgctgaaccagtccgtgggtgggccggaaaacttctacatgtatcagctgggcgcgatggcgacggcggatctgtgggtgaccgaccacctgttgaccaccggtagtctgttcggcaaccttgccaacaactacgacaaatttaactacaccaacccgccgaacgattcaaaactgccgcgcgtgcgtacccgcgttcgcgaatatgtgcagaacgatatctacgtgaataacctgcaggccaactacttccagtacttcggtaacggcttctacggccaggtttacggtggctatctggaaaccatgttcggcggcgcgggggcggaggtgctttatcgtcccgtcgacagtaactgggcgtttgggattgatgccaactacgtgaaacagcgtgactggcgcagcgcgcaggacatgatgaagttcaccgactacagcgtcaaaaccggccacctgaccgcctactggacgccgtcgttcgcacaggatgtgctggtgaaagccagcgtcgggcagtacctggcgggcgataagggcggcacgctggatatctccaaacacttcgacagcggcgttgtggtaggcggttatgccaccattaccaacgtttcgccagacgagtacggggaaggggacttcaccaaaggggtgtacgtgtcgattccgctggatctgttctcgtcaggcccaacccgcagccgtgcggcagtgggctggacgccgctgacgcgcgacggcggtcagcagcttggacgtaagttccagctgtatgatatgaccagcgataagaacattaacttccgctga

SEQ ID NO: 523927 - DNA, 411 bp, Stenotrophomonas maltophilia
atgacatccctgactcgtccgcgtgttgagtttatctcaacaatactccagaccgtgctgaacctcggtctgctgagccttggcctgatcctggtcgtgtttctgggtaaagagacggtgcatctggcggatgtgctgttcgcacctgagcaaaccagcaaatacgcgctggtggaaggcctggtggtctactttctctactttgaatttatcgccctgattgtgaagtactttcagtccggctttcacttcccgctgcgctattttgtctatattggcatcaccgccattgtgcggctgatcatcgtcgatcataaatccccgctcgacgtgctgatctactcggcggcgatcctgctgctggtgatcaccctctggctgtgcaactcaaagcggctgaaacgcgaataa

SEQ ID NO: 523928 - DNA, 891 bp, Stenotrophomonas maltophilia
atggctatggtacaacccaaatctcagaaactgcgcctcctcgcgacgcacttaggcctgctgattttcatcgcggcgatcatgttcccgctgctgatggttatcgccatctccctgcgttcggggaacttcgccaccgggagcctgatcccggatgaaatctcctgggagcactggaaactcgcgctgggcttcagtgtggaacacgcggatggccgcgtcactcccccgccgttcccggtgctgctgtggctatggaactcggtaaaagtggcgaccatcactgccatcggcatcgtgacgctctccaccacttgtgcttacgccttcgcccgtatgcgtttcccgggcaaagcgacgctgctgaaagggatgctgattttccagatgttcccggcggtgctgtcactggtggcgttgtatgccctgtttgatcgtctgggccagtacgtgccgtttatcggcctgaacacccacggcggcgtgatcttcgcctatcttggcggcatcgccctgcatgtgtggaccatcaagggctatttcgaaaccatcgatggctcactggaagaagccgccgcgctggatggcgccaccccgtggcaggcgttccgtctggtgctgctgccgctgtcggtgccgattctggcggtggtgttcatcctgtcgtttatcgcggcgatcaccgaagtaccggtcgcctctctgttactgcgcgatgtgaacagctacaccctggccgtcggtatgcagcaatacctcaacccgcaaaactacctgtggggcgactttgccgcggcggctgtcctctctgccatcccgattaccgtggtgttcctgctggcccagcgctggctggtcaacggcctgacggcgggcggtgtgaaaggttaa

SEQ ID NO: 523929 - DNA, 1545 bp, Stenotrophomonas maltophilia
atggatgtcattaaaaagaaacgctggtggcaaagcgacgcactgaagtggtcagtgataggtctgctgtgtctgctggtgggttaccttgttgttttaatgtacgtgcaaggggaatacctttttgccatcatgacgctgattttaagctcggttggcctgtatattttcgccaaccgtaaagcgtatgcctggcgctatgtctaccccggtgttgccgggatggggctgtttgtcctctttccgctgatctgcaccatcgcgattgcctttactaactacagcagcaccaaccagctcgcgcaggagcgtgccacccaggtgcttctggatcgttcttatcaggcgggtaaaacctttaacttcggcctgtatcctgcgggagatgagtggaagttagcgctcactgacggtgagagcggcaaaaactatctttccgacgcgttcaaatttggcggcgagcagaagctggtcttaaaagaggccgcggccctgccggaaggtgaacgtgccaacctgcgtatcatcactcaaaatcgccaggcgctgacccagctcaccgctgtgctgcccgatgacagcaaagtaaccatgagctcgctgcgccagttttccggcacgcagccgctttatactctggcggatgacggcacgctgaccaacaaccagagcggcgtaaaataccgcccgaacaacgatatcggtttctatcagtcggtgaatgccgacggcagctggggcgacgacaagctcagcccgggctataccgttaccatcggctgggataactttacccgcgtgtttaccgacgaaggcatccagaaaccgttcttcgccatcttcgtctggacggtagtcttctccatcctgaccgtgatcctgaccgtggccgtgggcatggtgctggcctgtctcgttcagtgggagtccctgaaagggaaagcgatttaccgcgtgctgctgattctgccgtacgccgtgccatcgttcatctcgattctgattttcaaagggttgtttaaccagagcttcggtgaaatcaacatgatgctgagcgcgctgttcggcatcaaaccggcctggttcagcgacccgaccaccgctcgctcgatgattatcatcgtgaacacctggctcggttatccgtacatgatgatcctgtgcatggggctgctgaaggccatcccggacgacctgtacgaagcctcagcgatggacggcgcgggtccgttccagaacttcttcaaaattaccctgccgctgctcattaagccgctgacgccgctgatgattgccagcttcgcctttaactttaacaactttgtgctgattcagctgttgaccaacggcggtccggaccgtctcggcaccaccacgccggcaggttataccgacctgctcgtgagctacacctaccgtatcgccttcgaaggcggcggtggccaggacttcggactggcggcggcgattgccaccctgatcttcctgctggtgggcgccctggcgatcgtgaacctgaaagctacacgtatgaaatttgactaa

SEQ ID NO: 523930 - DNA, 1191 bp, Stenotrophomonas maltophilia
atgaagatcaagactggcgcacgcgttttcgcattgtccgccctcgcagcaatgatgatttccgcaccggctctcgccaaaattgaagaaggtaagctggttatctggattaacggcgacaagggctataacggtctggccgaagtgggcaaaaaattcgagaaagacaccggtatcaaagtcaccgtagaacacccggacaaactggaagagaagttcccgcaggttgcggcaaccggcgatggtccggacattatcttctgggcgcatgaccgtttcgggggctacgcgcagtctggcctgctggcagaagtcacgccagacaaagccttccaggacaaactgttcccgttcacctgggacgccgttcgctataacggcaagctgatcgcttacccaatcgcggttgaagccctgtcactgatttacaacaaagacctggtgccaaatccaccgaaaacctgggaagagatccctgctctggataaagagctgaaggcgaaaggtaaatccgctctgatgttcaacctgcaagagccgtacttcacctggccgctgattgctgccgacggcggctacgcgttcaagtttgaaaacggcaaatatgacgtgaaagacgtgggcgtggacaacgcgggcgcgaaaaaaggcctgaccttcctggttgacctgattaagaacaaacacatgaacgcggataccgactactccatcgcggaagcggcgttcaacaaaggcgaaaccgcgatgaccatcaacggtccgtgggcctggaccaacatcgacaagagcaaagtcaactacggcgtgaccctgctgccaaccttcaacggcaagccgtctaaaccgtttgttggcgtgctgagcgcgggtatcaacgccgccagcccgaacaaagagctggcgaaagagttcctcgaaaactacctgctgaccgatcagggtctggatgaagtgaacaaggacaaaccgctgggcgccgttgcgctgaaatccttccaggatcaattagcgaaagatccacgcattgcggccaccatggataacgcccagaaaggcgaaatcatgccgaacatcccacagatggctgcgttctggtacgccacccgtaccgccgtcatcaacgctgcaagcggtcgccagactgttgatgccgcgctgaaagatgctcagggtcgtattactaagtaa

SEQ ID NO: 523931 - DNA, 1110 bp, Stenotrophomonas maltophilia
atggcgagcgtacagctgcgtaatgtaacgaaagcctggggcgacgttgtggtgtcaaaagacatcaatctggacatccacgaaggtgagtttgtggtgttcgttggtccatcaggctgtggtaaatctactctgctgcgtatgattgccggtcttgaaaccatcaccagtggcgatttatttattggtgatacccgaatgaacgacatcccgccagctgaacgcggcgtgggcatggtgttccagtcttatgcgctttatccgcatctttccgttgccgagaacatgtcctttggcctgaagctggccggcgcgaaaaaagagaccattaaccagcgcgtcacccaggtggcggaagtgctccagctggcacatctgctggagcgtaaaccgaaggcgctctccggtggtcagcgtcagcgtgtggcgatcggccgtacgctggtggccgagccgcgcgtgttcctgctcgatgaacctctctctaacctggatgccgccctgcgcgtccagatgcgtatcgaaatctcccgtctgcacaagcgcctggggcgcacgatgatttacgtcacccacgatcaggtcgaagcgatgacgctggccgacaaaatcgtggtactggacgccggtcgcgtggcgcaggtgggcaaaccgctggagctgtatcactacccggcagaccgctttgttgcgggcttcattggctcgccaaagatgaacttcctgcccgtaaaagtgaccgcgacggcaatcgaacaggtacaggtggagctgccaaaccgtcagcaagtctggctgccggtcgacagcgccaacgtacaggtgggggccaatatgtccctcggtatccgccctgagcatttactgccgagccacatcgctgatgtgacgctggaaggtgaagttcaggtcgtcgaacagcttggtcacgaaacacagattcatatccagatccccgccatccgtcagaacctggtctaccgccagaatgacgtggtgttggtagaagagggtgccacattcgctatcggtttgccgccagagcgttgccatctgttccgtgaggatggcactgcatgtcgtcggttgcacaaagagccaggcgtttaa

SEQ ID NO: 523932 - DNA, 1365 bp, Stenotrophomonas maltophilia; identical to SEQ ID NO: 119288

SEQ ID NO: 523933 - DNA, 933 bp, Stenotrophomonas maltophilia
atgaaaatgaagaaaaatctcgtcgcgctgtgcctgtcagcgggtctgctggcctgtgtgcctggcgttacgctcgctgacgtcaattatgtcccgcagaataccagcgcagcgcctgccattccgacagccgctctacagcaattaacctggacgccggtggatcagtccaaaacgcagagcacacagcttgcgacgggtggccaacagctcaatgtggctggcattaccgggccggtagccgcctatagcgtaccggctaatatcggtgagctaacgttgactttatccagtgaagttaacaaacagaccagcgtttttgcgccgaacgttctgatcctcgatcagaacatgacgccttccgcctatttccccagcagctattttacctatcaagagccgggtgtaatgagcgcggaccgcctggaaggggtaatgcgtctgaccccggcgctcgggcagcaaaagctctacgtactggtcttcaccactgaaaaagatttgcagcaaaccaccactctgctcgatccggcaaaagcctatgccaaaggggttggtaacgccattcccgatattcccgatccgattgcgcgccataccaccgatggcctgcttaagctgaaggtgaaaaccaacagcagctccagcgtactcgtaggcccactgtttggctcatctggcccgggtccggtaacggtgggtaatactgccgcgcctgtgtatgccgcgccagccgcagcaccagccgcagccccggcgaaaaaagccgagccggtgcttaacgatactgaaacttactttaacaacgccatcaagcaggcagttaaaaacggcgatgtcgataaggcgctgaaactgcttgatgaagccgagcgtttaggttcaaccactgcccgttccacctttatcagcagtgtaaaaggcaaggggtaa

SEQ ID NO: 523934 - DNA, 498 bp, Stenotrophomonas maltophilia
atgtcacaccccgcgctaacgcagctgcgtgcgctacgctatttcgaccacatccctgcgcttgacccggaacagctggactggctgctgctggaagattccatgacaaaacgttttgagcaacagggtaaaacggtcacggtgacgatgattcaggaagggtttgtctcgcctgcggagattgccagcgagctgccgctgctgccgcaggaagaacgctactggctgcgtgaaattttactctgtgcggatggcgagccgtggcttgccgggcgaacggtggttcctgagtctacactttccgggccggagctggcactgcaacgcctcggcaaaacgccgctggggcgatatctgttcacctcgtctgaactgacccgtgattttattgaaattggttgcgatgccgatttgtgggggcgccgttcccgccttcgtttgagtggcaagccgttaatactgacggaactctttttgcctgcatcgccgttgtattaa

SEQ ID NO: 523935 - DNA, 870 bp, Stenotrophomonas maltophilia
atggagtggagtctgacgcagaataagctgctagcctatcaccgcctgatgcgtactgataaacccattggcgcgctgctgctgctgtggccgaccttatgggcgctgtgggttgccacgccgggcgtaccgccgctgtggatcctggcggtgtttgtggcgggtgtctggctgatgcgcgctgcgggctgtgtggtcaacgactatgctgaccggaaatttgatggacatgttaagcgcaccgcgaatcgtcctttgccgagcggtcaggtgaccgggaaagaggcgcgcatcctgtttgtggtgctggtgcttctctctttcatgctggtgttaacccttaacaccatgaccattctgctgtccgtcgctgctctggcgctggcctgggtctacccatttatgaagcgatacacccatctgccgcaggtggtattgggtgcggcatttggctggtcgattcccatggcgtttgccgcggtcagcgagtccgttccgctcagctgctggctgatgttcctggcgaatattctctgggccgttgcgtacgatacccaatacgcgatggtcgatcgcgatgacgatctcaagattggcatcaaatcgacggcgatcctgtttggccgtcacgacaaactgatcatcggcatattggaggtggcggtgctggcgttgatggtggcgattggtcgcctgaacgggctgaactgggagttttactggtccgtgctggtggcgggtctgctgtttgcgtatcagcagaagctgatcgcgaagcgcgagcgtgaagcctgctttaaagcgtttctgaataataactacgtcgggctggtgctgtttatggggctggcgatgagttactggtcataa

SEQ ID NO: 523936 - DNA, 2421 bp, Stenotrophomonas maltophilia
atgtccggctggccacgaatttactacaaattacttaatttaccattaagcgtactggtaaaaagtaagtctatcccagcagaacctgcgctggaattagggctcgatacgtcgcgccctattatgtacgttttgccttataactcgaaggcagacctgctaacgcttcgcgctcaatgtctggcgcacgatttacctgacccgcttgaaccgctggaagtcgacggtacgctgctgccgcgctacgtgttcatccatggcggaccgcgcgtgttcacctattacacgccgaaagaagagtccattaagctgttccatgattacctcgatctgcaccgcagcaaccccgatctggacgtgcagatggtgccggtgtcggtgatgtttggccgtcgtccggggcgtgaaaaaggggaagagaacccgccgctgcgtatgctcaacggcattcagaaattcttcgccgtctcatggctgggacgcgacagctttgttcgcttctcgccttccgtttcactgcgccgcatggcggatgaacacggtactgacaaaatcattgcgcaaaagctggcgcgcgttgcgcgtatgcactttgcacgtcagcgtctggcggccgttgggccacgtctcccggcgcgtcaggatctgttcaacaagctgctggcttccaaagcgattgcccgtgccgtagaagacgaagcgcgcagcaagaagatttcgcacgagaaagcgcagcagaacgcaatcgcgctgatggaagagatcgccgcgaacttctcctacgagatgattcgtctctccgaccgtattctcggtttcacgtggaaccgcctctatcaggggattaacgtccacaacgccgagcgcgtgcgtcagttagcacacgacggccacgagattgtctatgtgccctgccaccgcagccacatggactacctgctgctctcttacgtgctctatcaccagggcctggtgccgccgcatattgctgccggtatcaacctgaacttctggccagcaggtccgattttccgccgtctgggtgcgttcttcattcgtcgtaccttcaagggtaacaagctctactccaccgtcttcagggagtatctgggcgagctgttcagccgcggttattccgtggagtactttgttgaaggcggtcgctcccgtaccggtcgtctgctcgatccgaagaccggcacgctgtcgatgaccattcaggccatgctgcgtggcggtacgcgtcctatcacgctggtgcctatttacatcggttatgaacacgtgatggaagtgggcacctacgcgaaagagctgcgcggtgcgaccaaagagaaagagagtctgccgcagatgctgcgtggtctgagtaaattgcgcaacctcggtcagggctacgtgaactttggcgagcccctgcccctgatgacatatctgaaccatcatgttccggagtggcgcgagtctattgatcctatcgaagcggtacgtccggcctggctgacgccaacggtcaacggcattgcatccgagctgatggtacgcatcaacaatgctggtgcggcaaacgccatgaacctgtgttgtaccgcgcttctggcctctcgccagcgttcactgactcgcgagcagttgaccgagcagattgattgctatctggatatcatgcgcaacgtgccgtattccgtggattcgaccgtgccgtctgccaccgccagcgaactgatcgatcacgcgttgcagatgaacaagttcgaagtcgagaaagatacgattggtgacatcatcattctgccgcgcgagcaggccgtgctgatgacctactaccgtaataacatcacgcacatgctgatgctgccgtcactgatggcagccattattacccagcaccgccgtatttcgagtcaggagctgctgcgccatattcaggccatctatccgatgctgaaagcggagctgttcctgcgctggagtaacgatgagctggcggcagagctcgataaaatgtccgcagagatgcgtcgtcaggggctgattaccatcagtgatgacgaactgcatatcaatccgtcacgttcccgaaccttgcagctcctggcttccggtgcgcgtgagacgttgcagcgctacgccattaccttctggttattgagtgctaacccgtcaatcaaccgcggtacgctggaaaaagagagtcggacgctggcccagcgcctgtccgttctgcatggcattaacgccccggaattcttcgacaaagcggtattcagctccctggtgctgacgctgcgcgacgaaggttacattagcgatacgggcgatgctgagccggaagagacgatgaaggtttaccagatgctggcagagctgattaccgcggatgtgcgtttaacgattgagagttcgacgcagggcgagtga

SEQ ID NO: 523937 - DNA, 369 bp, Stenotrophomonas maltophilia
atggccaataacaccactgggttaactcgaatcattaaagctgccggttattcatggaaaggtttccgcgccgcatgggttaatgaagccgctttccgccaggaagcggttgccgcaatcgttgccgttgtcatcgcctgcttccttgatgttgatgctatcacccgcgtactgctcatcggatctgtccttctggtgatgatagtggaaattctgaatagcgctattgaggccgttgttgaccgaatcgggtcggaattccatgaactgtctggccgggcgaaagacatgggttccgctgccgtactgctgtcgattatcacggcggcgatcacctgggtcacgctactttggtcgcatttccgatga

SEQ ID NO: 523938 - DNA, 609 bp, Stenotrophomonas maltophilia
atgaaagcgttaacgaccaggcagcaagaggtgtttgatctcattcgggatcatatcggccagacgggtatgccacccacgcgtgcagaaattgcgcagcgtctgggcttccgttctcctaatgctgccgaagagcaccttaaggcgcttgcgcgtaagggcgtgattgagattgtttccggcgcctcacgcggcatccgtctgctggtggaagaagagagcggtattccgctggtgggtcgcgtagccgcaggtgaacctctgctggcgcagcagcacatcgaagggcactatcaggttgacccaggcatgttcaagccgagcgccgatttcctgctgcgcgttagcggaatgtccatgaaagatatcggtattctggatggcgatctgctggcggtacacaaaacccaggacgtgcgtaacggacaagtggtcgtggcgcgcattgatgatgaagtgacggttaagcgcctgaaaaaacaaggcaataccgtgcagcttctgcctgaaaacaatgaattctccccgattgtggtggatctccgcgagcagagcttctctattgaagggctggcggtcggcgttatccgcaacggtgaatggctgtaa

SEQ ID NO: 523939 - DNA, 1338 bp, Stenotrophomonas maltophilia
atggcattgctaacttctgccgataaggcgttgtggcgtcttgcgctaccgatgattttttccaatattaccgttcctctgctggggctggtggatacggcggtaatcgggcatctggattcgccgatttacctgggcggcgtcgcgattggcgcaacggcgaccagcttcctctttatgctgctactttttctgcgcatgagtacgacaggccttacggcccaggcgtatggtgcaaaagatcccctgcgtctggcgcgtgcgctggttcagccgctcattctggcgttcggtgctggcgcgttaatcgttctgttgcgtacgccgctgattgatcttgcgctccatattgtaggcggcagcgatgccgtactggaacaagcccggcggttcctcgaaattcgctggctcagcgcgcccgcttcactagcaaacctggtccttctgggctggctgctgggcgtgcagtacgcccgcgcgccagtgatcctgctggtggtgggcaacctgcttaacattgtgctcgatctctggctggtgatgggactgcacatgaacgtccggggcgcggcgctggctacggcaattgccgagtacgggacgctgctgatcggtttggggatggtctggcgcgtgctggcgatgcgcggtatcaccctggatctgctgaaatcggcctggcgcggcaatatgcgtaagctgctggcgcttaatcgcgacatcatgctccgttcgctcctgctgcaactctgcttcggcgcattaaccgtttttggtgcgcgtcttgggcctgagatcgtcgccgtcaacgcagtgctcatgacgttactgacctttaccgcttacgcgctggatggttttgcttacgccgtcgaggcgcattcagggcaggcttatggcgcgcgtgaaagcggccagttacgcgaagtctggcgtgcagcctgtcgtcaggcgggtctggtggcgctggtctttgctctggtttacgcctgttttggtgggcatattgtcgcgcttctcacctcgttgcccgcgctacgtgagctggccgatcgctacatcctctggcaggtagtattaccggtggtgggcgtgtggtgctatttgctggacggcatgtttattggtgcgacgcgaggggcggagatgcgcaacagtatggccgtcgctgcggcggggttcggcctgacgctgctgaccttgccgtatctcggcaatcatggtctgtggctcgcgctggcggtgtttctctcactgcgtggcctttcgctggccgttatctggcgtcgtcactggcgaaacaatacctggtttccagccccgcacgatatatcgtaa

SEQ ID NO: 523940 - DNA, 210 bp, Stenotrophomonas maltophilia
atgaataaagacgaaatcggcggcaactggaagcaattcaaaggtaaagcgaaagaacagtggggtaagctgacagatgacgatatgaccgtcattgaaggtaagcgcgatcagctggtaggtaaaatccaggagcgctacggttatgaaaaagatcaggcggaaaacgaagtcaaagactgggaaacccgtaacgactaccgctggtaa

SEQ ID NO: 523941 - DNA, 513 bp, Stenotrophomonas maltophilia
atggacaagtccacaaaagagctgttagcgcaagctgaaaagctctgtgcgcaacgcaatgtgcgcctgaccccgcagcgccttgaggtactgcgtctgatgagcctgcaacagggtgccatcagcgcttacgatctgctcgacctgctgcgtgaaagcgagccgcaggcaaaaccgccgaccgtctatcgggcgctggattttctgctggagcaagggtttgtgcataaagtggaatcaacaaacagctatgtgctgtgccatctttttgaccagcctactcacacgtccgccatgtttatctgcgatcgctgtggcgtggtgaaggaagagtgtgcggaaggtgtggaagatattatgcatacgctggcagccagaatgggctttgcgctgcgtcataatgtgatcgaagcccacggcttatgttctgcctgcgtggaggtggagtcatgccgtcatcaggatgcctgtcagcacgatcactctatcctggtgaagaaaaagccgcgttaa

SEQ ID NO: 523942 - DNA, 492 bp, Stenotrophomonas maltophilia
atgatgaaaagacctgactgtattcggcactggcgggacgtggaaggcgccgatgacgcaacgtatccggacagcaatgaacggttttctattggcgcgccgctggcccgcaagctgggtctcggccgcattggtattcaccatgaacggctgccgcccggacgccgtacttcttatccgcatgcggaaagcgacgaagaggagtttgtttacgttctggagggttaccctgaggcctggatcaatggttatctgtggaagcttgaacccggagacagcgtgggatttcctgccggcacgggggtgtgccatacctttatcaacaacaccgatgaagaggtgcgcttactggtggtgggtgaggctaataaaaaacataaccgcatctactatcccctcaatccggtgtatgccgtgacgcgcgaagaccactgggtagaccatccgcctcagttttttggcccgcacgatggaaaacctgggcgaaaataa

SEQ ID NO: 523943 - DNA, 603 bp, Stenotrophomonas maltophilia
gtgaaaaaacattttaaattttcgatggttagcattgctgtctccttttttatggcaaatcaggcgggagcagccaatacctggacggaagcgcgtagcgacgcaatgggcggaacgggtgtcgcggcagggagctatggcagcggggcgttaatcaaccccgcgttactggcaaaatctaagcccgaggatgatgtgacggtcattttgccgtccgttggcgtgcaggtgaccgatgaagacaatcttcaggacgagattgataccattaacgataaaatcaatcattacaaggacgtggttgatagtctgacccccattgatatcatcacggatccattaggttcgatcaatcagttccagggcgcagcgaaagatctcgctgatgagctggactacctgaaaggcaaaaccgcacacgccaccgcaggggcggggattgccgtcagtatcctaacgatgtcctttccgtggcctttatggccaaaggctatgcacatggccgcgtcagctcttcaatcgatcagcaggacattgattatctgcgcggcatacaacgaagcgatgcggtggctgccggtgtggcgctggatgccgcgctaa

SEQ ID NO: 523944 - DNA, 729 bp, Stenotrophomonas maltophilia
gtggcgctggatgccgcgctaaacggttccgatcagatcaccaaaaaccttaactctacggcgtctggccgggcggcgattgtgtccgactacggtattgcggtagcccgtcagttcgatcttggcggcgttccggtttccgttggcgtcacgccgaagctgcaaaaaacctggctctataactacactacctcaatctacgattacgacagtaataagtggaacgacagccgctaccgtaccgacgacactggcttcaacgtcgatgccggtattgctgctgatttcggtgaaaactggacggtcggcgtgagcgggcaaaacctgatgtcgcgcgatatcgataccaaagatatccgcattcgcaacgggcgcacaggagaggtggtgagttataaagacacctatcagatccgtccgctggtcactgccggggccgcctggcacaacgatctggtcacgctgaccgcagatggcgatctgaccgaaaccaagggctttaaaagcgaagacacctcccagtacgttggcgtcggtgccgaagtcacgccgctgagctggctggcagtacgcgccggttatcgtgcggatatgaaagggaacgacagcaacgtctttaccggcggtgtcggttttgcgccgttcaactccgtccatgttgacctgatggggctttatggcgaagacgagacctggggcgcaggggcacagttgagcatgacgttctaa

SEQ ID NO: 523945 - DNA, 942 bp, Stenotrophomonas maltophilia
atgctcgactggacggacagacattgccgctatttcctgcgtcagctctcccgccatacgctgctatacaccgaaatggtcactaccggcgcaattattcacggcaaaggcgactatctggcgtacagcgaagaggagcatccggttgcgctgcaactcggtggcagcgatccggctgcgctggcgcagtgcgcgaagctggccgaagaacgcggctatgacgagattaacctcaacgtcggttgtccgtccgaccgtgtgcaaaacggcatgttcggcgcgtgtctgatgggaaatgcgcacctggtggcggactgcatcaaagcgatgcgcgacgtcgtctctatcccggtcacggtcaaaacccgtatcggcatagacgaccaggacagctatgagtttctgtgtgatttcatcaacacggtatcagggaagggtgaatgcgagatgtttatcatccacgcccgtaaagcctggctctcaggcctcagcccgaaagaaaaccgcgagatcccgccgctggactacccgcgcgtgtaccagctgaaacgcgacttcccacacctgaccatgtcgatcaatggcggtattaagtcgctggacgaggccaaagcgcacctcgaacatatggatggcgtgatggtcggacgcgaggcgtatcagaatccgggcattctggcgacggttgaccgggaaatctttggcgttgagggtgctgacaccgatcccgtggccgtagtgcgcgccatgtatccgtacattgagcgcgagctgattcatggtacgtatctgggccacattacccgccatatgcttggcctgttccagggcattcctggtgcgcgccagtggcgtcgttatctcagcgagaacgcgcataaagccggtgcggatattgaggtactggaacacgcgctgcgtctggttgcggataaacgttaa

SEQ ID NO: 523946 - DNA, 243 bp, Stenotrophomonas maltophilia
atgctggaactactttttgtgattggcttctttatcatgctgatggtcacgggcgtgtcgctgctcggtattctggccgcgctcgttgtggccacggtggtgatgtttgtcggcggattatttgccctgacgattaaactcttgccgtggttacttctggcgattgcggtggtatgggccatacgggcgattaaatcaccaaaactgccgacttatcagcgtaataaccgcttccgttactaa

SEQ ID NO: 523947 - DNA, 984 bp, Stenotrophomonas maltophilia
atggcaacacgcattgagttccagaaacatggcgggccagacgtactgcaagccgtggagtttacccccacggcacctggcgagaacgaaatccaggttgaaaacaaagcgatcggcattaactacatcgatacctatattcgcggcggtctctatccgcctccgtcgatgccgagcggactgggcaccgaggcggccggtatcgtcagcaaagtgggcagcgcggttaagcacattaaggaaggcgatcgcgtggtgtacgcgcagtcggcgctgggcgcttacagctccatccataacgttccggccgagaaagcggcgcttctgccaaatgcgatcggcttcgagcaggctgccgcctcattcctgaaagggctgacggtctattatctgctgcgcaaaacctacgaaattaagcctgacgagcaattcctgtttcacgcagccgcaggtggcgtagggctgattgcctgccagtgggcgaaagccctgggggcgaagctgatcggcaccacaggcagcgcgcaaaaagcgcagcgcgcgctggacgcgggcgcatggcaggtgatcaactaccgggaagagagcatcgttgagcggctgaaagagatcactggcggcaaaaaggtacgcgtggtgtatgactcggtggggaaagacacctgggaatcttcgctggactgcctgcaacgtcgcgggctgatggtgagcttcggtaacgcctccggggctgtcaccggcgtgaacctgggcattctgaatcagaaagggtcgctgtatgtcacccgcccttccctgcaaggttacatcaccaaccgggaagaacttgaggaagccagcaacgagctgttctcgctgatcgccagcggggtgatcaaagtggatgtggcagaagcgcagaaatatccgctgaccgatgcgcaacgtgcgcatgaggtgctggagagccgggcaacccagggctcaagtctgttaattccctga

SEQ ID NO: 523948 - DNA, 1413 bp, Stenotrophomonas maltophilia
atggcaggaaacaaacccttcaacaaacagactgaaccccgtgaacgtgattatcaggtcgccgggttaaaagtcccgccgcactcgattgaagcggaacagtcggtgttgggcggtttaatgctggataacgaacgttgggacgacgtcgccgagcgcgttgttgcggaagacttctatacccgcccgcaccgccacatctttactgaaatggcgcgtttgcaggagtcgggcagcccaatcgacctgattacgctcgcagaatcgctggagcgtctgggacagctcgacagcgtcggcggatttgcctatctggcagaactgtcaaaaaacacgccaagtgccgcgaacatcagcgcttacgctgatatcgtccgtgaacgtgccgttgtccgcgagatgatctcggtggcgaatgagatcgccgaggccggtttcgatccccaggggcgcaccagcgaagatctacttgatcttgccgagtcccgggtctttaaaatcgccgaaagccgtgcgaacaaagacgaaggcccgaaaaacatcgccgatgtgctcgacgccaccgttgcgcgtattgagcagcttttccagcagccgcacgatggcgtgacgggggtgaacaccggttatgacgatctcaacaagaaaacggcaggtcttcagccatcggatttgattatcgtcgcggcgcgtccgtcgatgggtaaaacgacatttgcgatgaacctcgtcgaaaacgcagcgatgttgcaggataaaccggttcttatcttcagtcttgagatgccctcagaacagatcatgatgcgttctctggcatccctgtcgcgcgtggatcagacccgcatccgtaccggtcagctcgacgatgaggactgggcgcggatctccggcaccatggggattttgctggaaaaacggaacatctatattgatgactcctccggcctgacgccgacggaagtgcgctcccgcgcgcgccgtatcgcccgtgaacacggtggcatcggccttatcatgattgactacctccagctgatgcgtgttccgtcgctttccgacaaccgtacgctggagattgccgaaatttcccgctcactcaaagcgttagccaaagagctgcacgtgccggtggtggcgctgtcgcagctaaaccgttctctggaacaacgtgcagacaagcgcccggtcaactccgacctgcgtgaatccggctccatcgagcaggatgccgacttaatcatgttcatctaccgtgatgaggtttatcacgagaacagcgatctgaaagggatcgccgaaattattattggtaagcaacgtaacggccccatcggtacggtacgtctgacctttaacggccagtggtcgcgtttcgacaactatgccggtcctcaatatgatgatgagtaa

SEQ ID NO: 523949 - DNA, 1080 bp, Stenotrophomonas maltophilia
atgcaagcggcaactgttgtgattaaccgccgcgctctgcgacacaacctgcaacgtctgcgagaactggcgcccgccagtaagctcgttgcagtcgtgaaagcgaacgcttacggacacggtcttcttgagaccgcgcgaacgctccccgatgccgacgcttttggcgtcgcccgtctcgaagaagctctccgcctgcgcgcaggtggaattacgcaaccgattctgctcctcgaaggcttttttgaagcctcggacctgccgaccattgccgatcagcacctgcacacggcggtgcataacgaagaacagctggccgcgctggaaacggccgaactgagcgagccggtcaccgtgtggatgaagctcgacacgggcatgcaccgcctgggcgtgcgcccggagaatgccgaagcgttttatcaacggctgtgccagtgccagaacgtgcgtcaaccggtgaatatcgtcagccactttgcccgcgccgatgagcctgaatgcggcgcaacggaacagcagcttgatatcttcaccaccttctgcgaaggcaaaccggggatgcgctccattgcggcgtccggcggccttctgctgtggccgcagtcgcacttcgactgggcgcgtccggggattatcctgtatggcgtttccccgcttgagaacaaaccctggggaccggacttcggctttaagccggtgatgtcgctggtttcaaagctgattgccgtgcgtgagcacaaagcaggcgagccggtaggttacggcggcacctggacgagtgagcgcgacacgcggcttggcgtggtagcgatgggctacggcgacggctatccacgcgccgcgccaacgggcacgccggtgctggtcaatggtcgcgaagtaaagattgtcggccgtgtggcgatggacatgatttgtgtcgatctgggacccgacgcgcaggataaagcgggggacgatgcggtgatgtggggcgaaggcctgccggtagagcgtattgctgaaataacaaaagtgagtgcttacgaacttatcacgcgccttacctcaagggtcgcgatgaaatacgtcgactaa

SEQ ID NO: 523950 - DNA, 1194 bp, Stenotrophomonas maltophilia
gtgtttcagaaagtagacgcctacgccggcgaccctatcctctccttgatggagcgtttcaaagaagatcctcgcagcgacaaagtgaacctcagcatcggtctttattacaacgaggacggcatcattcctcaactgaaagccgttgccgaagccgaagcgcgtcttaacgcaaccccgcacggggcttcgctttatctgccgatggaagggttaaatacctaccgtaataccattgcgccgctgctgtttggtgcggatcacgcggtgctcgcgcaaaagcgcgtggcgactatccagacgctgggtggctcgggtgcgctgaaggtaggcgcagatttcctgaaaaagtacttcccggattccggcgtgtgggtcagcgacccgacgtgggaaaaccacgtggccatctttgaaggcgcgggctttaaggttgcgacctatccatggttcgacagcgaaaccaacggcgtacgcgttgatgcgctgctggaaaaactgaacaccctgccggagcgcagtatcgtattgctgcatccgtgctgccacaacccgaccggtgcggacctcaccaatgcccagtgggatgcggtgatcgaggtactgaaggcgcgtaacctgatcccgttcctcgacatcgcctatcagggctttggggcgggcatggaggaggacgcctacgccattcgtgcgattgccagcgcgggtctgcctgcgctggtcagcaactctttctcaaaaatcttctccctctacggcgagcgcgtcggcggtctgtccgtggtgtgtgaagacgccgaagccgcgggacgcgtactcggtcagctgaaagcgacggtccgccgtatttactccagcccgccgaattttggtgcgcaggtggtcgcgaccgtactgggcgatgatcagctgaaagccacctggcttgcggaagtggaaggcatgcgtaagcgcatcctgtcgatgcgtcaggagctggttaacgttctgaaagaggccgtgcctggacataactttgattatcttctcaagcagcgcgggatgttcagctataccggactgagcgcggcgcaggtcgatcgcctgcgggaagagttcggcgtctacctgatcgccagcggccgtatgtgcgtggcggggctgaatgctggcaacgtccagcgcgtggcgcaggcgtttgcatccgtaatgtaa

SEQ ID NO: 523951 - DNA, 714 bp, Stenotrophomonas maltophilia
atgcgcaagatcacactggcgctcagcgccgcctgcttattgttctcgcttaatagtaccgttgttgcgcgggcttctgcacccacgccgctttacaccggcaccaccgccgccattcttgccgaacaggcccccattcactgggtttcagtggcacaaatcgaaaacagcctgacgggtcgcccgccgatggccgtgggcttcgatattgacgataccgttctcttctccagccccggtttctggcgcggcaaaaaaacgtactccccggacagcgaagcctatctgaaaaacccggaattctgggaaaagatgaacaacggctgggatgagttcagtatcccgaaagaggttgcccgcgcgctgatcgccatgcacgtaaagcgcggcgacagcatttacttcgtgaccggacgtagccagaccaaaaccgaaaccgtctcgaaaacgctacaggatgattttctgatcccggctgccagcatgaatccggtcatttttgccggggaccaggaagggcaaaacaccaaaacccagtggctggaaaagaaaaatatcaaggtgttctacggtgattcagataacgacatcaccgcggcgcacgatgtgggagccagaggcatccgggtgttacgcgcctcgaactccacctaccggccgctgccaatggccggtaaatttggtgaagaggtgatcgttaactccgaatactga

SEQ ID NO: 523952 - DNA, 417 bp, Stenotrophomonas maltophilia
atgtggtatcaacagaccctgaccttaagcgcaaaaccacgcggatttcacctggtgacggacgaagtcattgggcaaatccgcgacctgtcgcgcgtcaaaacgggtttgctgcatctgctgcttcagcacacgtctgcttctctcacgctcaatgaaaattgcgatcccaccgtccggtctgacatggagcggcattttctgaaaaccgtcccggataacgccccgtatgaccatgattacgagggggcggatgatatgccttcgcacatcaaatcctctttgctgggggtctcgttgatgctgccggtccacaacggacggctactgctgggaacgtggcaggggatctggctgggagaacatcgcattcacggtggtacgcgtaaaattatcgcaacgctacaaggggaataa

SEQ ID NO: 523953 - DNA, 354 bp, Stenotrophomonas maltophilia
atgacaatttcggagatacttcagtactgcatgagcaagccgggcgcagaacagagcgttcacagcgactggaaagccacgcagatcaaagtgggtgatgtgttgttcgcgatggtaaaagaggttgagggacgtcctgcggcatcgctgaaaaccagtcctgaactggccgacttactgcgccagcagcacgatgatgtcaggccaagcaagcatctgaataaagcacactggagtacggtgtttctcgacggctcgctgccagattcgcaaatttactacctggtagatgcgtcgtatcaacaggcggtagaactgctgccggaaacgatccgacagcagctctccgtgtaa

SEQ ID NO: 523954 - DNA, 2823 bp, Stenotrophomonas maltophilia
atggataagatcgaagttcggggcgcccgcacccacaatctcaagaatatcaacctcataatccctcgcgacaaactcatcgtcgtgaccgggctttcggggtctggcaaatcctcactggctttcgacactttgtatgccgaaggacagcgtcgttacgttgaatcgctctcggcgtacgcgcgtcagttcctgtcgctgatggaaaaaccggatgtcgaccacattgaagggttgtctcctgctatctccattgagcagaaatccacatcgcataacccgcgttctacggtcggtaccattaccgaaatccatgactacctgcgtctgctgtatgcgcgcgtgggcgagccgcgttgtccggatcatgacgttccgctggcggcccagaccgtcagccagatggtggataacgtgctgtctcagccggaaggcaaacgcctgatgctgctggcgccaatcattaaagagcgtaagggtgaacacaccaaaacgctggaaaacctggcaagccagggctatatccgcgcccgtatcgatggcgaagtgtgtgacttgtcagatccaccaaagctggagctgcaaaagaaacacaccatcgaagtggtgattgaccgctttaaggtacgtgaagatctggcgacgcgtctggcggaatcctttgaaacggcgctggaactgtcgggcggcacggcggtggtgtcagacatggacgatgcgaaagcggaagagctgctcttctccgccaacttcgcctgcccgatttgcggctacagcatgcgcgagctggaaccgcgcctgttctcgtttaacaacccagcgggcgcgtgcccgacctgtgacggcctcggcgttcagcaatatttcgacccggaccgcgtgatccagaacccggagctgtcgctggcgggtggcgccattcgcggctgggataagcgtaatttttactacttccagatgctgaaatcgctggcagagcactataagttcgacgttgaagccccgtgggccagcctgagcgcgaacgtacataaagtgatcctgttcggttccggcaaagagaacatcgagttcaagtacatgaacgatcgcggtgacacttccgtgcgtcgccacccgttcgaaggggtgctgcacaacatggagcgccgctacaaagagaccgaatccagcgcggtgcgtgaggagctggcgaagttcatcagcaaccgctcctgcgccacctgcgagggtacacgtctgcgtcgcgaagcgcgtcacgtgtttgttgaaaacacggcgctgccgaccatctcagacatgagcatcggccacgcgatggacttcttcaacaacctgaagctctccggccagcgcgcgaaaatcgccgaaaaagtgctgaaagagatcggcgatcgcctcaagttcctcgtgaacgtcggcctgaactacctgacgctttcccgatcggctgaaacgctctccggcggtgaagcccagcgtatccgcctggcgagccagattggcgcgggcttagtcggcgtgatgtacgtgctggatgagccgtctatcggcctgcaccagcgcgacaacgaacgcctgctcggcacgctggttcacctgcgtaaccttggcaacacggtgattgtggttgagcacgacgaagacgccattcgcgccgcagaccacgtgatcgacatcggcccgggcgctggcgtgcacggcggacaggtggtggcagaagggacgctgaaagacattatggcggtgcccgagtcgctgaccggccagtacatgagcggcaagcgcaaaattgaagtgccaaaacagcgcgtggcggcgaacccggaaaaagtgctgaagctaaccggggcgcgcggcaacaacctgaaagacgtgaccctgacgctgcctgtcgggctgtttacctgcatcaccggcgtgtccggttccggtaaatcgacgctgatcaacgatacgctgttcccgattgcacagacggcgctgaacggcgcgacgctggccgagcctgcaccgtaccgcgacattcaggggctggagcatttcgacaaggttatcgatatcgatcagagcccgattggccgcaccccacgttccaacccggcgacctatactggcgtctttacgcccgtccgtgaactcttcgcgggtgtaccggaagcgcgttcgcgtgggtatacaccaggacgtttcagctttaacgtgcgcggcggccgctgtgaagcgtgccagggcgacggcgtaatcaaggttgagatgcacttcctgccggatatctacgtgccgtgcgaccagtgcaaaggcaagcgctataaccgcgaaacgctggagattaagtacaaaggcaagaccatccacgaagtgctggatatgaccatcgaagaggcgcgcgagttctttgacgccgtccctgcgctggcgcgtaagctgcaaaccctgatggatgtgggtctgacctatattcgtctggggcagtcagcgacaacgctgtccggcggtgaagcgcagcgcgtgaagctggcgcgtgagctgtccaaacgcggtaccggtcagacgctgtacattctggacgagccgaccaccggcctgcattttgcggatatccagcagctgctggacgtgctgcaccagctgcgcgatcagggcaacaccatcgtggtgattgagcacaacctggacgtgattaaaaccgcggactggattgtcgatctcggcccggaaggcggcagcggcggcggtgaaatcctcgtctccggcacgccagagaccgttgcagagtgcgaagcctcgcacaccgcgcgcttccttaaaccgttgctgtaa

SEQ ID NO: 523955 - DNA, 525 bp, Stenotrophomonas maltophilia
atggccagcagaggcgtaaacaaggtgattctcgtcggtaatctgggccaggacccggaagtacgctacatgccgagtggtggcgcagttgccaacattacgctggctacttccgaatcctggcgtgataaagcgaccggtgaaatgaaagagcagaccgaatggcaccgcgttgtgctgtttggcaaactggctgaagtggccggtgagtatctgcgtaagggttctcaggtctatatcgaaggccagctgcgtacccgcaaatggaccgatcaatccggtcaggaaaaatacaccacggaagtggtggtcaacgtaggcggcaccatgcagatgctgggtggtcgtcagggcggtggcgcaccggcaggtggcggccagcagcagggcggttggggtcagcctcaacagcctcagggcggcaatcagttcagcggcggcgcgcagtctcgtcctcagcagcagtctgctccggcaccgtctaacgaaccgccaatggacttcgacgacgatatcccgttctga

SEQ ID NO: 523956 - DNA, 282 bp, Stenotrophomonas maltophilia
atggcaaccattaccaccagcatggtgctcctgcgctggccgttgttgagcgcggttttgatgttcctggccagcacgttaaacattcagttccgaaagtccgactacgcaggtcttgctgtgattagcaccctgttagggttgggtgccgcatgctggttcgcgacaggtttactcggcattacgctggtggatatggccgccgtctgggaaaacattaaagtggtgatggttgaagccatgagccacactccgccagactggccgatggtgattacctga

SEQ ID NO: 523957 - DNA, 1419 bp, Stenotrophomonas maltophilia
atgacctgcgaaaagataatgaaagaaaaaagacgcgagattattaacgacagcatgcaggctctgcacgccctggcgaagctgatgccacaactcaacgcgcagtgttcgccggttgaaatgctggaaatcatcaacagcgcactgggggcaaatctctcgtgggtcagtgtcgaatccgcagacgggccgcgcgtggtttgtgccggcgacgtgacgtgtcacgccttcaacgtggcggattttcttgccagcaccctgttgcaacggcatcaccgcgcctggcgcgttatctactggaaagagcatattggccgggcggtattttcccctcagcacccgggctatgcgcggctgcaaagcggcgtgctgtgtaaactctcagcgcatggcagacagtgcagtggttatttctttttggcttttaatgaaaaactgacctcgttgccgatattgaaaaatatcgtggtggtattggtcgagaagctaaaagattattttgatgacatcatcgtgcgggaaaaaacagcgcaagagatgcagcgcgtcgtcacgcaatataaaactttatttgaacgtgctccggtattgatgaacgcctttgacagacataaccggtgtgtattgtggaacgccgaatgcgaaaaagtctttggctggagtatgactgaaatcggcgagcaccccgatccgctggccctgttttacccggatcccgaggagcgacagcgcgtgcaggagtcggttcgtttcgcaccacttaaggatatgtacgaatggcacccggtgcgtaaagacgggacgccgttaaccatcctctggtcaaacatccttttaccggataactccattctcaatattggcctcgatatcaccgaacgtaaaaaagcagaacagcagctgaccgtcaaagccaccacggacgatctgacgggctgtatgaatcgctcgacaattttacagcggctcaaaatggcgctggcagccagttcgccgcaggatgtcagtagccatttctgtctcctgatgttcgatctcgattatttcaagcagatcaacgatcggtggggacatcaggttggcgatgcggcattgattcacttttgcgaccgtattcgcgaagtgagcccggccgggtcggcactgggacgggtagggggcgaagagtttgttcttctgctggcgcgtacggatggtatggccgctacgttgctctcttcccggctgcgtgccgcgctgatctcaaaaccgctgcgtgtgggcgataaaacgctggtactctctttcagcgccggggtggttgaagtctgtcaggggcaacgggatacttctgccatactgatgcgtgccgatcaggcattatatgacgccaagcgtacgggaagaggaaaaacggttctggcgtctgattatttataa

SEQ ID NO: 523958 - DNA, 1566 bp, Stenotrophomonas maltophilia
atgaatcgtagcgcgcggcgcaaaatgctcaaagcggtcgggattatcatggtagttatgctgccggtgatgcttgcgctatggtttgcccagcttagagccgtgtcggaaatcagcgctcagctgcgcacgtttgctgaacttgctttaaacaaaactgaacgggttattcaacaggttgatatggcccgggaagacgcggaaaaatatcagggtaaagtgtgtacgccggagcatcgtcaatatatgttgaacgtttcccgcggtcgcctttttgttgccgatttaatttatgctgaaggccaggactttctctgctcgacccttattacgccggatcatccttacatcatccccgctgccaattacacacgtaaacccgacgttgctatctattattttcgcgatacgccattttttaatggttataaaatgatatatatgcagcgcggaaattatgtcgcagtggtcaacccgctttcgtacagtgaggtgatgtcagacgatcgttccctgtcgtggggagtgtatgacaccgtcagcaatgcattcttttctgtgagtcagaaagccaatatttctttattgcattcgatgctccgacatcaggaaacgacttttcagaaagatgaccgtttttataggatcgtaaaatcagagcagaggcccattgcggccatcgtttcaacctccaatgcccgtttttataaaacgctttatcatcaggctactctgacgctaccgctggggatgatttgcagcattattattttgctggtgtggtcgcgaacacaccgtgaattcaattcgcctggccgacttctgcaccgggcgctgaataaacgccagctgtgcgtccattatcagcccattattgatataaaaaataaccagtgcgtgggagcagaggcgttgttgcgttggccaggattcaacggtcaggttatgagcccggcggaatttattcccctggccgaaaaagaggggatgattgagcgcattacggattacgtcgtggaggaggtgttcaccgatctgggccattttcttgccgctcaccccgatctgtatgtctcgattaacctgtcggcgtcggattttcactcttcgcgtcttatcgccctgatctccgacaaagcccgcttttactcggttcgcgcgcagcaaataaaaattgaggtgacggagcgggggtttattgacgtgccgaaaaccacgccggtcattcaggcgtttcgccaggcggggtatgaagtggcgattgatgatttcggaaccggctactctaacctgcataacctctattcgctgaacgtcgatatcctgaaaatcgacaaatcttttatcgataccttaaccaccaacagcaccagccacctgattgccgagcacatcattgagatggcgcaaagcctgcggctgaaaaccattgcggaaggggtcgagacgggggagcaggtgagctggctgctgaagcgtggcgtgcagtattgtcagggatggcacttcgcgaaagcgatgccgccccaggcatttatggcctggcagcagcaacccttgcgttaa

SEQ ID NO: 523959 - DNA, 327 bp, Stenotrophomonas maltophilia
atgtcgcatcagcaaattattcagacgcttattgaatggattgatgaacatatcgaccagccgttgaacattgatgtggtcgctaagaagtcgggctattcgaaatggtatttacagagaatgttccgcaccgtaatgcatcaaacgctgggtgactacattcgccagcgcaggctcctgctggcggcgcaggcgttacgctcaacgcagcggcccatttttgatatcgcaatggatctgggctatgtgtcgcagcagaccttttcccgcgtcttccgccgcgagtttgaccgtacgccgagcgactaccgccatcagctcaattaa

SEQ ID NO: 523960 - DNA, 459 bp, Stenotrophomonas maltophilia
atggaaaagagattaccgcgcatcaaagcgctgttaacccccggtgaagtggcgaaacgaagcggcgtggcggtgtcggcgctccacttctatgaaagcaaagggttaataaaaagtatccgtaacgccggaaaccagcggcgctatacccgcgatgtgctccgctacgtggcgattatcaaaattgcgcaacgtatcggcatccccctggctaccatcggcgacgcgttcggcgtattgccggaaggacactcgctgagcgcgaaagagtggaagcagctgtcgtcccagtggcgagaagaactggatcgtcgtattcacacgctggtggccctgcgcgatgaactggatggctgtattggttgcgggtgtttatcacgtagtgattgtccgctgcgtaacccgggtgacaggctgggcgagcagggaacaggggcgcggttgctggaggaggattga

SEQ ID NO: 523961 - DNA, 672 bp, Stenotrophomonas maltophilia
atgctaacggtccaccaccttaaccagtctcgttcccatcgtgtcctctgggcgctggaagaactgggtctgacatatgagattgtgcgctaccagcgcgaaaaaaccatgctcgcaccagacgcgctcaaaaaagtgcatccgctgggaaaatccccggtactggaagataacggactggttctggctgaatcaggcgcgattctggaatatcttcaggaaacgtacgattcggcgtcacgattcaaaccgttagatcccgcccataaagtgcagtatcgcttctggctgcattacgccgaaggatctttgatgccgctgctgttaatgaagctggtatttaacagcctcggcaaaccccccgtcccgtttggcctgcgcacgctgggtaaggcgctagggcagggggtgcaaaaagcgtatctcaaccgccagctggaaacgcatgcgcgctttattaacgatcatcttgccgaaaacagctggtttgccggcgacacgctgaccatggcggacatccagatgagttttcccctcttcgccctgctggcgagaggtggcatcgacaatctcgaccacatagcggcgtggaaacagagagtggaggcacgtccgggctggcagacaacacttgcgaaaggcggcccgctgacgatacccggcgggggatga

SEQ ID NO: 523962 - DNA, 1350 bp, Stenotrophomonas maltophilia
atgtctacgccatctgcgcgtaccggcggttcacttgacgccatgtttaaaatttctgctcgcggcagcaccgtgcgccaggaagttgttgccggtctgacgacgtttctggcgatggtgtactccgtcatcgtggtgccgggcatgctcggcaaagccggtttcccgccagcggcggtcttcgttgccacctgcctggttgcgggtgtgggttcgattgtgatgggcctgtgggcgaacctgccgctggcgatcgggtgcgccatctccctgaccgcgtttaccgccttcagcctggtgctgggccagcatatcagcgtccccgtagcgctcggcgcggtgttcctgatgggtgttctgttcaccgtgatctctgctaccggcatccgtagctggattttgcgcaacctgccgcagggcgtggcgcacggcaccggtatcggcatcggcctgttcctgctgctgattgccgccaacggcgtgggtctggtcatcaagaacccgctggacggcctgccggttgcgctgggtaacttcgcgagcttcccggtaattatgtcgctggtgggtctggcggtgatcattggcctggaaaaactgaaagtgccgggcggcattctgctgaccattatcggcgtgtccatcgtcggtctgatcttcgacccgtccgttcatttctccgggattttcgccatgccgtcgctgagcgatgacaacggtaactccctgattggtagcctggatattgtgggcgcgctgaatccggtgatcctgccaagcgtgctggcgctggtaatgaccgcggtgtttgacgccaccgggaccatccgcgcggtggccggtcaggctaacctgctggacaaagacggccagatcattgacggcggcaaagcgctgaccaccgactccctgagcagcgttttctctggtctggtgggtgcagcgccagcggcagtgtacattgagtccgcagcgggtacggcggcaggcggcaaaaccggcctgacggctattaccgttggcgtactgttcctgctgatcctgttcctctctccgctctcttatctggtgccagcttacgcgaccgcacctgcgctgatgtacgtcggcctgctgatgctgagcaacgtggcgaaaatcgactttgctgactttgttgatgccatgtccggtctgatcaccgcggtatttatcgtgctgacctgtaacatcgtgaccggcattatgatcggtttcgcctcgctggtgattgggcgtctggtctccggtgagtggcgcaagctgaacatcggtaccgttgtcatcgccgttgcgctggtggcgttctacgcgggcggctgggcaatttaa

SEQ ID NO: 523963 - DNA, 1647 bp, Stenotrophomonas maltophilia
atggaaattttcttcacaatactcatcatgacccttgtggtctcattatccggggtggttacacgcgtactgcccttccaggtccccctgcctttaatgcaaatagctatcggcgcgctgctggcgtggccgacgttcggtctgcacgtggagttcgatccggaactgttcctcgtgctgtttatcccgccgctgctgtttgccgatggctggaaaacgccgacgcgcgaatttcttgagcacgggcgagagatcttcggtctggcgctggcgctggtggtcgttaccgtggtcgggattggtttcctgatctactgggccgtaccggggatcccgcttatacccgcctttgcgctggctgccgtgctgtcgccgaccgacgccgtggcgctgtccggcattgtgggcgaagggcgcattcctaagaaaatcatgggcattttgcagggcgaggcgctgatgaacgacgcttccggcctggtcgccctgaagtttgccgtggcggtagccatgggcaccatggtctttaccgtcggcggtgcaaccctcgaattcttcaaggtggcgattggcggtatcctcgcaggctttgttgtaagctggctgtacggtcgttcgctgcgcttcctcagccgctggggcggcgatgaaccggcgacgcagatcgtcctgctgttcctgctgccgttcgcctcttacctgattgccgaacatatcggcgtgtcgggcattctggcggcggtagccgcggggatgaccatcacccgttccggcgtgatgcgccgggcgccgctggcgatgcgtctgcgcgcgaacagtacctgggcgatgctcgagtttgtctttaacggcatggtgttcctgctgttgggcctgcaactgccgggcattatggaatcttcgctgatcgcggccgaagcggatccaaacgttgaagtctggatgctgtttaccgatatcgtactcatctacctttcgctaatgctggtgcgtttcggctggctgtggacgatgaagaagttcagcgttcgcttcctgaccaaaaagccgatggagttcggctcctggaccacgcgcgagctgctgattgcctctttcgcgggcgttcgcggggcgattacccttgctggtgtgctctccattcctctgcttctgccgacgggcgacgtcttcccggcgcgctacgagctggtgttcctggcggcgggcgtgatcctcttctccctgtttgtcggcgtaattatgctgccgattctgctgcagcatattgatgcgggtgacacctcgcagcagcataaggaagagcggattgcccgtgcggcgacggcggaagtggcgattgtcgccatcgagaagatggaggagcgtctggccgccgatgccgaagagaacattgataaccagctgctgaaggaagtcagttcacgcgtgatcggtaatttgcgtcgccgtgctgacggacgtaacgacgtggaaagttcgttgcaggaagagaacctcgagcgccgtttccgcctggcggcgctgcgctccgagcgtgccgagctgtatcacctgcgcgcgacgcggcagatcagcaacgagacgctgcaaaagctgctgcacgatctggatctgctggaagcgttgttgatagagaatcagtag

SEQ ID NO: 523964 - DNA, 888 bp, Stenotrophomonas maltophilia
atggacataagaacgctgcgctattttgtcgaggtggttcgccagcaaagttttacccgcgcagcggagaagttattcgtaacccagcctaccatcagtaagatgctgaaaaacctcgaagatgagctgaactgtactctgctgatccgcgacgggcgcaagctgctgctgaccgataccggtcgcgtggtgttcgagcgcgggctggcaattctggcggagttccgccagctggaggccgagcttggggacatcaaccacctgacaaaagggctgctgcggctcggcattccgccgatggtcggcatgatgatggccgggccgattagcctgtttcgccagcgctatcccggcgttgagctaaaaatttctgaatttggcggcctgaccgtgcagcaggcggtgatgaacggtgaactggacgtggccatgacggcccttcccgtggaagaagagagcgggctggcaacgctgccgctgttcagccacccgctgtgcgtgctggtgccgcgctccggcgactggctgaagattgaatcagtaaaacccgagctgctcggcgaacacccgctgctgatttacaacgaagatttcgccttaagccgccagctgatggcgctgtttaaccagcacaacgtaaagccgcgcattacggtgcgcagcggccagtgggattttctggcagcgatggtacaggcgggcgtggggatagccattctgccgcagccgatctgcgagcggctggataaaaacacgctgcgctggatcccgctggagagcgatctgcactggcagttagggatgatctggcgtgaaggggtgtatctgtcgcacagcgcacaggcgtggttgcaatgctgtgaggggttttgggtaccctcaccctaa

SEQ ID NO: 523965 - DNA, 411 bp, Stenotrophomonas maltophilia
atggccgtggcgttaagccgtgttacgcctgccgttgttcaacgactccaggtaccggttcaggtactgctctacgcgggactgtttgtttttgctgaatatcttgtcgactggctgaacctgcctttacccgccaacctggtgggaatggtgctgatgctgacgctgatcctctgtcgcgcgttgccccttagctgggtgcgggccggtgcgcgctggctgctggcggagatgctgctgttcttcgttccggccgtggtggcggtggtgaattatgcgcaactgctgatggtcgacggctggcgcatctttgcggttatcgccctgagcacgctgatggtgctgggcgccaccgcctgggtggtggataaagtgtatcgctttgaaatcagcaggcagaagcatgactaa

SEQ ID NO: 523966 - DNA, 315 bp, Stenotrophomonas maltophilia
atgccgaacacgccggtcaccaccacaaacagcgccaccagatccggctgtccgccgagcggtttagccgccgccagcgcgaacggtgtggtcaccgagcgtaccgccaggctgcgctggatttcatcagacagggtaaacagccgcgccagccagaccgagctgcacaccgccactaccgtcgcggtgacgacacccgcgctgagcgacatccagtggcgtttaataattgccaggttgtcatacaccggcaccgcaaaggcgatagtcgccgggccgagcagccacagcagccagtgggattcaccaatgtag

SEQ ID NO: 523967 - DNA, 1431 bp, Stenotrophomonas maltophilia
atggcgactgacgcctttttcgttgcgttcaagctgccgaacctgctgcgccgtatttttgccgaaggggctttctcacaggcatttgtcccgatcctcgcggaatataaaagcaagcagggcgaagatgccacccgcgtctttgtggcgtacgtttccggtttactgacgctggcgctggcgatcgtgaccgtactggggatgctggcagcgccctgggtaatcatggtaacggcgccgggctttgccgacacggcggataaatttgccctgacgacgcaactgctgcggataaccttcccctatattctgctgatttcgctggcgtcgctggtgggtgccatcctgaatacctggaaccgcttctccgtgccggcctttgcccccacgttccttaacgtcagcatgattggctttgcgctgttcgccgcgccgcattttaacccaccggtgctggcgctggcctgggccgtgaccgtcggcggggtgttacagcttgcttaccagctcccgcacctgaaaaagatcggcatgctggttctgccgcgcattaatttcaaagatgcgggcgcaatgcgcgttatcaaacagatgggaccggcaatactcggcgtgtccgtcagccagatctcgctcatcatcaataccatcttcgcctctttcctggtgtcgggctcggtgtcctggatgtactacgccgaccggctgatggagtttccatccggggtgctgggcgtggcgctggggactattctgctgccgtcgctgtcgaaaagtttcgccagcggcaaccacgatgaatactgccgcctgatggactggggtctgcgtctctgttttctgctggcgctgccaagcgcggtggcgctggggatcctggcgaaaccgctgacggtgtcgttgttccagtatggaaaattcaccgcctttgatgccgccatgacccagcgtgcgctcgtagcctactcggtggggctgatggggctgattgtcgtgaaggtgcttgcgcccggcttctattcacgtcaggacatcaaaacgccggttaagattgccattgtgacgctgatcatgacgcagctgatgaacctggcgtttattggtccgctgaaacacgcgggtctgtcactgtcgattggtctggcggcctgtctcaacgccgggctgctgtactggcagctgcgtaagcaggatatcttcaccccgcagccgggctgggcaagcttcctgctgcgtctggcgatcgcggtagtagtgatggcggccgcgctggttggcatgttgtatgtcatgcctgaatgggcgcagggcaccatgccttaccgcctgatgcgtctgatggccgtggtggtggtcggggtggtggtgtactttgccacgctggcggtgcttggcttcaaggtgaaagagtttacccgccgcacggtataa

SEQ ID NO: 523968 - DNA, 426 bp, Stenotrophomonas maltophilia
atgagtcgactgtcagaaatactggatcagatgacggtggtcctgaacgacctgaaaacggtgatggacgcagaacagcaccacctctcttctggtcaaatcaacggcagcgcgttgcaacgcattactgaagataaaagctcgctgctggcgaccctggattatctggaaaaacagcgacgcgctgagcaagacacgaaacgcagcgccaatgatgagatcaacgaacgctggcagaccattacagaaaaaacccagcatcttcgcgatctcaaccagcataacggctggctgctggaaggtcagattatccgtaatcagcaggcgcttgaggtgttaaagccctataaagagccggggctgtacggtgcggatggtcaaacggccacggcacgtatcacgggcgggaaaaagatttcgatttga

SEQ ID NO: 523969 - DNA, 294 bp, Stenotrophomonas maltophilia
atgagcattgatcgtacatcagccctgaagccggttagcactgtacaacctcgcgaaacgaatgaggctgccccgcaaaaaacgcgtctggaaaaaacctcgacggctaacagcaccagcgtcacgctgagcgatgcgcagtcgaagctgatgcagccaggcagcagcgatatcaacatggaacgagttgaagcgctgaaaacggctatccgtaacggcgaactgaaaatggataccagcaaaatcgctgatgcgctgattcaggacgcacagagtttcctccagagtaactaa

SEQ ID NO: 523970 - DNA, 660 bp, Stenotrophomonas maltophilia
atgcggacttttaaacgtggccttgcggcgaccctgctgcttttgagccctcttgtgcaggctgaggggttagagaaccagctcaatgcattctttgcgcagaagctggccggtttcagcgatgacgtacgcgtgaccgtacgcaccccgcctaacctttacccttcctgcgaagccccgtcatttagcgtgaccggcagcacccgattatggggcaacgtgaatgtgctggcgcgttgcgccaacgaaaaacgttatttacaggttgcggttcaggcgacaggcaattatgttgtcgccgccgttcccattccccggggcagcctgctgcaaccagacagcgtaacgctgaagcgaggccgtctggatcagcttccaccgcggacgatgctggatattaaccaggctcaggaggcagtcagcctgcgcgatgtcgctcctggacaggcgatacagctctctatgctgcgccaggcgtggcgggtgaaggcgggacaacaggtgatggtggtcgccaatggcgaaggctttagtatcaacagtgaaggaaaagcgctgaataatgccgcagtggcgcaaaatgcccgggtcagaatgtcctcaggccaggtggtcagcggcacggtcggtcctgatgggaatattctgattaacctgtaa

SEQ ID NO: 523971 - DNA, 417 bp, Stenotrophomonas maltophilia
atgctcgataaactcgacgccgcgttacgttttcagcaggaagcgctcaacttacgcgcccagcggcaggaaattttagccgccaatatcgccaacgcggacacccccgggtatcaggcgagcgatattgatttttccagtgaactcaaaaaagtgatggagcgtggacgtgccgaagggacgggtgtctcacttgccctgacatcctcacggcatattcccgctcaggcgatgaccgcgccatcaactgacttactttatcgtgtccccgatcagccctcgcttgatggcaacaccgtcgacatggaccgggaacgcacacagtttgccgataacagcctgcaataccagacaggcctgacgctactcggcgggcaaatcaaaggcatgatgaccgtcctgcaggggggcaattag

SEQ ID NO: 523972 - DNA, 303 bp, Stenotrophomonas maltophilia
  misc_feature (229)..(238): n is a, c, g, or t
atggccttgctgaatatttttgatatcgccggttcggcattaacggcgcagtccaaacgactgaacgtggcagccagtaacctggccaacgccgacagcgtgaccggacctgacggacaaccgtatcgcgctaaacaggtcgtcttccaggttgatgctgcaccgggtgcggcaacgggcggcgtgaaagtggcggacgtggttgagagccaggcgcccgacaagctgnnnnnnnnnncagtgcgaccggttccagctctctcaccgggagcaatgcctccgatttacagagcagctttctga

SEQ ID NO: 523973 - DNA, 582 bp, Stenotrophomonas maltophilia
gtggcacagctgaaaaatcaggacccgaccaatccgatgcagaacaacgaactgaccacgcagcttgcgcagatcagtaccgtcagcggcattgagaaactgaacaccacgctcggctcggtctccggtcaaatcgataacagccagtccttgcaggccgccaacctgatcggtcacggggtgatgatcccggggaccacgattctggcgggcaccagcaccaccgatggcacgtccaccaccaccacaacgccgtttggcgttgagttgcagcaaccggccgacaaagtcaccgccaccatcaaagacgccagcggcaacgtggtgcgcacgattgagattggcgagcttaaagcgggcgttcatacctttacctgggatggcagcctgaccgacggcactaaagcgcctaacggctcgtatcaggttgcgattagcgccagcaacggcaccacgcagctggtggctcagccgctacagtttgccctggttcagggcgtcatcaaaggtagcgatggcaacaaactggatttgggtacctccggtaccaccacactcgacgaagttcggcagattatctaa

SEQ ID NO: 523974 - DNA, 1251 bp, Stenotrophomonas maltophilia
atggccttttctcaagcggtcagcggcctgaatgctgcggccaccaacctggacgtcattggcaacaacatcgccaactccgcgacctatggttttaaatccggttctgcgtcttttgcagatatgtttgcaggctctaaagtgggcctgggcgtgaaggttgcgggtatcacccaggacttcaccgacgggacgaccaccaacaccggtcgtggtctggatgtcgccatcagccagaacggtttcttccgtatggtggatgccaacggttccgtgttctacagccgcaacggccagttcaagctggatgaaaaccgtaacctggtgaacatgcaggggctacagttaaccggttatccggttgccggcacgccgccgacggtgcaaaccggtgcgaatccgcaggcgatcaccatcccaacgacgctgatggcggcgaagtccaccaccacggcctctcagcagatcaacctgaactccaccgataccgcgccaaccgtcgcattcgacccggccaaccctgactcttacaacaagaaaggcaccgtgacggtgtttgacagccagggtaatgcgcacaacatgaacctgttctatgtcaaaacaactgacaacaaatgggatgtgtatacccaggatggcagcgtagcgggttctcctgcaaaaaaagcggcacagatgagcttcgacagtaacggtaacctggcgggtgtttataactacgacgctgctggcgtgataagcgctacgccaaacgccaccccagctatcaacattactactggcatcattagcggtgcggagcctgccgagttctctctgagcttccagagctccatgcaacagaacaccggtgcgaacaacatcgtggcgacgagccagaacggctataagccgggcgatctggtgagctaccagatcaacgatgacggcaccgttgtcggtaactactccaacgaacagacccaggtgctgggccagatcgtgctggctaactttgccaacaacgaaggcctgaagtccgaaggggataacgtctggtccgccacgcagtcttccggtgttgccctgctgggtaccgcgggttccggtaacttcggcacgctgaccaacggcgcgcttgaagcctccaacgtcgatctgagtaaagagctggtgaacatgattgtcgcgcaacgtaactaccagtccaacgcgcagaccatcaaaacccaggatcagatcctcaacacgctggttaacctgcgttaa

SEQ ID NO: 523975 - DNA, 756 bp, Stenotrophomonas maltophilia
atggatcacgcaatatatacagcgatgggggctgcaagccagacgctcaatcagcaggctgttaccgccagcaacctggcgaacgcctccacgcctggttttcgtgcacagctcaacgcactgcgtgcggtgccggtagaagggctgtcattgcccacgcgtacgctggtcaccgcctccacgccgggcgccgacatgacgccaggccagatggattacaccgcgcgtccgctggacgttgcccttcagcaggacggctggctggcggtgcaaacggctgacggcgcagaagggtatacccgcaacggtaacattcaggtgagcgccaccggacagctgacgattcaggggcatccggtgatgggcgaagccggtccgctgacggtgccggaagggtcagagctgaccattgcggcagacgggacgatctcggcgttgaatccgggcgacccggcgaacaccgttgcgcctgtcggtcgtctgaagctggtgaaagcggaaggcaatgaagtgcagcgtggtgatgacggaatgttccgtctgactcaggcggcgcaggccacgcgtggcgccacgttacaggccgacccgaccatccgcgtgatgtccggcgtgctggaaggcagtaacgtcaaaccggtcgaagccatgaccgacatgatcgccagcgcccgccgcttcgaaatgcagatgaaaatcatcagcagcgtcgatgaaaacgcaggcaaggctaaccaacttctggctatgagttaa

SEQ ID NO: 523976 - DNA, 783 bp, Stenotrophomonas maltophilia
atgatcagttctttatggatcgcgaaaaccggtctggacgcacagcaaaccaatatggatgtaattgccaacaacctggcaaacgtcagcaccaatggtttcaagcgccagcgtgcggttttcgaagatttgctttatcaaacgattcgtcagccaggggcgcagtcttctgagcaaaccacgctgccgtccggtctgcaaattggtaccggcgtacgccctgtcgccaccgagcgtctgcacagccaaggcaacctgtcccagaccaacaacagcaaagacgttgccatcaaaggtcagggtttcttccaggtgcaactgcctgacgggacctccgcctatacccgcgatggttcgttccaggtggatcagaatggtcagctggtgacggcgggcggcttccaggttcagcctgcgatcaccatcccggcgaacgcgctgagcatcaccattggccgtgacggtatcgtcagcgtcactcagcaaggtcaggccgcgccggttcaggttggtcagctcaacctgacgaccttcatgaacgataccggactggaaagcatcggtgagaacctctacaccgaaacgcagtcttccggcacgccaaatgaaagtacccccggcctgaacggtgcggggctgctgtaccaggggtatgtggaaacctcgaacgttaacgtggcggaagagctggtgaatatgatccaggtccagcgcgcctatgaaattaacagtaaagcagtgtcgacgaccgaccagatgctgcaaaaactgacgcaactctaa

SEQ ID NO: 523977 - DNA, 699 bp, Stenotrophomonas maltophilia
atgcaaaaaaacgcggcgtttcgttatccgatcctgactgttctggctgtcaccctcaacgggtgtgcctggatcccgtctaaaccattggtacagggtgcgactaccgcccaacccgttcccggcccctcgccggtggtgaacggctctattttccagactgcgcagccgattaactacggttatcagccgctgtttgaagaccgtcgtccgcgtaacgtcggcgatacgctgaccattgtgttgcaggaaaacgtcagcgcgagcaagagctcgtcggcgaacgccagccgcgacggcaaaaccaattttggcttcgacaccgtaccgcgctatctgcaagggctgttcggcaacgcccgtgcggatgtggaagcctccggcggcaacacctttaacggtaaaggtggcgcgaacgccagcaataccttcagcggaacgctgacggtaacggttgaccaggttctggtgaacggcaacctgcacgtggtgggcgaaaaacagatcgccattaaccagggtacggaattcattcgcttctccggtgtggttaaccctcgcaccatcagcggcaccaacaccgtaccgtccacacaggtggcggatgcgcgcattgagtacgtcggcaacggctacatcaacgaagcgcaaaatatgggctggctgcaacgcttcttccttaacttatcgccgatgtaa

SEQ ID NO: 523978 - DNA, 1113 bp, Stenotrophomonas maltophilia
  misc_feature (498)..(507): n is a, c, g, or t
atgtataaatttctcttcgccgtggcgctgtcgctggtcgctaccgttgcgcaggccgatcgcattcgcgatctcaccagcgtgcagggcgtgcgcgaaaactccctgattggctacggcctggtggtggggctggatgggacgggtgaccagacgacccagacgccgttcaccacccagagcctgaacaacatgctctctcagctcggtattaccgtaccggcggggaccaacatgcagctgaaaaacgtggcggcggtgatggtgaccgcgtcttatccggcctttgcgcgtcaggggcaaaccatcgacgtggttgtctcgtcgatgggtaacgccaaaagcctgcgcggcggtacgttgttgatgacgccgctgaaaggcgtcgacagccaggtgtatgctctggcgcagggcaacattctggttggcggggcaggtgcgtcggcgggcggcagcagcgtgcaggtgaaccagctgaacgggggacgtattacnnnnnnnnnnattaccaacggcgcgatcatcgaacgtgagctgccgacccagttcggcaccggcaacaccattaacctgcaactgaataacgaagacttcacgatggcgcagcagattgctgacaccatcaaccgcagccggggttacggcagcgccaccgcgctggatgcccgcaccgtgcagatccgcacgtcaaccggtagcagcaaccaggtgcggatgctggccgatatccagaatatggaagtgaacgtgtcggtgcaggatgcaaaagtcattatcaactcccgtaccggatcggtggtgatgaaccgcgaagtgacgctggacagctgcgccgtggcgcagggcaatctctccgtcacggttaaccgctcggccaacgtcagccagccggataccccgtttggtggcggtcagacggtagtgaccccgcaaacgcagattgatttacgacagagcggcggatcgttgcagagcgtgcgctccagcgccaacctgaacagcgtggtacgtgccctgaacgcgctgggtgcaacgccaatggatctgatgtccattctgcaatccatgcaaagtgcaggctgcctgcgcgctaaactggaaatcatctaa

SEQ ID NO: 523979 - DNA, 966 bp, Stenotrophomonas maltophilia
  misc_feature (667)..(676): n is a, c, g, or t
atgctgaccgatagcaaactgttgaccagtgccgcctgggatgcccagtcgctcaacgagctcaaaaccaaagcgggcaaggatccggcggcgaatatccgcccggttgcccgtcaggtggaaggcatgttcgtgcagatgatgttgaaaagcatgcgtgaaaccctgccgaaagatggcatgttcagcagcgattccacacggctttacaccagcatgtacgatcagcagattgcccagcaaatgaccgccggaaaggggctcggcctggcggacatgattgtgaaacagaccgcagccgctcaggggctgccacctgaagaggctccgccgcaggtgccgctgaagtttgatctggaaaaggtgaccagttatcaaaatcaggcgctgacccagatggtgcgtaaggcgatgccgaagccgacagaagcgcgtgacgagccgctctccggcgacagcaaagacttcctggcgcagctctccctgccggcacgtcttgccagtgaagaaagcggcgtgccacaccatctgattctggcgcaggcggcgctggagtcgggctgggggcaacgtcagatccgcagggagaacggcgagccgagcttcaacatctttggcgtgaaggccacctccagctggaaggggccgaccacggaaattaccaccnnnnnnnnnnccaccgaatatgagaacggtgcggcagtgaaggtgaaagccaaattccgcgtctacagctcgtatctggaagcgttgtcggattatgtcgggctgttgagccggaatccgcgctacaccgccgtgacccaggccaccacgccagagcagggcgctcaggcattgcagaatgccggctacgcgaccgatccaaactatgcacgcaagctgaccagcatgatccaacagctgaaatccatgtctgagaaggtcagcaaagcgtatagcacagatctcgaaaatctgttctga

SEQ ID NO: 523980 - DNA, 1641 bp, Stenotrophomonas maltophilia
atgtccagtttgattaacagcgccatgagtggcctcagtgctgcgcagtcggcactcaataccgtcagtaataatatttcaagctacaacgtggcaggttatacccgccagactaccattctgggcgcatcaaacagcaccctgaccggcggcggctgggtgggtaacggggtctatgtctccggcgttcagcgtgaatatgatgcgtttattaccaaccagctgcgcgcggcgcagaaccagagcagcggcctgaccacgcgctaccagcagatgtcgaaaattgacgacgtgctgtcggataccacgaactcgctttctgccaacctccaggatttctttaaaagcctgcaaacgctggtgagtaacgcagaagatccggctgcacgccagacggtactcgggaaggcagatggtctggtaaaccagttcaaaactaacgatcaatatctccgcgatcaggatgcgcaggtcaatacggcgatttctaccagcgtcgatcagatcaataactacgcgaagcagattgctaaccttaacgatcagatttcccggctgactggcgtaggggcgggcgcatccccgaacgaactgctcgatcagcgcgatcagctggtgagtgagctgaacaaaattgtcggtgtggacgtgaccgtacaggacagcggcacctacaacatctctatcgccaacggctacaccctggtacagggcagcaacgccagccagctggctgcggtgaaatccagcgcggaccctgcacgtacaacgattgcgtatgtggatgccgcagcgggcaacgtggagatctcggaaaaacagatcaccacggggtcgcttggggggctgttaacgttccgttctcaggatctggatcaggcgcgaaatacgcttaaccagatggcgctggcgtttgcggatgccatgaatacccagcaccaggcgggctttgatgccaacggggataaaggcggcaagctgtttgattttggctccccggcagtgctgagtaacggtaagaacaccggaagcgcgtccgtgacggcaacgatgacggacagtaccaaggtccaggcgacaaactacaaagttgagtataacggtactgactggaccatcacccgtctgtcagacaacaccagcttcacggctatgccggataccagcggtaatctgtcgtttgatggcctcaacgtcaacattagcggctcggccaataataaagacagctttatcgtgaagccggtgaatgacgttatcgtgaatatggacgttgcgatcagcgacgagtccaaactggcgatggcctccgcgcaaggaagcggcgaaagcgacaataccaatggccaaaagctgctggatttgcagagcgccaagctggtgggggggaacaaaacctttaacgatgcttatgccgcgctggtcagtacggtgggcagcaccacggcgtcgctgaaaaccagcagcgaaaccaaagttaacgttgttacgcagctgaccaaacaacagcagtcaatctccggggttaacctggatgaagagtatggcaacctgcaacgctatcagcagtactatctggcgaatgcgcaggtgctgcaaacggcgagcacgctgtttgatgcattgatcaatatccgctaa

SEQ ID NO: 523981 - DNA, 954 bp, Stenotrophomonas maltophilia
atgcgtattagtactcaaatgatgtatgagcaaagcatgcgcggcgtgacgaactcccaaagcctctggctcagctacggcgagcagatgtctacggggaagcgtatcaaccgtccgtctgacgatccgattgccgcttcgcaggccgttgtgctctctcaggcccaaacgcaaaatagccagtatgcgctggcgcgctccttcgctacgacgaaagtctcgctggaagaaaacgtgttatcgcaagtgacaaccgctatccaggctgctcaggaaaagattgtcaatgcgggcaacggtacgttaagtgacgatgaccgcgcttcgctggcaacgaacctgcaaggtattcgcgatcagctcatgaacctggctaacagcacggacggtaacggtcgctatattttttccggttacaagaccgaagcggcggctttcgaccaggctacgggtgattataagggcggcggaacgccaatcagccagcaggttgactctgcgcgcacgatgcaaatcagccatacgggcactgaagttttcgatagcttcaccagcaatgcgaagccagagccagatggtagtgcgccggaaacgaatttgttcaagatcctcgactccgcaattgaagcgctgaataagccgattggcgatgacgaaacgaaggctgaagcatttacggcggctattgataaagccaaccgtggcctgagcaactccctcaacaacgtgttgaccgtgcgcgccgacctcggcatcaagctggacgagctgggcaagctggattctctgggtgaagaccgcgcgctgggccagactcagcagatgagcgacctggttgacgtggactggaactcggtgatttcttcctacaccatgcagcaggcggctttgcaggcctcgtataaagcctttagcgatatgcagggtatgtctttgttccagatgaacagataa

SEQ ID NO: 523982 - DNA, 1212 bp, Stenotrophomonas maltophilia
atgaacacaaccaccatccgggccgtaagccgctgggtaatcttaatgctggcgctcggtgcgggcttcagcgtggcatccatctattatgcccagcctctgctgccgctgatgggctcagacctgcacctgagcatcgaaggcatgggcatggtcccgacgctcacccaggcgggttatgccttaggcatcctgtttctgctcccgctcggcgatcgttatgaccgcagaacgttgatcctgataaaaagtgcagctctggcgctgttcctgctgagttgtagcctgaccggacaactgcactccctactgctcaccagcctgctgattggcatggccgccaccatggcgcaggatattgtcccggccgcagcgatcctcgcgccggaaggcaaacagggaaaaacagtcggcacggtgatgaccggcctgctgctggggattttgctctccagaaccgtgagcggcgtggtgggtgaagcctttggctggcgagtgatgtatcagctggccgcagcaagcattgcctttatcggcgtggtgatgtgggccgtgcttccccgcttcgccgttcattccacgctgagctacccggcgctgctgcgctccatggaacacctctggcgtcgctacccggcgctgcgtcgggctgcgctggctcagggttttctgtcgattgcctttagtgcattctggtcgacgctggcggtcatgctgctggaacggtatcaccttggcagcgccgtggcgggtggttttggtattgccggagccgcaggcgcgctggccgcaccgctggcaggcggtctggccgataagctgggcgccggtaaagtgacccaactgggtgccgcgctggtgaccctctcgtttgccctgatgttcctgatgccagccctgggtgtacacggccagttgctcctgattgccctctccgcggtcggtttcgatctcggtttgcagtccagcctcgtggcgcaccagaacctggtctacagccttgagccgcaggcccgtgggcgccttaacgccctgctgtttaccgtcattttcatcggaatggcgctgggttcggcattaggcagcaatatctatacgctggcaggctggacgggcgtggtagcactggcaaccctgtgtggtgccattgcgctggctatcagagtgattgaaagcgcccgggtggtgtccgctcaggcagaaagtgtgtaa

SEQ ID NO: 523983 - DNA, 939 bp, Stenotrophomonas maltophilia
atgaaacggactgagcgtatagatcgggtagaactgatgcgaacctttgttcgcattgtggaggcggggtccctttctgcggcggcacgtcagctggcaacaacccaggccacggtgagccgacggttgcagtcgctcgagaccatgctgggcgtgcgcctgatgctgcgcacaacccatacgacacggctgaccgatgacggtgaacgctgctatcagcatgccagacgggtgattgacagctggctggcgctggaagacgaggtggggcagacggaagatgaaccggtcggggtgctgagggtgcgcgcccctcacgcgtttggccaggatcagctactaaaaccgttaacccaatttttgcagcgctatccccagctttctgttgagtggatgcttaacgatcgctcggttgatttcctcggcgacaaccttgactgtgctattcgggtgggcgtggaagtcgatccggcaaccgtgtctgtgctactggctgaagtgccgcgctcggtggtagcgtcaccggcactccttgcccgttttcccgcggttaacacgccgggcgatctgcaacatctcccctggattgccattagctctttttatcaacgccatgtggagctcttccacgaggcaacacccaccccggcgagagttaccattacgccacgcctgagtaccgacagcttgtatgtagcgcgcaatacggcactcaccgggctaggcgtggcggtggtatccagctggacggtacaggatgatattcgggaagggcgactggtgcatttactgccagagtggcagccagcagcgctaccggtacatctggtttatccctggtcacgctattatccggcgcgcttgcggcgttttctggagctgatgcggcagataatgccggaggtcaccgggatgagaaagcccctgcaacagccataa

SEQ ID NO: 523984 - DNA, 2472 bp, Stenotrophomonas maltophilia
  misc_feature (6)..(15): n is a, c, g, or t
gtgatnnnnnnnnnnttccgtgattatctgcgtcaggacatcggtgaaattctgattgataacccgaaagtgcttgagctggctcgccagcacatcgccgcgctgggtcgcccggatttcaccagcaaaattaaactgtacaccggtgaaatcccgctgttcagccattatcagattgaatcccagatcgagtctgccttccagcgtgaagtgcgtctgccgtccggcggttctatcgttatcgataccaccgaagcgttgaccgccatcgacatcaactccgcgcgagcaacccgcggcggcgacatcgaagagaccgccttcaataccaaccttgaagccgctgatgaaatcgcccgccagctccgcctgcgcgacctgggtggtctgatcgttatcgacttcatcgacatgaccccggttcgccatcagcgtgcggttgaaaaccgtctgcgtgaagcggtgcgccaggatcgcgcgcgtatccagatcagccatatttctcgctttggcctgctggagatgtcccgtcagcgcctcagcccgtctctgggtgagtccagccatcacgtctgcccgcgctgttccggtacaggtaccgtgcgtgacaatgaatctctctccctctctattctgcgtctgattgaagaagaagcgctgaaagagaacaccaaagaggttcacgctattgttccagtgccgattgcctcctacctgctgaacgaaaaacgtgcagcggtgagcgcaatcgaagcgcgtcagggcggcgttcgctgcatcatcgtgccaaacgacgagatgcaaaccccgcactatcacgtgctgcgcgtgcgcaaaggcgaagagacaagcaccctcagctacctgctgccgaagctgcatgaagaagaaatggcgctgccgtctgatgaagagcctgccgagcgtaaactgcctgagcagccagctttagcgaccttcatcatgccggaagcaccgccagaagcgacgctggaaaaaccagcggaaaaacctgctgtgcagaaagtggctcctgccgcgccaaaagcgcagcctgagcagcctggtctcctgagccgcatcatcggtgcgctgaaaaaaatgtttgccgccgaagaagttcagcctgaggagccgaaagaagcgccaaaagaagcgaaaccagagcgtcagcaggaccgtcgtaagcgtcagaacaaccgtcgcgaccgcaacgaccgtggcgatcgtaatgagcgccgtgataatcgttccgataacaacgaaggccgtgaacagcgcgaggacaaccgtcgcaaccgtcgcgagaagcaacagcagaacgttgaagatcgtgagattcgccagcaggcgggcgatgagtccgagaagagcaaacagcgtgacgagcagcagcctcgccgcgagcgtaaccgtcgtcgtaacgatgacaaacgccaggctcagcaggaagtcaaaaacctgaatcgcgaagcgcctgtagaacagcaggacactgagcaggaagagcgtactcaggttatgccgcgtcgtaagcagcgccagctgacccagaaagtacgtgtgggtgttgttcaggccgaagaaaacgacgttatcgcggttgaagcggctgaaagcacaacgggtactcaggttgcgaaagttgacctgccagccgtagtggaaaatcaggttgagcaggacgaaagcagcgaaaaccgtgataacgcaggtatgccgcgtcgctcccgccgttctccacgccatctgcgcgtgagcggtcagcgtcgccgtcgttatcgtgacgagcgttacccgacccagtctccaatgccaatgaccgtggcgtgcgcgtcacctgagatggcatccggtaaagtctggatccgttatccggttgcacgtccggagcaggctgttgaagaacaggctgtgaccgaagaggtgattgcaccggtcgtcgcagtggaagacgtcgtgactgaagcggcaaccgtggtcgaaccgcaggttgttgaaacagcgccgccgcaggctgtggaagtggaaacgacccatcctgaagtgattgctgcaccggttgatgccgcaccgcagatcattgccgaagaagataccgtggtggctgaagaagtcgcggaagacgctaagcctgtatccgcagcagaagagcccgcagacgttgccgtcgaaacggtgacggaagaggttgttcaggacgtcgagattcaggttgaacctgttgtcgaagaggtcaaagcgcctgaagtgaaatctgagccggttgagatcgttgaagctgtagcgcctgctcacattgctaccgcgccaatgactcgtgccccggcacctgagtacgtgcctgaagcaccacgccatagtgactgggttcgtccggaattcaacttcgaaggtaaaggtgctgccggtggtcacagtgcgacgcacatggctactgccccagctactcgtcctcagcctgttgaataa

SEQ ID NO: 523985 - DNA, 678 bp, Stenotrophomonas maltophilia
  misc_feature (661)..(670): n is a, c, g, or t
atgaaaagaatgttaatcaacgcaactcagcaagaagagttgcgtgtcgcccttgtggatgggcagcgcctgtacgatctggatatcgaaagtcctggacacgaacagaaaaaagcgaacatttacaaaggcaaaatcacccgcattgaaccaagccttgaagctgcatttgtcgattacggtgctgagcgtcacggtttccttcctctcaaagaaatcgcccgcgaatattttcctgcaaactacaactcccatggccgtccgaacatcaaagatgttctgcgtgaaggtcaggaagttatcgtccagatcgataaagaagagcgtggcaacaaaggcgccgcgctgaccacctttatcagtctggcaggaagctatctggtattgatgccaaacaacccgcgtgcgggtggcatctctcgccgtatcgaaggcgatgaccgtaccgagctgaaagaagcactggcaagtcttgaactgccagacggcatgggccttatcgtgcgcaccgcaggcgttggcaaatctgccgaagcgttgcagtgggacctgagcttccgcctgaaacactgggaagccatcaagaaagcggcagaaagccgtgctgcgccgttcctgatccaccaggaaagcaacgtcatcgtgcgtgccttccgtgatnnnnnnnnnnttccgtga

SEQ ID NO: 523986 - DNA, 867 bp, Stenotrophomonas maltophilia
  misc_feature (324)..(333): n is a, c, g, or t
  misc_feature (725)..(734): n is a, c, g, or t
atgaaaacagagactccagccgtaaaaatggttgccatcgccgacgacgaggcggggcaacgtatcgataattttttgcgcacccaattgaagggtgtgccaaaaagtatgatttatcgcatcttgcgtaagggtgaggtgcgggtgaacaaaaaacgtgtgaagcccgagtacaagctcgaggcgggcgatgaagtccgcattccaccggtacgtgttgcagagcgtgaagaagaggtcgtttctccgaagctgcaaaaagtcgcggctttgagcgacgttatcctttatgaggacgaccacattctggtgctgaataaaccnnnnnnnnnngtacacggggggagcggtctgagcttcggcgtgatcgaaggtttacgtgcgctgcgcccggaagcgcgtttcctcgaacttgttcaccgtcttgaccgtgatacctcaggcgtgctgctggtggcgaaaaaacgttctgcactgcgttccctgcatgaacagctgcgcgaaaaagggatgcagaaagattatctggcgctggtgcgcggccagtggcagtcccacgtgaaagtggtgcaggcgccgctgctgaaaaatattctgcaaagcggtgagcgcattgttcgtgttaatcaggaagggaaaccgtctgagacgcgatttaaagtagaagagcgctacgaattcgccacgctggtgcgctgtagtccggtgacggggcgtactcaccnnnnnnnnnncaccagattcgcgtccatacccagtttgcaggccatccgattgcgttcgacgatcgctatggcgatcgcgagtttgataagcagttggcgggtacggggctgtcgcgtctgttcctgcatgcggcagcgctga

SEQ ID NO: 523987 - DNA, 543 bp, Stenotrophomonas maltophilia
atgctgctggaaaagctcgggatcccgtttgaatgcgccgcgccggaggtggatgaaacgccacagccgggcgagtcaccgcgtcatctggtgacccgtctcgcgaaagagaaagcacagtcgctggccgtacgttaccccgctcatctgattataggctccgatcaggtttgtgtgctgggcggcgaaatcaccggtaaaccgcatacggaagaaaacgcctgccagcagcttttgcgtgcgcgaggcagtatcgtgaccttttataccggcctggcgctttataattcggcctccggtcatctgcaaaccgagtgcgagccatttgatgtgcacttccgtcatctcagtgatgaggagattatggattacgtgcgtcgggaacgtcctctgaactgcgcagggagtttcaaaagtgaaggactgggaattgcactgttcgacaagctggacgggcgggatcccaacacgctggtggggttgccgctgattgcgctgtgccagatgttaaggcgagaagagtgtaatccgctgacgatgtga

SEQ ID NO: 523988 - DNA, 522 bp, Stenotrophomonas maltophilia
atgcaaaaggtaaaattacccctgactcttgatccggttcgtacggctcaaaaacgcctcgattacgaaggaatctattcttccgatcaggctgagcgtattgccgaatctgtagtcagtgtggacagtgatgtagagtgctccatgtcgttcgctatcgacaaccagcgcctcgccgttttaaccggtgatgcaaaggtgacggtaacgctcgaatgtcagcgctgcgggaaaccgtttgtacagcatgttcacacaacgtattgtttcagcccggttcgttctgacgaacaggctgaagcactcccggaagcgtatgaaccgattgaggttaacgaattcggtgaaatcgatcttctggcgctggttgaagatgaagtcatcctctccctgccagtcgttccggtgcatgattctgaacactgtgaagtgtccgaggcggacatggtctttggggaactgcctgatgaagcgcaaaaaccaaatccatttgccgtattagccagcttaaagcgtaagtaa

SEQ ID NO: 523989 - DNA, 174 bp, Stenotrophomonas maltophilia; identical to SEQ ID NO: 114872

SEQ ID NO: 523990 - DNA, 777 bp, Stenotrophomonas maltophilia
atgcgcatggcgctggagctggtgaaagaagggcgagcgcaggcttgcgtcagcgcgggaaatactggcgcgctgatggggctgtcgaaattattgctcaagccgattgagggcattgagcgtccggcgctggtgacggtgttaccgcatcagcagaagggcaaaacggtggtgctcgatctgggcgctaacgtagattgtgatagtacaatgctggctcagtttgccgtgatggggtcggtgctggcagaagacgtggtcgggattaccaatccccgcgttgcgttattgaatattggtgaagaagagaccaaaggcctggacagtatccgcgacgctgcggaaatactcaaacaggttccctccatcaactatattggttatctcgaagccaatgagttgctgacgggcaaaacggatgtattagtgtgtgatggcttcaccggaaacgtgacgttgaagaccatggaaggggtcgtacgaatgttcctttctctgctgaaatcgcagggagaaggtaaaaaaaggtcctggtggctgattttattaaagcgttggttacaaaaaagcctgacgcggcgattcagtcacctcaaccccgaccagtataatggcgcctgtctgttaggattgcgcggcatcgtgattaagagtcatggcgccgccaatcagcgagcatttaccgtcgcgattgaacaggcagtgcaggcggtgcagcgacaagtccctcagaggattgccgctcgcctgggatctgtattagctaaaagtgactga

SEQ ID NO: 523991 - DNA, 954 bp, Stenotrophomonas maltophilia
atgtatacgaagattttaggtaccggcagctacctgccaaaacaagtgcgtaccaacgccgatcttgaaaaaatggtagatacgtctgacgagtggattgtcacgcgcacaggtatccgtgaacgtcgtatcgccgcgccagacgaaactgtgtccaccatgggctacgaagccgctcagcgagcgcttgagatggctggcattgataaagaacagatcgggcttattgtggtggcgacaacatctgccacgcatgccttcccaagcgcagcgtgccaggtgcagaacatgctcggcatcaaaggctgcccggcatttgatgttgcagcggcgtgcgcgggtttcacctatgcgctgagcatcgccgatcagtatgttaaatcgggtgccgtaaaatatgcgttggtgatcggtgctgatgtgctggcgcgtacctgcgatccaaccgatcgcggcacaatcattatttttggcgatggcgcgggcgcggtactgttggggcagtccgaagaaccaggcattatctccacgcacctgcacgctgacggtcgctacggcgagctgttaacgctgcctaacgccgatcgcgttaatccggacagttcgatttacctgacaatggcgggtaatgaagtgttcaaggtggccgtgaccgaactcgctcacattgttgatgagacgctggaagcgaacaatctggatcgcgccgcactcgactggctggtaccgcatcaggctaacctgcgtattatcagcgcgacggcgaagaagttgggcatgtctatggataacgttgtggtgacgcttgatcgccacggcaacacctctgcggcatcggtaccgtgcgcatttgacgaagcggtacgcgatggacgaattaaacggggccaactggtcttgcttgaagcctttggtggtgggttcacctggggttccgcgctggttcgtttctag

SEQ ID NO: 523992 - DNA, 930 bp, Stenotrophomonas maltophilia
atgacgcaatttgcttttgtgttcccgggacagggctcacaaactgttgggatgttgtctgaaatggcagcaaactatccggttattgaagagactttccgtgaagcttctgacgcgctgggttatgatctgtgggcgctgacccagcagggcccagctgaagagctgaacaaaacctggcagactcaaccggcactgctggcagcctccgtcgcattgtggcgcgtatggcagcagcagggcggcaaaacgccggcgctgatggcgggtcatagcctgggtgaatactctgcgctggtctgcgcaggggtgattgccttcgctgacgcggtccgtctggttgaattgcgtggtaagtttatgcaggaagcggtgccagaaggcacgggcggcatgtctgccatcatcggtctggatgatgcttctattgctaaagcctgtgaagaatctgctgaaggtcaggtcgtttctccggtaaactttaactcgccaggccaggtagttatcgcgggtcataaagaagcggttgagcgtgcaggcgctgcctgtaaagctgcgggtgcaaaacgtgcactgccgctgccggtgagcgtgccgtctcactgtgcgctgatgaagcccgctgccgataagctggcggttgagctggaaaaaatgacctttaacgcaccgacgatttccgttgtgaataacgtcgatgtgaagtgcgaaaccgcgccggaggctatccgtaacgcgctggttcgccagctctacagcccagttcagtggaccaaaaccgttgaatttatggcgtctcagggcgttgaacatctgtatgaagtcggtccaggtaaggtacttaccggtctgacaaaacgtattgtagacaccctgactgcctcggcgattaacgagccggaagcaatgaaagcggcactctcgcaataa

SEQ ID NO: 523993 - DNA, 735 bp, Stenotrophomonas maltophilia
atgagttttgaaggaaaaattgccctggtgaccggcgcaagccgcggtatcgggcgtgctattgctgaaacactggttgcgcgcggcgcgacggtgatcgggactgcgaccagcgagaatggcgcacaggccatcagcgagtatctgggtgcgaacggcaaaggtctggtactgaatgtgactgaaccagcatctatcgaatctgttctggaaaatattcgcgcagagtttggcgaagtggatattctggtcaataatgccgggatcactcgcgacaacctgttgatgcgaatgaaagatgatgagtggaacgatattatcgaaaccaacctgtcatcggtattccgtctgtcaaaagcggtaatgcgcgctatgatgaaaaagcgtcatggacgtattatcactgtaggttctgtggttggtaccatgggaaatgctggtcaggctaactacgctgcggcgaaagcaggtctgatcggtttcagtaagtcgctggcgcgcgaagtcgcgtcccgcggaattactgtaaacgttgttgctccgggctttattgaaacggacatgacgcgtgcgctgaccgatgatcagcgtgcgggtacgctggcggcagttccagcgggtcgtcttggcgaccctaaagaaatcgccagcgcggttgcatttttagcctctgacgaagcgggttacatcactggtgaaaccctccacgtcaacggcgggatgtacatggtttaa

SEQ ID NO: 523994 - DNA, 237 bp, Stenotrophomonas maltophilia; identical to SEQ ID NO: 114867

SEQ ID NO: 523995 - DNA, 1242 bp, Stenotrophomonas maltophilia
gtgtctaagcgtcgtgtagttgtgaccggacttggcatgttgtctcctgtcggcaataccgtagagtccacctggaaagctctccttgccggtcagagcggcatcagcctaatcgaccatttcgatactagcgcctatgcaacgaaatttgctggcttagtaaaggattttaactgtgaagagatcatctcgcgcaaagaacagcgcaagatggatgccttcattcaatatggaattgtcgctggcgttcaggccatgcaggattctggccttgagattacggaagataacgctacccgtatcggcgctgctatcggctccgggattggcggtcttggcctgatcgaggaaaaccatacatctctggtgaatggcggcccgcgtaaaatcagcccgttcttcgttccgtctacgattgtaaacatggtggcaggtcacctgaccattatgttcggcctgcgtggcccaagcatctcaatcgcgacagcctgtacgtctggcgtgcataacatcggccaggccgcgcgtatcatcgcgtacggcgatgcagatgctatggttgcgggcggtgctgagaaagccagtaccccgctgggcgtcggtggcttcggtgcagcgcgtgcgctctctacccgaaacgataatcctcaggcggcgagccgtccgtgggataaagaccgtgatggtttcgtgctgggtgacggtgcaggcatgatcgtactggaagagtacgaacacgcgaaaaaacgtggcgcgaaaatttatgctgaagttgttggctttggcatgagcagcgatgcttaccacatgacgtctcctccagagaacggcgcaggtgctgcgctggcgatggaaaacgccatccgtgatgcgggcattacgccggcacagattggctacgttaacgcgcacgggacatctacccctgcgggcgataaagcagaagcgcaggcggttaagtctatcttcggcgaatctgccagccgtgtactggtgagctccacgaaatccatgaccggtcacctcctgggggcggcgggtgcagtagaatcaatctactctattctcgcgctgcgcgatcaggctgtaccgccaaccatcaacctggataatccagatgaaggttgcgatctggacttcgttccccacgaagcgcgccaggttagcggtatggagtacaccctgtgtaactccttcggcttcggtgggactaacggttctctgatcttcaaaaaggtctga

SEQ ID NO: 523996 - DNA, 828 bp, Stenotrophomonas maltophilia
  misc_feature (225)..(234): n is a, c, g, or t
atgtttttaattaatggccttgagcaagaaatgctgccggcaagcgacagggcgacccagtttggcgatggctgtttcacgaccgcgcgtattctcgacggtggcgtgtgcctgctcggggcccatatccttcgtttacaaaaagcctgcgaagcattactgatccccttctcgcagtgggacattcttgaaagtgaaatgcgtcggctggcgtcacataaagcnnnnnnnnnncataaagcaagcggcgtcctgaaagtcattatcagccgcggcagcggtggtcggggctatagcggttctgcctgccagcatcctgcgcggatcctttccgtttcagattatccttcccattacgcgcactggcgtgaagagggcgtagtcctggcgcttagcccggtacgtctggggcgaaacccgatgctcgctggcataaaacatcttaaccgtcttgaacaggtgcttattcgtactcatcttgagcagacggaggccggggaggcgctggttcttgacagcgaagggtacattacggaatgctgtgcggctaatttactctggcggaagggcagtgacgtattcacgccttcgctggagcaggccggagtcaacggcattatgcggcagttttgtttgcaacagctggcacgcgcaggctttcgcgttgtcgaagttaacgctaaggaagaggcgctgctggctgccgaagaagttgttatctgcaatgcgctgatgcccgttgtccccgttcgcgcttatgaccgcaagtgctggtcatcccgcgagctgttccagtttctggccccgttatgtgagcaaaccaggtag

SEQ ID NO: 523997 - DNA, 1023 bp, Stenotrophomonas maltophilia
atgaagaaaatgttacgctttgtcctccttcttatcgttgcgttcggaatcgctggcggagcgggagtgtggaaagtccgtcagctggctgaaagtcagatcctgattaaagacgagacgatatttaccctgaaagcggggaccgggcggcaggcgcttggtcagcagctgtatgacgacaaaattatcaatcgtccacgcgtattccagtggctgctgcgtattcagccggacctgtcccatttcaaggccggtacctatcgtttcacccctggcatgaccgtgcgcgagatgctgcaactgctggagagtggtaaagaagcccagttcccattgcgttttgtggaaggtatgcgtctgagcgattatctcaggcaactgcgtgacgcgccgtacatcaagcatacgctgaaagatgaccgctaccagaccgtggcagacgccttaaaattcgaacatcccgagtgggtggaaggctggttctggcccgatacgtggatgtatacggcaggcacgacggatgtggcaattctgaagcgagcgcataacaaaatggtcgcggcggtagacgctgcgtggaaagggcgagcagagggcctgccttataaagatcaaaaccagttcatgacgatggcctcgatcatcgagaaagagacggccgttgctgccgaacgtgaccaggttgcctcggtgtttattaaccgtctgcgcatcggcatgcgtttgcaaaccgatcctaccgtcatctacggcatgggcgaaaactacaacggcaggatttccagaaaagatctggaaacgccaacggcgtataatacctacgtgattagcggcctgccgcctggaccgattgcgacgccaagtgaagcatcattgaaggccgccgcgcacccggccaaaacgccgtatctctattttgtggctgacggaaaaggggggcatacgttcaataccaacctggccagccacaatcgctccgttcaggactatctgaaggcacttaaggaaaaaaatgcgcagtaa

SEQ ID NO: 523998 - DNA, 642 bp, Stenotrophomonas maltophilia
atgcgcagtaaatacattgtcattgagggactcgaaggggcgggcaaaaccaccgcccgtaacgtggtggtggatacgctgaaatcgcttggcgtcgccgacatggtcttcacccgcgagccgggcggtacgcagctggcggaaaaactgcgcagcctggttctggatatcaaatccgttggcgatgaagttattaccgacaaagcggaagtgctgatgttctatgcggcgcgcgttcagctggtggagacggtgatcaaacccgctctggcagaaggcaaatgggtgattggcgatcgccacgatctctcaacccaggcgtatcagggtggtggccggggtatcgatcaggccatgctggctacgcttcgcgacgcggttctgggcgatttccgtcctgacctgacgctgtatctggacgtgacccctgaggtgggcctgaagcgcgcccgtgcccgcggcgaactggaccgcatcgaacaggagtcttttgatttctttaaccgcacccgtgcgcgttatcttgaactggccgggcaggacaagaccattcgtaccatcgatgcgacgcaatcccttgaagacgttacatgtgatattcagcagaccgttacgcagtggctacaggagcagcaggcatga

SEQ ID NO: 523999 - DNA, 1005 bp, Stenotrophomonas maltophilia
atgaaatggtatccatggttgcgcccacactttgaacagctgatcggcagctatcaggttggtcgggggcatcatgcgttactgatccaggcgctgccgggaatgggtgatgatgcgttgatttacgccatcacccgctttctgatgtgccaacagccggaaggacataaaagctgcggtaaatgccggggttgccagctcatgcaggcgggcacgcatcctgactattacaccctcgaacctgagaagggcaaaaatacgctcggtatcgacgcggtgcgtgaggtcagtgagaaactgtacgaatatgcgcgtctggggggggcgaaagtggtgtggctgaaagatgccgcgctgctcacggaagccgcagccaacgcgctgttaaaaaccctggaagagccgccagaaaacacctggtttttcctctcctgccgcgagccggaacgcttgctggcgacgctgcgcagtcgctgccgtcttcaccaccttgctgtccctcaggaatcctgggcactcgcctggcttgagcgggaagtgacggtgtcacaagacgcggcgctctcagcgttgcgcctgtgcagcggtgcgcctgcggctgcgctggccttattacagcccgaagtgtggtcccagcgtgaaacgctgtgtcgtgcggttgaatcagccctcgacatccatgactggctgagcgtgctgccagcgctgaacagcgatcaggctccggaacggctgcactggctggccgcgctgctgctggatgcgctcaaaattcagcagggggctacgcttctgactaaccctgacgtgtgggcgctggtcaccacgctggcgaatcgcctgtcagggcagtcgctgcacgctatccttcatgatatctgccagagtcgtgaacaacttttgacggtaaccggtctcaatcgcgagcttttactgaccgaccagttactgcgtattgaacactacctgcaaccgggcgtcataccgccggtttcccacctctga

SEQ ID NO: 524000 - DNA, 795 bp, Stenotrophomonas maltophilia
atgtttttagtcgactcacactgccatctcgatggcctggattatcaatccctgcataaaaatgtagacgacgtgctggcgaaagccgccgcgcgcgatgtgaaattttgcctggccgtggcgaccacgttgccgggttaccgctccatgcgtgaactggtaggcgagcgcgataatgtcgtcttctcctgcggcgtgcatccgctgaatcaggatgaagcgtacgacgttgaggatttacgccgtcttgccgcagaagagggcgtagtggcgatgggcgagaccggcctggactatttctacactccggaaacgaaacctcgccagcaggaatccttccgtaaccatatccgcattggccgggaactgaataagccggttatcgttcacacccgagatgcgcgcgccgacacgctgggtatcctgcgggaagaaaaggtgacggattgcggtggcgtactacactgtttcacagaagacagagaaacggcgggtaagctgcttgatttgggcttttatatctcgttctcggggattgtcacgttccgtaatgctgagcaactgcgtgatgcggcgcgctatgttccgctggatcgtattctggtggaaaccgattccccgtacctggcgccggtgcctcatcgtggcaaagagaaccagccagcgatgacccgggatgtcgctgagtatatggccgttctgaaaggtgtcagtattgaagaactggctcgcgtgacaacggaaaacttcgccagcctgttccatattgaccccgcccgcctgcaatctgtctga

SEQ ID NO: 524001 - DNA, 1434 bp, Stenotrophomonas maltophilia
atgtttaagaatgcatttgctaacctgcaaaaggtcggtaaatcgctgatgctgccagtatccgtactgcctatcgcaggtatcctgctgggtgtcggttctgcaaacttcagctggctgccagccgtagtttcccacgtgatggccgaagcaggcggttctgtttttgctaacatgccgctgatcttcgctatcggtgttgctctgggcttcaccaataacgacggtgtttccgctctggcgtccgttgttgcttacggcatcatggtgaaaaccatggctgtggttgcgccgctggtactgcatttacctgctgaagagattgccgctaagcacctggcggacaccggtgttctcggtggtatcatctccggtgcgattgcagcgtatatgtttaaccgcttctatcgcatcaagctgcctgagtatctgggcttcttcgcgggtaaacgttttgtgccgatcatttctggtctggccgcgattttcaccggtgtggtcctgtccttcatctggccaccaatcggtacggcaatccagaccttctctcagtgggcagcttaccagaacccggttgtggcgttcggtatctacggcttcattgagcgctgcctggtaccatttggtctgcaccacatctggaacgttccattccagatgcagattggtgaatacaccaacgcagcaggtcaggtgttccacggcgacatcccacgctacatggcgggcgacccaacggcaggtaaactgtctggtggcttcctgttcaaaatgtacggtctgccggcagctgcaattgctatctggcactctgctaaaccagagaaccgtgcaaaagtgggcggtatcatgatctccgcagcgctgacctcgttcctgaccggtatcaccgagccgatcgagttctccttcatgttcgttgcgccgatcctgtacatcatccacgcggtactggcaggtctggcattcccaatctgtatcctgctgggtatgcgtgacggtacgtccttctctcacggcctgatcgacttcatcgttctgtccggtaacagcagcaagctgtggctgttccctatcgtgggtgcgggctacgcagtggtgtactacaccgtcttccgcgtgctgatcaaagcactggacctgaaaacgccgggtcgtgaagatgcaacggaagacagcaaagccggtgtgaccagcgaaatggcacctgctctggttgctgctttcggcggtaaagagaacatcactaacctggacgcgtgtatcactcgtctgcgtgtgagcgttgccgacgttgcgaaagtcgaccagccgggtctgaaaaaactgggcgcagcaggcgtcgttgttgcaggttctggtgttcaggcaatcttcggaacgaaatccgataacctgaaaaccgaaatggatgagtacatccgcaacaactaa

SEQ ID NO: 524002 - DNA, 300 bp, Stenotrophomonas maltophilia
atgaagctgttcacccgttatcaactgccaatgctgccggaactgaccgtgggcggtggcgtaaactggcagaacaaagtgtggacggacgtggaaggcggtccggcaggacgttcccgcgcggagcaaggcagctatgggctggtgaacctgttcagtcgctatcaggtcaccaaagactttgctgttcaggctaacgtcaacaacctgttcgacaaagagtattacgactacgtcggatcgtatgtagtgtatggcgcgccactgaacgtttcggtgagcgcgagctacgatttctga

SEQ ID NO: 524003 - DNA, 1812 bp, Stenotrophomonas maltophilia
atgatgtctttcattaatcacaccagggatgggcaacgtcagcctgccgcaacaccttcgttgctggccgcctgcattgctatggcattgacgccaaccaccgctttcgctgcttcaacagccgaagataccgtcgtcgttgatgggggttttgataacacacaggatctttctgccagccaggatcaggattacagcgtaaaaaccaccaccaccggcaccaaactgttgctggttccccgcgacatcccacagtccgtcagcgttatcagccagcaacgtatggctgaccagaatctgcaatccatcggccaggtgctgacgaacaccacgggcattacggcgcaggtgcaggacagcgatcgtaccgtattttactcacgcggatttttcgtcagcaactacgcctatgacgaccttccaacgtccatcagtgaagtgtggaactttggtgataccgccgccgataccgcaatttatgaccgcattgaagtggtccgcggcgccacaggcctgatgtccgggacgggcaacccggcggcgtacgttaatatggtgcgcaagcatgcggacagccaggaatttaaaggcaacgtctccgccagctacggcagctgggacaagcagcgttacgtgctggatctccaggcgccgctggtggaatcaggtaaggtacggggtcgtctgatcacgggttatcaggacaacgacagcttcgtggataactaccactaccggaagaaattcctctacggcgtgatggatgcagatgttaccgacagcacgaccctctcggtagggtatgagtatcaggaaagccataccgcggacccaacctggggtgggctgccgacctggtacagcgacggaagtaagaccaactacaatcgcagccagaccgtcgcgcctgactgggcctattcagataaagacagcacccgcatcttcgctaacctgacccagcgtttcgataatggctgggaagcgcacatcaacggcatgcatgctgaaaccaactttgactctaagctgatgtatatgtccggttatccggataaagagaccggcgcgggcctggtgggttacggcggctggaaccgcggggaacgcaaacaggatgcggtcgatgccttcctgcgcggcggtttcgatctctttggccgtcagcacgagatgatgttcggcggcagctttagccgtcagcgtaaccattacgacaacaccatgccggatgcagtatacggcatggttgatgtcggcaactttaagaactggaacgggaacattgccgatccgcagtggacgccgtggaaactctacagcaaggatgatattcgccagtcttcagcctattcctctgcgcgtttctcactcgccgatccgttgcacctgatcctgggggcgcgttacacccaatacaacattcgctataaccccgctggttcgccgaatacccgtctggaaagcaccaaagatgatgtcacgccgtatgccggcctggtgtatgacatcaatgaggactggtcgacctacgtcagctatacctctatcttccagccgcaggataagcgcaatgccagtggacgttatctcgaccctaccacgggtaaaagctacgaagcaggggtgaaggcagactggtttaatacccgcctcaccacctcgttggcgattttccgcattgagcaggataacgtggccagcaacacgtatacctacatgccgagcggtgagtcgatttatgaatcgctggacggggtggtcagcaaaggggtcgagtttgagctcaacggtgcactgaccgataactag

SEQ ID NO: 524004 - DNA, 360 bp, Stenotrophomonas maltophilia
atggctgaagaaacgattttcagtaaaattatccgccgcgaaattccgtcggatattgtctatcaggatgaactggtcacggctttccgcgacatttctccccaggcgccgacgcacatccttattattcccaatattctgattccgaccgtcaatgacgttaaaaccgagcatgaagttgcgctgggccgtatgcttacggtggccgcgaaaattgctgagcaggaagggattgctgaagatggataccgtttgatcatgaactgtaatcgccatggcggccaggaagtctatcatattcatatgcatcttctgggtggacgtccactgggaccgatgctggcacataaaggtctttaa

SEQ ID NO: 524005 - DNA, 375 bp, Stenotrophomonas maltophilia
atgttaactgggcgtattgcagcgctgatcgtgacgctggtaatggttgggtgcagcgcgcgtcccgccatcccggtcagtgaagaacagacgctggtgatggagtcctcagtgcttgctgcgggcatcacggcggaaaatccttcgttgaccataagcgaaatccagtcttctgcctcctctacgctctataacgaaaggcaagagccagtgacggtgcattatcgcttctactggtatgacgtgagaggtcttgagatgcacccgcttgaggcgccgcgtagcgtgacggtcccggcaagatcgtcggtcacgctctacggcagcgccagctatctgggtgcacataaggtgagactttatctttatttgtaa

SEQ ID NO: 524006 - DNA, 648 bp, Stenotrophomonas maltophilia
ttgattaaaacaatgagccgttatgcgctcctgagtgcgttcgcactctttctggcaggctgtgtgacgcgaacggaagaacctgcaccggtggatcaggcgaagccgggaacggaacagccaacaacaccggcgcaacctgttccaaccgtgccgtctgtaccgactattcctgcgcagcctggcccgatcgaacatccggacgataccgcgcagcctgcgccgcgagtgcggcactatgactggaacggcgcgatgcagccgatggtgggcaaaatgttgcaggcacagggcgttacgcctggcagtgtgctgctggtggacagcgtgaacaaccgtacaaacggttccctgaatgcgggagaagcgacggaaaccctgcgcaacgcgctggcaaacaacggtaaatttacgctggtctcagcccagcagctcgcggtcgctaagcaacagcttggtctgtcgcctcaggacagcctgggttcgcgcagtaaagcgattggtatcgcccgcaacgttggcgcgcagtatgtcctttattctaacgcgacaggcaacgtgaacacgccgtcgttgcagatgcagttaatgctggttcaaaccggcgaaattatctggtcaggtaaaggtgccgttacgcaacaataa

SEQ ID NO: 524007 - DNA, 825 bp, Stenotrophomonas maltophilia
gtgccgttacgcaacaataagcgcacgcgtcatgatgtcctgacgcgttatttcccccagtaccgtgttatcgcgccgcaagcccccgtcgggcttggcggcgcgagttgcattattgagcgtggcgaccatcggctggttttacgtcagcatcacgatgccgccgcgcctgccgcccattttcgtcgccagttccgcgccctgaagcgccttcccgccgaccttgccccgaaacctcatctctttatcagggactggatggcggtggcgtttattgcgggtgagatcaaaagcgagcttcccgatacgcccacgctggcagccatgctgtatcatctgcatcgacagccgcgtctgggctggcaggtgacgttacttccattactggatagctattggcagcaggctgcgcctggacgacgcacgcccttctggctggcgcagcttaagcggctgcgtaaagcgggagagccgaaggcgttacgtctggcgccgctgcatatggatgtccatgcggggaatatcgttcataccacggcgggcgagaaacttatcgactgggaatatgccggggatggtgacgtggcgcttgaactcgctgcggtctggatgcctgatgaggcttcgcgcgtgcagctgataaccgcctatgcccgaaacgccaacataaatgtactcactcttgcgcggcaggtcgcgcgctggcgtccgtgggtgctgatgctgatggcgggatggtttgaaatgcgccttcagcagacagatgacgaacaatttattgcgctggcaaatgatgcctggcgtcagttacaaacgaaaggataa

SEQ ID NO: 524008 - DNA, 1026 bp, Stenotrophomonas maltophilia
gtgggtccagtaatgttggatgttgaagggtttgagcttgatgcggaagagcgcgaaattctggcgcacccgctggtaggggggctgattcttttcacccgcaattatcacgatccggcgcagttgcgcgagctggttcgccagatccgcgcggcgtcacgcaatcgcctggtggtggccgtcgaccaggaaggtggacgcgtgcagcgtttccgcgaagggtttacgcgtttacccgccgcacaatcttttgctgcgctgctgggtgctgaagagggcggtcaactggcgcaggacgcaggctggctgatggcgagcgagatgatcgccatggatatcgatatcagcttcgccccggtgctggacgtaggacacattagtgcggcaataggtgagcgttcgtatcatgacgatccacgtatcgcgctggcaatggcgacgcgcttcattgacggtatgcacgatgcgggcatgaaaaccaccggcaagcatttcccgggccacggggcggtgacggcggattcccataaagaaaccccgcgcgatccgcgcccggaagcagacattcgcgctaaagatatgtctgttttccgctcgctgattaccgataacaagctggacgctattatgcctgcgcacgtcatctacagtgacgttgatccgcgtccggccagcggctctccgcactggcttaaaaccgtgctgcgtcaggagttgggcttcaatggcgttattttctctgacgatttatccatggaaggggcggcgatcatgggaagctatgccgaacgtgggcaggcttcgctggatgcgggttgcgatatgatcctcgtctgcaataatcgtaaaggggcggtgagcgtgctggataacctgtcgccgatcaatgctgaacgtgttacacaattgtatcataaaggttcatttagtcgtcaggagctgatggactcggcgcgctggaaaacggtaaacgcccggcttgaagccctgaacgagcgctggcaggcacataaagcagccctttaa

SEQ ID NO: 524009 - DNA, 543 bp, Stenotrophomonas maltophilia
atgatcatttatttacacggttttgactcaaacagtcctggtaatcatgagaaagtgctgcaattgcagtttatcgatccggatgtccggctgatcagttacagcacgcgtcatccgaagcatgacatgcagcatctgcttaaagaagtggacaaaatgttgcagctcaatatcgacgatcgcccgctgatttgcggcgtggggttggggggatactgggcagagcgcatcggttttttgtgcgatatccgtcaggtcatttttaatcctaacctgtttccaaacgaaaacatggaaggcaagattgaccgtccggaagagtacgccgatatcgcaacaaaatgcgtgagcaatttccgcgaaaagaaccgcgaccggtgtctggcgatcctctcccgcaacgatgaagcgctggacagctcccgcgctgctgaacttctgcatcattactacgaaattgtctgggacgaagagcagacccacaagttcaaaaatatttccccgcacttgcagcgtattaaggcctttaaaacgctgggctga

SEQ ID NO: 524010 - DNA, 1305 bp, Stenotrophomonas maltophilia
ttgactacgccattgaaaaagatagtgattgtcggcggtggtgctggcggactggagctggcgacgcagctgggtaagaaactgggtcgcggtaagaaagccaaaatcacgctggtggatcgtaaccacagccatctgtggaagccgttactgcacgaagtggcgaccgggtcgctggatgagggcgtggatgcgctcagctatctggcacatgcgcgtaaccaccacttccagttccagctgggttcggtggtggacatcaaccgtgaaaataaaaccatcacgctggctgagctgcgtgatgataaaggcgagctgctggttcctgagcgcaagctggcctatgacacgctggtgatggccctgggcagtacgtccaatgatttcaacaccccaggcgtaaaagagcactgcatcttcctggataacccgcatcaggcgcgtcgtttccatcaggagatgcttaacctgttcctgaagtacaccaacaacatgggtgctaacggcaaggttaacattgctatcgtgggcggcggcgcaacgggcgttgaattatcggcggagttgcacaatgcggtcaaacagctgcacagctacggctacaaaggactgactaatgaagcgctgaatgtgacgctggtggaagcaggtgaacgtattctgcctgcgctgccgccgcgtatttctggcgcggcgcacaacgagctgaccaaactgggcgtgcgcgtgctgacccagaccatggtgaccagcgcggatgagggcggactgcataccaaagacggcgaatacatccaggccgacctgatggtctgggctgcggggatcaaagcgcctgatttcatgaaagatatcggtgggctggagacaaaccgtattaaccagctggtgacagagccgacgctgcaaaccacgcgcgatccggacatcttcgctatcggcgactgtgcctcctgcgcgcgtccggaaggcgggtttgtgcctcctcgcgcccaggccgcgcaccagatggcaagcctcgtgctgcataacatcctggcgcagatgaaaggcaaaccgatgaaagcctatgtctacaaagaccacggctctctggtgtcgctctcaaacttttccaccgtgggcagcctgatgggcaacctgatgcgcggctccatgatggtggaagggcgcatcgcccgcttcgtgtacatttctctgtaccgtatgcaccagattgcgctgcacggctacttcaaaaccggcctgatgatgctggtcggccgcatcaaccgcgttatccgcccacgcctgaagctgcactaa

SEQ ID NO: 524011 - DNA, 540 bp, Stenotrophomonas maltophilia
gtgaataaatcaatgttggcgggtatagggattggcgtcgcagctgcgttaggtgtggctgccgttgccagtctgaacgtacttgatcgtggcccgcagtatgcgcaggtggtttccgctacaccgatcaaagagacggtcaagacgcctcgtcaggagtgccgtaatgtttctgtcacccatcgtcgtccggttcaggatgaaaaccgtatcgctggctccgtgctgggcgcggttgctggtggggtgattggtcatcagtttggtggtggccgtggtaaggatgtcgcgacggtagttggtgcgctgggtggcggttatgccggtaaccaggtgcagggcgcgatgcaggaaaatgatacctacaccacaacgcagcagcgctgtaaaaccgtgtatgacaagtctgaaaaaatgttgggctacgacgtaacctacaaaattggcgatcagcagggcaaaatccgcatggataaagatcctggtacgcagatccctctcgacagcaatggtcagctgatactgaataacaaagtgtaa

SEQ ID NO: 524012 - DNA, 636 bp, Stenotrophomonas maltophilia
atgacaaccgatgtcacgcgttgcgcaaagaaaagccgtggccgaccaaaagtgttcgacagggatgcggcgctcgataaggccatgacgctcttctggcagcatgggtatgaagccacgtcgctctccgacctggtggaagcaacgggcgcgaaagcccctaccctgtacgcagagttcaccaacaaagaaggcttattccgggccgttctggacagatacatctcgcgcttcgcggcaaaacacgaagcccagctattctgtgaagaaaaaacggttgagcaggcattgcaggattatttctgcgcagtcgcaacctgctttaccagtaaagacacgcccgcgggctgttttatgatcaacacctccgcgaccctcgcggcatcgtcgaaagagattgccaacacggtcaaatcgcgccatgcgatgcaggaggagacgctcagcacgtttctggctcaacgccagcagcgcggtgaaattccggcacattgccgtccgcaggagctagcccagtatctgagctgtattctacaggggatgtccatcagcgcccgtgaaggcgcgacgctggaaaaactgcaggggattacgcaaataacgctgcgcctgtggcctgaacttcttaaactctga

SEQ ID NO: 524013 - DNA, 258 bp, Stenotrophomonas maltophilia
atgaaaaacgttaaaaccctcatcgctgccgccgttctgagttcactctctttcgcaagcttcgctgctgttgaagtgcaatccactccagcagaccagcagaaagtcggtaccatctctgccactgccgggactaacctcggctctctggaagatcagctggcacaaaaagctgacgaaatgggtgcgaaatcattccgcatcacctctgtgaccggtcctaacaccctgcacggtaccgcagttatctacaaataa

SEQ ID NO: 524014 - DNA, 966 bp, Stenotrophomonas maltophilia
atgatgatttcttcgcgttttacccgctggttaactctggttgcgctggccgcgacggttgccgtcgcgctccctgctcgcgccaatacctggcctcttccgcccgccggcagcaacgtcgtaggtgaaaaccgctttcacgtggttgaaaacgatggcggttcgctggaagcgattgctaaaaaatataacgtcgggttcctggcgctgttgcaggccaacccgggcgtagatccctatgtgccccgggcgggcagcgtactgacgattccgctgcaaaccatcctgccggacgcgccgcgtcaggggattgtgataaacctcgccgagctgcgtctttactattacccgccggggaaaaatgaagtaaccgtctaccctatcggcatcggccagctgggaggcgatacgctcacgccgaccatggtgaccaccgtctccgacaagcgcgctaatccaacctggactccgacggcaaacatccgcgcccgctataaggcacagggtatcgatctccctgccgtggttcccgcgggcccggataatccgatggggcaccatgcaattcgcctggcggcatatggtggggtttatcttctgcacggaacgaatgcggattttggtatcgggatgcgcgtcagctccggctgcattcgcctgcgcgatgacgacatcaaaacgctctaccgcgtgatcgcccctggcacgaaagtgaatatcatcaatacgccgattaaagtgtctgaagagccgggtggcgcccgtctggttgagatccaccagccgctatcgaaaaacattaatgacgatccgcagacgctgccgattaatctgaatgcctcgatggtgagctttaaaacgaatgcaaacaccgatggcgcagtgatggagcgggcgatggaagcgcgctcggggatgccaaccgatgtcacgcggcatcatgaggttgctcagcagtcaatgtag

SEQ ID NO: 524015 - DNA, 2493 bp, Stenotrophomonas maltophilia
atgctgtggctgcgtaccgacgagctcaacgccgagctaaaacgctggccgcgtatgcagctcaaaaccgattcgcttgccgataaggcggcgaacaccaatctcgcgttccggacgctgcccgatctggccgtccaggcgcagcagaaatccccgctcgataacctgcgcaagtttcttgattccttcaccgggccagtggtgttctccgttgagagtgagggtcgtcgtgaagcgctgggcgaactactagggcggatcaaagttgcaccgaagcgcattcatcgcctgagcgaagcgaccggaaatggtcgttacctgatgatcggctccgccgaacacggatttattgatacgctcaataacctggccttgatttgtgaaagcgacctgctgggcgagcgcgtggcgcgccgtcgtcaggacagccgtcgcaccatcaacccggacaccctgatccgcaacctggccgaactgcaccccggtcagccgatcgttcacctggaacacggtgtgggtcgctatcagggaatgaccaccctcgaagcaggcggcatcaaaggtgaatacctgatgctgacctacgcgaacgacgccaaactgtacgtgccggtgtcgtccctgcaccttatcagccgctacgccggtggcgcggaagataacgcgccgctgcataagctgggcggcgacgcctggtcacgcgcgcggcagaaggcggcggaaaaagtgcgcgacgtggccgccgagctgctggacatttacgcccagcgcgcggccaaagagggttatgcgtttaagcatgataaagagcagtaccagctgttctgcgacagcttcccgtttgaaactacgccggatcaggctcaggccataaatgccgtgctgagcgacatgtgccaaccgctggcgatggatcgcttagtctgcggcgacgtgggcttcggtaaaaccgaggtagcaatgcgtgccgctttcctggcggtggaaaacaacaagcaggtggcggtgctggtgccgactaccctcctcgcccagcagcacttcgacaacttccgcgaccgcttcgccaactggccggtacgcattgagatgctgtcgcgtttccgcagcgccaaagagcagacgcaaatcctggaacaggcaagcgaaggcaaaattgacattctgatcggcacccacaagctgctgcaaagcgacgtgaagtggaaagatctggggctgctgatcgtcgatgaagagcaccgctttggggtgcgccacaaagagcgcatcaaagcgatgcgcgccgacgtcgacattctgaccctgaccgccacgccgatcccgcgcaccctgaatatggcgatgagcggcatgcgcgatctgtcgattattgccaccccgccggcgcgccgtctggcggtgaaaacctttgttcgcgagtacgacaatctggtggttcgcgaggcgatcctgcgtgaagtgctgcgcggcggccaggtatattacctgtataacgacgttgaaaacattcagaaagccgccgacaggctggcagagctggtgccggaagcgcgcatcgccattggtcacggccagatgcgcgagcgcgagctggagcgggtgatgaacgacttccaccatcagcgtttcaacgtgctggtatgtaccaccatcattgagaccgggatcgacattccgacggcgaacaccatcatcatcgaacgcgcggatcacttcggcctggcccagctgcatcagctgcgcgggcgcgtcgggcgttcgcaccatcaggcctacgcgtggctgctgacgccgcatccgaaggcgatgaccaccgacgcgcaaaagcgtctggaagctatcgcctcgctggaagatctgggtgctggctttgcgctggcgacgcacgacctggagatccgcggcgccggtgagttgttgggtgaagaccagagcggctccatggaaaccatcggtttctctctgtatatggagctgctggaaaatgccgtcgacgcgcttaaagccggacgtgaaccgtctctggaagatctcaccagccagcagaccgaagtggaactgcgcatgccttccctgttgccggatgattttattcctgacgtgaatacccgtctgtcgttctacaaacgcattgccagcgcgaaacgcgaaggcgagctggaagagattaaagtcgaactgattgaccgttttgggatattgcccgatgcggcgcgcaacctgctggatattgcccgcctgcgtcagcaggcgcagaagctgggcattcgtaagcttgaaggcaacgagaaaggcggcgtaattgagtttgccgagaagaaccacgtcgatccgatgtggctgattggccttctgcaaaaacagccgcagcatttccgtcttgatggcccgacgcgtctgaaatttactcaggatctgacggaacgtaaaatccgcatggactgggtgcgtaactttatgcgtcagttggaagagaacgccatcgcataa

SEQ ID NO: 524016 - DNA, 984 bp, Stenotrophomonas maltophilia
  misc_feature (874)..(883): n is a, c, g, or t
atgcctgaacactatcgtttttccttgcctgtaaaagcaggtgaccaacgccagctgggcgaactgacaggcgcggcctgcgccacgctggtggcggaaattgccgagcgccatccggggccggtggtgctggttgccccggacatgcaaaacgccctgcgcctgcacgacgaaattcgtcagttcaccgacagtctggtattcagcctggccgactgggaaacgcttccctacgacagtttctctccgcaccaggagatcatctcctcacgcctgtcgacgctgtatcagctccccaccatgcagcgcggcgtgctgattgtgccggtgaataccctgatgcagcgcgtctgtccgcacagctatttgcacggccatgcgctggtgatgaaaaaaggccagcgcctgtcgcgcgatgccctgcgcgtgcagcttgacggagccggttaccgtcatgtcgatcaggtgatggagcacggcgaatacgcgacgcgcggtgcgctgctggatctctatccaatgggcagcgaccagccgtatcgtctggatttcttcgatgatgagatcgacagcctgcgcgtgttcgacgccgacacccagcgcacgctggaggaagtggactccattaatctgctgcccgcccatgagttcccgacggataaaaccgccatcgaactgttccgcagccagtggcgcgacaggttcgacgtgaaacgtgatgccgaacatatctaccagcaggtcagcaaaggcacccttccggccgggatcgagtactggcagcccctgttctttaacgaaccgctgccggcgctgttcagctacttcccggcgaatacgctgattgttaacaccggggatatcgacgccagcnnnnnnnnnnaacgcgcgcccgctttgaaaaccggggcgttgacccgatgcgtccgctgctgctgccggaaatgctgtggctgcgtaccgacgagctcaacgccgagctaa

SEQ ID NO: 524017 - DNA, 1074 bp, Stenotrophomonas maltophilia
atgaaacaaaaagcattatggattaaccagataaaagggctgtgcatctgcctggtggtgatttaccactcggtgatcaccttttatcctcacctggacgggctacagcatccgttatcgggcctgctcgccaaatgctgggtctactttaatctttacctcgcaccgttccgtatgccggtgtttttcttcatctccggctatttgattcgtcgatatattgacgaggtgaactggcgcaccagtctcgacaagcggatctggagcattgtctgggtgctggccctgtggggcgtcctgcaatggcaggcgctgacccatctgaatgcctggctcgcccccgagcgtgaactggcgacagcatccaatgcggcctacgccgattccgtttcagggtttgtactgggaatgctcacggccagcaccagcctgtggtacttgtacgccttagtagtctacttcacgctctgtaaactgctgagccgctggaaactgccgatgctggggcttctggcgctggcaagcatcgccattaacttcctgcctttaccatggtggggaatgaacagcgtggtgcgcaacatgatctactacagcctcggcgcatggtacggcgcgcagttgatgacgtggatgaaagggatgaatttgcgccgcagctggctggtacttatcgcctctggcgcggtgtcggtagtgctgtggttcgctaatgttcctctgccgctctcactgctgtcgatcgtggtcatcatgaagctcttttacagcttcgagcagcgttatgccgttcatcccaataatctgctgaacgtcatcggttcaaacaccatcgcgatttataccatccaccgcattttaattgaggcgtttagcctgctcctgattcgcgaaatgaatgcggcgtactggccgatctgggcggagttaacgctgattctggtctatccgttcgtcagcctgctcgtctgcacgctggttggactgggcgcacgtaagctctcgaccgccctctttggcgaccttttcttctcccctcccgcacggcttacgccacagctcgccagccgctaa

SEQ ID NO: 524018 - DNA, 1161 bp, Stenotrophomonas maltophilia
atgcgtgggcgcgccgcggaccgcttcggtcgctttgtctcctggctttcgactattggcattacgcttggcgtgatggctctggtgacggtgctttccgtcatgaacggcttcgagcgcgagctgcaaaacaatatcctggggctgatgccgcaggccgttctctcttccactcagggctccgttaacccgcaacagctgccggaaagcgcggtgaagttacagggtgtcacgcgcgttgcgcccctcacgacgggcgatgtggtgctgcaaagcgcccgcagcgtggcggtcggggtgatgctgggtatcgatccggcgcaaaaagatccgctgacgccgttcctggtcaacgtaaaacaaaccgacctggaagcgggtaaatacaacgtcatcctcggcgagcagcttgccgggcagctcggggtcaaccgtggcgatcaactgcgcgtgatggtgccctcagccagtcagtttacgccgatggggcgtctgccaagccagcgcctgttcaacgtgattggcacgtttgcggcgaacagcgaagtcgatggttaccagatgctggttaacattcaggacgcctcgcgtctgatgcgctacccggcgggaaatatcaccggctggcgtctgtggcttgatgcgccgctgaaggtggatacccttagccagcagacgctaccggaaggaacgaaatggcaggactggcgcgaccgcaaaggcgaactgttccaggccgtgcgcatggagaaaaacatgatggggctgctgctgagcctgatcgtggccgttgccgcgtttaatatcatcacctcgctcgggctgatggtgatggagaagcaaggcgaagtcgccattctgcaaacccaggggctgacgccgcgccagatcatggctgtatttatggtgcagggcgccagcgctggcatcatcggcgcgctgctcggcgcggcgctgggtgcgctgctcgccagccagctcaacaatctcatgccgattatcggcgcgctgcttgatggtgcggcgctgccggtggctatcgagccgctccaggtggtcggtattgcgctggccgcgatggctattgcgctgctctctacgctttatccttcctggcgggctgccgccactcaacccgctgaggctttacgttatgaataa

SEQ ID NO: 524019 - DNA, 702 bp, Stenotrophomonas maltophilia
atgaataagatcctgttgcagtgcgacaacctgtccaaacgctatcaggaaggcactgtgcagaccgacgtgttgcacaatgtgagttttagcgtgggcgaaggcgagatgatggcgattgtcggcagctccggctccggcaaaagtacgctgctgcacctgctgggcgggctggacacgccaaccgaaggcgatgtgatcttctccggtcagccgctgagtaaaatgtcgtctacggcgaaagccgagctgcgtaaccgtgagctgggttttatctatcagttccaccatctgcttccggactttacggcgctggaaaacgtcgcaatgccgctgctgattggtaaaaagaaacccgcggaaattaatgcccgcgccagcgacatgctaaacgcggtagggctgggtcatcgcgggaatcatcgtccgtctgagctttccggcggcgagcgtcagcgtgtggccatcgcccgtgcgctggtcaacaacccgcgcctggtgctggcggatgaaccgacaggcaacctcgatgcgcgtaacgcagacagcattttccagcttctcggcgaactgaacgccgcgcagggaaccgcgtttctggtggtcacgcacgatttgcagctggctaagcggatgggccgtcagctggaaatgcgcgacggtcgtctgaatgcagaactgacgctgatgggagcggagtaa

SEQ ID NO: 524020 - DNA, 1245 bp, Stenotrophomonas maltophilia
atggcttcaccgttatcgttactcattgggttacgctttagccgcggtcgtcgccggagcgggatggtttcccttatctccgtgatctccaccatcggtatcgccctgggtgtggcggttctaatcgtgggcttaagcgccatgaatggctttgagcgcgaactgaataaccgcattctggccgttgtaccccacggtgaaatcgagccggttaaccagccgtggtccagctggcgtgatgccctgaacaaagtggaaaaggtacccggcattgcggcggcagcaccttacatcaactttaccgggctggtagagagcggggtaaacctgcgcgccattcaggtgaaaggggtgaatccacgtcaggaggagcgtctgagcgcgctgcctcgctatgtgcaaaatggcgcatgggcaaactttaaggctggcgaacagcaggtcatcatgggcaaaggcgttgccgatgcactgaaggtgaagcagggcgactgggtctcgatcatgatcccgaacgccagcgctgatcacaaattgcagcagcctaagcgcgtgcgtctgcacgtcaccggtattttgcagctgagcggccagctcgatcacagcttcgcgatggtgccgctggaggatgcgcgccagtatctggatatgagcgacagcgtgacgggcattgccattaaagttaacgacgttttcaacgccaatacactcgtgcgtgacgctggcagcgtgaccaataactatgtctacatcaaaagctggatcggcacttacgggtatatgtaccgtgatatccagatgatccgcgcgattatgtatctggcgatggtgctggtgattggcgtggcgtgctttaatatcgtctctacgctggtcatggccgttaaggacaagagcggcgacattgccgtgctgcgtaccttaggggcgaaagacggtcttattcgcgccatcttcgtctggtacggtttgctggcggggctgtttggtagcctctgcggcgtggtcatcggcgtggtggtgtctcttcagctgacgccgattatcaacgggattgaggcgcttatcggccatcaattcctgtcaggcgatatctattttattgacttcctgccgtctgaactgcactggctggacgttatttatgtgctggttacagcacttttactgagtctgctggcaagctggtatccggcgcgtcgcgctagccgaattgatccggcgagggtattaagtggccagtaa

SEQ ID NO: 524021 - DNA, 912 bp, Stenotrophomonas maltophilia
atgtattacggatttgatattggcggcaccaagattgcgctcggcgtgttcgataaagaccttaagctacaatgggaaacccgcgtccccacgccgcgcgaaagctacgatgaatttttaaccgccattgccgcgctggtggcgcaagcggatgaacgctttggcgtcaaaggcagcgttggcattggtataccgggtatgcccgaaaccgacgacggcacgctgtatgccgccaacgttcctgctgccaggggcaaaccgctgcgtgccgatctttctgctctccttgagcgcgacgtgcgcttagacaacgatgccaactgttttgctctctcagaggcctgggacgacgagtttcgtcgctatccgttggtgatggggctgatcctcggaacgggcgtcggtggcgggattgtcattaacggtaagcccattaccgggcgcagctacattaccggagaatttggtcatatccgtctgccagtggatgcgctggacgtcgttggtcgtgatttcccgcttacccgctgcggctgtggtcagcacggctgcattgagagttacctttcagggcgcgggtttgcatggctttatgaacacttctatcatcagaaacttgaggcccctcaaatcattacgctgtgggagcagggagacgcgcaggcgcgtgagcacgttgagcgctatcttgatttgctggcggtgtgtctggggaatatcctgaccatcgtcgacccggatctgctggtgatcgggggagggctgtcaaatttcactgcgattacggaacagctgtccgggcgtttgccccgacatttattgccggtcgcccgcgtgccgcgcattgagcgtgcgcgacacggggacgcaggaggcatgcgcggagccgcattccttcatctcaccgattag

SEQ ID NO: 524022 - DNA, 822 bp, Stenotrophomonas maltophilia
atgctgtcgcgtcgccagggtcgactcagccgttttcgcaaaaataaacgccgcttacgtgaacgcctgcgtcagcggatctttttcagagacaggatgatgccagaagcgatggataaacccagagtggtggtgttgaccggggcggggatctccgccgaatccggtattcagaccttccgcgcggcggacgggctgtgggaagaacaccgagtagaagatgtggcgacgccggaaggtttcgcccgcgatccggcgctggttcaggcgttttacaacgcccgtcgtcgccagcttcagcagccggagattgcgccaaacgcggcgcacctggcgctggcaaagctggaggaggcgctgggggatcgttttctgctggtgacgcaaaacatcgacaatcttcacgaaagagccggaaaccacaacatcattcacatgcacggcgaactgctcaaggtgcggtgcgcatggagtgggcaggtgctggagtggaaagaggacgtgctggacgaagaccgctgccactgctgtcagttcccttcgcgtctgcgtccccatgtggtctggtttggcgaaatgccgctgggaatggatgagatctacagcgccctggccatggcggacgtctttatcgccattggtacctcagggcatgtctatccggcggcggggtttgttcacgaagcgcgactgcaaggtgcccatacggtggagcttaatctggagccaagccaggtcgggagtgagtttgaagagaagcattacggtctggccagcgaggtggtgccagcctttgtggataaactcctgaaggggctgtaa

SEQ ID NO: 524023 - DNA, 1035 bp, Stenotrophomonas maltophilia
atgaaaaaaatgcttgccgctgcggcactggtgctcggaatgggtgccgcgcatgctgatgacagcaaaacgctctatttctacaactggaccgagtatgtgccgccgggcctgctggagcagttcaccaaagagacgggcatcaaggtgatctattcgacctacgagtcgaatgaaaccatgtacgccaagctcaaaacctataaagatggcgcgtatgacctggtggtgccgtcgacctatttcgtcgacaagatgcgcaaagaaggcatgatccagaagatcgataaaacgaagctaaccaatttttcaaacctcgatcctaagatgctaaacaagccgttcgacccgaacaacgattattccattccgtacatctggggcgcgacggcaattggcgtcaacagcgatgccgttgatccaaaaacggtttcatcctgggctgatctttggaagccggaatacaaaagcagcctgctgttaaccgatgatgcgcgcgaagtgttccagattgcgctgcgtaaactcggctactccggcaacaccaccgatccgaaagagatcgaatcggcgtataacgaactgaaaaagctgatgccaaacgtggcagcgttcaactcggataacccggctaatccgtatatggaaggtgaagtgaatctggggatggtctggaacggctctgcgtttgtggcgcgtcaggccggtacgccactggaggtggtctggccgaaagagggcggcatcttctggatggacagcctcgcgatcccggctaatgcgaaaaacgtcgatggcgccctgaagctgattaacttcctgctgcgcccggatgtggcaaaacaggtggcggaaactattggttacccgacaccaaacctggccgcgcggaagctgttaagtcctgaagtggcgaatgataaatcgctttatccggacgctgaaaccatcagcaaaggggaatggcagaacgacgtcggtgacgcgagccgcctgtatgaagagtattatcagaagctaaaagcaggccgttaa

SEQ ID NO: 524024 - DNA, 792 bp, Stenotrophomonas maltophilia
atgatcggtcgactgcttcgcggcggttttatgaccgccatttatgcgtatctttatattccgataatcattttgatcgtgaactcctttaacagttcacgcttcgggatcaactggcaagggtttaccaccaaatggtatggcctgctgatgaacaatgacagcctgctacaggccgctcagcactcgctgacgatggcggtattctctgccaccttcgcgacgctgattggctcgctgaccgccgtggcgctgtaccgctaccgttttcgcggtaagccgttcgtcagcggtatgctgtttgtggtgatgatgtccccggacatcgtgatggccatttcactgctggtgctgtttatgctgctgggcgtccagctcggtttctggtcgctgctgttttcgcatatcaccttctgcctgccgtttgtggtggtaaccgtctacgcgcgactgaaagggttcgacgtacgcatgctggaagcggcgaaggatctgggagccagcgagatgaccattctgcgcaaaatcatcctgccgctggcgatgcctgccgtggcagccggatggctgctcagctttaccctgtcgatggacgacgtggtcgtgtcctccttcgtcaccgggccgagctacgaaattctgccgttgaagatctactcaatggtgaaagtcggtgtttcacccgaagtgaacgcgctggcgactattctgttggtgttatcgctggttctggtgtttgccagccaggttattgctcgtgataaaacaaaatctcaggggacacagaaatga

SEQ ID NO: 524025 - DNA, 618 bp, Stenotrophomonas maltophilia
gtgctggggtatccgttcgcgtggttcctggctcgcctgccgcaaaaagtgcgtccgctgctgctgtttttactgattgtgccattctggaccaactcgttaatccgcatctacgggctgaaaatctttctcagcaccaaaggttatctgaacgagtttctgctgtggcttggggttattgatacgccgatccgcattatgttcactccgagcgcggtgatcgtcggcctggtctatatcctgctgccgtttatggtgatgccgctttactcaagtattgaaaagcttgataaaccacttctggaagccgcgagagacctgggggccagcaagctgcaaacctttatccgcatcattatcccgctgaccatgccgggcattattgccggatgtctgctggtcatgttgcctgcgatgggcctgttctacgtgtcggacctgatgggcggggcgaaaaacctgctgatcggcaacgtgatcaagagccagttcctgaacatccgcgactggccgttcggctcggccaccagcattacgctgacggtggtaatggggctgatgctgctggtttactggcgtgcctcacgcctgctgaataagaaggtggagctggaatga

SEQ ID NO: 524026 - DNA, 1695 bp, Stenotrophomonas maltophilia
atgaaatatattaggtctcttacccagcaaagattgtgtctgatgctggctgtctatatcggtttgtttctgaatggcgcggtgctgttcagacgagtggaaggttatttcgaacacctcactgtaagaaatggaatttttgccgcgattgaagtgtttggctcaattctggcgaccttcttcctgttacgcctgctctctctctttggccgtcgtacatggcaaattctggcctcgctggtggtgattatctccgccgccgcaagctattacatgacattcatgaacgtggtcattggctacggtattgtggcctcggtgatgaccacggacatcgacctctcgaaagaggtggtgggtcaagggttcatcctgtggacgattctgacctgcctgatcccgctcttctttatctggagtaacacctgtcgctacaccctgttacgccagctgcgtacccggggacagcgcatccgcaacgtcgccgtcgttcttctggcgggtctgctggtatgggcgcctattcgcctgatggaaaagcagcaaaaacggatcgaaaaagcgacaggcgtggatatgccaagctacggcggcgtggtggctaactcgtacctgccgtctaactggctgtcggcgttaggtctttatgcctgggctcaggcggacgaatccagcgatgtgaaatcgctgattaacccaaccaaaaagttcacctaccaggctccggctgacgggctggatgatacttacgtggtcttcgttatcggcgaaacgacgcgctgggatcatatgggtattctcggttatgaccgcgataccaccccgaaactggcgcaggaaaagaatctggtggcataccgcggctactcctgcgataccgccacgaagctctcgttgcgctgtatgtttgttcgcgagggcggtgcgagtgataaccctcaacgcactctcaaagagcaaaacgtatttgctgttctgaagcagcttggatttagctccgatctgttcgccatgcaaagtgagatgtggttctacaccaacaccatggcggataacatcgcctaccgcgagcagattggcgccgagccgcgtaaccgcggaaagaacgttgatgacatgctgctgctctctgagatggaacagtcgctaaaaaaccatccgcagggtaagcaccttattgttctgcataccaaagggtcacactacagctactatcagcgttacacgcgcgatttcgccaaatggacgcctgagtgcgtcggcattaacaagaactgtagcaagcaggagttgatcaatgcctatgataactcgattctgtatgtggataccttcctcagccgggtgattgaccagcttcgcgataagaaagcgattgtgatctacgcggccgaccacggcgagtccatcaacgagaaagagcatttacacggtacgccgcgtaagctggcgccaccagagcagttccgcgtgccgatgatcatgtggatgtcggacaagtatctggaaaacccggacaaagctaaaatgtttgcccacctgaaacagcaggcagagattaaggtaccgcgccgtcacgttgagctgtacgacactattatgggctgtctcggctatacctcaccgaacggtgggattaacgaaaacaacaactggtgtaaactccctgataacaccacaaaagccgcgcagtag

SEQ ID NO: 524027 - DNA, 1203 bp, Stenotrophomonas maltophilia
atgaacacatcaacttataaccgcacgcgttggctgacgcttttcggcaccatcgttacccagttcgcactgggctcggtctatacctggagcctgtttaacagcgccctgtccgataagctcggcgcaccgataagccaggtggcattctccttcggcttgctgagccttggattagcgatttcctcttccgtggcgggcaaacttcaggagcgcttcggcgtgaagcgcgtaaccatggcctccgggatcctgctgggcgtgggcttcttcctgacggcacattcaaacaacctgatgatgctgtggttaagcgccggggtgctggtgggtctggcggacggcgcaggttatctgctgacgctgtctaactgcgtgaagtggttcccggagcgtaaagggcttatctccgcgtttgccattggttcatatggcctgggcagcctggggttcaaattcattgactcccatctgctggcctcggttgggcttgagaaaacctttatgatctggggcgtgattgtgctggtaatgatcctcttcggcgccacgctgatgaaagatgcgccgcagcaggaagtgaaaaccgttaacggcgtggtggagaacgatttcaccctcgctcagtccatgcgtaagccgcagtactggatgctggcggtgatgttcctgacggcctgcatgagcggtctgtatgtcatcggtgtggcgaaagatatcgcgcaggggatggtaaaactggacgcggcgacggcggcgaacgcggtaacggtcatctccatcgctaacctctcgggtcgtctggtactgggtatcctgtctgacaaaatcgcccgtatccgtgtgattacgctggggcaggtcatctccctggtgggtatggcagcactgctgttcgctccgctgaacgaggcgacattctttgcagcaattgcctgcgtagcctttaactttggcggcactattaccgtcttcccgtcactggtgagcgagttcttcggcctgaacaacctggcgaaaaactacggcgtcatttatctcggcttcggtatcggcagtatttgcggttcactgattgcctcgctgtttggcggcttctacgtgaccttctgcgtgatattcgctttgctgattatttcgctggcgctgtccatcacgatccgtcagccgcagcgcgaactgtataaagaagcgcatgtatga

SEQ ID NO: 524028 - DNA, 543 bp, Stenotrophomonas maltophilia
atgatgttaaaaaaaatcagtggtcgccatgctgcttctggcctggtgggtgtctcagcctgcctgcttatatgtaacaccgcttttgcgtggcaacaggaatatatcgtttcagatgcacaaagtaatacgacggaacgctatacatgggacgccgatcaccaacctcgttatgaagatattctcgcggagcgtatcaaccattcgcagaatgctgcgggctttgccctgaacgacccatccggttcagatgcggaaaccgttctgagcgttggctggaattttcccgtggcgggacattttaccaccggccccgtcatggcgtggcgcactgatggcgctccccctgcaacggtgaatgcatttggtgaggtaactaccacgcagccgcttaccgatcccctctggcatgccagcgtgaactcgttggggtggcgcgttgatacgcagtatggtgatttacatccctgggcgaagatcagctacaaccagcagtcggaggaagaatatttgtacaccctgggcttaagcgccaaattttag

SEQ ID NO: 524029 - DNA, 582 bp, Stenotrophomonas maltophilia
atgcaacgttgcggctgggtaagccaggatcagctttatatcgattatcacgacaaggaatggggcgtgccggaaaccgacggtaaaaaactgtttgaaatgatttgccttgaaggccagcaggccgggctgtcgtggatcaccgttctgaaaaagcgtgagaactatcgcaaggccttccaccatttcgatccggttgcggtggccgccatgaccgacgaagacgtggaaaggctggttctggataccggtatcatccgccatcgcggtaaaattcaggccattattggtaacgcgcgtgcttatctggcgatggagcaaaacggcgaacccttctcagcttttgtctggtcgtttgtggataacgagccgaaggtgacgcaggccgccacgcttgcagagatcccaacgtcgacccccgcctcagatgccctgtcaaaagcactgaaaaaacgcggctttaagtttgtgggcaccaccatctgttactcctttatgcaggcctgcgggctggtcaatgaccatattaagggctgcttctgccacccggagggccaccatgatccgcaaatggcaaagtga

SEQ ID NO: 524030 - DNA, 441 bp, Stenotrophomonas maltophilia
atgatccgcaaatggcaaagtgaggataccgctccgcttttgagtctgtggctggagagcaccaccgaggcgcatccgtttatcgacgcaagttactggcaagcgaatgaagcggtagtgcgggatgattaccttcccgccgccgagacctgggtctgggaggaaaacggtaccctgtgcggttttatcagcgtcatgcagttccagttcgtgggggcgttgtttgtcgccccggcgttcatcggaagggggatcgggcgtgcgctgctgaactatgttcagcagcactacccgtatttaaccctggaggtgtatcagaaaaacgtgcgggcggtgaatttctatcatgctcagggttttcgcatcgaagacagcgcctggcaggatgatacccaacacccgacgtggatcatgagctggcaggcggatcaaatgccgtaa

SEQ ID NO: 524031 - DNA, 2328 bp, Stenotrophomonas maltophilia
ttgagcacctcaacaaaaaccattctgaccgccgcccactgggggccgatgctggtcgaaaccgatggcgacaccgtgctgtcgtctcgcggggctttgccttcgcgccatctcaactctttacagaccgtcgttcgcgatcaggtacatagcaaaacccgcgtacgctggccgatggtgcgtaaaggctttctggcgtcaccggataaaccgcaaggtattcgcgggcaggatgagttcgtgcgcgtgagctgggacgatgccctggcgctgatccatacgcagcataaacgcatccgcgacagctatggcccgtcgtccatttttgccggctcctatggctggcgctcaaacggcgtgctgcataaggccgcaaccctgctgcaacgctatatgagcctggccggaggatataccggccatctgggtgattactcgaccggcgcggcgcaggcgatcatgccgtatgtcgtgggcggaaatgaggtttatcagcagcagaccagctggccgctggtgctggagcatacagaggtggtggtgctgtggagcgccaacccgctcaatacccttaaaattgcctggaatgcgtccgacgagcagggcgtttcctacttcgatgcgctgcgcaaaagcggcaagcgcatcatctgtatcgatccgatgcgttctgaaacgcttgatttcttcggcgacagcgccgactggatcgcgccgcatatgggcaccgacgtggcgatgatgctgggtatcgcccacaccctggtggagaacggctggcacgatacggaatttctgacgcgctgcacaacggggttcgataaatttgccgactatctgacgggcaaaaccgacggtatcgccaaaaccgcagagtgggctgcggcgatttgcggcgttgatgccgctaaaatccgcgaactggcagcgttattccatagcaatgtcacgatgctcatgtccggatgggggatgcagcgccagcagtttggcgagcagaagcactggatgctggtgacgctcgccgcgatgcttgggcagattggcacagccggcggcggttttggcctttcctatcactttgccaacggcggcaacccgacgcgtaaagcggcggtgctggcgtccatgcagggctcggtgcagggtggcgtagacgctgtggataaaattccggtggcacgcattgttgaagctctggagaaccccggcgggttttatcagcacaacggtcaggatcgccatttcccggatattaagtttgtctggtgggcgggtggggccaacttcacccatcaccaggataccaaccgcctgatccgcgcctggcagaaaccggagctggtggtgatctcggagtgcttctggaccgcgtcagcgaaacatgccgatatcgttttgcccgccacgacctcgttcgagcgtaacgatctcaccatgacgggggattacagcaaccagcatatggtaccgatgaagcgcgtcgtggctccccgggatgaagcgcgggatgattatgacgtctttgctgacctgagtgaattatgggaagcgggcggacgggagcgtttcaccgagggcaaaacggatctgcaatggctggaaacgttttaccagattgcctgccagcgcggggctgcgcagggcgtgacgctgccgccatttgctgagttctgggaggcgaatcaactcttcgaaatgccggaaagcgagcagaacgcgcggtttgtgcgctttgctgacttccgtcgcgatccggagaatcacccgttaaaaaccgaaagcgggaagattgtgatccacagcgagcgcatcgccagctttggctacgcggactgcccgccgcacccggcgtggctggagccggacgaatggcatggcaatgcgcagccggggcagcttcagctgctgtctgcccatcctgcccatcgtctgcacagccagctcaactattcggctctgcgcgagcagtatgcggtggcgggtcgtgagccgatcgcgctgaatagcgacgatgcaaaggcgcgggggattaacgacggcgatctcgttcgcgtctggaacgcacgcgggcaggtgctggctggcgccgtggtgagtgacgggatccgccctggcgtgttctgcattcatcagggagcatggccggatctggcgctggacgagggcggtatttgtaagaacggcgccgtaaacgtgctgaccaaagatctccccagctcgaagctggggaacggctgtgcggggaatacggcgctggcatgggtggagaaatatgaggggccggcgcttcaccttacggcatttgatccgcctgccagctcatga

SEQ ID NO: 524032 - DNA, 663 bp, Stenotrophomonas maltophilia
atgaaaaaacgcgtactcgttattgccgctctggtgagcggtgcactggctgtttcaggctgcacaaccaacccttacaccggcgaacgcgaagcgggtaaatccggcattggcgcgggtattggttccctggtgggcgctggcgttggcgcactctcctcctccaagaaagatcgcggtaaaggtgcgctgattggcgcagcggcaggcgcagccctgggcggcggcgtgggttattacatggatgtgcaggaagcaaaactccgtgacaaaatgaaaggtacaggcgtgagcgtgacgcgcagcggtgacaacatcatcctgaacatgccaaacaacgtgacctttgacagcagcagcgcgacgctgaaacccgcaggcgcgaacaccctgaccggcgtggccgcggtgctgaaagagtacaacaaaactgccgtgaacgtgattggctacaccgacagtaccggcagccaggatctgaacatgcgtctgtcgcagcagcgtgccgattccgtggccagctcgctgatcacccagggcgtagaagcgaaccgcatccgcaccagcggcatgggtccggctaacccgatcgccagcaacagcacggcggaaggcaaagcgcagaaccgccgcgttgagattacgttgagccctgtgcagtag

SEQ ID NO: 524033 - DNA, 1017 bp, Stenotrophomonas maltophilia
atgagcaaaccaacccgggccaccatcagcgacgtggcgaaagccgctaaaaccggtaaaaccagcatttcacgctacctcaacggcgagaaacacctgctttccgatgcgctgctggcgcgaattgaacaggccattgccgatctcgactaccgtcccagcctgatggcgcgcggcctcaagcggggtcgtacccgtctgattggcctcatcatcgccgatatcaccaacccttactccgttaacgtcctcagcggcattgaggcggcgtgccgtgagaaaggctttaccccgctggtctgtaacaccaataacgaagttgatcaggagttgcactacctcgatctgctgcgcagctatcaggtggaagggatcgtggtcaatgccgtcgggatgcgcgaagagggactgaatcgcctgcaacaatcgtcgctgccgatggtgcttattgaccgcaaaatcccggaatttgcctgcgatgtggtcgggctggataacacccaggcggccaccactgccaccgaacatctgattgaacagggtttcgaagccattttgttcctgagcgaaccgctgggtatggttaacacccgccgcgaccgcctggctgcatttcgtgccacgctggcgcgttatcccggtgtgatcgccgaaaatgccgaaatctccctccatgaagccggtcagctggataataccctgcgccagttccatacccgccatcggggtatgcgcaaagcggtgatctccgcgaacggggcgctgacgcttcaggttgcccgctcgcttaaacgcattggcctgcactggggcagcgacatcggcttactcggctttgatgaactggagtgggctgaacttgctggcgtaggcattaccaccctcaaacaacccacctggcagatcggctatgccgcggttgaacaagtggttcgccgcattgaaggcacccgcgacgccgtacgcgagcaggttttttctggcgagctgatcgttcgcggctctactgcccgttaa

SEQ ID NO: 524034 - DNA, 750 bp, Stenotrophomonas maltophilia
atgagcaggaaaattatggtggtcaccgccgcgtatggcgcggatcaggtgcgacaagcaggcggtcaacgggcgatgcttcccgttattgccggcgcaggggctgatggcgttgaaatccgccgcgagctcttcagcagcgacgagttaatggccctgcctgcgctcggcgagtccattgaactgctgggtttactggcgtgctactccgccccggcccccctgtttatgcccgatggaaccctcaacccggatcttccgcgctaccttagcgaagccagcaccctgaacgccctgtggcttaaagtctcgctgggccatttcagcgacaaacaaccgcttgaagccctgcgcgtactgctggatgaaagcggcatgacgctggtggtggaaaacgaccagaccgactgcggtcagctcgctccgatgcagcgcttcaaagccgcctgccgggtaatggcgctgccggtcacgctgacgttcgatatgggcaactggctgtgggttggcgactccccggaagaggctgcacgtcagttggctcccgccgtgagctacattcatgtgaaggccgcggtcccgcataaggcgcaattccgcgccgtcgcgccggatcagaccgattctcgctggcgggatctgcttaatcaactccctgccgatgcgccacgcggtatcgaatttccgctggaagggacggatctcaccgccgtcacccgccattacgtcaacctgctgcgcgaggagtaa

SEQ ID NO: 524035 - DNA, 939 bp, Stenotrophomonas maltophilia
atgcacaagacgctggatgtcatcaccatcggcgaggccatggcgatgtttgtcgccaccgaaacaggcgagctgagcgcagtggagcactttatcaaacgcgttgcaggtgctgagctgaatgttgctaccggccttgcgcggctggggctgaatgttggctgggtaagccgcgtgggaaatgacagctttggccatttcgtactcgactcgctgaaaaaagagggcattgatgccgcaggcgtaactctcgacggacgcttcccgacgggctttcagctgaaatctaaagttgaaaatggaaccgatcccatcgtggagtatttccgtaaaggctcagcggcaagccatctctccgtggatgattatcacgccgcgtatttctcctctgcgcgccacctgcacctgagcggcgtggcggcggcactctcggccagttcgtacgatttactcgatcatgccgcttcggcaatgaaagcgcagggcaaaacgatctcctttgatccgaacctgcgtccggtgctgtggaaaagcgaagcggagatggttgagaaactcaaccgactggcgtttcaggcggactgggtactgccgggggtaaaagagggaatgatcctcactggcgagagcacgccggaaggcattgctgatttttacctcaacaaaggagtaaaagccgtggtgctgaaaaccggtgctgacggtgcatggttcaaaactgccgacggcgagcaaggcgccgtcgctgcggtaaaagtcgataacgtggtcgataccgtgggtgcgggcgatgggtttgccgtcgggatcatcagcgccctgctggagggcaaaccgctgtcgcaggccgtggcgcgaggcaacaaaattggttcgctggcgattcaggtgcagggcgacagcgaaggattaccaacacgagcagagctcggagtctga

SEQ ID NO: 524036 - DNA, 1281 bp, Stenotrophomonas maltophilia
atgaacagttcgaccaatgcagtaaaacgctggtggtacatcatgccaatcgtgtttatcacgtacagcctggcgtacctggatcgtgccaacttcagttttgcatccgccgccgggatcaacgaagacctcgggatcaccaaaggggtttcctccctgctgggcgccctcttcttcctgggttatttcttcttccagatccccggcgcgatttacgctgaacgccgcagcgtgcgaaagctcattttcatctgcctgatcttatggggtgcatgtgcatcgctgactggcgtggtgaataatattcctgctctggcggctattcgctttattctcggcgtggttgaggcggccgtcatgccagcaatgctgatttacatcagcaactggttcacaaaatctgagcgttcacgtgccaatacgttcctgatactcggtaacccggtcaccgtgctgtggatgtcggtggtttccggctatctgatccagtccttcggctggcgcgagatgttcatcatcgaaggggttcccgcgattatctgggccttctgctggtgggtgctggtgaaagataagccagcccaggcaaaatggctttctgaagacgaaaaagccgcactccaggcgcagctggataaagagcagcaggggctgaaagcggtgcgtaactacggcgaagccttccgctcccggaacgttattctgctatgcgcacagtattttacctggagtattggcgtgtacggctttgttctgtggctgccgtcgattatccgcagcggcggtgaaaaccttggcatggtggaagtgggctggctgtcatcagtgccttacctggctgcaaccatcgcgatgattatcgtctcctgggcatcggacaagctgcaaaaccgtaagctgttcgtctggccactcctgctgatcgctgcttttgccttcattggttcctgggccgtaggcgcgaaccacttctgggcctcgtatacgctgctggtgattgcgggtgcggccatgtatgccccgtatggtccgttctttgccatcatcccggaaatgctgccgcgtaacgtcgcagggggcgcgatggcgctgatcaacagtatgggtgcgctgggttcgttctttggctcgtggtttgtgggctatctgaacggcgccaccggcagcccttcagcttcttacatctttatgggggtggcgctttttgcctcggtatggcttactctgatcgttaagcctgctaataatcaacagctacccgtcggcgcacgccacgcctga

SEQ ID NO: 524037 - DNA, 975 bp, Stenotrophomonas maltophilia
atgaagccgtccgtcattttgtacaaagcactgcctgaagatctgcaaaaacgcctggaggaacactttaccgttacccgggtaaagaacctcagcccgcaaaccgtggcacagcacgccgacgcgtttgcctgcgccgagggcctgctgggttcaagcgaaaaggtggatgcagcgctgctggagaaaatgccgaagcttcgtgcaacctcaaccgtttctgtgggctacgacaatttcgacgtggatgcgcttaacgcgcgcaacatcctgctgatgcacacgccacatgctctgacggaaaccgtcgccgacacgctgatggcgctggtgctcagcactgctcgtcgcgtggtggaggtggctgagcgcgtgaaagcgggcgaatggacgaaaagcattggcccggactggttcggcgtggacgtacatggcaaaacgctggggattgttgggatgggccgtatcggtctggcgctggcacagcgcgcccatttcggcttcaacatgtccattctgtataatgcacgccgtcatcacgctgaagctgaagaacgtttcaacgcccgttactgcgagcttgatacgttgttgcaggaagccgactttgtctgcctgatcctgccgctgacggatgaaacgcgtcatctcatcggcagggcggcgtttgaaaagatgaagaaatcggccattttcatcaacgcaggtcgcggcccggtggtcgatgagaaggcgctgattgaggcactgcaaaacggtgagatccacgccgccggtctggacgtgtttgaacaggagccactgccggtggattctccgctactgaacatgccaaacgtcgtcgccctgccccacatcggctctgcaactcatgaaacacgctacaacatggcggcgaccgccgtggataacctgattgccgcgctcggcggtaaagtggataagaactgcgttaacccgcagatacaacagtag

SEQ ID NO: 524038 - DNA, 213 bp, Stenotrophomonas maltophilia; identical to SEQ ID NO: 117111

SEQ ID NO: 524039 - DNA, 711 bp, Stenotrophomonas maltophilia
atggcgacaggaaagtcctgctctcgctggtttgcgcctattgcggcgttgttgatggttgttagcctgagtgggtgtttcgataaagaaggcgatcagcgcaaagcgtttatcgattttttacagaatacagtgatgcgtagcggcgagcgtttaccaacgctgactgcggatcagaaaaaacagtttggtccattcgtgtcggattacgccattctgtatggctattcacagcaggtaagccaggcgatggattcgggcattcgcccggtcgtggatagcgtcaatgccattcgcgttccacaggattatatgacccagcgcgaaccgctgcgccagtccaacggcgcccttggggtgctgagccagcagttgcaaaatgccaaaatgcaggctgatgcgtcgcgctccgcgttgaagcaggacgaggatctcaagccggtttatgatcaggtgtatgagaaagtcgtgaccaagccgtcaaacgccttgcaaccactgatcccggcggcgcaggtctttactcagcagctggttcaggtgggtgactttattaatgagcagggtacgcaggtgagcttcgtctctaacggtatccagttcccgacctcccagcaggcgagtcagtacaatacgctgattgggccgctggcgtcccagcatcaggcctttagccaggcctggagcgcagcggtcgctgcaacggaataa

SEQ ID NO: 524040 - DNA, 288 bp, Stenotrophomonas maltophilia
atggaattaaaagatcctgagtttgagctgctgagcagcctggaacagattatttttaaagatgtaccgccgacggttaccctgaatcaaaagtccaatccttttagtgaatttgagcgtttacgcaaagggtcgggcctgaaaacagatgaattcgcaagagcgatgggtgtcagcgtagcgatggtgctggagtgggagtcaaagcgtgaaaaacctaccccagccgagctaaagctgatgcgcctgatccaggcaaaccctgaccttcgcaagcagttagcctga

SEQ ID NO: 524041 - DNA, 1620 bp, Stenotrophomonas maltophilia
atggctcattttgcgcaatccccctcttttattttgcatcaggtcacctgtcagtttgcgacgggcgatatcctttttggtccactgaatctttctctggatgcgtcagtgtgtgcgctggttggccgcaacggcagcggtaaaacacgccttctgcgtctgctggcaggggttgatgaacccgccagcggtcacattgagcgctttggtacacacgtctatgtggcgcagcagcaggatatttctgcggatacgactcttgccggactgcttggttacgacgcgatctttgcggcgcgcacgcgcatcgacggcggtcattatgaacccgacgatctcgacacgctcgatggttactgggatctggctgaacggctaagccaggcttttatcgctgcaaaacttcccgcttttgagccgaacaaacgcgcggcagagctgagcggcggcgagcgcattcgtgccttgctgtgcggcgcattcaccgcggatgctgattacctgctgctggacgaaccgaccaaccacctcgacaggcaaggccgcgtgtggttctacgagcagctttcccggtatcagggcggggtgctggtggcctctcacgaccgtgagttgctggcccaggtaccgcgtatccttgaactgagcgcgttgggcttgcgcagctacggcgggaattatgctgactatcgaacccagcgtgatgctgagcagctggctgcccgcgccgcgctggaacatgctgccaccgaacgcaagcgtacccgcgcccgtatgcataaagagcatgacgacagccagcggcgttcggccaaaacgcttcgcacggtcgacagccttaacatcgcctcgtttgaacgggtcaaatacaaaggggcggcgaaagagcggattggttcctggaaaaaacagcatagcgatcaaaatcatgccctgaacgctgcggttaaccaggcacgcgagcgggttgaagaggataacgcggtgatgtttaccctgccgggtagtgaaatcccggaaggaaaacaggtgctggtgctggaagaactggtgcttccgcacgtgcctgtctccccgataaactggcgaatggatggcccgatgcgcgtggcgctacgcgggccgaacggctgtgggaaatccacgctgttgaaagtgatgttgggcgaaaccgcccctgttacgggaacctgtaaggtctccgtcagatgtgcttatctcgatcagcatctttcccggctggatctgtcgcagtcggtgatgacacaccttagcctgggcaatacaccgctcgaagagggggcgctgcgtacccgtttagcgcagcttcagctgggcgcggagaaagtgacacttccactggccgatctaagcggcggcgagcgcctgaaggccgcgctggcctgcgtattgtggcgtgaagcggcaacgcagctgttgcttctggatgagccgaccaaccacctcgatctggcttccgttcaggccattgaagcggccctggccgattatcccggcgcgctgctggtggtgtcgcacgatgaagcgtttttagcaggattaaagctgacgcatgagctggtgtgggaagagtcgggatggcgatgtgaaagcctctaa

SEQ ID NO: 524042 - DNA, 702 bp, Stenotrophomonas maltophilia
atgacaaccttaagctgtaaagtgacgtcggtagatgctattaccgacaccgtatatcgcgtccgtttggttcctgaagcggcattctcattccgtgccggtcagtacctgatggtcgtgatggacgagcgtgataagcgtcctttctctatggcctcaacgccagcagagaaggaatttattgagctgcatattggtgcgtctgagcttaacctgtacgcgatggccgtgatggatcgcatcctgaaagagcgtgaaatcgtggtcgatattcctcatggcgaggcctggctgcgtgaagacgaagaccgtccgctgatcctgattgccggtggtacaggcttctcctatgtccgctctattctgttgacggcgctggcgcgtaatccaaatcgcgatatcaccatctactggggcggccgtgaagagaagcacctttacgatctgtctgagctggaagcgctgagcgtcaatcatccaaacctgcgcatcgagccggtcgtcgagcagccggaagagggctggcgcgggcgcagcggcacggtgctgactgcggtattgcaggatcacggaacgctggccgggcacgatatctacattgccggtcgctttgaaatggcgaaaattgcccgcgacctgttctgcaacgagcgtgacgcgcgggaagatcgtctgtttggcgatgcgtttgcgtttatctga

SEQ ID NO: 524043 - DNA, 1497 bp, Stenotrophomonas maltophilia
atgattaactgcatgaaataccacgatctacgcgacttcctggcgctgctggaaaagcagggcgaactcaaacgcattacgcttcctgttgatccgtatctggaaatgacagaaatcgctgaccgcaccctgcgcgcgggcggcccggcgttgctgtttgaaaacccaaaaggctacgccatgccggtactgtgcaacctgtttggcacacctcgccgcgtggcgatgggcatggggcaggaagatgtcacggcgttacgtgaagtgggcaaactgctggcctttctgaaagagccggagccgccaaaagggttccgcgacctgttcgacaagctgccgcagtttaagcaggtgttgaatatgcccaccaaacgcctgcgcggcgcgccatgccagcaaatagtgctggaaggcgatgcagttgatctgaccaaaattcccatcatgcagtgctggcctgaagatgccgcaccgctgattacctggggcctcaccgtgacgcgtgggccgcataaagagcgtcaaaacctcggcatttatcgccagcagctgattggcaagaacaagctcatcatgcgctggttgtcccaccgcggtggcgcgctggatttccaggagtggtgcgcggcccatccgggcgaacgcttcccggtttccgtcgcgctgggtgccgatccggcaaccattctgggcgcggtgacgcctgttcctgatacgctgtctgaatatgcctttgcagggctgctgcgcggtaccaaaaccgaagtggtgaagtgcatctccaatgacctggaagtgccagccagcgcagagatcgtgctggaaggttacattgaacagggcgagctggcacccgaaggaccgtacggcgaccacaccggctattacaacgaagtggataacttcccggtattcaccgtcacgcacattacccagcgtgaagatgccatttatcactctacctacaccggccgcccaccggatgaaccggcggtacttggcgtggcgctgaacgaagtgttcgtgccgatcctgcaaaagcagttcccggaaattgttgatttttatctgccgccggaagggtgttcgtatcgcctggcggtggtgacgatgaagaagcagtatgccggtcacgctaagcgcgtgatgatgggcgtatggtctttcctgcgccagtttatgtataccaagtttgtgattgtctgcgatgatgacgtcaatgcccgcgactggaatgacgtcatctgggccatcaccacgcgtatggatccggcgcgtgatacggtgttagtggaaaacacgccgattgattatctggactttgcctcgccggtttccggccttggttcaaaaatgggactggatgccacgaacaaatggcctggcgaaaccgaccgtgaatggggtcgcccgattgaaaaagatcctgccgtgaccgcgcgaattgacgcgatctgggacgagctggccataatgaataacggtaaggcagaataa

SEQ ID NO: 524044 - DNA, 492 bp, Stenotrophomonas maltophilia
atgcaggcctggtatttactgtattgcaaacgcgggcaacttcagcgcgcacaggaacatcttgaacgtcagtctgttaactgcctgacgcccgtgatcacgcttgaaaaaatgcagcgtggaaaacgcacgaccgtcagtgagcctctgttcccgaactatctgttcgttgagttcgaccccgaagtgatccacaccacgacgatcagcgccacgcgcggcgtcagccattttgtgcgttttggcgcccatccggcaagagtaccgtcatcggttattcatcagctctctgtctaccagcagcctgaagatattaccgatccggaaaccccttatgccggggacagcgtggtgatcaccgaaggcgcttttgaagggttacaggccatcttcgctgaaccagacggtgaagcgcgttctatgctgctgctcaacctgctgaacaaagaggtgttgcagagcgttaaaaacaccgatttccgcaaagtttag

SEQ ID NO: 524045 - DNA, 783 bp, Stenotrophomonas maltophilia
atgtttgatatcgggcttaacctgaccagcgcccagtttgcgaaagaccgcgatgaggtggtggcgcgcgcctttgccgccggcgtgaacgggctgttactgacgggaacaaatctgcatgagagtgagcaggcacggcagctggcgcaacgctatcaacactgctggtccaccgcaggcgtgcatcctcatgacagcagccagtggacgcatgaaagcgctgaggcgcttcatcgtctggcggctacgccagaagtggttgccattggcgaatgcgggcttgatttcaaccgtaacttctcgacgcctgaagagcaggagaaggcatttaccgcccagctcgcgctggctgcagagctggggatgccggtgtttatgcactgtcgcgatgcgcatgaacgttttctggcgctactggacccctggctggagaaactgccaggcgcggtgttgcactgctttacgggctcccgtcaggaagcgctggattgcctgaaccgcgggctttacttgggtatcacgggctgggtgtgcgatgagcgtcgtgggctggagctgcgcgagctgttatccgtaatcccggccgatcgtttgttgctggaaacggatgcgccgtatctgttgccccgggatatgcagcccaaaccggcatcacgacgtaacgaaccggcttatctgggacacattgctgagcgagtggcgtactggcgcggggaagatgcgcagtggctggcagcccaaaccgatgacaacgtgcgtcgtctgttcggcgtgcagttctaa

SEQ ID NO: 524046 - DNA, 771 bp, Stenotrophomonas maltophilia
atggcagtagatgatactcaaccgctgattacgcacctcattgagctgcgtaagcgtctgttaaactgcattattgcggttttcctcatttttttatgtctggtctattttgccaacgatatctatcaggtggtttccgcaccgctgattaagcagatgccgctgggcgcaacgatgattgcaacggacgttgcttcgccgttctttaccccgatcaagctgaccttctgggtgtcgttgattgcctctgcgccggtcattttgtatcaggtctgggcatttgtggcacccgcgctgtacaggcatgaacgcaagctggttattccgctgctggtgtccagttcgctgctgttttatatcggtatggcgttcgcctacttcgttgtcttcccgctggccttcggcttcctgacgcataccgcgccggaaggggtacaggtgtcgacggacatcgccagctacctcagcttcgttatggcgctgtttatggcctttggtgtcgccttcgaggtgcccgtcgcgattgtcctgctctgctgggtgggggtgaccacgcctgacgatctgcgtaagaagcgcccgtacatcctggtaggggcatttgtcgtaggtatgctgttaacgccaccggacgtcttctcgcaaaccttactggcgatacccatgtactgcctgtttgaagtcggcgtattcttcgctcgtttctacgtcggaaaggggcgtacccgggacgaagaagacgagccgtctgaagagaccactaaagaataa

SEQ ID NO: 524047 - DNA, 543 bp, Stenotrophomonas maltophilia
gtgttcgacattggttttggtgagttactgctggtctttgtgattggtttgattgtgctggggccgcagcgtttacccgttgcggtaaaaactgtcgtgggctgggtgcgtgcgctccgttcgctggcaacgaccgtgcagaacgagctggcgcaggaactgaagcttcaggaatttcaggacagcctgaaaaaggttgaaaaggcgagcatggacaacctgacgccggagctgaaagcatccatggatgagttgcgcgaagcggctgaatccatgaagcgctcatacagcgttaacgatcctgagaaggcgagtgatgaagcaaacaccatccataatccggtggtgaagggcagcgaagagcagcgcgagggtgtgacgccttccagcgcggaacatcaggctgcttcgccagagcaatcgccgcaggagcccgaagtgaaaaagcaggtgccgccggaagagcccgtggtcaaaacggctgaggtaaaacccgccgcgcccgtttccgaatcatccccctcgtcgagtgataaagcgtaa

SEQ ID NO: 524048 - DNA, 255 bp, Stenotrophomonas maltophilia
atgggtggtatcagtatctggcagttagtgatcattgccgtcatcgttgtgctgctgttcggcacgaaaaaactcggatcaattggttccgacctgggcgcgtcaatcaaaggcttcaagaaagccatgagcgatgatgagaataagcaggaaaaaagcggtcaggacgctgattttaccgctaaatctatcgccaataagcaggacgaagccaaaaaggaagaggccaaacgtcacgataaagagcaggtgtaa

SEQ ID NO: 524049 - DNA, 1641 bp, Stenotrophomonas maltophilia
atgacgcctggtgaaattcggcgcctctattttatcgttcgcacctttttgagctacgggctcgacgagcttatccccagaatgcgtatcaccctgccgcttcggctttggcgtcgcacgctgttctggatgccgaatcgccataaggatcaggagctgggcgcacgcctgcgtcttgcgttgcaggagctgggaccggtctggatcaagtttgggcagatgctctcaacgcgtcgcgaccttttcccgccgcagattgccgatcagctcgcgctattgcaggaccgcgtcgctccgtttgacggagagagagcgaagaaacaaatcgaagaagcgatgggcaatatccccatcgagacctggtttgatggtttcgacattcagcctctggcctctgcctctattgcgcaggttcacaccgcgcgcctgaaggagaatggcaaagaggtggtcattaaggtgattcgcccggatatcctgccggttatcagagcggacatgaagctgatctatcgcctggctcgctgggtgccgcgtctgttgccggatggccgccgtctgcgtccgctggaagtggtacgggaatacgaaaaaacgctcatcgatgaacttaacctgctgcgtgaatcggcgaacgccattcagctgcgtcgaaactttgaagacagtccgatgctgtatgttccggaagtctattctgactattgcagtcagaacatgatggtgatggaacgtatctacggcatcccggtctcggacgtggtagcgctggaaaaacagggcaccaacatgaagctgctggccgagcgcggtgtgcaggtcttctttactcaggttttccgcgacagcttcttccatgctgacatgcatccgggcaacattttcgtcagctatgagcacccggaagatccgaagtacattggcatcgactgcggtattgtcggctcgctgaataaagaggataagcgttatctcgccgagaactttatcgctttcttcaatcgcgactaccgtaaggtggccgaactgcacgtggattcaggctgggttccgccagataccaacgtggaagagtttgaatttgcgatccgtaccgtctgtgagccaatttttgaaaagccgctctcagagatctctttcgggcatgttctgctcaacctgttcaacaccgcacgccgttttaatatggaagtgcagccacaattagttttacttcagaaaacattactttacgttgagggcgtaggccgccagctctatcctcagttagacttgtggaaaaccgcgaaaccgttcctcgaatcctggattaaggatcaggtcggtattccagccctggttcgctcgcttaaagagaaaggcccgttctggattgaaaaaatgccagaaattcctgaactggtttacgacagtttgcgtcagagcaagaaccttcagcacagcatggataaaatcgcgcacgagcttcaatccagtcgcgtgcgtcaggggcagtcccgctatctcttcggaattggcgcgacgctgctgataagcggcacgttgctgttgatcaatcgtccggactgggaaatgatgccagcctggattatggctgccggtgtggttgtctggcttgctggctggcaaaaaacacgctga

SEQ ID NO: 524050 - DNA, 606 bp, Stenotrophomonas maltophilia
gtgcccattaaacccttagtcaccgcaggcatcgagaatgtactgaatgcctttctgtatcgcgccccggcgctgaaaaccgcacgtcagcggcttaacggaaaggtgctgcgtattgttttaaaagagttctcgacgccgcttgtgctggtcttcagcgaacgccagcttgacgttctgggggagtgggaaggcgaggctgactgctcggtgattacgcacatgagcgtattgccaaaactgcgtgaccgtcagcagatgacggcgcttattcgcagcggtgagctggaggtcgagggcgatattcaggtggtacagaacttcgttgcactcagcgatcaggctgaatttgaccccgcggaactgctggcgccctatatcggcgacatcgcagctgaagggataagcaaaacgctgcgcacgggttccactttcctgcgtaaaggcctgctccgtcaacagcgctatgctgccgaggtgctgaccgaagagtggcgtatggcgcctgggcctttagaagtcgcctggtttgcagaagagaccgcggcagttgagcgcgcagttgatgcgttaaccaaacggcttgaaaaactggagggcaaatga

SEQ ID NO: 524051 - DNA, 756 bp, Stenotrophomonas maltophilia
atggttgacgattcacaagacacaacgcactttggctttcagactgtcgccaaagcgcagaaagctgacatggtggcccacgtatttcattccgtggcggcgaagtacgatgtgatgaatgatttgatgtcatttggcattcatcgcttgtggaagcgcttcactattgattgcagcggcgtgcgccgtggacaaaaggtactggatttagccggcggcacaggggatctgaccgctaaattctcccgtctggttggcgaaaccggtcgcgtggtgctggcagatatcaacgactccatgctgaaaatgggacgcgaaaagctgcgtaacatcggcgtggtaggcaacgttgaatatgttcaggccaacgccgaagcgctgccgttcccggacaatacgttcgactgcatcaccatctccttcggcctgcgtaacgtgaccgataaagataaagcgctgcgctctatgtaccgcgtgctgaagccgggtggccgactgctggtacttgagttttctaaaccgattatcgacccgctgagcaaagcttacgatgcctattccttccacgttctgccgcgcatcggcgagctggtggcaaacgatgcagaaagttaccgttatctggccgaatccatccgaatgcacccggatcaggacacgctgaaagcgatgatgcaggatgcggagtttgaaaacgtggaatacttcaatatgacggcgggtgtcgtcgcgctgcatcgtggttacaagttctga

SEQ ID NO: 524052 - DNA, 1458 bp, Stenotrophomonas maltophilia
gtggatatctcaatcctggtttatgcggtagttgcgctggtgagcgtggggattggctggctcatttgcggctaccaacatgctcagcagaaagccgatcagctggcagagcgcgaagagatcgtcgccgaactcagcgcgacgaaacaacagcttacgctgtgtgaccactggcgcgatgagtgtgaactgctcaataacgaactgcgcaatctgcgcgacattaacacctcgctggaggccgatctccgggaagtgaccacccgccttgaatccacccaactgcacgccgaagacaaaatccgtcagatgatcaacagcgagcagcgtcttagcgagcagtttgagaacctcgcgaaccgcatttttgagcacagcaatcgccgcgtggatgagcagaaccgccagagcctgaacagccttctgacgccgctgcgtgaacagctggacggctttcgccgtcaggtgcaggacagctttggtcaggaggctcgcgagcgccacacgctggcgcatgagatccgtaatctccagcagctgaatgcgcagatggctcaggaggcggttaacctgacgcgcgcactgaaaggtgataacaaagcgcagggaaactggggcgaagtggtcatgacgcgcgtgctggaggcctctggcctgcgtgaaggatacgaatacgaaacgcaggtcagcattgaaaacgatgcgcgctcgcggatgcagccggatgtcattgttcgtctgccgcagggcaaagatgtggttatcgacgccaaaatgacgctggtggcctatgagcgctacttcaacgcggaagatgactatacccgcgaaacagcgttgcaggagcatatcgcctccgtgcgtaaccatatccgtctgctgggcagaaaagattatcaacagttgccggggctgcgatcgctggattatgtgctgatgttcattccggttgagccagccttcctgctggcgctcgacagacagcccgaactgatcaccgaagcgctgaaaaataacattatgctggtcagccccaccacgcttctggtggcgttacgtaccattgccaacctgtggcgttatgagcaccaaagccgtaacgcgcagcagattgccgatcgcgccagcaagctgtacgacaaaatgcggctgtttgtggacgatatgtcctcggtggggcaaagcctggatcgcgcgcaggataactaccgccaggcgatgaaaaaactctcctccgggcgcggcaatttgctggcgcaagcggaggcgtttcgcagcctgggggtggaagttaaacgcgagattaatccggaactggtggagcaggctacggctcaggacgaagagtttcgtctgcgtgaaggcgatggtgagcaaaatagccgcaatgaagacaatgggttagcggcgagtttatcccccgaagcgcagtcggcgcgtttctttcgcggtggttga

SEQ ID NO: 524053 - DNA, 762 bp, Stenotrophomonas maltophilia
atgtctaagtctgatgtttttcatctcggcctcactaaaaacgatttacaaggggctacgcttgctatcgtccctggcgatcctgagcgtgtggaaaagatcgccgcgctgatggataagccggttaagctggcagcgcatcgcgaattcaccacctggcgcgcagagctggacggtaaagcggtgatcgtgtgctctaccggtatcggtggcccgtctacctctatcgccgttgaagagctggcacagctgggcattcgtactttcctgcgcattggcaccacaggcgccattcagccgcacatcaacgtgggcgacgtgctggttaccaccgcatccgtgcgtctggacggggcaagcctgcactttgcaccgatggaattcccggcagtggctgatttcgaatgcaccaccgcgctggttgaagcggcgaaatccgtgggcgccaccacccacgtgggcgtcactgcatcttccgataccttctacccgggccaggagcgttacgacaccttctctggtcgcgtggtgagccgtttcaaaggctcaatggaagagtggcagtcgatgggcgtcatgaactacgaaatggaatctgcgacgctgctgaccatgtgcgcaagccagggtctgcgtgccggtatggtggcgggcgttatcgtcaaccgtacccagcaggagatcccgaacgctgaaaccatgaagcagactgaaagccatgcggtgaaaatcgtggttgaagcggcgcgccgtctgatctaa

SEQ ID NO: 524054 - DNA, 807 bp, Stenotrophomonas maltophilia
atgactgaaaaaaccggttttgcaccagctgcggccccgcatgcttcaaccatcgtctcaacccctgaagaggccattaccgcaggcgagacctccattccctcccagggagagaacatgccagcgtaccacgcgaggccaaaatccgccgatggcccgctgcccatcgtgatcgtggtgcaggaaatatttggcgttcatgaacatattcgcgacctctgccgccgtctggcgctggagggttacctggccgttgcgccggaactctatttccgtcagggcgatccgaatgattacagcgacatcccgacgctgttcagcaacctggtcaacaaagtgccggacgcgcaggtgctggccgatctcgaccacgttgccagctgggcagcgcgcaacggtggcgatgcgcatcgtctgatggtgactggcttctgttggggcggacgcattagctggttgtacgccgcgcataacccgcagctaaaagcggccgtggcctggtacggcaagctggtgggtgaaaaaacgctgaattcaccgaagcaacctgttgatattgccacggatttaaatgcgcctgtgttggggctctatggcggtcaggataccgggatcccgcttgatacggtcgagaccatgcgccatgcgttgcgcgcagcaaacgcgaaggcggaaattgtggtgtatccggaagccgggcacgcctttaatgccgattatcgtccgagctatcacgcggaatcggcgaaagatggctggcagcggatgctgacatggtttagccagtacggcgggaaaaaagcgtaa

SEQ ID NO: 524055 - DNA, 2262 bp, Stenotrophomonas maltophilia
atgacaatccgcactcacactctcggtttccctcgcgttggcctgcgtcgcgagctaaaaaaagcgcaagaaagctactgggcaggtaacgccacccgtgaagaactgctggcggtgggacgtgagctgcgcgcgcgtcactgggatcagcaaaaacaggcgggcattgacctgctgccggtgggcgatttcgcctggtacgaccatgttttgaccaccagcctgctgcttggcaacgtgccggctcgtcatcagaacaacgatggatcggtggatatcgataccctgttccgcatcggccgtggccgcgcgccaacgggtgagccagcggcggcggcggaaatgaccaagtggttcaacaccaactatcactatatggtgccggagttcgttaaaggccagcagttcaaactgacctggacccagcttctggatgaagtggacgaagcgctggcgctgggtcaccaggtgaaacccgtgctgctggggccgataacctacctgtggctgggcaaagtgaaaggcgaacagttcgaccgcctcagcctgctgaacgacattctgccggtttataagcaggtgctgattgagctgggcaaacgcggcattcagtgggtgcaaatcgatgaaccggcgctggtgcttgagctgccgcaggcgtggctggacgccttcaaaccggcgtataacgcgctcaccgggcaggtgaagctgctgctgaccacctacttcgaaggcgtcacgccgaacctgaaaaccattaccgcgctgccggttcagggtctgcacgttgacctcgttcacggcaaagacgatgtagcagagttgcacaagcgtctgccagtggactggctgctctctgccggtctggtgaatggtcgtaacgtctggcgtgccgatctcaccgagaaatatgcacaaattaaagacatagtcggtaaacgtgaattgtgggtggcctcttcctgttccctgctgcatagcccgattgacctgagcgtggagacccgactcgaccctgaggtgaaaagctggtttgccttcgccctgcaaaagtgtgaggagctggctctgctgcgcgacgcgttgaacagcggcgacacggcagcgattaacgactggagcgctccgatccaggcgcgccgtcactcgacgcgcgtgcataacccggcagtggaaaaacgtctggcggccatcaccgcccaggacagccagcgccagagcccgtatgaagtgcgcgccgaagcccagcgtgcgcgctttaacctgcccgcgtggccgaccacgacaatcggctccttcccgcagactaccgagatccgcagcctgcgcctggacttcaaaaagggcaatctggatgcgaatcactaccgcaccggtattgcggaacacatcaaacaggcgattatcgagcaggaacgtttaggtctggacgtgctggtgcacggtgaagccgagcgtaacgacatggtggaatacttcggtgagcacctggacgggtttgtctttacccagaacggttgggtgcagagctacggctcccgctgcgtgaagccgccggtggtgattggcgacgtcagccgcccggaagcgattaccgtggagtgggcgaagtatgcccagtctctgaccgacaaaccggtaaaaggcatgctgacgggtccggtgaccattctctactggtcgttcccgcgtgaagacgtaacccgggaaaccatcgccaaacagatcgccctggcgctgcgcgatgaagttgcggatctggaagcggccgggattggcatcattcagatcgatgaacctgcgctgcgtgaaggtttgccgctgcgtcgcagcgactgggatgcttacttacagtggggcgtggaggcgttccgcctcaacgcggctgtcgcgaaggacgatacgcagatccacacccacatgtgttactgcgaatttaacgacatcatggactccattgccgcgctcgacgccgatgtgatcaccatcgagacctcgcgttcagacatggagctgctggagtcgttcgaagagttcgactacccgaacgaaatcgggccgggcgtgtacgacattcactccccgaatgtgccaagcgtggagtggattgaatcgctgctgcaaaaagcggcccagcgcatcccggcggaacgtctttgggtaaacccggactgcggcctgaaaacccgtggctggcctgaaacccgcgcggcgctggcgaacatggtgcaggcggcgcagaatttgcgtcaggcttga

SEQ ID NO: 524056 - DNA, 954 bp, Stenotrophomonas maltophilia
atgatcgagataaaacacctgaaaacgctacaagcgttgcggaactgcggttctcttgcggcggcagcggccacgctgcaccagactcagtctgccctttctcaccagttcagcgatctggaacaacgcctcggctttcgtctttttgtgcgtaagagccagcctttgcgctttacgccgcagggcgaaattttgcttcagctggcgaaccaggtgctgccgcagattgccagcgcgttgcagtcctgcaacgagccgcagcagaccaccctgcgcatcgccattgagtgtcacagctgtattcagtggctgacccccgcgcttgagaacttccgccagaagtggccgcaggtggagatggacttcaagtccggcgtcacgtttgatccgcagccgtcgcttcagcagggtgagctggatctggtgatgacctcagatattctgccgcgcagcggtctgcactattcgccaatgtttgattttgaggtacgtctggtgctggccccggaccatccgctggccgccaaaacgcgtatcacgccggaagatctggcaacggagaccctgctgatttacccggtacagcgcagtcgtctggatatctggcgccatttcctgcaacccgcaggcatcagcccacagctgaaaagcgtggataacacgctgctgttaattcagatggtggcggccagaatgggaattgcggcgctgccgcactgggtggtcgagacggttgaacgccagggtctggtggttaccaaaaccctgggtgaaggactgtggagccggctgtacgccgccgtgcgcgacggcgagcagcgtcagccgattacggaagcgtttattcgctcagcgcggaaccacgcgtgcgaccatcttccgtttgtgcggagcgcggagcgacccagcggcgatgtacccacagcgaagccaggatcaccgttcccccaataa

SEQ ID NO: 524057 - DNA, 900 bp, Stenotrophomonas maltophilia
gtggcgctactcattatcaccactatcctgtgggccttctcctttagcctgattggcgaataccttgccggatcggtcgacagctacttttcggtgctgatgcgtgtggggctggcggcgctggtgttcctgccgttcctgcgtacccgcgggcaatcgctgaaaaccattctgctgtatatgctggtgggcgcaatgcagctcggcatcatgtacctgttcagcttccgggcttacgtctacctctccgtctcggaatttctgctctttaccgtgctcacgccgctctatatcacgctgatttacgacctgctcagcaggcgccgcctgcgctggggatatctgctgagcgctgcgctggcagtcattggcgcggcgataattcgctatgacaaggtgagcgatcacttctggaccgggctgatgttcgtccagctcgccaatatcagcttcgccatcgggatggtgggctacaaacgcctcatggagacccgcccgatgccgcagcataacgcgtttgcgtggttctatatgggcgcagcgattgtcgcgattgcggcatggtttatgctcggcaacccgcaaaagctgccgaccacccccgtgcagtggagcgttctggtctggctgggcgtggtggcctcggggctgggctactttatgtggaactacggcgcgacgcaggtagacgccggaacgctggggatcatgaacaacgtgcatgtgccggcggggctactggtgaacctcgccatctggcaggaacagccgcactggccgagtttccttattgggggaacggtgatcctggcttcgctgtgggtacatcgccgctgggtcgctccgcgctccgcacaaacggaagatggtcgcacgcgtggttccgcgctgagcgaataa

SEQ ID NO: 524058 - DNA, 801 bp, Stenotrophomonas maltophilia
atgtaccaggttgttgcatctgatttagatggcacgctgctttcccccgaccacaccctgtcgccttatgcgaaagagaccttaaaactcctgactgcccgtggcgtgaactttgtgttcgccaccggccgccaccacgtggacgtggggcagatccgcgataacctggagatcaagtcgtacatgatcacctccaacggtgcgcgcgtacacgacacggacggcaacctgatttttacccacaatctcgatcgcgacatcgccactgatttgttcggcattgtgcataacaacccggatatcgtcactaacgtttatcgcgacgacgagtggtttatgaaccgtcatcgcccggacgaaatgcgtttcttcaaggaagccgtcttcaactactccctgtatgaaccgggtttgctggatcctgaagggatcagcaaggtgttctttacctgcgaaagtcacgaagcgctgcttccgctggagcaggcgatcaacgcccgctggggagaccgcgtgaacgtgagcttctccacgctgacttgtctggaagtgatggcgggcggggtgtccaaaggtcacgcgctggaagcggtcgcgaagcgtctgggctttgatctgaaagactgcatcgcgttcggcgatggcatgaacgatgccgagatgctctccatggcgggcaaaggctgcatcatgcagaacgcgcaccagcgcctgaaagatctgcacccggagctggaagtgattggcaccaacgcagacaacgcggtacctaagtatttgcgcaaactgttccttgaataa

SEQ ID NO: 524059 - DNA, 993 bp, Stenotrophomonas maltophilia
atgtttcagcagaaaaaggactgggaaacacgagaaaacgcatttgctgctttctccatggggccgctgaccgatttctggcgccagcgtgaggaagatgagtttatgggcgtcggggatatcccggtacgcttcgttcgtttccatgatgaaaaaaatgaccgggtgattgtggtttgccccgggcgcatcgaaagctatatcaaatatgccgagctggcgtatgacctgttccatctgggctttgatgtgttaattatcgaccatcgcgggcaggggctttccggccggatgctgccggatacccatcgcggccacgtggataacttcagcgattacgtcgacgatctggccgcgttctggcagcaggaagtgcagcccggaccgtggcgcaagcgttatattcttgcccactccatggggggcgcgatctcgacgttgtttttgcagcgccataagcaccagtgcgacgccattgcgctgaccgcgccgatgtacggcattgtgatacgttttcctgactggatggtgcgccatcttctcgactgggctgagggccatcagcgcattcgtgaaggctatgccatcggaacaggacgctggcgggcgttgccgtttgccatcaacgtgttaacccacagtcggcagcgttatcgccgcaacctgcgtttttatgccgatgaaccgcgtctgcgggtcggcggccccacctggcactgggtgcgggaaggtattcatgccggtgagcaggtgctggcgggcgtaggcgatgatgacacgccgacgctcctgatccaggcggaagaagagcgtgtggtggataaccgcatgcatgaccgctattgtgaacttcgcgccgcggcgggccatccctgtgaagggggtaaaccgctggtcatcaacggtgcgtaccatgagatcctttttgaaaaggacgctatgcgctcagtcgcgctcaacgccattgttgaatttttcaacaggcataactga

SEQ ID NO: 524060 - DNA, 621 bp, Stenotrophomonas maltophilia
atgaccttcgagtggtggttcgcttacctgctgacatccatcatcctcagcctttcacctggctcgggcgcaatcaacaccatgaccacctccattaatcacggctatcgcggcgcggcggcgtcaattgccggtttacagacagggcttggcattcacattgtgctggtggggattggtctgggcacgctgttctcccgttcggtgctggccttcgaagtgctgaaatggactggcgcagcgtatcttatctggctgggcattcagcagtggcgcgccgcaggctcgattgatctgcatacgctctcccggacgcaaacacgcggccacctgtttaagcgcgcggtattcgttaacctgaccaacccgaaaagcattgtgttcctcgccgccctgttcccgcagtttatcgtgccgcatcagccccaggtgatgcagtacgtggtgctgggcgcgacaaccattattgtcgatatcattgtgatgattggttacgcgacgctggcgcagcgaattgcggcgtggatcaaagggcctaagcagatgaaggccctgaacaaagtctttggttcgctgtttatgctggttggcgcgctgcttgcgtcagcgcgtcatgcttag

SEQ ID NO: 524061 - DNA, 621 bp, Stenotrophomonas maltophilia
atgttaatgctatttctcaccgtggcgttagtgcacattgttgcgctgatgagccctggccctgacttcttcttcgtgtcacaaacggccgtcagccgctcccgcaaagaggcgatgatgggtgtgctcggtatcaccatgggcgttatggtctgggcggcggttgcgctgcttggtctgaacctgatcctggcgaaaatggcgtggctgcataacatcatcatggttggcggcggtctgtacctgtgctggatgggctaccagatgctgcgcggggcgctgaagaaagaagagaaaaagccggaagagccaaaggttgagctggcaacgggcggccgtagctttgtgaaagggctgctgactaacctggcgaacccgaaagcgattatttacttcggctctgtgttctcgctgtttgtgggggataacgtcggtgcgggcgcgcgctgggggatcttcctgctaatcgttgttgagacgttcgcctggtttaccgttgtggcaagcctgtttgctttaccggcgatgcgtcgcggctaccagcgcatcgcgaagtggatcgacggctttgccggcgcactgttcgccggcttcggcattcatctcatcatttctcgctaa

SEQ ID NO: 524062 - DNA, 1830 bp, Stenotrophomonas maltophilia
gtggcgcaggcggaagtattgaatcaggaatcgctggctaaacaggttttgcatgaaacctttggctaccagcagttccgtcctggccaggaaaccatcattgaaaccgtgctggaaggccgcgattgcctggtggtcatgccgaccggcggcggaaaatcgctctgctatcaggtgcccgcgctggtacttaatggcctgacggttgtggtctccccccttatttccctgatgaaagaccaggtcgaccagctgcttgccaacggcgtggcggcggcctgtcttaactcgacgcaaacccgcgagcagcagcaagaggtgatggccgggtgccgcaccgggcagatccgcctgctgtatatcgcgccagagcgcctgatgctggacaacttcctcgaccacctggcgcactggaacccggtgctgctggcggtggatgaagcgcactgtatctcccagtgggggcacgatttccgcccggaatacgccgccctcggtcagctgcgtcagcgcttccctgagctgccgtttatggcgcttaccgccacggcggatgacaccacgcgtcaggatatcgttcgcctgctggggctgaaagacccctatattcaggtcagcagcttcgaccggccgaacatccgctatatgctgatggaaaaattcaagccgctggatcagctcctgcgctacgtgcaggagcagcgcggcaagtccggcatcatctactgcaacagccgcgcgaaggtggaagacaccgctgcgcgtctgcaaaatcgcggctttagcgcggcggcataccatgccgggttagaaaaccacatccgcgccgacgtacaggaaaaattccagcgcgacgacctgcaaatcgtggtcgcaacggtggcgttcgggatggggatcaacaagcccaacgtgcgctttgtggtgcactttgatatcccgcgcaatatcgaatcctattatcaggaaaccggccgcgccgggcgtgatggcctgcctgcggaagcgatgctgttttacgatccggcggatatggcgtggctgcgccgctgtctcgaggagaaaccgcaggggcagttgcaggatatcgaacgccacaagcttaacgcgatgggtgccttcgccgaagcgcaaacttgccgccgtctggtactgctcaactactttggtgaagggcgacaggcgccgtgcggcaactgcgatatctgcctcgacccgccgaagcagtacgacggtctgatggacgcgcgcaaagcgctctcgactatcggacgcgtgaaccagcgctttgggatgggctacgtcgtcgaagtgctgcgtggggctaacaaccagcgtatccgcgacatggggcacgacaagctgccggtttacggcatcgggaaagaccagagccacgagcactgggtaagcatcatccgccagctgatccatctcggctttgccacgcaaaatattgcccagcactctgcgcttcagcttaccgaagcggcgcgaccggtcctgcgcggtgaggttgaactgaagctcgccgttccgcgcgtcgtcgccctgaagccgcgcgtgatgcagaaatcctacggcggcaactacgatcgcaagctgttcgccaagctgcgcaagctgcgtaaaaccattgccgatgaagagaacatcccgccatacgtggtgttcaatgacgcgacgctgatcgagatggccgagcaaatgccactgagcgccagcgagatgctcagcgtcaacggcgtcggcacgcgcaaactggagcgctttggtaaagagtttatggcgcttatccgttcccacgctgatggtgatgatgaggagtag

SEQ ID NO: 524063 - DNA, 870 bp, Stenotrophomonas maltophilia
atgcggacgtatctgggttggttactggcggcggttgcgctgcccctcacagcatatgcgcaggaagcgacgatcaaagaagtgcatgataaacctgccgttcagggcagcatcatcgccaatatgcttcaggagcatgacaatccgttcacgctctacccctatgacacaaactacgtgatctatacccagaccagcgatctcaacaaagaggcgataagctcctataactggtctgacaatgcgcgtaaagatgaggtgaagttccagctcagcctggccttcccgttatggcgcggcatcctggggccgaactcggtgcttggtgcatcttacacgcagaagtcatggtggcagctctccaacagcggggaatcttcaccgttccgcgaaaccaactatgaaccgcagctgttcctcggtttcgccactgattatgagtttgcaggctggacgctgcgcgacgtggaggtgggctataaccacgattccaacggtcgttccgacccaacctcacgcagctggaatcgcgtctatacgcgtctgatggcgcagaacggcaatttcatggtggaagtgaagccgtggtacgtggtgggcagcaccgatgacaacccggatatcaccaaatacatgggctattatcagcttaaagtgggctatcagctgggtgacgcggtgctgagcgccaaagggcagtacaactggaataccggctacggcggcgcagagctgggcctgagctatccggtgacgaagcacgttcgtctctatacccaggtgtatagcggttatggcgaatcgctgattgactataacttcaaccagacccgcgttggtgtgggcgtcatgctgaacgatattttctaa

SEQ ID NO: 524064 - DNA, 468 bp, Stenotrophomonas maltophilia
atgtcagccacactcaccgccgaagaaaccttaaagctcgtgggcgagatttttgtgtaccacatgccattcaaccgtgcactgggtcttgagctggagcgatacgaaaaagacttcgctcagctgagtttcaataatcagccaatgatggtcggtaactgggcgcaaagcattttgcacggcggggtgattgcctctgcgctggacgtggcggccggtctggtgtgcgtgggcagcacgctgacgcgccatgacaccatcaacgaagatgaattacgccagcgcctgtcgcgcatgggcaccatcgatttacgcgtcgactatctgcgaccgggacgcggaaaccgcttcacctgcaccagcagcctgctgcgcgccgggaataaagttgccgtcgcccgcgttgagctgcataacgaggagcaggtttatatcgccagcgcaaccgccacttatatggtgggttga

SEQ ID NO: 524065 - DNA, 897 bp, Stenotrophomonas maltophilia
atggatgctaaacagacgcggcagggcgttttactcgcccttgccgcttattttatttggggtatcgcaccggcgtacttcaagcttatcgcctatgtcccggcggacgagatcctcactcaccgcgtcatctggtcgtttttctttatgattgcgctgatgagcatcagccgtcagtggtcaggcgtcaaaacgctactgaaaaccccgaagaaggtcttcctgcttgccctctctgcggtgctgattggcggaaactggctgctgtttatctgggcggtgaataaccatcacatgctcgaagccagcctgggctacttcattaacccgctggtgaacatcgtgctggggatgattttcctcggcgaacgtttccgccggatgcagtgggtggcggtgattctggccctctgcggcgtgctggtgcagctgtggaccttcggttcactgccggttatcgccctggggctggcgttcagctttgccttctacggcctggtgcgtaaaaaaatcgccgtggaagcgcagacgggaatgctgtttgaaaccctgtggctgctgcctgtcgcggcgatctacctgttcggtattgccgacagcgccaccagccacatgagcagcaacccatggtcgctgaacctgatgctgatggcggcgggcgtggtcacgacgattcccctgctgtgcttcaccggcgcggcaacgcgtctgcgtctctcgacgcttggcttcttccagtacattggcccgacgctgatgttcctgctggcggtggtgttttacggcgaggtgccgggtgcggataagatggtgacgtttgcctttatctgggtggcgctggcgattttcgttgcggatgcaatttatacccagcgcaggactcgcagaggaatttag

SEQ ID NO: 524066 - DNA, 951 bp, Stenotrophomonas maltophilia
atgttgagcgcatttcaactcgaaaataaccgactgactcggcttgaagccgaagagtcacagcccctcattgatgccgtatgggtggatctggtcgagccggacgacgatgagcgccttcgcgtacaatctgaactggggcaaagcctggcgacacgcccggaactggaagacatcgaagcatccgcccgtttttttgaagacgaagacggcctgcacattcactccttcttcttcttcgaagatgccgaagaccacgcggggaactccaccgtggcgttcaccatccgcgatggccgcctgttcaccctgcgcgagcgcgaactgcctgcgtttcgtctctaccgcatgcgcgcccgcagccaggcgatgatggacggtaacgcctatgagctgctgctggatctgttcgaaaccaaaatcgaacagctggcggatgaaatcgaaaacatctacagcgacctggaaaagctgagccgcgtgatcatggaaggccatcagggtgatgagtacgacgaagcgttgtccacgctggcagagctggaagatatcggctggaaggtgcgtttgtgtctgatggatacccagcgcgcgctgaacttcctggttcgcaaggcgcgtctgccgggcggtcagctggagcaggcgcgtgagatcttacgcgatatcgaatccctgctgccgcacaacgaatccctgttccagaaggtcaacttcctgatgcaggcggcaatgggctttatcaacatcgagcagaaccgcatcattaagatcttctcggtggtttccgtggtgttcctgccgccgacgctggtggcatccagctacgggatgaactttgagtttatgccggagctgaagtggagctttggctacccgggggcgattatctttatgatcctcgccgggctggcgccgtacctgtacttcaagcggaagaactggttgtaa

SEQ ID NO: 524067 - DNA, 2163 bp, Stenotrophomonas maltophilia
atggacgtttcttacctgctcgacagccttaatgacaaacagcgtgacgcggttgccgcctcgcgtacaaacctgctggtactggctggagcgggcagtggtaagacgcgcgtgctggttcaccgtatcgcctggctacagagcgtggagaactgctcgccgtactcgattatggccgtgacgttcaccaacaaggcggcggcggagatgcgccaccgtatcgcacagctgatgggcaccagccagggcggcatgtgggttggcaccttccacggcctggcgcaccgtctgctgcgcgcgcaccatatggacgctaacctgccgcaggatttccagatcctcgacagcgaagatcagctgcgcttactgaaacgtctgatcaaggcgatgaacctcgacgagaagcagtggccgccgcgtcaggcgatgtggtacatcaacggtcagaaagacgaagggctgcgtccgcaccacattcaaagcttcggtaacccggttgagcagacctggcagaacgtctacaaggcctatcaggaagcgtgcgatcgcgccggtctggtggatttcgccgaactgctgctgcgcgcccacgagctgtggctcaacaaaccacatatcctgcaacactaccgtgaacgcttcaccaacattctggtggacgaattccaggataccaacaacattcagtacgcgtggatccgcctgctggccggggataccggcaaggtgatgatcgtgggcgatgacgaccagtctatctacggctggcgcggcgcgcaggtggagaacatccagcgctttctcaacgatttccccggcgcgcaaaccatccgtctggagcagaactaccgttctaccagcaacatactgagcgcggccaacgccctgattgagaacaacaacgggcgactgggtaaaaagctgtggaccgatggcgtcgacggcgaaccgatttcgatttactgcgccttcaacgagctcgacgaagcccgcttcgtggtgaaccgcattaaaacctggcaggagaacggcggtgcgctggagcagtgtgccattctctatcgcagcaacgcccagtcgcgcgtgctggaagaggcgctgttacaggtgagcatgccgtaccgcatttatggcggtatgcgcttcttcgaacgtcaggagatcaaagatgcgctctcgtatttgcgtctgattgccaaccgtaacgacgatgcggcgtttgagcgcgtggtgaacacgccgacgcgtggcatcggcgatcgtacgctggacgtggtgcgtcaggcctcgcgcgatcgtcagctcacgctatggcaggcatgccgcgagctgttacaggaaaaagcactcgccgggcgcgccgccagcgcattgcagcgcttcctggagttaatcgacgcgctggcgcaggaaacggccgacatgccgctgcacgtccagaccgaccgggtgatcaaagattccggcctgcgcaccatgtacgagcaggaaaaaggcgagaagggccagacccgtattgagaacttagaggagctggtgacggcaacgcgccagttcagctacaacgaagaagacgaagacctgatgccgttgcaggcattcctctctcacgccgcgctggaggcgggtgaagggcaggccgatacctggcaggatgcggttcagctgatgaccctgcactccgcgaaaggtctggagttcccgcaggtgttcatcgtcgggatggaagaggggatgttcccgagccagatgtcgctggatgaaggcgggcgtctggaagaggaacgtcgtctggcctacgtgggcgtgacccgtgcgatgcagaaactgaccctgacctacgcggaaacccgccgcctgtacgggaaagaggtgtatcaccgtccgtcgcgctttatcggcgaactgccggaagagtgtgtggaagaggtgcgcctgcgcgcaagcatcagccgtccggtcagtcatcagcgtatgggctcgccaatctcggaaaccgataccggatacaagctgggccagcgcgtgcgccactcgaagtttggcgaaggcaccatcgtcaatctggaaggcagcggcgagcacagccgtttgcaggtcgcgttccaggggcaggggatcaaatggctggtggcagcctatgccaagctggaaagtgtgtaa

SEQ ID NO: 524068 - DNA, 717 bp, Stenotrophomonas maltophilia
atgcgtttttaccgcccactcggtcagatctcagccctgacgtttgatcttgatgacaccctttacgacaaccgcccagtgatcctgcgtaccgagcaggagtcgctggcgtttgtgcaaaactatcatcctgcgctgaaagcgatccagaacaaagagttccagaagctgcgtcagtccctgcgggaaaccgagccggaaatttatcatgacgtgaccgaatggcgccgccgtgcggttgagcaggcgatgctcaatgccggcctgagcgcgcaggacgcggccatgggtgctgaagcggccatggaaaacttcgccaaatggcgcagccgaatcgacgtgccgcaggagacccacgacacgctggcgaagctcgccgaaaagtggccgctggtcgccattaccaacggcaacgctcagcctgaactgtttggtctggggaactattttcagttcgtgctgcgcgcgggcccgcacggacgctcgaagccgttcaacgatatgtatcatctggcggcggaaaaactggatttgccgctcggtgagatcctgcacgtgggcgacgacctgaccacggacgtcgccggggcgatccgctgcggcatgcaggcctgttggatcaagccggaaaatgccgatctgatgactaccccggatagccgtcttctgccgcacgtggaaatttcacggttggcatccctcacgacgctgatataa

SEQ ID NO: 524069 - DNA, 903 bp, Stenotrophomonas maltophilia
atgacggacggactgctcgccactgacgttacccgttttctgcgctatcttggcgtagaacgccagcttagccctattacgctgctcaactatcagcgtcagcttgatgccatcatgcagattgccgatgaaatcggtcttaaaagctggcaacaatgtgacgccgccacggttcgcggcttcgttgtgcgtagccgtaaaaaaaacttaagcccggcgagcctggcgctccggctctctgccctgcgcagtttcttcgactggctggtcagccagggcggtctgaaagccaacccggcaaaagggatcgccacgccaaaggccccgcgtcatctgccgaaaaatatcgacgtcgacgacgtaaaccgcctgctggatatcgatcttaacgatccgctggccgtgcgcgaccgcgcgatgctggaggtgatgtacggcgcgggcctgcgtctctctgagctggtgaacctcgacttaaagcacctcgatctggaatccggcgaagtgtgggtgatgggcaaaggcagcaaagagcgccgcctgccgattggccgcaacgcggtctcctggattgagcactggctggacctgcgcgggctgtttggcgccgacgaagatgcgctgttcctgtcgaaactaggcaagcggatctcggcgcgtaacgtgcagaagcgctttgcggagtggggcattaagcaggggctgaacagccacgttcacccccacaagctgcgccactcctttgcgacgcacatgctggaatcaagcggcgacctgcgcggggtacaggagctgcttggtcacgcgaatctgtcgaccacccaaatctatacccacttagacttccaacaccttgcctcggtgtatgacgcggcgcatccacgcgccaaacgggggaaataa

SEQ ID NO: 524070 - DNA, 708 bp, Stenotrophomonas maltophilia
atgaagcaaccaggggaagaactgcgggaacctgtaacggagctggatgacagcgctgttgtggattacctgctgcacaatcctgagttttttatccgcaatgcacgcgtcgtcgaaaggatgcgcgtaccgcatccggttcgcgagaccgtgtcgctggttgaatggcacatggcgcgctcgcgcaaccacatcaatcagctcgaagagaacatgacgctgctgatggagcaggccagcactaacgaaagcctgttctatcgccttctgcaccttcaggcgcgtctggcttccgcgcacagtctcgaagagttcctcaaccgcttccaccgctgggcgcgcgagctggggctggcaggcgcgacgatccgtctcttccctgaccgctggcgcattggcgcgccgtccgggtttacccatctggcgctgagccgtcaggcgtttgagccgctgcgcattcagcgtctgggccatgagcaccactatctggggccgcttaacgggccagaactgctggtggtgctaccggaagccaaagctatcggctcggtggcgatgtcgctgatggggcgcgatggtgacttgggtgtgatgttatttaccagccgcgacgcgcatcattatgaacaggggcagggcacgcaactgttgcaggagatcgccctgatgctgcctgagctgctggagcgctggattgagcgcgtatga

SEQ ID NO: 524071 - DNA, 825 bp, Stenotrophomonas maltophilia
atgcagttctctaaaatgcatggccttggcaacgactttatggtcgtcgacgcggtaacgcagaatgtctttttctccccggaactgatccgtcgtctggcggatcggcacgtgggcgtggggtttgaccagctgctggtggtggagccgccttacgatcctgacctggacttccactatcgcatttttaacgccgacggcagcgaagtttctcagtgcggcaatggcgcacgctgttttgcccgctttgttcggctgaaagggctgaccaacaagcgcgatatccgcgtcagcaccgccaacggccggatggtgctcagcgtcaccgacgaggaactggtgcgcgtgaacatgggcgagccgaacttcgaacccgctgccgtgccgtttcgcgccaacaaagcggaaaagacctatattatgcgtgccgccgagcagacagtattgtgcggcgtcgtctcgatgggtaacccgcactgcgtgattcaggtggatgatgtgcaaaccgcggcggttgaaacgctcggcccggtgctggaaagccacgagcgcttcccggagcgggcgaacatcggtttcatgcaggtggtgaagcgtgaacacattcgcctgcgggtttacgagcgcggcgcgggcgaaacccaggcctgcggaagcggtgcctgtgcggcggtggccgtcggtatctcgcaggggttactggcggaagaggttcgcgtggaattaccgggcgggcgtcttgatatcgcctggaaaggagcgggtcatccactgtacatgactggcccggcgacacatgtttatgacgggtttatccatctatga

SEQ ID NO: 524072 - DNA, 321 bp, Stenotrophomonas maltophilia
atgaacgacagtgaatttcatcgccttgccgataccctgtggatgaccatcgaagagcgtatcgacgagtgggacggcgacagcgatatcgattgtgaaatcaacggcgggatcctgaccttaagcttcgaaaacggcagcaagattattattaaccgtcaggagccgcttcaccaggtgtggctggcggcgaaacagggcggttatcactttgatctaaaaggtgacgagtggatctgcgaccgcagcggcgaaacgttctgggatctgctggagcaggcggcgaccgcgcaggcgggcgacgacgtgagtttcaggtag

SEQ ID NO: 524073 - DNA, 2544 bp, Stenotrophomonas maltophilia
ttgtacctctatattgagactctgaaacagagactggatgccatcaatcaattgcgtgtggatcgcgcgcttgctgccatgggccctgctttccagcaggtatacagtctactgccgacattgttgcactatcaccatccgctaatgccgggttacctcgatggtaacgttccccagggcatttgcctcttcacgcctgatgaaacccaacagcactatctgactgaacttgagctttaccgtggtatgccgccgcaggtttcgccgaaaggcgagctgccgattaccggggtttactccatgggcagcacgtcatcggttgggcaaagttgttcttctgacctggatatctgggtctgccatcagtcctggctcgacaatgaagagcgccagctgttgcagcgtaaatgcagtctgctggagagctgggcggcgtcgctcggcgtggaagtgagcttcttcctgattgatgaaaaccgtttccgccataacgaaagcggcagtctgggtggtgaagactgcggctcgactcagcacattctgttgctggatgagttttaccgtactgcggttcgcctggccggaaaacgtattctgtggaatatggtgccgtgcgatgaagaagagaattatgacgactacgtcatgtcgctttactcgcagggcgtactgacgccaaacgagtggctggatctgggcggtctgagctccctgtccgccgaagagtactttggtgcaagcctctggcagctctataagagcattgattcaccgtacaaagcggtgctgaaaaccctgctgctggaagcctactcctgggaataccccaccccgcgtctgctggcgaaagatattaagcagcgtctgcacgacggggagatcgtctcctacgggcttgatgcctactgcatgatgctggaacgcgtcaccgaatacctgacggccattgatgacgccacgcgtcttgacctggtgcgtcgatgtttctatctcaaagtctgtgaaaaactgagccgcgagcgcgcctgcgttggctggcgccgcgaagtggtcagccagttagtcaaagagtggggatgggacgaagcgcgtctcgccatgctcgacaaccgcgccaactggaaaatcgatcaggtgcgcgaggcgcacaacgagctgcttgatgcgatgatgcagagctaccgcaacctgatccgctttgcccgccgtaacaaccttagcgtttctgccagcccacaggatatcggggtgctgacccgtaaactgtacgccgcgtttgaagcgttgccgggcaaggtaacgctggtgaacccacagatttcgcctgacctgtctgaaccgaatctgacctttatctacgtgccgccgggccgcgcaaaccgcaccgggtggtatctgtacaaccgtgcgccaagcatggattcgatcatcagccatcagccgctggagtataaccgctaccttaacaagctggtggcctgggcctggtttaacggccttctcacctcacgcacccggttgtttatcaagggcaacgaggtggtcgatttagccaaattgcaggagatggtggcggatgtctcgcaccacttcccactgcgtctgcctgcgccgacgccaaaagcgctctacagcccgtgtgagattcgccatctggcgatcatcgtcaacctggaatacgacccgacggcggccttccgcaatcaggtggttcactttgacttccgtaagctggacgtctttagcttcggtgagcagcaaaactgcctggtgggcagcgtggatctgctgtaccgcaattcgtggaacgaagtgcgtaccctgcactttaacggcgagcaggcgatgatcgaggcgctgaaaacgatcctcggcaagatgcaccaggacgccgcgccgccggacagcgtggaggtgttctgctacagccagcaccttcgcggcctgattcgtacccgcgtgcagcagctggtgtctgagtgcatcgaattgcgtctttccagcacccggaatgaaaccggacgctttaaagcgctgcgcgtctccggccagacctgggggctgttctttgagcgcctgaacgtgtcggtgcagaagctggagaacgccattgaattctacggcgcgatttcacacaacaaactgcatggcctgtcggttcaggtggaaaccaaccacgttaagctgccgcaggtggtggatggctttgcgagtgaagggattattcagttcttcttcgaggagtcgggcgataacgccgggtttaatatctacattctggatgaaaccaaccgtgccgaggtgtatcaccactgtgaaggcagcaaagaggagctggtgcgcgatgtcagccggttctattcatcctcgcacgatcgctttacctacggctcaagttttatcaacttcaacctgccgcagttctaccagattgtgaatgtggatggacgagcgcaggtgatcccgttccgtacgcaggcgattacccctgcggtgcccgctaaccaggaaactgcgccgctgttgcagcagtatttctcctga

SEQ ID NO: 524074 - DNA, 822 bp, Stenotrophomonas maltophilia
atggtcacgcgtggcgatgtcattcttgatacgccgctggccaaagtgggcggaaagggtctgtttgtcaaagagctggaactggcattgcttgagaaccgcgccgatatcgccgtgcattcgatgaaggatgtgcccgttgagttcccggaagggctggggctggtgaccatctgcgagcgcgaggatccgcgcgatgcgtttgtctctaatcgctatgactcgcttgatgcgttgccggcaggcagcgtggtcggcacgtcaagtttacgccgccagtgtcagctggctgaacgtcgcccggatctggtgattcgctcgctgcgcgggaacgtcggcacacgccttggcaagctggataacggcgactacgatgccattattcttgcggttgcgggcctgaaacgcctggggctggaagaacgtattcgcgtggcgttgccgccggagctgtcgctgcccgccgtcggccagggtgccgtcggcattgagtgtcgtctggatgatgcgcgtactcaggcactgctcgcgccgctgaatcatgacgataccgccgttcgcgtaaaagccgagcgcgcgatgaacactcgcctcgaaggaggctgtcaggtgccaattggcagctatgctgaattaactgacggtgagctgtggctgcgtgcgttggttggcgcgccggacggctcgcagatggttcgcggtgaacgtcgcggcaagccgcaggatgccgaggcgcttggcgtatcgctggcggaagagctgctgaataacggcgcgcgtgaaattctggctgaggtctataacggagagccccctgcatga

SEQ ID NO: 524075 - DNA, 741 bp, Stenotrophomonas maltophilia
atgagcatacttgtcacccgcccttctcccgcaggagagcagttagtgagccgtctgcgcgcactggggcaggtggcctggagttttccgttgattgaattctcccccggtcacgagctgcctacgctcgctgaccagatgcgtgccttgcaggaaggtgatctgctctttgcgctatcgcagcatgccgtggaatttgcccatgcgcagctgcaacagcagggcgttaactggccccacgcaccccgctatttcgccatcgggcgcaccacggcgctggccttacataccgcgagcggaatcgatgttcgttacccgttagatcgggaaatcagcgaagtcttgctacaattacctgaattacaaactattgccggaaagcgtgcgctcattttgcgcggcaacggtggccgcgaactgctgggcgagacgctgcgcgaacgcggcgcagacgtgacgtttgtggagtgctatcagcgctgtgcaaaacactatgatggcgcggaagaagccatgcgctggcatgcgcgcggcattaatacgctggtggttaccagcggtgaaatgttacaacagctttggtcgctgattccgctttggtatcgcgaaaactggttactccgctgtcggcttctggtcgtcagcgagcgtctggcgaaccacgcccgggaactgggctggcaggatattcggatcgctgataacgccgacaacgatgcgctgctgcgcgcattacaataa

SEQ ID NO: 524076 - DNA, 1194 bp, Stenotrophomonas maltophilia
atgacggaacacgaaaaatcctccgccgtggttgaagagaccagggagactgtggacaccacgtcacagccagagacgacagacaaaaccgttgagaagaaaaacggcagcaataaaaccagcctcacgctgagcgtgattgccatcgcgattgcgctggccgcaggcgtgggtctctacggactggtgaagaaacaaggcaccaaccagacggccaccagcgacgcgctggttaaccaaatcaccgccctacagaaagcgcaggagacgcaaaaagctgagctggaaggcgtgatcaaacagcaggctgccgccctcgccgacgcgaacagcaaacgtgaagagttgaccaaacagctgagcgaagtgcaggagaaagtcgccacgatttcgggaaccgatgccaaaacctggctgctctcacaggccgattttctggtgaagctggccgggcgcaagctctggagcgatcaggatgtcaccaccgccgccgcgctgctgaaaagcgccgacgcaagcctggccgatatgaacgatccgagcctcatcaacgcacgccgcgctattacggaagatatcgccagcctgtctgcggtttctcaggtcgactacgacggtatcatccttaaggtaaatcagctctccaaccagattgataaccttcagctggccgataacaacgacgatgactccccgatggattctgacggcaccgagctgtccagctccctgagcgaatggcgtatcaacctgcaaaagagctggcagaactttatggacagctttattaccattcgccgccgcgatgaaactgccgtgccgctgctggcaccgaaccaggatgtctatctgcgcgaaaacattcgctcccgcctgctggtggctgcccaggccgtaccacgtcaccaggaagagacctacaaacaggcgctggataacgtttcaacctgggtacgtgcttactacgataccaatgacgcaaccacgaccgcgttcctggaggatatcgacaagctgagccagcaaaacatcaccatgaacgtgccggacaagctggaaagccagccgattctggagaagatcatgcagacgcgcgtgcgtaacctgctggcccagccgggcgttccggcagagcgcccggctgaagcacctgccgccgcgccagcgcctgaaagcgcgccgcaaggagagtga

SEQ ID NO: 524077 - DNA, 1200 bp, Stenotrophomonas maltophilia
atgctaaaagtcttcttactcttcatcctgctgatcgccgggattgtactgggaccgatgctcgcgggtcaccagggttacgtattgatccagaccgataactacaacgtcgaaaccagcgtgacagggctggtgatcatcctgatcctgggtgtggtcgtcctgctggcagtggaatggatcctgcgtcggattttccgtaccggggttcacacgcgcggctggttcgttggccgtaagcgccgtcgcgcccgtaagcagaccgagcaagcgttgctgaagctggccgaaggcgactatcagcaggttgaaaagctgatgtcgaaaaatgccgaccatgcagaacagccggttgttaactatctgctggccgctgaggcggcgcaacagcgaggcgatgaggcccgcgccaatcagcatctcgaacgcgcgtctgagctctcaactaaggatccgattccggttgagatcacccgcgttcgtctgcaactggcgcgcaatgaaaaccatgccgcacgtcacggcgttgaccgtctgctggaaattacccctcgtcatccggaagtgctgcgtcttgcggagcaggcatacattcggaccggtgcctggggttcgctgctggacattatcccttccatggcgaaagccgacgtgggcgatgatgaacatcgtgatgaacttcagcgtctggcctggattggcctgatggatcaggcgcgcgccgatcttggcagcgacggcctgaaaacctggtggaaaaaccagagccgcaaaacgcgccagcaggttccccttcaggtggcgatggcagaacatctgattgagtgtgacgaccatgacaccgcgcaggagatccttctcgacggtctcaagcgacagtatgatgaccgcctggtgatggtcatcccgcgtctgaaaaccaacaatccggaacaaatagaaaaagcactgcgccagcagatcaaaaccgtgggcgatcgtccgctgctgtggagtacgctgggccagtctttgatgaaacacggcgagtggcaggaggcgagtctcgccttccgcgctgcactgaagcaacgcccggacgcatttgattacgcctggcttgctgattcgctggacaagcagcacaagccggaagaggccgcagccatgcggcgtgatgggcttctgcttacgctacacaataacggaacgcagcagtaa

SEQ ID NO: 524078 - DNA, 2088 bp, Stenotrophomonas maltophilia; identical to SEQ ID NO: 119357

SEQ ID NO: 524079 - DNA, 951 bp, Stenotrophomonas maltophilia; identical to SEQ ID NO: 119358

SEQ ID NO: 524080 - DNA, 1308 bp, Stenotrophomonas maltophilia; identical to SEQ ID NO: 119359

SEQ ID NO: 524081 - DNA, 396 bp, Stenotrophomonas maltophilia; identical to SEQ ID NO: 95944

SEQ ID NO: 524082 - DNA, 351 bp, Stenotrophomonas maltophilia; identical to SEQ ID NO: 119361

SEQ ID NO: 524083 - DNA, 654 bp, Stenotrophomonas maltophilia; identical to SEQ ID NO: 119362

SEQ ID NO: 524084 - DNA, 258 bp, Stenotrophomonas maltophilia; identical to SEQ ID NO: 119363

SEQ ID NO: 524085 - DNA, 333 bp, Stenotrophomonas maltophilia; identical to SEQ ID NO: 119364

SEQ ID NO: 524086 - DNA, 435 bp, Stenotrophomonas maltophilia; identical to SEQ ID NO: 119365

SEQ ID NO: 524087 - DNA, 546 bp, Stenotrophomonas maltophilia; identical to SEQ ID NO: 119366

SEQ ID NO: 524088 - DNA, 744 bp, Stenotrophomonas maltophilia; identical to SEQ ID NO: 25800

SEQ ID NO: 524089 - DNA, 210 bp, Stenotrophomonas maltophilia; identical to SEQ ID NO: 119368

SEQ ID NO: 524090 - DNA, 219 bp, Stenotrophomonas maltophilia; identical to SEQ ID NO: 119369

SEQ ID NO: 524091 - DNA, 684 bp, Stenotrophomonas maltophilia; identical to SEQ ID NO: 119370

SEQ ID NO: 524092 - DNA, 258 bp, Stenotrophomonas maltophilia; identical to SEQ ID NO: 25801

SEQ ID NO: 524093 - DNA, 1275 bp, Stenotrophomonas maltophilia; identical to SEQ ID NO: 119372

SEQ ID NO: 524094 - DNA, 357 bp, Stenotrophomonas maltophilia; identical to SEQ ID NO: 119373

SEQ ID NO: 524095 - DNA, 579 bp, Stenotrophomonas maltophilia; identical to SEQ ID NO: 119374

SEQ ID NO: 524096 - DNA, 408 bp, Stenotrophomonas maltophilia; identical to SEQ ID NO: 119375

SEQ ID NO: 524097 - DNA, 546 bp, Stenotrophomonas maltophilia; identical to SEQ ID NO: 119376

SEQ ID NO: 524098 - DNA, 471 bp, Stenotrophomonas maltophilia; identical to SEQ ID NO: 25802

SEQ ID NO: 524099 - DNA, 249 bp, Stenotrophomonas maltophilia; identical to SEQ ID NO: 95962

SEQ ID NO: 524100 - DNA, 588 bp, Stenotrophomonas maltophilia; identical to SEQ ID NO: 119379

SEQ ID NO: 524101 - DNA, 486 bp, Stenotrophomonas maltophilia; identical to SEQ ID NO: 119380

SEQ ID NO: 524102 - DNA, 249 bp, Stenotrophomonas maltophilia; identical to SEQ ID NO: 119381

SEQ ID NO: 524103 - DNA, 741 bp, Stenotrophomonas maltophilia; identical to SEQ ID NO: 119382

SEQ ID NO: 524104 - DNA, 975 bp, Stenotrophomonas maltophilia; identical to SEQ ID NO: 119383

SEQ ID NO: 524105 - DNA, 444 bp, Stenotrophomonas maltophilia; identical to SEQ ID NO: 119384

SEQ ID NO: 524106 - DNA, 564 bp, Stenotrophomonas maltophilia; identical to SEQ ID NO: 119385

SEQ ID NO: 524107 - DNA, 507 bp, Stenotrophomonas maltophilia; identical to SEQ ID NO: 119386

SEQ ID NO: 524108 - DNA, 480 bp, Stenotrophomonas maltophilia; identical to SEQ ID NO: 119387

SEQ ID NO: 524109 - DNA, 411 bp, Stenotrophomonas maltophilia; identical to SEQ ID NO: 119388

SEQ ID NO: 524110 - DNA, 264 bp, Stenotrophomonas maltophilia; identical to SEQ ID NO: 83557

SEQ ID NO: 524111 - DNA, 363 bp, Stenotrophomonas maltophilia; identical to SEQ ID NO: 119390

SEQ ID NO: 524112 - DNA, 450 bp, Stenotrophomonas maltophilia; identical to SEQ ID NO: 119391

SEQ ID NO: 524113 - DNA, 267 bp, Stenotrophomonas maltophilia; identical to SEQ ID NO: 119392

SEQ ID NO: 524114 - DNA, 180 bp, Stenotrophomonas maltophilia; identical to SEQ ID NO: 95978

SEQ ID NO: 524115 - DNA, 861 bp, Stenotrophomonas maltophilia; identical to SEQ ID NO: 119394

SEQ ID NO: 524116 - DNA, 339 bp, Stenotrophomonas maltophilia; identical to SEQ ID NO: 119395

SEQ ID NO: 524117 - DNA, 231 bp, Stenotrophomonas maltophilia; identical to SEQ ID NO: 95981

SEQ ID NO: 524118 - DNA, 411 bp, Stenotrophomonas maltophilia; identical to SEQ ID NO: 119397

SEQ ID NO: 524119 - DNA, 306 bp, Stenotrophomonas maltophilia; identical to SEQ ID NO: 119398

SEQ ID NO: 524120 - DNA, 441 bp, Stenotrophomonas maltophilia; identical to SEQ ID NO: 21629

SEQ ID NO: 524121 - DNA, 285 bp, Stenotrophomonas maltophilia; identical to SEQ ID NO: 119400

SEQ ID NO: 524122 - DNA, 222 bp, Stenotrophomonas maltophilia; identical to SEQ ID NO: 119401

SEQ ID NO: 524123 - DNA, 435 bp, Stenotrophomonas maltophilia; identical to SEQ ID NO: 119402

SEQ ID NO: 524124 - DNA, 312 bp, Stenotrophomonas maltophilia; identical to SEQ ID NO: 119403

SEQ ID NO: 524125 - DNA, 537 bp, Stenotrophomonas maltophilia; identical to SEQ ID NO: 119404

SEQ ID NO: 524126 - DNA, 141 bp, Stenotrophomonas maltophilia; identical to SEQ ID NO: 21635

SEQ ID NO: 524127 - DNA, 366 bp, Stenotrophomonas maltophilia; identical to SEQ ID NO: 119406

SEQ ID NO: 524128 - DNA, 318 bp, Stenotrophomonas maltophilia; identical to SEQ ID NO: 25804

SEQ ID NO: 524129 - DNA, 1980 bp, Stenotrophomonas maltophilia; identical to SEQ ID NO: 119408

SEQ ID NO: 524130 - DNA, 501 bp, Stenotrophomonas maltophilia; identical to SEQ ID NO: 119409

SEQ ID NO: 524131 - DNA, 780 bp, Stenotrophomonas maltophilia; identical to SEQ ID NO: 119410

SEQ ID NO: 524132 - DNA, 1164 bp, Stenotrophomonas maltophilia; identical to SEQ ID NO: 119411

SEQ ID NO: 524133 - DNA, 261 bp, Stenotrophomonas maltophilia; identical to SEQ ID NO: 83582

SEQ ID NO: 524134 - DNA, 3216 bp, Stenotrophomonas maltophilia
atggcgaaacctgaaattgcaactgaaagaacccgtctgagtattccctttgacgatcgccaacgtgcaatacgtgcggccggcaaactggctgatggcagtaatgctctggactacgtgaaggaagaaaaggtgtggtatgcacagccgggggccaacctgagccggctgaaagagtggatttttgaccccaataaggtgatcgaagaaccgcccctggatattcaggccattgaagatgaatttacggcgtggcttgaagagcgcggtgccattatcaaagaccccatagagttcgatggccagaagcattatgtcgatacagtggacggtaaagctggttcaagaaagggggtgtatgccgctttcctggatggccggcctgcagggtggtacagggactataagaacggtggtgaaattcagaaatgggtatctaccggcgcagcccctaaccctgaacaaatggccatgctccgtgctgatgctgcggcaaggcgtgaacaaagagctgcagcgcaagcggataagtttgatcagaccgctaaccggttgatggaagaatataaccggcttccggatgccacgggagatctggcatacctgaaaaacaaacaggtcattgccgctaacggccttaaagctgatgagcggggcaacgttgtgatccccctgtttaatgctgatggcgagttcaggacccttgagcgcatctggtccgacggtagtaaacaccttgaaaaagacggccaggcatgggggagttttttcgttgtgggtggccaactgaaggatggtgacaacctgctttatgccgagggatatgcgacagcagccagtatcagcgaagccatcaatcagcctgtgatcatgacggttaatgccggcaacatggtggaagttgctggccgcctgaaagacgcctttccaaacagcactcattacttccttgctgacaatgacatttataaagacgagaacgttggactagaaaaagcgacagaagctgcagagctgactgccggccatgttctggtccctgcctttagcaacccgaaagaagggcttacagactacaacgatttgcatgtctctgaagggctggagcaagtcagattgcaggtagaaggagccattaatcaaataaacagggtagacactatgccgactgataacccgaacattactgacgttaatcacagctcgactgacagcgctgccgttgcagcccctgaaaatgccgcgccggtggccagcgcccctgcagctgctgaaccggtggaagccgcgccggtggccagcgcccctgcagctgccgaaccggaggaagccgcgccggtggccagcgcccccgcagctgccgaaccggaggaaaccgcaccggtggccagcgcccccgcagctgccgaaccggaggaaaccgcgccggtggccagcgcccctgcagctgctgaaccggaatacgccgcaccaacagatcgagacggtgatgatgaaaagagtaatagcgccagtgatcttgaggcgtatgccgctatgatggcctttggcggtgaaacaactgacaccgctcagcaaaagcctgaagggatagcgcccagcgaacctgtagctaataccgccccggctgaaaatgaaaccgaggagaagaagaaaaaaacaaacgaagaactggaaaacggcatacgctgggcaaccaacgataatgcagaaacgcccccaaaagaacgtatagacctggaagggttaattgcccggtttgggtacagagcagagaaagactatacggcgtatacgcttgatgggcaggatgcgttttacgattacggctcacatctgcgtatggctacccctgaagccagccagagtgacgagatgatcctggcggccgttcttaccgcggataagcaacatcatcgtggtattgaaatcaccggcagtgacgaatttaaagagcgagtgtttaaccttatcagtgaatacaacattgaggtgaaactgactaacccagaacaaagggttaaattgctcgaactcaaaaaagcaaatgaaacagcaaaagaaacggcaaaagaaaatgttgctgattcaaaagcgaataagcaggaaggggtaaacgaaaaggcaaattcatcagttcagcaaaatggaatgcgctgggaagaatcggcctctgtacaaccgaagaagcagaatgcatctgatactcaaaaggaagataaagctgcgggtgaatcctgggagaaaggcgttatcgtcgcgtatggacgtgctaagtatgagtggaaagatgatgaatccatgaactactttgtcaccctcaaaaatgaacatggagagaagacactctgggggaaagaccttgagagagcggttaaagatgctggtgtagacaccgaacgtcttgttacggtcagaaagctgggatttgtggatgttgaggtgaatgcacctgtccgtgatgaaagcaacaagatcgttcgttatgaaactatccagaccaaacgtaatgagtgggaagtaaaacctgtatacccacagccaacagcagggaatgaacaggcctataagccttctgaactggttccgtatgatgctgcaaccttccagaagctccgcacaacaattcagcagattaccggtgttgatctcagccgtgaggccgtgcctgaaaaagaactgtattggttcctgccgaatggtaagccagctcctgaaagcatgacaaaacccacaggctataaactccctcaagagtcaaaaaccgcgggtacacctttgctggtcgcaccgcataaaaaaggcgaacgacctgattattaccttgttgagtctcgtaaaggattcatgcaggggatcgcaaaggataaggaatctggcgagtaccatagcgtaattggtaaagtgaacaagcgtattgataaagatggaaactggaaaacgtatatgacactttcagcaatcaataaaaattctgaaagtggaattgttttgcacggatacggccatgttgatcagggaggtaaaaacctgctttacaaaaacacaattgcaaatgaaaaacagcctcagcatttacaaccggcctcagatgaggtaaaaaacaaaacagtaatgaagcagctttttcatccttctaatgctgcaaaaagaaaagatgatgaaaggagagaacagactcatgcaccagtcgcaaagtcagcgcctcggccataa

SEQ ID NO: 524135 - DNA, 537 bp, Stenotrophomonas maltophilia; identical to SEQ ID NO: 229613

SEQ ID NO: 524136 - DNA, 411 bp, Stenotrophomonas maltophilia; identical to SEQ ID NO: 119416

SEQ ID NO: 524137 - DNA, 714 bp, Stenotrophomonas maltophilia; identical to SEQ ID NO: 119417

SEQ ID NO: 524138 - DNA, 1152 bp, Stenotrophomonas maltophilia; identical to SEQ ID NO: 119418

SEQ ID NO: 524139 - DNA, 1350 bp, Stenotrophomonas maltophilia; identical to SEQ ID NO: 119419

SEQ ID NO: 524140 - DNA, 705 bp, Stenotrophomonas maltophilia; identical to SEQ ID NO: 119420

SEQ ID NO: 524141 - DNA, 531 bp, Stenotrophomonas maltophilia; identical to SEQ ID NO: 96007

SEQ ID NO: 524142 - DNA, 390 bp, Stenotrophomonas maltophilia; identical to SEQ ID NO: 119422

SEQ ID NO: 524143 - DNA, 495 bp, Stenotrophomonas maltophilia; identical to SEQ ID NO: 119423

SEQ ID NO: 524144 - DNA, 3051 bp, Stenotrophomonas maltophilia; identical to SEQ ID NO: 119424

SEQ ID NO: 524145 - DNA, 1209 bp, Stenotrophomonas maltophilia; identical to SEQ ID NO: 119425

SEQ ID NO: 524146 - DNA, 651 bp, Stenotrophomonas maltophilia; identical to SEQ ID NO: 119426

SEQ ID NO: 524147 - DNA, 2181 bp, Stenotrophomonas maltophilia; identical to SEQ ID NO: 119427

SEQ ID NO: 524148 - DNA, 654 bp, Stenotrophomonas maltophilia; identical to SEQ ID NO: 119428

SEQ ID NO: 524149 - DNA, 231 bp, Stenotrophomonas maltophilia; identical to SEQ ID NO: 25792

SEQ ID NO: 524150 - DNA, 1056 bp, Stenotrophomonas maltophilia; identical to SEQ ID NO: 119430

SEQ ID NO: 524151 - DNA, 1185 bp, Stenotrophomonas maltophilia
atgaagctcacagttagacaaatcgacacagccaagcctaaagagaagccgtataagctatctgatggtggaggcctctaccttgaagtaactaccaacggctcacgttactggcgtttaaagtatcgctacgcaggtaaagaaaagcgtcttgctttcggcgtttatcccgaggtttctctcgctcaagcacgcgaaaagcgtgatgctgcgaaaaagctgctgtctgctggaagcgatcccggtgaagtaaagaaagcagagaaaattgcccaaaagcttaactatgaaaataccttcgaagctattgcccgtgaatggcatcagttgagagcggatcgttggtcattacgctatcgcgatgaaattattgatacctttgaaaaggatattttcccctacatcggtaagcgccctatagctgaaattaagcccatggaattgctggaaacccttcgtcgtatggaaaagcgtggtgcattagaaaagatgcgcaaagtcagacagcgctgcggtgaagtattccgtcatgcgattgtgaccggacgcgctgaatacaatccagcacccgatctcgccacagccctcgcaacaccaaagaaaacacattttccattcctgacagccgaagaactccctcactttcttagggatcttgccggttacaccggtagcgttattaccaagactgcgactcaaatcatcatgcttacaggggtacgaactcaggaattacgttttgcccgctgggaggatatcaattttgaaaagcggctttgggagatccctgctgaagtgatgaagatgaaacgaccacacatcgttccgatgtcggatcaggttgtcgagctctttgagtcacttaaacctattaccgggctatacccactggtattcgtcggacgtaacgatcgaacgaagccgatctcaaaggaaagcgttaatcaggttattgagttattgggatataaaggaaggctgacagggcatggtttccgccacacgatgagtaccatcctccatgaagaaggttttaactcagcttggatagaaacgcagctagcacatgtggataagaacgcgatacgtgggacttacaaccatgcgcagtatttggaggggcggagagaaatgatgcagaagtatgcagattacgtagaaagtttagtctctcgaggtgtgtga

SEQ ID NO: 524152 - DNA, 1392 bp, Stenotrophomonas maltophilia
atgagcgaagtattgtcagtaaaagagaagattggctacggcatgggagacgccgccagccatatcatttttgataacgtcatgctttacatgatgtttttctacaccgatatttttggtattcccgccgggtttgtcggcaccatgttcctgctggcccgcgcgctggatgcgatctccgacccgtgcatggggctgattgccgaccgcacccgcagccgctggggcaagttccgtccgtggattttgttcggcgcgatcccgttcggcatcgtctgcgtgctggcgtataccacgccggacctcagccttaacggcaaaatggtttacgcagccatcacctacacgctgctgaccctgctctataccgtggtcaacatcccctactgcgcgctgggcggcgtaattaccaacgacccgacgcagcgtatctccctccagtcctggcgctttgtgctggcgacggcgggcggcatgctctccacggtgctgatgatgccgctggtgaacctgatcggcggcgacgataaggcgttcggcttccagggcgggatcgccgtgctgtcggtggtcgcgttcctgatgctggcgttctgcttctttactaccaaagagcgcatccaggtgccgccaagcaccacctccatgcgggaagacctgcgcgatatctggcaaaacgaccagtggcgcatcgtcggcgtgctgaccatcctcaacattctcgccgtttgcgtgcgcggcggcgcgatgatgtattactgcacctggatcatgggctcgccggaggtgttcgtcgcgttcctgaccacctactgcgtcggcaacctgattggctcggcgctggcgaaaccgctcaccgactggaagtgcaaggtcagcatcttctggtggaccaacgccgcgctggcggtggtcagcatggcgatgttcttcgtgccgatgcatgccaccgtgctgatgttcggcttcatcttcgttatcggcgtgctgcaccaactggtgacgccgattcagtgggtaatgatgtccgataccgtcgactacggcgaatggaccaacggcaaacgtctgaccggcatcagctttgcgggcacgctgttcgtgctgaagctcggcctggcgctgggcggggcgatgatcggctggatgctgtcaggcggcggctacgacgcggcagccaaaacccagaacagcgcgaccatcagcatcattatcggtctgtttacgctggctccggcgatctgctacgtgctgagcgccattatcgccagacgctactacacgctgaaaacccccttcctgaccaaaatcctgcgcgagctggcgcagggcgcgcgccgcaatcagcaggagtttgaaaacctgccggtcagcaaagaattgcagaactaa

SEQ ID NO: 524153 - DNA, 2319 bp, Stenotrophomonas maltophilia
atgaaaatcagtgatggaaactggcttatccaaccgggccttaacgtgacgtatccggtacaggtgttcgacgtggagcagcagggcaatgacctggtggtgtatgtggcgccgcgtgacgtgcgcgaacgcacctggcagctcgacacgttgatgttcacggtgcgcctgtttgctccgcaggaagggattatcggggtgcgcattgagcacttccagggcgcgctgaacaacggcccgcactatccgctgaacgttctgaaggatgtaaaagttgagattgaaaacaacgccgaatttgccgagctgaaaagcggcagcgtcagcgtgcgcgtcgccaaaggcgagttctgggcgctggatttcctgcgcaacggccagcgcattaccggcagccagctgaaaaacaacggctacgtgcaggataccaacaccgatcgcaactatgtgtttgaacgtctggatctgggcgtgggggaaacggtctacggcctgggcgagcgctttaccgcgctggtgcgcaacggccagacggtcgaaacctggaaccgcgacgggggcaccagcaccgagcagtcctacaaaaacatcccgttctacctgaccaaccgtggttatggcgtgctggtgaatcacccggaaaatgtctcgtttgaagtcggctccgagaaagtgtccaaagtgcagttcagcgtggaaggggagtatctggagtacttcgtgatcgacggcccgacgccaaaagaggtattaaaccgctatacgcagttcaccggccgtccggcgctgccgccggcgtggtcgttcggcctgtggctgaccacctccttcaccactaactacgacgaagcgacggtcaatagctttatcgacggcatggccgagcgcgacctgccgctgcacgtgttccacttcgactgcttctggatgaaagccttccagtggtgcgacttcgagtgggacccgatgaccttcccggatccggaagggatgatccgccgcctgaaagagaaagggctgaaggtctgcgtgtggatcaacccgtacatcggccagaaatcgccgatcttccgggagctgaaagagaagggctacctgctgaagcgcccggacggctccctgtggcagtgggacaaatggcagccggggctggcgatctacgacttcaccaacccggacgcgtgccggtggtacgccgacaagctgaaaggcctggtggagatcggcgtcgactgcttcaagaccgacttcggcgagcgtatcccgacggacgtccagtggtttgacggttccgatccgcagaagatgcacaaccattacgcctacatctacaacgaactggtgtggaacgtgctgaaagagacggtgggagaagaagaggcggtgctgtttgcccgttctgcctccgtgggtgcgcaacagttcccggtgcattggggcggcgactgctacgccaactatgaatcgatggcggaaagcctgcgcggcgggctgtcgattggcctgtccggcttcggattctggagccacgatatcggcgggttcgaaaacaccgctccggcgcacgtctacaaacgctggtgcgcgttcgggctgttctccagccacagccgcctgcacggcagcaaatcctaccgcgtgccgtgggcgtacgatgatgagtcctgcgacgtggtgcgccacttcacccagctgaaatgccagctgatgccgtacctgtatcgtcaggcagcgctggcccacgagttcggcacgccgatgctgcgggcgatgatgctggagttcccggacgatccggcgtgcgattacctcgaccgccagtacatgctgggggattcgatgatggtggcgccggtgttctccgaggcgggcgacgtgcagttctggctgccggaagggcgctggacgcacctgtggcacaacgatgaaatcgagggcagccgctggcataagcagcagcacgatttccagagcctgccgatctatgtgcgcgacaacacgctgctggcgctcggcaataataaccagaagccggactatgcgtggcacgaggggacggccttccagcttttcaacctgagcgatggcgcaacggcggtgagtgaagtgcctgcggcggacggttccgtgttgtttacgctgaaggcgtcacgtcagggcgacgtcgtgacctttaccggcacgggagatgcgcaaaactggtcggtgtgcttgcgcaacgtgcagaaggtcggcggcgtaaaaggcggttcacatgcgggcagcgagtggggtgtggtggtgaaagccgagggggatgaggtggtgatccacctctga

SEQ ID NO: 524154 - DNA, 1695 bp, Stenotrophomonas maltophilia
atgaaatttattggaaagctgcttatctatcttctggtagccctgctcattgtagtgctcgccttttattttctgctccagacccgctggggcgcatcgcaggtcagtagctggatcacggtgaataccgattacgagctcaactttgacctgatggatcaccacttttcatccccttctcacatccttctggaaaacgtcaccttcggacgagatggcaaaccggccacgctggtcgctaaaaaagtggatattggcttaagcagccgccagatcaccgacccgctgcatatggacgccatcaccctgttcgatggcacgctgaatttatctccacagacggcgccgctgccgttccaggccgatcgtctgcaactgaataacatggcctttaacagcccgaatacggagtgggttctcagtgcgcaaaaggtgaccggcggcgtcagcccgtggcagcccgaggcggggaacgtactggggaaaaatgcgcaaatccagatgagcgccgggtcgctcacgctcaacggcataccggccaacaacgtgctgattcagggacaactcaacggcaaagaggtggtgctcaataccatcggtgccgatatggcgcgcggctcgcttacggggtcggctcagcgtaatgccgacggtggctgggttatcgacaccctgcgtctgaatgagatacgcctgcaaagcgacaaatcgctgctggatttcttcgcccctctctccaccctgccttcgttacagattgggcggctggaagtgaccgatgcccgtctacaggggccagactgggcggtaaccgacctcgatctcagcctgcgtaacctcaccctgagtaaaggtgactggcaaagccaggagggacggttatccatgaacgccagcgaatttatctacggctcgctgcatctttttgaccctatcctgaacgcggaattctccccgcagggcattgcgctgcgtcagttcacttcccgctgggaagggggcatggtgcgcacctccggcaactggctgcgcgacgggaacgcgctggtgctggacgacgttgccattgccgggctggaatatacgcttccggaaaactggaaaacgctgtggatggatccgctcccggcatggctgaacagcgtgacgctgaaaaaattcggcctgagccgcaacctggtgatcgacatcgatccggcgttcccatggcagatcacctccctcgacggttatggcgctaatctgcgtctggcgcaagaccacaagtggggcgtgtggggcggtaacgcaaccctgaacggggcggcagcaacctttaaccgcgtcgacgtgcgacgcccgtcgctggcgctgaatgccaacgccgcaacggtaaacattaccgacctgagcgcctttaccgagaaagggatcctggaagcgaccgccaccgtgtcacagctgccacagcgacaaaccaccgtgagcctgaacgggcgcggtgtaccactcaacgttttgcagcagtggggctggccagcgctgccgattgcgggcgacggcaatattcagctcaccgccagcggcagcgtgcaggcgaatgcgccgctgaagccgacggtgaacgggaagctgagcgcggtgaatatggataaacagcaggtgcaacagacgatgaccggcgggatggtgtcggcggtggctccggcacagtaa

SEQ ID NO: 524155 - DNA, 1392 bp, Stenotrophomonas maltophilia
atgtctgttaacactctggagtctgctgatgcgcaaccgattgcgcagaagcaaaacagtgaactgatttaccgccttgaagatcgtcccccgctgcctcaaaccgtgtttgccgcctgccagcatctgctggcgatgttcgttgcggtcatcacgccggctctgctgatttgtcaggcgctggggttaccggcgcaggatacgcaacacatcatcagtatgtctctgttcgcttccggtgtagcctccatcattcaaattaaagcctggggtccggtgggttcggggttgctgtcgattcagggcaccagctttaactttgtggcgccgctgatcatgggcggtacggcactgaaaaccggcggcgcagatgtcccgacgatgatggcggcgcttttcggcaccctgatgctggcaagctgcacagagatgatcatctcccgcgttctgcaccttgcgcgccgggtgatcaccccgctggtctccggcgtggtggtgatgattatcggcctgtcgctgattcaggtgggtctgacctccatcgggggcggctacgcggcaatgagcgaccataccttcggcgcgccgaaaaacctgctgctggcaggcgtggtgctggcgatcattattctgcttaaccgccagcgtaacccgtacctgcgcgtggcttcgctagtgatcgccatggcggccggttacctgctggcgtgggcgctgggcatgctgccggaaaacaccaccccaaccaacagcgcgttgattaccgtgccaacgccgctctactacggcctgggcattgactggagtctgctcctgccactgatgctggtctttatgatcacctcgctggaaaccattggcgatatcactgccacctccgacgtgtccgagcagccggtctccggcccgctgtacatgaaacgtctgaaaggcggcgtgctggcgaacggactgaactcgtttgtctcggcggtgttcaacacattcccgaactcctgcttcggccagaacaatggcgtgatccagctgaccggggttgccagccgctacgtgggcttcgtggtggcgctgatgctggtggtcctcggcctgttcccggcggtgagcgggtttgtacagcacattcccgagccggtcctgggcggcgcgacgctggtcatgttcggtaccatcgcggcctccggcgtgcgtatcgtctcccgcgagccgctgaaccgccgcgcaatcatgattattgcgctgtctctcgccgtaggacttggcgtctcccagcagccgatgattttgcagtttgccccggactgggtgaaaaacctgctctcttccggcatcgccgcgggcggtattaccgctatcgtgctgaatctcattttcccgcctgaaaagaactga

SEQ ID NO: 524156 - DNA, 1203 bp, Stenotrophomonas maltophilia
atgattcatctcgatacgttgtcgaccctagttgccgcaacgctggttcttctgcttggtcgcaagctggtacacagtgtttcctttctgaaaaagtacaccattcctgaacctgtagccggtggattgctggtggcgctggccctgctggtactgaaaaaaagcatgggttgggaaattgattttgatatgtccctgaaagatccgttgatgctggccttctttgccactatcggcctgaacgctaacctcgcaagcctgcgttcgggtggcaaggtgctgggcgtgtttttgattgtcgtggtgggcctgctgctgatgcaaaacgccatcggcatcggtatggcgtcgctgctggggctggatccgctgatgggtctgctggcggggtcgattaccctgtcaggtggccacggaacgggcgcggcgtggagcaagctgttcatcgaacgctatggctttgaaaacgcaacggaagtggcaatggcctgcgcgacctttggcctggtgcttggcgggctgattggcggcccggtggcgcgctatctggtgaaacattccactacgccggaaggcagaccagacgatgaaatggtgccgaccgcgttcgaaaaaccggacgttggtcgcagcatcacctcgctggtgatgattgaaaccatcgccatgattgccatctgcctcaccgtgggcaaaatcgttgcgcaatggctggcgggaacggctttcgaactgccaacctttgtctgcgtgctgtttatcggggtgatcctgagcaacggtctggcgcagatgggcttctaccgcgtcttcgaacgcgcggtgtccgtgctggggaacgtcagcctgtcgctgttcctggcgatggcgctgatgagcctcaagctgtgggagctggcctcgctggcgctgccgatggtggcgatcctggcggtacaggccgtgtttatggcgctgtatgccatctttgttacctggcgcatgatgggcaaaaactatgatgcggcggtactggctgcgggtcactgtggatttggtctgggagcgacaccaacggccatcgcgaatatgcaggcgatcaccgaacggttcggcccgtcgcacatggcgtttctggtggtgccgatggtgggcgcattcttcattgatatcgtcaacgcgctggtcattaagctctacctgatgctgccaatgtttggctga

SEQ ID NO: 524157 - DNA, 2082 bp, Stenotrophomonas maltophilia
atgaaaggccgcctgctggacgccataccgctcaacagcctgacgggcgtgggcgcggcacaaagcagtaaactggcgaagattggcctgcacaccgtgcaggatctcctgctccacctccccctgcgttacgaagaccgtactcagctttataaaattggcgatctgctgcccgctatttacgccaccgttgaaggggaagtgctgaactgcaacatcacctttggcggacgcaggatgatgacctgccagatcagcgacggcaccggcattctcaccatgcgctttttcaacttcaatgcggcgatgaaaaacagccttgccactggacgacgcgtacttgcgtacggtgaagccaaacggggcaaatacggcgcggagatgatccacccggaataccgcgtgcagggcgatctcagctcacctgagctacaggagacgctcacgccggtctatccaaccaccgaaggcattaagcaggccacgctgcgcaagctcaccgaccaggcgctggagctgcttgatacctgcgccattaacgagctgctgccaccggagctagcgcagggcatgatgagcctgccggaggcgttgcgcaccctgcaccgtccgccgccgacgcttcagctcatagacttagaaagcggtaaacaccccgcacaacggcgtcttatccttgaggagttactggctcataacctgagcatgctggccctgcgcgccggtgcgcagcgtttccacgctcagcctttaggccagcgtgatgaactcaaagataagctgctggcctcactcccgtttaaacccaccggcgcacaggcgcgggttaccgccgagattgaacgcgatatggcgctgaatgtgccgatgatgcgcctggtgcagggcgacgtgggttccgggaaaacgctggttgccgcgctggccgctttacgcgctatcgcccacggcaagcaggtggcgctgatggcgccgacagaactgctggccgagcagcacgccaacaatttccgtaactggttcgccccactggggatcgaagtgggctggctggccgggaagcagaagggcaaagcacgtcttgcgcagcaggaagccattgccagcgggcaggtgcagatgattgtcggcacgcacgccattttccaggaacaggtgcagtttaacggcctggcgctggtcattatcgacgaacagcaccgctttggtgttcatcagcgtctggcgctgtgggagaaaggtctgcaacagggcttccacccgcatcagctgatcatgaccgccacgccgattccgcgcaccctggcgatgacggcctatgccgatctggatacctccaccatcgacgagttgccgccgggccgaacgccggtgaccacggttgccataccggacacgcggcgcagcgacatcattgaccgcgtgcgcaacgcctgtacgcaggaagggcgtcaggcgtactgggtctgcaccctgattgaagagtctgagctgctggaagcgcaggctgccgaagccacatgggaagagttaaagctcgccctgccagagctgaacgtcggtctggttcacgggcgcatgaagcctgccgagaagcaggcggtgatgcagtcgttcaaacagggcgagctgcacttactcgttgcgaccacggttatcgaagtgggcgtggatgtgccgaactccagcctgatgattattgagaacccggagcgtctgggcctggcgcagctccaccagctacgaggccgcgtgggccgtggcgcgatcgcctctcactgcgtgctgctctacaaagccccgctgtcgaaaaccgcgcagatgcgtttgcaggtattacgcgacagcaatgacggcttcgtcattgcgcaaaaagatctggagatccgcggcccgggtgaactgctgggcacacgtcagacgggtaacgccgaatttaaagtggcggatttgctgcgcgatcaggccatgatccccgaagtacaacgccttgcgcgtcatattcatgaacgctaccccgaacaggcggcagcgttaattgaacgctggatgccggaaaccgagcggtattccaacgcctga

SEQ ID NO: 524158 - DNA, 657 bp, Stenotrophomonas maltophilia
atgctcgccaggcgtcagcctgatctgacggtctgcatggagcaggtccataaacctcataacgtctctgctatcgttcgcaccgcagatgccgtcggcgtgcatgaagtccacgccgtctggccaggcgcacgtatgcgtaccatggcctccaccgccgcaggcagcaacagctgggtatccgtgaaaactcaccagactattggtgaagcggtctcgcacctgaaagggcgtggcatgcaggttctggcaaccaacctctctgctaaagccgtggatttccgtgagatcgattacacccgtccgacctgcattttaatgggccaggagaaaacggggatcacgcaggaagcactggatttggctgaccgggacatcatcattccgatgatcggcatggtccagtcactcaacgtgtcggtcgcctcagcgctgatcctgtatgaagcgcagcgccagcgtcagaatgccggaatgtacgagcgcagcaacagcatgctgccggaagaggagcagcagcgcctgctgtttgaaggtggctatccggtgctggctcgcgttgcgaagcagaagaaattgccttacccccacgtcaacgcgcagggcgaaattgaagccgatgccgagtggtggtccaccatgcagtacgcagagtaa

SEQ ID NO: 524159 - DNA, 2115 bp, Stenotrophomonas maltophilia
ttgtatctgtttgaaagcctgaatcaactgattcaaacctacctgcctgaagaccagattaagcgtcttcagcaggcgtatctcgttgcacgtgacgctcacgagggccagacacgttcaagcggtgaaccctatatcacgcacccggtagcggtggcctgtattctggccgagatgaaactcgactacgaaacgctcatggccgccctgctgcatgacgtgattgaagatacccctgccacctaccaggacatggaacagctgtttggcaaaagcgttgccgagctggtggaaggggtctctaagcttgataagctgaaattccgcgataagaaagaggcgcaggccgaaaactttcgcaagatgatcatggcgatggtgcaggatatccgcgtcattctcatcaaacttgctgaccgcacccacaatatgcgcacgctgggctcacttcgcccggataaacgtcgccgcatcgcccgtgaaaccctcgaaatctacagtccgctggcgcaccgtttaggtattcatcacattaaaaccgagctggaagagctgggttttgaagcgttatacccaaaccgctatcgcgtgattaaagaggtggtgaaagccgcacgaggcaaccgtaaagagatgattcaaaagatcctctctgaaatcgaagggcgcttgcaggaagccggtattccatgccgcgtcagcggtcgcgaaaagcatttgtactctatttactgcaaaatggtgctcaaagagcagcgttttcactcgatcatggatatctacgcgttccgcgtcatcgtccacgactcggacacctgctaccgcgtgctggggcagatgcatagcctgtacaagccacgtccggggcgcgtcaaagattacatcgccattccaaaagcgaacggataccagtctttgcacacctcgatgattggcccgcacggcgttccggttgaggtgcaaattcgtaccgaagacatggatcagatggcggaaatgggtgtcgcggcgcactgggcttataaagagcacggcggcgaaagcagcaccaccgcgcaaatccgcgcccagcgctggatgcagagcctgctggagctgcaacagagtgcaggtagctcgtttgaatttatcgagagcgttaaatccgatctcttcccggatgagatttacgttttcacgccggaagggcgcattgtcgaactgcctgcgggcgcgacaccggtcgacttcgcttacgccgtgcataccgatatcggccatgcctgcgtgggtgcccgcgtcgacaggcagccttatccgctgtcgcagccgctcttcagcgggcagactgtcgaaattattaccgcgccgggcgcacgtcctaacgccgcctggctgaactttgtcgtgagctcaaaagcgcgcgcaaaaatccgccagctgctgaaaaatctcaagcgcgacgactccgttagcctggggcgtcgtctgctcaatcacgcgctgggtggcagccgcaaactggcagagatcccaccagaaaacattcagcatgagctggagcgtatgaagctcgcctcgctggatgacctgctggcagagattggcctcggaaacgccatgagcgtggtcgtggcgaagaacctgcaacagggcgaaacgacagccgttcctgctaacgcgcaaaatcatggtcacctgccaatcaaaggcgctgacggggtgctcatcaccttcgccaaatgctgccgccctatcccgggcgacccgattattgcgcacgtcagcccgggtaaagggctggtgatccaccacgaatcctgccgtaacatccgtggctatcagaaagagcctgagaagttcatggcggtcgaatgggataaagagacagcgcaggaatttatcactgaaatcaaggtggatatgtttaaccaccagggtgcactggcgaacctgacggcagcgatcaacacggcctcgtcaaacattcagagcctgaatactgaagaaaaagatggccgcgtttacagcgcctttattcgcctgaccgcccgtgaccgcgtacatctggccaatattatgcgcaagatccgcgtgatgccggatgtcattaaagtcacccgtaaccgaaactag

SEQ ID NO: 524160 - DNA, 276 bp, Stenotrophomonas maltophilia
atggcacgcgtaactgttcaggacgctgtagagaaaattggtaaccgttttgacctggtactggtcgccgcgcgtcgcgctcgtcagatgcaggtaggcggtaaagatccgctggtaccggaagaaaacgataaaaccaccgttattgcacttcgcgaaatcgaagaaggtctgatcaacaaccagatcctcgacgtgcgtgagcgccaggagcagcaagagcaggaagccgcagaactgcaggccgtaaccgccattgctgaaggtcgtcgttaa

SEQ ID NO: 524161 - DNA, 624 bp, Stenotrophomonas maltophilia
atggctcaaggcacgctttatattgtttctgcccctagtggcgcgggtaaatccagccttattcaggcactgttaaaaacccaaccgttgtacgatacgcaggtttctgtttctcacaccacgcgagcaccgcgtccgggtgaggtgcacggtgaacactatttctttgtgaatcacgacgaattcagagcgatgattggcagagacgcgtttcttgaacacgcagaagtattcggtaactactacggtacttcgcgtgaaaccattgagcaggttctggcgaccggcgtgaacgtgttcctggatatcgactggcagggcgcgcagcaaattcgtaagaaaatgcctgattcgcgcagtatttttattctaccgccatcgaaagatgaactggatcgtcgcctgcgtggtcgcggccaggatagcgaagaagttatcgcgaagcgtatggcacaggctgttgcagaaatgagccattacgcggaatatgattaccttattgtgaatgatgattttgatgccgcgctgagcgatctcaaaactatccttcgcgcagaacgtctgcgtatgagccgccagaagcagcgacatgacgcattaattaccaaactgttggcagactga

SEQ ID NO: 524162 - DNA, 1671 bp, Stenotrophomonas maltophilia
atgtggcgatggataagcgggtttgcgctgttgtggtgtagcaccgggttagcggtatgcccggtatggtcgcaggcaaaagcagaaaaggaaattgtagcgctgagcgcgcagatcaaacgctgggacgatgcttactggaagcagggagtcagtgacgttgatgacggggtgtacgatcagcttaacgcgcggttgaaccagtggcagcgctgctttggtcatgtctcttccgaagagagaccgccacctctgacaggtagtgtgacacacccggttgcgcatacgggcgtgcataaggttgccagtaaagctgagctcagccagtggatgcgagcccggcaacatctctggatgcagcccaaagtggatggcgtggctgtgacgctggtgtaccagggcgggaagcttgtccgggccattagccgtggcaacggtgtgaaaggtgaagactggacggcgcaggttcgatcaatcccctctgttccgcaaaacctgtccggccccctggcaaatagcgtcttacagggtgaactgttctggattcatgaaaaccacatccagcgtcagatgggggggatgaacatgcgggcaaaagtggtgggcgccatgatgcgtcataacgatagcgcacttctcaggcagctcggcgtgtttatctgggcctggccggatggacctaaagagatgcaggtatctctggatgcgttgtcaaaagccgggttcaccctgacggcgcgttatacgctgcccgccgcgtctgtgaatgcggtcgaagcgcagcgttcagcgtggcatacaacagcattgccctttgccacggacggcattgtggtgcgttcagcggatgaacccgcgggcgacggttggttacccggtgaagggcgttgggttgtcgcatggaaatatacgcctgtcgctcaggttgctgaagtgcgagggatacagtttggcgtcgggcgaacgggcaaggtgtccgttgtagccgaactggatccagtaaagcttgatgataaacaggtgcggcgggtgagcctggggtcggtcacacgctggcagcggctggatattgttcccggcgatcaggttctgataagcctcgccgggcagggaatcccccgattcgatcgagttgtctggcggggagcgaacaggaaaaaaccagaacctccggccctgcagtaccactcgctgacctgtttttatgcctcaccagtgtgtatggaacagttctttgcccggttgacgtggcttagctcaaaacaagggctagggatcgaggggttaggcgaggcgggctggcgaacgcttcatcagacgcatcgtttcgagcatattttttcgtggttaacactgacgcaggcgcagctacagtccacgcctggcttttccgccgggcgcgggttatcgctctggcatcgttttaatattgtgcgcaaacaaccttttattcgctgggtcacagcgatggggatcccgctgacaaaagccacgctgaatgcggttggggcggcgtcgtggcaggcgctgaatcagcggagcgctgctgactggcaggctttgccgggaacaggtgaagagaaggcgcagcaggtcgttaactggctgcatgcgcctcccgttgataggctggcaaggtggctggctgagcagcacattaacgggttctga

SEQ ID NO: 524163 - DNA, 618 bp, Stenotrophomonas maltophilia
atgctgcttcacattctctatcttattggcattaccgctgaagccatgaccggcgcgcttgccgccggacgtcgccgaatggacaccttcggcgtgatcattattgccacggccactgcgctcggcggcgggtccgtgcgcgatatcctgcttggccattatccgctcggctgggttaaaaaccctgagtacgtcattatcgtggcaacggcagccgtgttaaccacgattgtagccccggtgatgcctcatctgcgccgcttgttcctggtgctggatgcgcttgggctgattgttttttccatcattggcgcacaaattgctctcgatatgggtgaaggcccggttatcgccaccattgcggcggtgatcacgggcgtgtttggcggggtgctgcgcgatatgttctgcaaacgtatcccgctggttttccagaaggaactgtatgccggcatctcctttgccgcggcagtgctttatgtcgccttgcagcactatgtcacaaaccacgatgtggtcgttatctccacgctgctgtttggtttcacggcgcgtatgctggcattgcgcctgaagctgggcctgccggtttttcattacaagcacaacgcgcattaa

SEQ ID NO: 524164 - DNA, 864 bp, Stenotrophomonas maltophilia
atgatccgcagtatgaccgcctacgcccggcgtgaaatcaagggtagctggggtagcgctacctgggaaatgcgctcggtaaaccagcgctatctggaaacatatttccgtatgccggaacagttccgcagcctggagcctgtggtgcgtgagcgtatccgtacgcgtctgacccgcgggaaagtggaatgtaacctgcgttttgagcccgatgccagtgcacagggcgaactgatcctgaacgaaaagctggcaaaacagctggttaatgcggcgaactgggtcaaaatgcaaagcgatgaaggcgagatcaacccggttgatattctgcgctggcctggcgtgatggccgccggagagcaggatctggacgcgattaccgctgaaatcctggctgcactcgacggcacgctggatgactttatcgttgcccgcgaaaccgaaggccaggcgctgaaagcgatgattgagcaacgccttgaaggcgtgagcgccgaagtggctaaagtgcgcgctcatatgccagaagtgctgcaatggcagcgtgagcgtcttgtcgccaaactggaagaggcggaagtccagctggaaaacaaccgtctggaacaagagctggtgctgatggcgcagcgtgtagacgtggctgaagagctggatcgtctggaagcgcacgttaaagagacctacaacatcctgaagaagaaagaagcggtaggccgccgtctcgactttatgatgcaggagttcaaccgcgagtcgaacacgctggcgtctaagtctatcaatgcagaggtgaccaattcagcaattgaactgaaggtcctgattgagcagatgcgcgagcagatccagaatatcgagtaa

SEQ ID NO: 524165 - DNA, 717 bp, Stenotrophomonas maltophilia
atgcgtccagcaggtcgtagcaccaaccaggtgcgtcccgtcaccctgacccgtaactatacaaaacacgctgaaggctccgtgctggttgagtttggtgacaccaaagtgctttgcaccgcgtccatcgaagagggcgtgcctcgcttcctgaaaggtcaggggcaggggtggatcaccgccgaatacggtatgttgccgcgcgcaacccatacccgtaatgcccgtgaagcggcaaaaggtaagcagggcggccgtactatggagatccagcgcctgatcgcacgtgcgctccgcgccgcggttgacttaaaaacgctgggtgagttcaccatcacgctggactgcgacgtgatccaggccgatggcggcacgcgtacggcctccattaccggtgcctgtgtggcgctggcagatgcgctgaacaagctggttgccgccggtaagctgaaaaccaacccaatgaaagggatggttgctgctgtctccgttggtattgttaacggcgaagcgctttgcgatctggaatacgttgaagattctgccgcagaaaccgacatgaacgtggtgatgaccgaagatggtcgcatcattgaagtgcagggcacggcagaaggcgagccattcactcacgaagaactgctcaccttgctggcgttggcccgagggggtattgaatctattgtagcgacgcagaaagcggcgttagaaaattga

SEQ ID NO: 524166 - DNA, 642 bp, Stenotrophomonas maltophilia
atgaaatcgtatcagcgccagtttattgagtttgcgcttaacaagcaggtacttaagtttggcgagttcacgctgaaatccggtcgtaaaagcccgtatttcttcaacgccgggctgtttaataccgggcgcgatttggcactgttaggccgcttctatgccgaagcgctggtagattccgggattgatttcgatctgctgtttggccccgcgtacaaaggcattccaattgcaaccaccacggcggtggcgctggcggagcaccatgaccgcgacgtaccgtactgctttaaccgtaaagaggccaaaacccacggtgaaggcggcaatctggtaggcagtgcgttgcagggccgcgtgatgctggtggatgacgtgatcaccgcaggcaccgcgatccgtgaatcgatggaaattatccaggctaacggtgcaacgcttgcgggtgtgctgatttcgctcgatcgtcaggaacgcgggcgtggcgacatctctgctattcaggaagtggaacgcgattatggctgcaaagtgatctctatcatcacgctgacagacctgattgcatatctggaagagaagcctgagatggcggatcacctggcggcggtaaaagcgtatcgcgaagagttcggggtttaa

SEQ ID NO: 524167 - DNA, 597 bp, Stenotrophomonas maltophilia
atggcagaaaaacaaaccgcgaaaaggaatcgtcgcgaagaaatacttcaatctctggctctgatgcttgaatccagcgacggcagtcaacgcatcaccaccgccaagctggcggcctctgtgggcgtgtcagaggcggcgctgtatcgtcatttcccgagcaaaacccggatgttcgacagcctgatcgagtttatcgaagatagcctgatcacgcgcatcaacctgattctgaaggatgaaaaagacaccagcacgcgtctgcgtctgattgtgctgctgattctgggctttggtgaacgtaacccgggtctgacccgtattctgactggccacgcgctgatgtttgaacaggatcgtctgcaaggccgtataaaccagctttttgaacgtatcgaagcccagcttcgtcaggttctgcgcgagaagaaaatgcgggaaggcgagggatataatacggatgagacgctgctggcaagccagatccttgcattttgcgaagggatgctctcccggtttgtgcgcagcgagtttaaatatcgaccaacggacgattttgacgcccgctggccgttagtggcagcacaattacagtaa

SEQ ID NO: 524168 - DNA, 459 bp, Stenotrophomonas maltophilia
atgatgaaaaaaatcgacgttaagattctggacccgcgcgttggcgagcaatttccgctgccaacgtatgccacctccggctctgccggtcttgacctgcgcgcctgtctcgatgacgccgtagaactggcgccgggtgcaacgaccctgatcccgaccgggctggcgattcacattgctgacccgtcactggcagcggtgatcctgccgcgctctggcctgggccataagcatggcgtcgtgctgggtaacctggtcggcctgatcgactctgactatcagggtcagctgatggtatccgtctggaaccgtggccaggacagcttcaccattgaaccgggcgagcgtattgcgcagatggtgtttgtaccggtggtgcaggcagaatttaacctggtggcagacttcgacgctaccgaccgtggcgaaggcggcttcggccattccgggcgcaaataa

SEQ ID NO: 524169 - DNA, 1215 bp, Stenotrophomonas maltophilia
atgatgagcctggccggtaaaaaaatcgttcttggcgtcagcggcggtattgctgcctataaaacgccagacctggtgcgccgtttgcgcgagcgcggggccgacgtacgggtcgcgatcaccgaaggcggcaaagcctttatcaccccgctgagcctgcaagccgtctcgggatacccggtatccgacagccttctcgacccggcagccgaagccgcaatgggccatattgagctggggaaatgggccgatctggttatccttgcccccgccacggcagatgtaattgcccgcgtggcggccgggatggcgaacgatctggtaacgaccatttgcctcgccacgcctgcgcccgtcgcggttgtacccgcaatgaaccagcagatgtatcgcaacgccgctacccagcataatctggatacgctggcctcgcgcggcctgctaatttggggaccggagagcggcagccaggcctgtggcgacgtggggccagggcgtatgctcgacccattgacgattgttgatatggccgccgcccatttctcgcctgtcaacgatctgcaacatctcaacatcatgattaccgcgggccccacgcgcgagccgctggatccggtgcgatacatcaccaaccacagctccggcaaaatgggctttgcaattgctgccgcggcagccaaacgcggcgcgaacgtgacgctggtgagcggcccggtgtcgcttaccacccctgcgtttgtgcggcgtattgatgtaactaccgcgctggaaatggaagccgccgtacaggcgcatgctcaacagcagcatatttttatcggctgtgcggccgtcgctgattaccgcgccgaaaccattgccgacgccaaaattaaaaagcaaggtgatgaattaacaataaaaatggtgaagaacccggatatcgttgccggtgtcgccgcattgaaaactcatcgtccttacgttgttgggtttgccgcagaaacgaataatgtggaagaatatgcccggcaaaaacgtacccgcaaaaacctcgatttgatttgcgcgaacgacgtatcgctgtccacgcaaggatttaacagcgacagcaacgcattgcaccttttctggcaggatggagataaagtcttaccgcttgagcgcaaagaactcctgggccaacaattactggacgagatcgttacccgttatgatgaaaaaaatcgacgttaa

SEQ ID NO: 524170 - DNA, 666 bp, Stenotrophomonas maltophilia
atggaagagactgaactgctgctaccgcgtgaaaaaatgctgcgccatggcgtcacgttgttaaaggacgacgagctgctggcgctctttttacgcacaggcacgccggggaaaacggtatttacgctggcgaaagagctgatagagcatttcggctcactgtatggattgttgaccgccgagctggaggcgtttacgcacgttgagggtattggcgtggcgaaatatgcccagttacggggcattgccgagctggcccggagattttacaacgtgcgtatggaggaagaagacccgatcctcacccccgatatgacccgcgaatttctgcaaagccagctttccgatctggagcgggagatctttatggtgatctttctcgacaacaaaaaccgggtactgaaacatacccgccttttttcgggaacattgagccacgttgaggtgcatccgcgagaaattgtgcgggaagcgataaaagtgaatgcagccggcgtgatcctcgcgcataatcacccctctggctgtgcagaaccaagcagagctgacaaagcaattaccgaacgtattatcaaatgctgtcaattcatggacattcgtgtgctggaccatctgataattggccgcggagagtacatttcttttgccgaacgtggctggatttag

SEQ ID NO: 524171 - DNA, 237 bp, Stenotrophomonas maltophilia; identical to SEQ ID NO: 117025

SEQ ID NO: 524172 - DNA, 168 bp, Stenotrophomonas maltophilia; identical to SEQ ID NO: 117026

SEQ ID NO: 524173 - DNA, 810 bp, Stenotrophomonas maltophilia
atgcctgaattacctgaggtagagaccagccgccgcggcattgagccccatctggttggcgcgactattcttcatgctgtcgttcgcaacgggcgtctgcgctggccggtgtccgatgagatccacgcgttaagcgataaacccgtcctgagcgtacagcgccgcgcgaaatacctgctgctggagctgcctgacggctggatcattatccatctgggcatgtcgggaagcctgcgcatcctcaccgaagagttgcctgcggaaaagcacgaccacgttgatctggtgatgagtaacggcaaggtgctgcgttacaccgacccgcgtcgctttggtgcatggctgtggaccaaagagctggaagggcacaacgtgctggcgcatcttggacctgagccgctctcagaggcgtttaacgcggattatctcaaagagaagtgcgcgagaaagaaaaccccgatcaaaccctggctgatggataacaagctggtcgtgggcgtggggaatatctatgccagcgaatcgttgtttgccgccgggatccatcccgatcggctggcctcttcgctgtctgcgcaggagtgcgagctgctggtcagagtgattaaagcggtactgctgcgctcaattgagcagggcgggacgacgctgaaggattttctgcaaagcgacgggaagccgggctattttgcgcaggagttgcaggtttatggtcgtaagggggaaccgtgcagagcatgcgggacgccgattattgccacgaagcacgctcagcgcgccacgttttactgtcgtcagtgccagaagtag

SEQ ID NO: 524174 - DNA, 480 bp, Stenotrophomonas maltophilia
atgagcacaaaagcgatttatccgggtaccttcgatccgatcactaacggtcatcttgatatcatcacccgtgcggcgtgtatgttcgacaaggtgattctggccattgccgccagcccgagcaaaaagccgatgttcgacctgaacgaacgcgtgcagcttgccaccgatgcgatttcgcatttgtcgaatgttgaggtcgtcggattcagcgatttgatggcaaactttgcccgtgctcagcaggccaatatcctgatccgcggtcttcgcgcggtagcagacttcgaatatgagatgcagctggcgcacatgaaccgccatctgatgccggagctggagagcgtattcctgatgccctccaaagagtggtccttcatctcttcttcgctggtaaaagaggtggcgcgccatcgcggggacgttacccactttctgccggttaacgtccaccaggcgttgatggaaaagttaaagtaa

SEQ ID NO: 524175 - DNA, 771 bp, Stenotrophomonas maltophilia
atgtcaacgcgtctgtcggtcgtgatgatcgccaaaaacgccgccgacctgcttccggattgcctggcctctgttgcctgggctgacgaaatcgtcattctcgattccggaagtacggacaatacggcggacgttgcccgtgcagccggggcaaaagtctttaccgacaccgactggcagggctacggtattcagcgtcagcgtgcgcagagttacgccacgggcgattacgtgttgatgatcgataccgatgagcgcgtcaccccggaactccgacaggccattcaaacggtgcttgccgcgccacagcccggcgcggtctacagtatcgcgcgtcgtaactatttcctgggccgctttatgcgccacagcggctggtaccccgaccgcgtgatgcgcctctatgcccgcgagcgttatcagtacaacgacaacctggtccatgagtctctggcctgcgataacgctcaggtcatccccctgacgggcgatctgcttcatctgacctgccgcgatttcgccagcttccagcggaaacagctgaactatgccaccgcctgggcacaggagcggcatgcgcgcggcaagaaggccacgctgaccggcatcttcacccacacgctgggcgcgtttctgaaaacgctgctgctacgtggtggcgtgctggacggcaaacagggctggttactggcggtagtgaatgcccagtatactttcaataaatacaccgagctgtgggcgctgaaccgcggctactcagagaaaacgtga

SEQ ID NO: 524176 - DNA, 1275 bp, Stenotrophomonas maltophilia
ttggaattgttgtataccgccctgctctacatcattcagccactggtgtggctgcgactgttgcttcgtagccgtaaagcgcctgcgtaccgtaaacgctgggccgaacgctatggctactgccgcaataaagtggcgccggacggtattctgctgcattccgtgtcagtcggggaaacgctggccgccattccactggtgcgtgccttacgccaccgttatccgtcactgcccatcaccgtcaccacgatgacgccaaccggctcagagcgcgtgatgtctgccttcggtaaagacgtgcatcacgtctacctgccgtacgatctcccctgcgccatgaaccgtttcctgaataccgttcgccctaaactggtgatcgtcatggaaactgaactgtggccgaatatgatttccgccctgcatgcccgtaaaattcctttggttatcgccaacgcgcgtctgtcggaacgctcggcgaaagggtacggcaagctgggtaaatttatgcgtcgcctgctcagcaaaattacgctgatcgccgcgcagaacgaagaagatgccgcgcgctttatcgccctcggcctgaagcgcaaccagcttgcggtcacgggtagcctgaagttcgatatttccgtcacccctgaactcgccgcccgtgcggtaacgctgcgtcgtcagtgggcgccgcgtcgccaggtctggattgccaccagcacccatgacggcgaagaggccattattcttcaggctcaccgccagctgctggaaaaattccctgatttactgctgattctggttcctcgccatcctgagcgttttaaagatgcccgggagatggtgcaaaaaggcggtttcagcttcaccctgcgcagcagcggcgaaatcccctctggcagcacgcaggtggtgattggcgatacgatgggcgaactgatgctgctgtacgggattgccgatcttgcattcgttggcggaagcctggtggagcgcggtggtcataacccgctggagccggcagcccacgccattcccgtgctgatgggtccacacacgtttaacttcaaagatatctgcgcgaaattgcagcaagccgatggcttaatcaccgtgaccgatgcggactcggtggtcaaagaggtctcaacccttctgactgacgaagattaccgcctgtggtacggtcgtcacgccgttgaagtcctgcatcagaaccagggtgcactgacccgtctgctgcaacttttgcaaccttacctgccgcagcggagccactaa

SEQ ID NO: 524177 - DNA, 990 bp, Stenotrophomonas maltophilia
atgcaaaattcagcgcctttattaagcgtggtggttgccgtttataacggtgaagcttttctcgatcagttctttacctgccttgtaaatcaacacatcgacagtatggaagtcatcatcgtgaatgacggctccactgaccgctcgatgcagattgtcgaaaaatggcgcgaacagctgccacagatgcaggtcattgaacaacctaatcagggcgtgtccatcgcgcgtaataccggcctggccgttgcgaccggccaatatctctctttcccggatattgatgatgtcttcaaacccggcatgtaccagcgtctgctggatatggccgtcacgcagaacctggatgtcgccacctgcaatggcaactacgtctgggaaaataacaaaaaaccgtctcgccctatcttccctgaagataagctcgcctcaacgagcgtcatgaatggcgcggcatggttaaaaaaggcgctggattcacgtaagttcctgcatgtgacctggctgaatatctatcgtcacgattttattcgtcagcacggctttcgtttcgagcctggcctgcgccatcaggatatcccgtggacgactgaggtgctgcttgctgcggaacgcgttcagtacaccagcgaacgcttttacgactactacattcactccgcctcggtatcgcacaccccggataatgacgacacgctgattcgctcagcgcgccattacatgaagatcctgaagatgcttgatgccattaaccagcgctacccggataaagtgaaaaatatcccggcctgtcactggcaaatcgccaaagagggtctgggaattattcataccttcgacaacatgaaggatgaagcgaagaaatcaatgataatcaaagagttcttcgacaccgggatctggaagctcatctggaaaagtgccaaaagcccgcgtttgcgctggcgcctgggccgacgctacttccgtttaaaacggtatctggcataa

SEQ ID NO: 524178 - DNA, 1101 bp, Stenotrophomonas maltophilia
atgcgcatcctaatgattattgatggtttacccggtggaggagccgaaaaaacggttctcaccctctccagcggactgacagaactggggcatcaggtcacccttttctccttacggaaggtgtgcgactacgccattccggaaggcatcgattttcaggtcgtgcaggatacctgtaaaaaaccctggcggaagctgaccgagatcccgcgtcgcgcccgtttgctggatcgcgccattgagcaggcagaacgcagcggtaaatttgacgttgccttctcgcatctgcataaaaccgaccgtatcgtggcgcacagccgcgtgctggatcgggataaggtctggttctgcatacacgggatgttctccttttcctatttgcgccatcgcagcgggctttctcgctggtttaagcattataaaattcgtcatacctatgaaaaccgcaacgtggtggcggtatccggcgccgtgctgcacgatctgtctgaagtactcgcgatccccctgcggcgcaaagcggttatccataaccccttcgatatccctgaaattcagcgtctggcggaagcgccctttaagatgcaggggcagaattatattatccacgttggtcgttttcatgagcacaaacgtcacgaccggctgcttcgcgcgttcgcgatgagcaagattgacgcatcgctggtgttgatgggcaaaggctctgacgtgaaaataaaccagctcaaacagcttgccgctaagctgggaattgaaaacaagatcgtcttccgcccgtttgaaaccaatccttatccgtggatcaaaggtgcacgccttttagtgttaagttccgactgcgaaggttttggtaatgtactggtagagtccattatctgtcagaccccaccggtgagtacaaactgccctggcggccctgctgagatccttactggccccctggcgcgcggtctgaccgcgttaaccgacgaatcactggcgaataccctggcagaactgtatgcctctccgccggttgttgatcgcgaaacgatcgcatcgttcggtatcaacgccatttgccagcaatacattgctttggtcgacaaccaaaaataa

SEQ ID NO: 524179 - DNA, 1128 bp, Stenotrophomonas maltophilia
atgaagcttcatcgtctggccattgtgcgccaaaaatatcggccggatgggggagcagaacgttttgtctccagggcactcaccgcgctgagcaatcaaaatcttgagctcaacgtcatcacccgcgagtggcagggcgaaaagcaggacgactggcatattcatatctgcgatccacgaaagtggggccgcatcagccgtgaacgcggctttgcacacgccgcgcgcgcgctgtggcagcaacagcagtttgatattgtacagagccacgaacgtattccgggctgcgatatttaccgcgccggagatggtgtacatcgacgctggctgctacagcgtacgcgtattcttcccgcctggcgcgctaagctgctcatgcacgatcgctatcaccgctacgtgatgaacgccgaacgtgaaatgtaccaggctcccgagttgaaagccgttatctgtaatgcggagatgatcaagcgcgaaatcgtcgaagactttgatattgacgcaaaaaagatacatgtgatttataattcaatagattcccgccgcttcgttccggcagaagagaggcagcgcgctgtactgcgtaagcaatttggcttacccgctgatgccgtcattttctgcttcgtgggttcagggtttgaacgcaaggggctggcaagcgctattcaggctatagcaggaacatcggcgtggctggttgtggtcggtcaggataaagcggaaagccgttatcgcgacctcgcccgttcattaggctgtgaggggcaaatccgtttcctgggaatgcaaaaagagacgctgccattttatcagctttctgatggtttactgctgccgacgctgtatgatcctttccctaacgtcatacttgaagcaatggcctgtggattgcccgtcattacgtcagagagttgcggtggttcagaatttattgagcaaggccagaacgggttttactgtgatgcacttgatatccacacattgaaggaggccgtcatgtccatcccttcactggaaaaaaataacaatatggggcttgcggcgcgtgaacgcgttagagaagcaacccctgaaaaactatcaagtcagcttatttcgctttatcaaaaattactggattaa

SEQ ID NO: 524180 - DNA, 1071 bp, Stenotrophomonas maltophilia
atgatgatgaataacttacctgacacgcctgatttgcgcattttactgattaaacttcgccatcatggtgacatgttactcaccacccccgtcatcaattcattgcgccagaaatggcctgaagcccaaatcgacgtgcttctctatgaagagacgcgagacatgctcgccgcgcatccggcaatcggtacgatctatggtatcgatcgtaaatggaagcagttggggacgctgaaacacctgcaaaaagagtggcagttgcttcgtgctttacgcgctcagcattatcatctggtgatcaatcttgccgatcagtggcgcagcgcactggttacccgcttcaccggcgcaccggttcggctcgggttcgcttttaacaagcgcaataatgccttctggcgtttttgtcacagtgaactggtctcggtcgccagccatcagtcgctgcacaccgttgaacaaaacctgtccatactgaaaccattacccgttgccgccagacccgacgtcaccatggcttacagcgcggatgactggcaccatgctcatcacaagctgacacaaaagggtgtgggggaacgctatatcgttattcaacccacttcacgctggttctttaagtgctgggacgaaggcaaaatggcgcaaactatcgccgcattgcagcaggacggccacactatcgtccttacggcgggaccggataagaaagagctggcgatgattgaccgcattcttgccgcctccccgcagacaggtgttgtatcgctggcagggcagttaaccctgcgccagctggcctcgcttatcgatcacgcagccctgttcattggcgttgactccgtccccatgcacatggccgccgcccttcagacgccctgcgtggcgctgtttggcccatcaaagttgacgttctggtcgccatggcaggttaacggcgaggtcatctgggctggtaactacggcccgcttcccaaccctgacgccattgatacaaaaacgacggaacgttatctcgacgccatccccgttgatgctgtcgtctccgccgcaaggagatacctgcaatga

SEQ ID NO: 524181 - DNA, 954 bp, Stenotrophomonas maltophilia
atgaaaaaaccagcgtttatcatcacgatcgataccgaaggggataatctctggcagaaccaccgggtcatcaaaacggaaaacgcgcgctacctggcgcggtttcagacgctttgcgagcgtttcggctttaagcctgtctggctcaccaattacgagatggccgtcgaaccggtgttcattgagttcgcgaaagaggtcatagcccgggggcagggcgaggtaggaatgcatctccatgcctggaacagccctccggagcacgatctgaccggtgatgactggcgctggcagccttatctgattgagttttcagacgaggtcatgcgtgagaaagtgctgttcatgacccgcttactggaagagaccttccagacaaaaatgctcagccatcgcgccgggcgctgggcattcgacagccgttacgcccggttgctgattgagctggggtatcaggtagattgttccgttacgccgcgcgtgaactggcgcaacgcgaaaggtgccccgcagggtaatggcggaacgaattaccagcattttcccgatcgtgcctactttttggacgtagacgacatttcccggccgggaaacagccttctcctcgaagtgccaatgagcatccagtataaacacccggcatggctgaattccctgaagcagggttacgatcgtctgcgcggtaagtaccgttctccgtcagttaactggttacgcccgtccggcggtaacgcgcaggagatgattaaggttgcgcagcagtgcctgtctcagggaaatgactacgtagagttcatgctgcattcgtcggaatttatgcctggcgggagccctacttttaaagacgaggccgcgattgaggggctttatcaggatctggagcagctctttacctggttatcagataagaccgtggggatgacgctggcggagttttaccagtacaaaaaatag

SEQ ID NO: 524182 - DNA, 1212 bp, Stenotrophomonas maltophilia
atggaaaaaataaaaccacggctatatcaactgacgattgctttgagcctcatctctttgatgctggcactagtcagttcagggaagcaaagagagtttttctatattgctatttacgtcagtattattggcctggctttcgaatataaaaaaatcactcttcgaccttttactatagcgctgcccattttgctgattgggttacttaacctcggctggtacttaatctatgagtatcataacgagggactcaatctttacagcgactatctaggcgcaagcaaaaagttaattttagcgagtatcctgattttctatattgaccgctttaagttttacattgataaagacaacttcaggaaatttttcttctacgcagcggccttagggtttgtgctcgccacaggatatggcttgtggcaggcctcgcaaggtatgactcgcgttgagatggcaattaaccgtgccaccgtttcagcctatgtttattctgtcctgtcactggctttcgtatacagtctttaccttcagcagaacgtgaagctgtatgttgtcgcgggtttcactatattaatctcttacttcgtcatactgttgacgggtacccgtgctgcgatgggtttatatctgcttctggcgatagtgctcacgctatatcatttcagaaaaattcatctcaaatccactctcatctttttatgcattgtggccggcattgtcgtcgtaagctacaaaccgttgattgcaccgaaaataacgcaaacccaaattgaagttgagaaatatcagcaaggctatgaccgcacgtcactgggcgcacgtttttcgatgtggactgtcgggatcgagaatggtcttgcacatccgttggggcaatcacttgaagagcgtgaaacgtggacacggcagtatataaaagacggtcatcctcaccttggcagtgcactcgaatacatcaaggtccacctgcataatgaatttatagagaaatattcattgcaggggatccccggcgtggcggtaatgctctttttcttcgtttcgatgattgtgtatgccctacgaaacagaaacgcactgctgctaacctcgatgctacttttgcttttgtatggtctgacggatgtcatactgctcagttcagaagccttaatcttctttatggttttgtttgcattaagtacacctttcacccaaacaaagcagcaatag

SEQ ID NO: 524183 - DNA, 900 bp, Stenotrophomonas maltophilia
atggcttttttaagcgtcattattgctgcgcataacgctgaagctacgctgcatgccacgctttcaagcctgctggcagccaccgttcaagacactgaaattattatttttaatgacagttctgaggataccacgcaggcaataattgaagagtggtcacctaaatttcctcagatcataacgcgcaccgtgaactttcgtaacgtcggccgggtacgaaacagtgctgtcgcactggcatccggtgaatatattacgatgctcgacagtgacgattgcttaaagccgggcagcctcagggacgcaattacctttctgaaagcgcaacgtccggatatgttactgacacgtttgcttgagattcgcgatccccggaaaatgacttcagactggcagggattcaaccctgtgccattgtcacaacatgaagcagtcgctcgtttcttacgccataaagactttcaggcgcatctcattggccagtttattcatcgtagcctgtacgagagcaaccctattcctccaatgttatgttatgaggatttcgctgtcttccccggaatgttgatgcagtcgagcaaaatagtctatcaacgccaggggcattattattacgtcaagcgtcgcgacagtttgtcgagcagtctggacgccagcaaaatttcaacgcttgtcgaatgcacgttacagatggaaagaacatttccgtcaagctacaggcatcttgtcaattgccactggtttgatatttacagcaaccatcggtcctgtcttacagaccaacaattgcaactcgtgaaacaacgcgtaaaggccatgtacacattgtcttttttcctgtccaccgatgttcgttttagctacaaaaaaagggttattgaggcgttatggaaaaaataa

SEQ ID NO: 524184 - DNA, 1110 bp, Stenotrophomonas maltophilia
atgagttatgtatttctgctgattttactctttccggtgaaactcctccggaagctgtttcgaaaagacacgggcaaaaaccttgtcattcagacagccaaaatcggtgactttattaatgcgacacctcttctggcatatctgcaaaaaagcgatgtgttggtcagtcgcagcgttggtgcgctggcgaagcatgatgagactatcgagcagatctattttattgagcagcataagcgcaacctgtggcgtaaactgtgcttcgcgtgcaggatcatgaaccgctacgacaacgtctacctgctacaacccaacagcgtgaacctcttttttgccgccgtctgcaatgctaaaaacaaacaatttttaaccatttacacgcgcaggtggtatcacgggattttctatcttgcggctgacggtaccgttgagcatggcaaaaaaacgctttcggtgacgaactacctgaaactggccgaccgcgcactcacatggcaagactctcccaagcacgccacaaagccgctctttgaaccgacgacctggccggccattcttgataaacctgacgttatccgcatcggcatcagtattgcggcgggcaataaagccaaaaccgtccctccggttatctggaagcggattgttgatcaactcgctgatttaccctgcgagttttatgtcttcggcgcgccaaatgaacagtcgtggatggacgatatcacccgcctttacggtgaaatccctaattttatcaatcttattggcaaaatttcgctggaagagcttccctgggccatttctaagatggactgttatatcgcgtctgactcggggaatgtgtatatcgcagacgccgttggcgttccggtagtcctgctgtttggtccgtgttgtcactatgaacaacgtccgcttggcaatgtgttgctgatcgggaatgacgacaacatttgttcttatgtgtttgaaacgcgctattacttcccgcaagaacgggaagcactattctctgtcactgactccgcgttacacgatcttcagcagtttatccgtacattacccaaagcccgctcactggctagcgctaccgacgctcaaggaaactaa

SEQ ID NO: 524185 - DNA, 984 bp, Stenotrophomonas maltophilia
atgcgggtattgatcgttaaaacctcttcgatgggcgatgtgctgcatacgctgccgtcactgacggacgcgatgcgggccattcccggcattcgttttgactgggtagtggaagaaggcttcgcgcagatccccacctggcacgaagcggttgaccgcgtgatcccggtggccattcgccgctggcgcaaagcatggttctccgcaccgattaaagccgaacgtaaagccttccgcgaagcggtgcaggcccggcgttacgacgcgatcgttgacgctcagggcctggtgaaaagcgccgcgctggtcacgcgtctggcgcacggcgtaaagcacggcatggactggcaaaccgcccgcgaaccgctggcgagcctgttctataatcgtcgccaccatattgcgaagcaacagcacgccgtggaacgtacccgcgagctgttcgcgaaaagcctgggctatgcaaaacctgaagcccagggtgactacgctattgcacagcattttttgcgcgagacggaggagcatgccgaaccgtatctggtgttcctgcatgccacaacgcgcgacgataagcattggccggaaacgcactggagaaggctgattgaactaatgcaaccttgcggtatccatattaaactcccgtggggtgcagaacatgagcggcagcgtgcggagcgtctggcagcaggcttttcccacgttgaggtgttacccaaactcacgctggcgcaagttgccgcacagctggcgggcgctaacgccgtcgtttctgtggatacagggttaagccatttaaccgccgcactggatcgtcctaatatcacgattttcggcccgaccgatccggggttgatcgggggttacggtaaaaaccagcatcagatggtcagccctacgcaacaaacgaaggatattagcgcagatgctattttttcatttttacagggcagccatcggctttccaacagggatatttaa

SEQ ID NO: 524186 - DNA, 1047 bp, Stenotrophomonas maltophilia
atgaaaatactggtgatcggcccgtcctgggtgggcgacatgatgatgtcgcaaagtctctatcgcacgctcaaggcgcgttatccccaggcgataatcgacgtgatggcacccgcatggtgccgtccgctgttatcgcgtatgccggaagtgaacgaggcgatcccgatgccgctcggccacggggcgctggaaatcggtgaacgccgcaaactcggccatagcctgcgcgagaaacgctatgaccgcgcatatgtcctgccaaactccttcaaatccgctcttgtgcccttctttgcgggcatcccgcaccgtaccgggtggcgcggtgaaatgcgctacggcctgcttaacgacgcccgggtgctggataaagaggcctggcctctgatggtagaacgctacgtggcgctggcctacgacaaaggcgtgatgcgcagcgcgaaagatctgccgcagccgctactgtggccgcagctccaggtaagcgacggggagaaatcccacacctgcaacgcgtttggcatttcgtccgaacgcccgatgattggcttctgccccggcgcggagtttggtccggcaaaacgctggccgcactatcactacgcagagctggcgaaacagctgatcgacgaaggctatcaaattgtgctgtttggctcggcgaaagatcacgaggcgggcaatgaaattctcgccacgctcagcaccgagcaacaggcctggtgccgaaacctggccggggaaacgcagctcgagcaggcggttattttgattgccgcctgtaaagccgttgtcagcaacgactctggcctgatgcacgtcgccgccgcgctggatcgtccgctggtggcgctgtatggcccgagcagcccggacttcacgccgccgctgtcgcacaaagcgcgcgtgatccgtttgatcaccggctaccacaaggtacgtaaaggtgatgccgcagaaggctaccatcagagtctgatcgacattacgccgcagcgcgttctcgaagagctcaacgaacttctgttgagcgaagaaggataa

SEQ ID NO: 524187 - DNA, 981 bp, Stenotrophomonas maltophilia
atgatcatcgttaccggcggcgcgggctttatcggcagcaatattgttaaggccctcaatgacaaaggcatcaccgacatcctggtggtggacaacctgaaagacggcaccaagttcgtaaacctggtggatctgaacatcgctgactacatggataaagaagactttcttatccagattatggcgggtgaagagttcggcgagatcgaagccatcttccacgaaggggcctgttcctccaccaccgagtgggacggcaagtacatgatggacaacaactatcagtactccaaagagatcctgcactactgcctggagcgtgaaattccgttcctgtacgcctcttccgcggcaacctacggtgggcgcacttcagatttcatcgaatcccgcgagtatgagcagccgctgaacgtttacggttactccaaattcctgtttgatgagtacgtgcgtcagatcctcccagaagcaaactctcagattgtcggcttccgctacttcaacgtctacggaccgcgcgaaggccacaaaggcagcatggcgagcgtggcgttccacctgaacacccagttaaataacggcgaaagtccgaaactgttcgaaggcagcgacggctttaagcgtgacttcgtctacgtaggcgacgtggcggcagtgaacctgtggttcctggaaaacggcgtgtccggcattttcaacctgggcacaggccgcgcggaatccttccaggcggtggcagacgcgacgctggcttaccataagaaaggcagcatcgagtacattccgttcccggataagctgaaaggccgctaccaggcattcacccaggcggacctgactaacctgcgcgccgcaggctacgacaagccgttcaagaccgttgccgaaggcgtaacggaatatatggcctggctgaaccgtgaccgcgatataaattcacaaaatcattcgagcggtatcaaggcggcaactaagtga

SEQ ID NO: 524188 - DNA, 1197 bp, Stenotrophomonas maltophilia
atgcgtggtgatttttacaaacagttaaacagcgacctcgacaccgcacgtgcggaagggttgttcaaagaagagcgtattatcacgtctgcccagcaggcggacatcaccgttgccgacggcagccatgtgatcaacttttgcgcgaacaactatttaggtcttgcgaatcaccctgagctgattgccgcggcgaaaaacggcatggatacccacggcttcggcatggcctccgttcgctttatctgcggtacccaggacagccacaagcagcttgagcaaaagctggcgaacttcctcggaatggaagacgcgattctgtactcctcctgcttcgatgccaacggcggtctgtttgagaccctgctcggtgcagaagacgcgattatctccgacgccctgaaccacgcctccatcatcgacggtgtacgcctgtgcaaagcgaagcgtttccgctacgccaacaacgacatggttgagctggaagcccgcctgaaagaggcccgtgaagccggtgcccgccacgtgctgatcgccaccgacggcgtgttctccatggacggcgtgatcgccaacctgaaaggcgtgtgcgatctggcggataaatacgacgcgctggtaatggtggatgactctcacgcggttggctttgtcggcgaaaatggccgcggctcccacgaatactgcgacgtaatgggccgcgtagatatcatcaccggtacgctgggcaaagcgcttggtggcgcgtctggcggctacactgctgcgcgcaaagaggtggttgagtggctgcgtcagcgctcccgcccgtacctgttctccaactccctggcgccggcgattgtagccgcctctattaaagtgctggagatggtggaatccggggctgagctgcgcgaccgcctgtgggctaacgcccgcctgttccgtgaaaaaatgagtgccgcaggattcaccctggccggcgctgaccatgcgatcattccggtgatgctgggcgacgcggttgtcgcgcagaaatttgctcgtgagcttcagaaagaagggatttacgtgaccgggttcttcttcccggtggtaccaaaaggtcaggcgcgtatccgcacccagatgtctgcggcgcactcgcctgaacaaattgaacgtgcggtggaagcctttacccgcatcggcaaacagctgggcgtaattgcctga

SEQ ID NO: 524189 - DNA, 1029 bp, Stenotrophomonas maltophilia
atgaaagcgttatccaaactgaaagcggaagaagggatttggatgaccgacgtgccggagccggaagtcggtcataacgatctgctgatcaaaattcgtaaaaccgccatctgcggtactgacgttcacatctataactgggaccagtggtcgcaaaaaaccattcccgtgccaatggttgtcggccacgaatatgtcggcgaagtggtcggcattggccaggaagtgaaaggcttcaacattggcgaccgcgtctccggtgaaggccacattacctgcggtcactgccgcaactgtcgcggtgggcgtacgcacctgtgccgcaacacagtcggcgtgggcgtgaaccgtccgggctgcttcgcggaatacctggtgatcccggcgtttaacgcgttcaaaatcccggacaatatctctgacgatctggcctccatcttcgacccgttcggcaacgcggtacacacggcgctctccttcgacctggtgggtgaagacgtgctggtttccggcgcgggccccatcggcattatggcggcagccgtggcgaagcatgtgggtgcgcgcaacgtggtgatcaccgacgtgaacgaataccgcctgtcgctggcgcgcaaaatgggcgtcacccgcgcggtggatgtctcgaaagagagcctgacagacgtgatggaagagctgggcatgaccgaaggctttgacgtgggtctggagatgtccggcgcgccaccggcgttccgcaccatgctcgacaccatgaaccacggaggccgtatcgcgatgctgggtattccgccgtcagatatgtccatcgactggaacaaagtcatcttcaaggggctgttcattaagggcatttatggccgcgagatgttcgaaacctggtacaagatggctgcgctgatccagtccggtctggatctgtccccgattatcactcaccgtttctccatcgatgagttccagcagggcttcgacgcaatgcgttccggccagtcagggaaagtgatcctgagctgggataagtaa

SEQ ID NO: 524190 - DNA, 915 bp, Stenotrophomonas maltophilia
atgtttaaattcctgaatgctcgctaccgccacattaccgggcgtcataacattccttacgcttcccttccggtcacgcgcgatctcgttgcggttgattccattgtgatcccgtgtacgggcgcggatttcgtcgaagaggcgttattgtcagcgacctttgcagagcgttatgcctctgacgtcagcgagattgttatcgtcagcgatcagcctgaatccgctttcggcgaactgccgccaaaaacccgcgttgttaccctcacgcttccaaaacgtgaagaaggttaccgctataagcagatctacctcagtcgtctggtgaagcttaacgctccgttgcaggcgcgcggtgaaggtgtgctgatgatcgactccgatctcaacctgcttaaaatgccagagatcaacatggcggatatgcacatctactccagcttccgtcagggcaaaatgattgccaagctggacggtgcgccagcggagaaagtgccggcgtattacaaagaaacggtgcgcccgtatctggtcgatcacgttaacggcgcgtttcttgccgccaccaaaaagacctggcgccgtatctgcccgctgtggctgacgctgttccaggatacctgggagctgatggacgatacgcagccgccgaccgatcagctgccgctcgctgcgctgctggacatgctggatgtcaaaacggttaacctgggcgactggatgaactggccggtctccaagaagatcggcggacaggaagccgttgtgccgaaagaggtgattggcgcgcacggcggtttcccgctttccgaatggcagaagtatctggaatcaccggataataagctgctgttcaaaggtcaggattacacccgcaaggtgcgttacctgacggacgaagagaaaaagaatcagtaa

SEQ ID NO: 524191 - DNA, 1206 bp, Stenotrophomonas maltophilia
atgccgcaaaaacgtaaaatcctcctcctggacacaggcaaagaatgggggggaggtaccaacagtatgcttgagcttctgaagcgaatcaaccgcgacaaattcgacattacctgttgtttttacagttattatagtcgtgctgaaggtcaaacgataggccaggtgctcaacagcattgggatcccattactcgttatccctcaacgtaagcaaccggcatgggcaaaactcctgaaagaagcgggacgtggtctgctgtttttctcgcgttcggcgcgcaaagcatttacgcggcatattgataccctgtggcgtatccggcccaacgtcagcaagatcgagaccattttcagggaaggtggattcgatacgctgtatatgaacaaccagccaggctctaatgaagaagggtatctggcgggcgcaaacctgcgtgcacggataatccagcactgccggattgaaccagtgctgaccccgccgctggtgaagctggtgaatgcccatgccacaaaaatcattgccgtctcgcacggcgttgaacgcgtgctacttcagcatggcgtccggccagagctgtgtaccacggtcagcaatgccatcgacatccatcagcctttgccggaccgatgcgcgatgcgccagcgactgaatattgaagacgatacgtttgtattcggcagcattggctcgttaatccctcgtaaggccaaccaccacacgctggaggcgctggcacagttcagccagagacacccgcaggcaaaatggaaaatggtgctggtcggtgaaggggctgaacgcggcgcgctggctgcacaagctgatgcatcaggtattgctgagcacgtcatttttaccggtttccagaacacaccttttgactatctcgccacttttgacgcgttcattctggcctcgcagagcgaaggcttgccccgcgtcgtgctggaagcaatgctgctcaacatccccgtgattggttcaaaagtgaccggcacggcagaattgatcgaccatgagtcgaccgggctgctgttcccctggagcgacgtgtcgcaacttgctcaacatctggataatatctggcaggatcctgctctgcgcgcccggctcgccgcagccgcgcaccagaatgtctgcaacatgtatgccattgaaagctatgttaacggtgtcgaggccgttcttggcgcgcaataa

SEQ ID NO: 524192 - DNA, 801 bp, Stenotrophomonas maltophilia
atgtttaaaataacggtttgcttattaacgtttaactccgaaagaacgttgcacgatgttattcctcctcttttaaaaatagcggatgaattcgttgtagttgattccggcagtacagacgcaacgatatatatttgccagagttatggattgtcgcccatattcaaaaaatatagctggcacggcgagcagatgaaccatgccatatcccatgcgcacaacgactgggtgctgtgcatggacagtgacgaaatactcgatcaagaaaccgttggtgctattttaaaattaaaaatgggcgatgaacccgaatcggatatggcgtggcggatatgtcgtcactggtttgttctgggagaaaatgtccgaacgatttatccagtctcatctccggattatccggtgcgtctttttaaccgtacgcagtcgcgatttaataaccgaccagtagacgatcaggttgaaggttttctccgttctgaacgtattcctggctatgtcagacatgatacgttttattcactgcatgaacttttcaataaattaaacggatataccactcgcctggttcaatatcagacgatacgtccctctcttggtcgcggcgcgatcagcgctatcggcgcatttttcaaatggtatctgtttagcggtgcgtggcgtaagggcaaagtgggtgtggtgacagggttttatgccacggcgtacagttttttgaagtatttcaaggcctggtatcaggatcgagaaaagaaagagtccgttgcaaaagagcagtcggactcttatctggcagaatag

SEQ ID NO: 524193 - DNA, 798 bp, Stenotrophomonas maltophilia
atgccgtcagccatctctgtcgccgtcctgcctaatgcgcctcacgcgcatgaaatggcgaccaaagcgcacaatggcggccatcaggttctcatccatctgccgatggcccctctcagcaagcagccgctggaaaaagataccctgcgtccggacatgagcagcgacgagatcgatcgcatcatccgcgatgcatacaataaagtgccgtatgccgtgggtctgaataaccatatgggcagcgcgatgacctccagcctgtacggtatgctgaaagtgatgcaggcgctggagcgttacaatctctacttcctcgacagcatgaccatcggcaacagccaggcgatgcgtgccgctcaggggacgggtgtaaaagtcatcaagcgcaaagtcttcctggacgactcccagaacgaagcggatatccgcgtgcagttcaaccgcgcggttcagctggcgcgccgtaacggttcggcgattgccattgggcatccgcatccgtctaccgttcgcgttttgcagcaaatgttgccgggcttacccgccgatatcacgctggtacgtccgagcgatctgctcaatgaacctcaggtggatacttcccgtccgggtagcgcgcaaccacccgcaacgcagccgcgtaatccattccgcggcgtgaagaactgctcgctgaaacagccgcctgaaccggtctatgcaacccgcttcttcacggtgattggcgaaagcatcagcagcagtacgctggttaaatacgtccagcaacagtggcagggttggggaaaaaaagcctga

SEQ ID NO: 524194 - DNA, 1284 bp, Stenotrophomonas maltophilia
atgaggggaaaggcgattttttcaatcacatgggtcgtgaagccgtttcggttatcagtcagacctctgctttgcgccagcgcactcagcgctggcgtattgctgtgcgccgcatctgcccacgcggatgaccgcgaccagctcaaatccattcaggccgatatcgccgccaaagagcgtgtggtacgccagcagcagcagcagcgctctgccctgcttgcccagcttaaaaagcaggaagaggccatttccgccgccgcgcgtaagctgcgtgaaacgcaaaacactcttgcccagctcaataagcaaatcgatgaaatgaacgcgtcgattgcgaaactggagcgtcagcgcgatgcccaggagcgcaaccttgctgcacagcttgacgccgctttccgccagggtgagcacacaggccttcagttgatcctcagcggtgaagagagccagcgcggtcagcgtttacaggcctatttcggctatctcaaccaggctcgtcaggagaccattgcgcagctgaaacagacgcgcgaagaagtcaccacgcaaaaagccgagctggaagagaagcagagccagcagcaaacgctgctctacgatcagcaggcgcagcaggagaagcttgagcaggcgcgcaatgagcgtaagaagacgctcgccgggctggagtcctctatccaggcaggacaaagccagctgagcgaaatgcgcgccaacgaatccagactgcgtaacagcattgcccgggcagaagccgcggccaaagcgcgcgccgaaaaagaagcgcgcgaagcgcaggcggtgcgtaataagcagcaggaagcctcccggaaaggcaccacctacaaaccgactgaaaatgaacgttccctgatgtcgcgtaccggcggcctcggctccccgcgtggtcaggcttactggcccgttcgcggtacgatcctgcatcgctatggcgaacagttgcagggtgagctacgttggaaggggatcgttatcggtgcgtctgaaggtagcgaagtgaaagccatcgccgatggccgcgtgatcctggccgactggctacagggttacgggctcgtggtggtggtcgagcacggtaaaggcgacatgagtctttacggctacaaccagagcgcgctggtcagcgttggcactcaggtgcgcgcgggtcaacccattgcccttgtgggcagcagtggcggtcagggccgcccgtcactctatttcgaaattcgtcgtcagggtcaggcggtcaatccacagccgtggttgggaagataa

SEQ ID NO: 524195 - DNA, 1545 bp, Stenotrophomonas maltophilia
atgtcggtttctaaaaaacctatggtactggtgattctggatggctatggctaccgtgaagatcaacaggataacgccattttcaacgccaaaaccccggttatggatgcgctatgggcaaaacgtccccacaccctgattgatgcgtctggtctggaagtcggcctgccggatcgtcagatgggcaactctgaagtgggtcacgttaacctgggcgcaggccgtatcgtttatcaggacctgacgcgcctggacgttgaaatcaaagaacgtacattctttgccaacccaacgctcaccggagcagttgataaagccgttgccgcaggcaaggccgttcatattatgggcctgctctctgcgggcggcgttcacagccacgaagatcacatcatggcgatggtagagctggccgctgagcgcggtgcggaaaaaatctatctgcacgccttcctggatggtcgcgatacgccgccacgcagcgcaaaaggttctctgaaagcctttgaagataaatttgccgcactgggcaaaggccgcgtggcatccatcgttggtcgttactatgccatggaccgcgacaaccgctgggaccgcgttgagcaagcctatgatctgctgaccctggcaaaaggcgagttccagttcccgaccgccgttgaaggcctggaagcggcttacgcgcgtgatgaaaacgacgaatttgtgaaggcaaccgtgatccgcgctgaaggccaggccgatgccgctatggtagatggcgatgcgctgatcttcatgaacttccgtgctgaccgcgcgcgcgaaatcacccgcgccttcgtcaacagcgatttcgacggtttcgcccgtaagaaagtggcgaagatcgatttcatccagttgaccgagtatgcagcggatatcaaagccccatgcgcgtatccacccgcttccctggaaaataccttcggcgagtggatggcgaaaaacgataaaacgcagctgcgcatctccgaaactgagaagtatgcgcacgtgaccttcttctttaacggcggcgtagaagagccgtttaaaggcgaagaccgcatcctgattaactcaccgaaagtcgccacatacgatctccagccagaaatgagctctgcggagctgaccgaaaaactggtggccgcgatcgaaagcggtaaatacgacaccatcatctgtaactatccgaatggcgacatggtgggccacaccggcgtgatggaagctgccgttaaagcggttgaagcgctggaccactgcgttgagcaggccgcgaaagcggttgaatccgtgggcggccagctgctgatcaccgctgaccacggtaacgcagaacagatgcgtgacccggcaaccggtcaggcgcatactgcccataccaacctgcctgttccactgatttatgtaggtgataagtcagtgaaagcagtggaaggcggcaagctttccgacatcgcgccaaccatgttgtcgctgatgggtatggaaatccctgaagagatgactggcaagccgctgttcatcgtggaataa

SEQ ID NO: 524196 - DNA, 432 bp, Stenotrophomonas maltophilia
atgcaagaaattatgcaattcgttagccgccacccggttctgagcatcgcgtggattggcctgctggtcgctgtactgttcaccacatttaagggactgacgtctaaaattaaggtgatcacccgcggtgaagcgacacgtctgatcaacaaagaggacgccgtggttgtcgatctgcgtcagcgcgacgatttccgcaagggccatattgcaggtgctatcaacctgctgccagcggaaattaaagcgaacaacattggtgagctggagaagcataaagcccagccgattattgttgttgacggcactggcatgcaggcgcaggaatctgccaacgcactgcataaagcaggctttgaaaacgtaacggtgctgaaagaaggcatctccggctggagcggggagaatcttcctttagtgcgcggtaaataa

SEQ ID NO: 524197 - DNA, 252 bp, Stenotrophomonas maltophilia
atggccaatattgagatctacaccaaagcaacgtgcccgttctgccaccgagcgaaagcgctgctgtccagcaaaggcgtaacgtttaaggaactgccgattgatggtgacgcgattaaacgcgaagagatgatccaacgcagtggtcgcacaacggttccacagatttttattgatgcgcagcacattggcggctgtgatgacttgtatgcgctcgacgcccgcggtggactcgatccgctgctgagctag

SEQ ID NO: 524198 - DNA, 468 bp, Stenotrophomonas maltophilia
atgtcagaacaaaacaacaccgagatgactttccagatccagcgcatctacaccaaggatgtctctttcgaagcgccaaatgcgccgcacgttttccagaaagactggcagccagaggttaaacttgatctggataccgcatccacccagctggcggatgacgtgtatgaagtcgtactgcgtgtcaccgtgaccgcctccctgggcgaagaaactgcattcctgtgcgaagtccagcagggcggtatcttctctatcggcggcatcgaaggtaaccagatggcgcattgcctgggtgcatactgcccgaacatcctgttcccgtatgcgcgtgaatgcatcaccagcctggtttctcgcggtacattcccgcaactgaaccttgcgccagtcaactttgatgcgctgtttatgaactatctacagcagcaggctggcgaaggtgccgaacaacatcaggatgcctga

SEQ ID NO: 524199 - DNA, 1020 bp, Stenotrophomonas maltophilia
atgagcactgttaatgcgtcaatgactgtgatcggtgccggctcttacggcaccgctcttgccatcacactggcaagaaatggtcacgacgtggtcctgtggggccacgatccaaaacatatcgcgacgttgcaacacgaccgctgcaacgtggcgtttctcccggacgttccgttccctgactctctgtatctggaaagcgacctcgcaaccgcgctggcggccagccgcaatattttgattgtggtgccaagccatgtgtttggcgaagtcctgcgtcagattaagccgctgatgcgtgcggatgcgcgtattgtgtgggcgacgaaggggctggaagcggaaaccggacgtctgttgcaggacgttgcccgcgaagcgctgggaacagcgatcccgctggcggtgatctccgggccgacattcgccaaagagctggctgcgggcttgccgacggcgatctcgctggcgtccaccgaccaggcattttccgacgatcttcagcaactgctgcactgcggcaaaagcttccgcgtgtacagcaaccctgattttatcggcgtacagctgggcggcgcggtgaagaacgtcattgccatcggggccgggatgtctgacggcatcggcttcggcgcgaatgcgcgtacggcgctgatcacccgtggcctgaccgaaatgtcacgcctgggcgaagcgctgggcgccgatccggccacctttatggggatggctgggctgggcgacctggtgctgacctgcaccgacaaccagtcgcgtaaccgccgctttggcatgatgctcggacagggcagcgatgtcaaaagcgcgcaggagaagattggtcaggtggttgaaggctatcgcaataccaaagaagttcgcgaattggcgcatcgtttcggtgtcgaaatgccaataaccgaggaaatttatcaggtattgtattgcggaaaaaatgcgcgcgaggcagcattgaccttattaggtcgtgcgcgcaaggacgagcgcagcagcaattag

SEQ ID NO: 524200 - DNA, 822 bp, Stenotrophomonas maltophilia
atgccgtgtgaagaactggatatcgtctggaataatattaaagccgaagcccgagcgttggccgactgtgagcccatgctggccagtttttatcacgcgacgctactcaagcacgaaaatctcggcagcgccctgagctacatgctcgccaataaactggcttcccctatcatgcctgctatcgctattcgcgaggtggtggaagaggcctacgctgccgatccggaaatgattgcttctgccgcctgcgatattcaggccgtgcgcacgcgtgacccggcggtggataaatactccacgccgctgctgtatctcaaaggcttccacgccttacaggcgtaccgcatcggccactggttatggaatgagggacgccgcgcgctggccatcttcctgcaaaaccaggtttccgtgaccttccaggtcgatattcacccggcggcgaaaattggccgcgggatcatgctcgatcacgccaccggcattgttgtcggtgaaacggcggtgatcgaagatgacgtgtcgattctgcaatccgttacgctgggcggtaccggtaaaaccagcggcgatcgccatccgaaaattcgtgaaggggtgatgattggcgcgggtgctaaaatccttggcaatattgaagtcggacgcggcgcaaaaattggcgcgggatcggttgtgctccagcctgtaccgccgcacaccaccgccgctggcgtcccggcgcgcatcgtcggtaagccagacagcgataaaccgtcgatggatatggatcagcactttaacggtattcaccacaccttcgaatacggcgacggtatctga

SEQ ID NO: 524201 - DNA, 282 bp, Stenotrophomonas maltophilia
atggcaaaaacagcagcagcactgcatatccttgttaaagaagaaaaactggcacaggatctgctcgaacagattaaaaacggcgccgacttcggcaaactggcgaagaaacactcgatttgcccgtcaggcaaacgcggtggtgacttaggcgagttccgccagggccagatggttccggcgtttgataaagtggtcttctcctgcccggtgctggagccaaccggcccactgcatacgcagttcggctatcacattatcaaagtgttataccgcaactaa

SEQ ID NO: 524202 - DNA, 2025 bp, Stenotrophomonas maltophilia
atgcgtttaaaccccggacaacaacaagctgtcgaattcgtcaccggaccctgcctggtgctggcgggagcgggatccggtaaaacacgcgtgatcaccaacaaaatcgcccacttaattcggggttgtggataccaggcgcgccatatcgcggcggtcacctttaccaacaaggcggcgcgtgagatgaaagagcgcgtcggccagacgctgggccgtaaagaggcgcgcgggctgatgatctccaccttccacacgctgggtctggatatcatcaagcgcgaatacgcggcgctgggaatgaagtccaacttttcgctctttgatgacaccgaccaggtggcgctgctcaaagagctgacggaagggctgatcgaagatgacaaagtgctgttgcaacagctgatctcgacgatctcgaactggaaaaacgatctgatgacgccggcccaggctgcggcaagtgccaaaggcgagcgtgaccgcatctttgcccactgctatggcctgtacgacgcgcatatgaaagcctgcaacgtactggatttcgacgatctgatcctgctgccgacgctgctgcttcagcggaatgaagaggtgcgcgagcgctggcagaacaaaattcgttacctgctggtggatgaataccaggataccaacaccagccagtacgagctggtgaagctgctggtaggacagcgcgcgcgttttaccgtcgtaggtgatgacgatcagtcgatttactcctggcgtggcgcacgtccgcaaaacctggtgctgctgagcaaagacttcccggcgttgcaggtgattaaactggagcagaactaccgttcttccgggcgtatcctgaaggcggcgaacatcctgattgccaacaacccgcacgtctttgagaagcgcctgttctctgaactgggttacgggaccgagctgaaagtccttagcgccaataacgaagagcacgaagcggagcgcgtaaccggcgagctgattgcccatcacttcgtcaacaaaactgaatacaaggattacgcgatcctctatcgcggaaaccaccagtcgcgcgtctttgaaaagatgctgatgcagaaccgcatcccctacaaaatctccggcggtacgtcgttcttttcgcgtccggaaatcaaggatctgctggcttatctgcgcgtgctgaccaacccggatgacgacagcgctttcctgcgcattgtaaatacgccgaagcgcgagattggctctgcgacgctgcaaaagctgggtgaatgggcgatgacccgcaacaaaagtctgttcaccgccagcttcgatatggggctgagccagaccctgaccgggcgcggctatgacgccttaacccgatttacccactggctgggtgaggtgcagcgtctggcagagcgcgaacccgtggcggcagtacgcgacctgatccacggcattgattacgaatcctggttgtatgaaacctccgccagcccgaaagcggcagaaatgcgcatgaaaaacgttaaccagctcttcagctggatgaccgaaatgcttgaaggatctgagattgacgagccgatgaccctgacgcaggtggtcacccgcttcacgctgcgcgatatgatggagcgcggcgagagtgaagaagaagctgatcaggtccagctgatgacgttgcatgcctcgaaagggctggagttcccgtatgtctatctggtggggatggaagagggcctgctgccgcaccagagcagcattgatgaagataacgtcgacgaagagcgccgtctggcctacgtggggatcacccgtgcgcagaaagagctgacgtttacgctgtgcaaagagcgccgtcagtatggtgagctggtgcgcccggagccgagccgcttcctgctggagttgcctcaggacgatcttatctgggagcaggagcgtaaagctattaccgctgaagagcggatgcacaaggggcaagccaacgtggcgaacatacgcgccatgctggcgaaagccaaagagaaaggataa

SEQ ID NO: 524203 - DNA, 1509 bp, Stenotrophomonas maltophilia
atgcaacgcaagcttgccacatgggcagccaccgatccgtccctacggattcaacggctgctgcgtctgataacacaaccagaatggctggctgaagcggcgcggatcacgctttcatcaaagggggcccatacccccggcgttgatggcgtgaacaaaacaatgctacaggccagactggctgttgagctgcaaatcctcagggatgaattactctcaggccactaccagcccttgcccgccagacgggtttacatccctaaaagcaacggcaaactgcgaccactgggtatccccgcgttgcgggatcgtattgttcagcgggccatgctgatggcgatggagccgatatgggagagtgattttcatacgctctcatatggcttccggcctgagcgcagtgtccaccacgcgatccgcacggtgaaattacagctcacagactgcggtgaaacccggggacgctgggtgattgaaggcgacctgtccagttacttcgacaccgtacatcatcgactgctgatgaaggctgtacgccgcaggatcagtgacgcacgtttcatgactctgctgtggaaaaccatcaaggcgggacatatcgatgtcggtctctttcgggcggccagtgaaggtgtgccacagggcggtgttatatcgccgctattatcgaacatcatgctgaatgagttcgatcaatacctgcatgagcgctacctgagcgggaaagccagaaaagatcggtggtactggaataacagtatccaacggggccgaagtacggcggtcagagaaaactggcagtggaaacccgcggtggcgtactgccgctatgccgatgattttgtcctcatcgtcaaaggcaccaaagcacaggcggaagccatcagggaggagtgtcggggtgtgctcgaaggcagtctgaaactcaggctgaacatggataagactaaaatcacccatgttaatgacggctttatctttctggggcacaggatcattcgcaaacgcagtcgttatggcgagatgcgagtggtctcaacgatcccgcaggagaaagccagaaacttcgccgcatcgctgacagcactgttatcaggcaactacagtgaaagcaaagtcgatatggctgaacaactcaaccgaaaactgaaaggctgggccatgttctatcagttcgttgattttaaggccaaagtcttcagttatatcgaccgtgtcgtgttctggaagctggctcactggctggcccgcaaataccgtacaggtatcgcttccctgatgaggtggtggtgtaaatcaccgaaaccgggtcagagcaaaacgtgggttttatttggtaaaaccaatcacggcaagctcagcggcgaaatactgtaccggttggtggggcaaggcaagaagctgttccgctggcggctacccgaaggtaatccctatctgaggacggagaccagaaacacgtatacatcgcgctttacagaagtggcaatggcgttcgccagcatttaa

SEQ ID NO: 524204 - DNA, 420 bp, Stenotrophomonas maltophilia
atgtgtcgggtactgaatgtcgcccgggccgggttctatgcgtggctgcataaccctgtctcggcgcgtgataaagataaccagcgcctgctgatgcttatccgcgactcatattccctgagcggaggcgtatacggttaccggcgggttcatggcgatctgaacgaaatcggggaaacctgtggtagaaaccgggtgggtcggatcatgcaactggaccggattaaagctgtgcgcggctataaagcgccacgtcgtatcgctggcaggccttcagtcgttgctcctaatctcgtgcagcggcagttcaccgttgtccgggccacccaggtctgggtcaccgatattacttatagtgtgcccggagttcagggcgggcatggatgcttaaatgaaccgcgagtctgtctggaatattga

SEQ ID NO: 524205 - DNA, 309 bp, Stenotrophomonas maltophilia; identical to SEQ ID NO: 113671

SEQ ID NO: 524206 - DNA, 1134 bp, Stenotrophomonas maltophilia; identical to SEQ ID NO: 119510

SEQ ID NO: 524207 - DNA, 582 bp, Stenotrophomonas maltophilia; identical to SEQ ID NO: 119508

SEQ ID NO: 524208 - DNA, 660 bp, Stenotrophomonas maltophilia; identical to SEQ ID NO: 119507

SEQ ID NO: 524209 - DNA, 837 bp, Stenotrophomonas maltophilia; identical to SEQ ID NO: 119506

SEQ ID NO: 524210 - DNA, 852 bp, Stenotrophomonas maltophilia; identical to SEQ ID NO: 119505

SEQ ID NO: 524211 - DNA, 876 bp, Stenotrophomonas maltophilia; identical to SEQ ID NO: 119504

SEQ ID NO: 524212 - DNA, 795 bp, Stenotrophomonas maltophilia; identical to SEQ ID NO: 119503

SEQ ID NO: 524213 - DNA, 1125 bp, Stenotrophomonas maltophilia; identical to SEQ ID NO: 119502

SEQ ID NO: 524214 - DNA, 330 bp, Stenotrophomonas maltophilia; identical to SEQ ID NO: 119501

SEQ ID NO: 524215 - DNA, 1152 bp, Stenotrophomonas maltophilia
atgagacgaacatttacagcagaggaaaaagcctctgtttttgaactatggaagaacggaacaggcttcagtgaaatagcgaatatcctgggttcaaaacccggaacgatcttcactatgttaagggatactggcggcataaaaccccatgagcgtaagcgggctgtagctcacctgacactgtctgagcgcgaggagatacgagctggtttgtcagccaaaatgagcattcgtgcgatagctactgcgctgaatcgcagtccttcgacgatctcacgtgaagttcagcgtaatcggggcagacgctattacaaagctgttgatgctaataaccgagccaacagaatggcgaaaaggccaaaaccgtgcttactggatcaaaatttaccattgcgaaagcttgttctggaaaagctggagatgaaatggtctccagagcaaatatcaggatggttaaggcgaacaaaaccacgtcaaaaaacgctgcgaatatcacctgagacaatttataaaacgctgtactttcgtagccgtgaagcgctacaccacctgaatatacagcatctgcgacggtcgcatagccttcgccatggcaggcgtcatacccgcaaaggcgaaagaggtacgattaacatagtgaacggaacaccaattcacgaacgttcccgaaatatcgataacagacgctctctggggcattgggagggcgatttagtctcaggtacaaaaaactctcatatagccacacttgtagaccgaaaatcacgttatacgatcatccttagactcaggggcaaagattctgtctcagtaaatcaggctcttaccgacaaattcctgagtttaccgtcagaactcagaaaatcactgacatgggacagaggaatggaactggccagacatctagaatttactgtcagcaccggcgttaaagtttacttctgcgatcctcagagtccttggcagcggggaacaaatgagaacacaaatgggctaattcggcagtattttcctaaaaagacatgtcttgcccaatatactcaacatgaactagatctggttgctgctcagctaaacaacagaccgagaaagacactgaagttcaaaacaccgaaagagataattgaaaggggtgttgcattgacagattga

SEQ ID NO: 524216 - DNA, 1557 bp, Stenotrophomonas maltophilia
atgaaaaacatgaaactggagtggaaaagaggtgactgggcagcttatttcgggttgatgaccaacaacctgaccaatttgctgaccatgatggggttgctcatttttgtcgtcggcatcccgaaggagattgtttatggacgcatcgcgccagccttcgggctggcggtgctggtggcgagtctttgctatacgtggtttggcctgcaaatggcgcgcgccaccggacgaacggacgtcaccgcgctgccgtccggcccgagcgcgccgtcgatttttaccgtgaccttcttggtcttaatgccggtttaccagcaaaccggcgatgcggatttcgcgattcagattggcctggtgtggtgctttgtggaagcgatgatcctcgcgggcggttccttcctgggggaaagcatccgcaagatgatcccgcgtaccgtgctgctgtcgtgcctgtccggtcttggcctgctcctgctggcgatgaacccgatgttgcaggcgttcgaagcgccgaccgtgtcgtttatcgtcctgctgctgatcttcattaactggttcggtaaaaagccgattttcgcccgcatcccgaccggcctgctgctgttgattgccggtactctgcttgcgtggatctccggcctgcaaagcccggatgccattaaagcgtccatgtcatccttcggctttaacccgccggaagtgcatgtggacagctttatgcaggggttgccgcacgcgctgccgtatctggcgtccgccgtaccgctggggctggcgaactacatctttgacctggagaacatcgaaagcgcccatgcggcgggggatgaatacccgacccgcaaggtaatgctggcgaacggtctggcctccatgctcggctgcttgatgggcaatccgttcccggtcacggtctacgtcggccatcctggctggaaagcgatgggcgccagcatcggctacaccctggcgtccggcgtgaccatgttcatcgtgccgctattcgggctgggggcctttatgctcgccatcataccgatgaccgccatcgtgccgattctggtgtttatcggcgtcgtcaccgccaaccaggtggtgagggaaaccccgaaagtggaggtgcccgtcatcttcatctgcctgttcccgtggattgccaactgggcgctgaccatgatgaacagcgtgatgagcgcggcggggaccagcgcggcgaaaattggcaccgacgtgctgcacagcaaggggatctactacgaaggcctgatgcatctcggcaacggcgcgccgctcgccagcatgctctggggctgtatcgccatcttcgccatcatcaacaaaccgctacgcggggccgtcgccgccgcaggaggtgcgctgctggcgctgtttggcgtgatccacgccccggtggtgggctttgccgagggcagttccctgatgttcgtcactgtagattcaattggtcaacgcaacagttatgtgaaaacatggggttgcggaggttttttgaatgagacgaacatttacagcagaggaaaaagcctctgtttttga

SEQ ID NO: 524217 - DNA, 1416 bp, Stenotrophomonas maltophilia
atgacgaccttattcaaccaaccgctgaacgtgattaacgtcgggattgcgatgttcagcgacgacctcaaaaaacagcacgttcccgtgacccagctcgactggacgccgccggggcagggcaatatgcaggtggtggacgcgctggatcggctggcggaaaaaccgctggcggagaaaattgctgccgcgaacaacattgcccttgagcgcattattcagtcccatccggtgctggtgggctatgaccaggcgattaacgtggtgccgggcatgacccgcaccaccattctgcacgccggtccgcctgttacctgggaaaacatgtgcggggcgatgaagggcgcggttaccggcgcgctggtgtttgaagggctggcgacggatctggaggacgccgcaaggctggcggcttcagggaagatcaccttctcgccgtgccacgagcacgactgtgtgggctctatggcgggcgtcacctccgcgtcgatgtttatgcacatcgttgagaacaaaacctacggcaaccgcgccttcaccaacctcagcgagcagatggcgaagatcctgcgcatgggggccaacgatcagagcgtgatcgaccgcctgaactggatgcgcgacgtgctcggcccaatgctgcgcgacgcgatgaagattatcggcgaaatcgacctgcgcctgatgctggcccaggcgctgcacatgggcgacgagtgccacaaccgcaacaacgcgggcaccacgctgcttatccaggcgctgacgccggggctgatccaggcgggctatccggtggcgcagcagcgtgaagtgttcgagtttgtcgccagcagcgactacttctccggtccgacgtggatggcaatgtgtaaggccgcgctggatgccgcccacggcattgagtacagcaccgtcgtcaccaccatggcgcgcaacggctacgagttcggcctgcgcgtctccggcctgccggggcagtggttcaccggcccggcgcagcaggtgatcggcccgatgttcgcgggctataagccggaagactccgggctggatatcggcgacagcgccatcaccgaaacctacggcatcggcggctttgcgatggcgacggcaccggcaatcgtggcgctggtgggcggcacggtggaggaagccatcgatttctcccgccagatgcgcgaaatcactctcggcgaaaacccgaacgtcaccattccgctgctgtcgtttatgggcatcccgtccgccatcgacatcacgaaggtcgcgggcagcggcattctgccggtcattaataccgccattgcccataaggacgccggtatcggcatgattggggcgggcatcgttcacccgccgtttagctgttttgaaaaggcgctgttaaccttccgcgatcgctacgttctataa

SEQ ID NO: 524218 - DNA, 1464 bp, Stenotrophomonas maltophilia
atgccaaccaaaatcgtcataaaaaagaatacgtatttcgattcggtttccttaatgtcggtttccaccaaagccaataaattgccgggcatcgagcaggcgtttgtggcgatggcgacggaaatgaacaaaggggtattaaaaaacctcgggctattaacgccggaattagcggacgcgaaaaacggcgacctgatgatcgttattaaaggcgacgcggcgaatgaggaaacccttgccgccattgaagcgttattcacgcgtaaagagagcgctggctcccatgaagcacgctacgcgacgattgccagcgccaaaacccatcgtccggacagcaaccttgcggtgatatccgtcaacggcaccttcgccgcccgcgaagcgcgccaggcactggaaaacgatctcaacgtgatgctgttttccgataatgtgtcgctcgacgacgagctggcgctgaagcagctggcgcatgacaaaggattgctaatgatggggccggactgcggcaccgccattatcaacggcgcggggctgtgctttgccaacgcggtacgtcgcgggccgattggcatcgttggcggcgggcgcgatctcagcgagaagattggcggcctgatgatgctcgacgccatcgacatgctggaggcggacgacgcgacccgggtgatagcgctcatttccaaaccgcctgcacccgcggtggcagagaaagtgctggcccgggcacgcgcctgccgcaaacctgtggttgtgtgctttctgggccgcaacgaaccgccagccgatgaagacggcttgcagtttgctcgtggcaccaaagaggcggccctgaaagcggtgctgcttaccggcattaaaaaagactccctggatttacatccgctcaactggccgctgatcgaagaggtgcgcgcccgcctgacgccacggcagaagtacattcgcggcctgttctgcggcggcaccctgtgcgacgaagcgatgtttgccgcgctggagaagtttgacgatgtttacagcaacatccagccggatccggccaggcgtctgaaggacatcagcgtcagccaggcccacaccttccttgatttcggtgacgacgatttcaccaacggcaaaccacacccgatgatcgacccgaccaaccgcatcagccgcctgctacaggaggcgcgcgatccgcaggtgggcgtcatcgtgatggacttcgtgctgggctttggcgcacacgaggatccggtgggggtgatgatcgaggcgatcaaagaggcacaggcaatcgcgaaagccgacaaccgtccgctggaaattctcggctacgtgctcggcaccgatcaggatccgcagtcgctggcccagcagtgccagctgctgaccgacgcaggcgtcatctgggccagcagcagcaccaataccggattactggcacgcgaatttgtctgcaaaggggagagagcataa

SEQ ID NO: 524219 - DNA, 606 bp, Stenotrophomonas maltophilia
atgtctgcaactgcactggttacagaatttttgctggcggcagaagagggtaatatcgacgcgctaaaagcttgcctggaaaaaggcgtggatattaacgcgaccaaccgccagaaaagaaccgccattattattgccagcctgaaaaagcattacgcctgtgtggaatttttaattgccgccggggcggatattgataaacaggaccagacctgttttaaccccttcctgatcggctgcctgaccaatgatttaaccctgctgcgcattgtccttccggcggatccggatctcgaccgtctgacgcgctttggcggcgtgggcattacccccgccagtgaaaaagggcacgttgaaatcgtgcgcgagctgctggaaaaaaccgacattaacgtcaaccacaccaattttgtcggctggacgccgctgcttgaggccatcgtgttaaacgacggcggcgcaaagcagcaggaaattgtgaagctgctgctggatcacggcgcgaatccgcacatgactgataaatacggcaaaaccccgctcgaactggcgcgggaaaaaggcttcaacgcgatcgcagacctgctgctggcggcaggcgcatag

SEQ ID NO: 524220 - DNA, 930 bp, Stenotrophomonas maltophilia
atgaattccatctttaccgaagagaatttgctggccttcaccaccgcggcacgctttggcagttttagcaaagcggctgccgagctgggcgtgaccacttccgccatcagttacaccatcaaacgcatggagaccgggctggacgtggtgctgtttgtacgcaacacgcgcagcattgagctgaccgaatccggtttttatttttatcgtaaagcgaccgacctgctgaatgactttcatgccatcaagcgcgggattgataccatttcgcagggcattgagacgcgggtgcgcatctgcattaatcagcttttgtatacgccacgccataccgcgcgtttgctccaggtgctgaaaaaacagtttcctacctgccaaatcacggtgacgaccgaggtgtataacggcgtctgggattccatcatcaataatcaggccaacatcgccattggcgcgccggatacgctgctggatggcggaggcatcgattacaccgagataggcgcgatccgctgggtatttgccatcgcgcccacgcatccgctggcgttcgccccggagcccatttccgaaagtcagctgcgtctgtatcccaatatcatggtcgaggacaccgcgcataccatcaacaagaaggtcggctggctgcttcacggtcaggaggcgattctggtaccggactttaacaccaagtgtcagtgtcagatcctgggggagggtattggatttttaccggagtatatgacgcgtgaggcgatggaggacgggctgctggtaaagcggcgaatcaataatccgcgccaggactcgcgcatgctgctcgccacgcagcatgcggcgaccggtcaggtcacgcgctggatcaaacagcagtttggccccgagggcgcgctgacccggatctacagtgatctattgtggcgtacctag

SEQ ID NO: 524221 - DNA, 159 bp, Stenotrophomonas maltophilia
atgggtttttggcgcgttgtttttacgattattctcccgccgctgggcgtgctgcttggcaagggactgggctgggcgtttatcctgaacatccttctgaccatcctgggttacttcccgggtcttatccacgcgttttgggttcagacgaaaagctag

SEQ ID NO: 524222 - DNA, 537 bp, Stenotrophomonas maltophilia
  misc_feature (374)..(383): n is a, c, g, or t
atgtctcttcctcttatttcgccgcagcaggcaaacgcgcttattgctgaaggcgccaaacttatcgatattcgcgaccccgacgagtatgcccgcgagcatattccagtggcgcactccattccgctggattcgttacccggcgggcttaacgcagcgccgggagaaacggtgattttccactgtcagtctggcgcaagaaccgtaaacaatgatgctcgtcttgcccgggcagcgtcccctgcgaacgcctttgtggttgagggaggcattcagggctggaagcaggctgggctgctgaccgttgaagataaatcgcagccgcttccgctgatgcgtcaggtgcagatcgccgccgggctgctgattctctnnnnnnnnnngattctctgcggcgtggtgctgggttacagcgtctcaagcggctttttcctgctaagcggttttgtgggcgccgggctgctgttcgccggagtgacaggtttttgcggtatggcgcgactgctgaaagtgatgccgtggaaccgacgtacctga

SEQ ID NO: 524223 - DNA, 180 bp, Stenotrophomonas maltophilia
atgttttctgtcggtgattatgtccaaccgcgtcagggcggtccgaaactgaaagtgctcgaagtaaatggtgaaaacattgtggccgtacaggccagcaatgagcagggcgagaaatatcacctgaaagcggcggacgtagttctgtactccgaagaaggtgactttggcgtctgctaa

SEQ ID NO: 524224 - DNA, 405 bp, Stenotrophomonas maltophilia
atggctttaacgttacagaatcttaataatatccgtaccctccgggcgctggcgcgtgaattatccatggatgttctggaagaagtgctggaaaaagttcggattgtcacagaagaaaaacgcagcgagcaggctgaattagagcgccagcgcgctgaacagcaggataaaattaatgctctgctggaactgatgaaggcagacggtatttccccgagcgatctgttaggcggagaactggctcatgcgggccagccggctaaaaaacgtaaagcgcgtgcggcgaaatatcgtttcatcgacgcgaacggtgaagagaaaacgtggaccggtcagggacgtacgccaaagccaattgcgaacgcactggcaaacggtaaatcgctggacgatttcctgatctga

SEQ ID NO: 524225 - DNA, 450 bp, Stenotrophomonas maltophilia
atgttctcaccgcagtctcgcctgcgccatgcggtagcggatacgttcgcgatggtcgtttactgttccgtcgtaaacatgctgattgaaattttcctgtccggaatgacctttgagcagtccctctcatcgcgcctggtggccattccggtgaatatcatgattgcctggccgtacggaatgtatcgcgatgcggtgatgcgtttcgcccggcgtattagcccggcaggttgggtaaaaaacctggcggacgtgctggcttacgtgacgttccagtccccggtgtatgtggttattttgctgacggtgggcgcagactggcatcaaatcgccgccgcggtaagttcaaatatcgtggtatctatgctgatgggtgcggtgtacggttacttccttgactactgccgccgcctgtttgaagtcagcccttatagccaggcaaaagcgtaa

SEQ ID NO: 524226 - DNA, 345 bp, Stenotrophomonas maltophilia
atgtatttacgacccgatgaggtggcgcgcgttcttgaaaaagaagggttcaccatggatgaggtaacatcaaaagcgtacggatatcgccgtggtgagaattatgtttacgtcaaccgtgaagcaagaatggggcgtactgctctcattattcacccgacactcaaagacagaagcctgtcatttgctgagcccgcctcggatattaaaacctgcgatcattatcagcaatttccgctctatttaggcggcgagacgcatgaacattatggtattccgcacggtttcagctcgcgtatggcgctggagcgtttcctgaaagggctgtttggcgacgtacaataa

SEQ ID NO: 524227 - DNA, 327 bp, Stenotrophomonas maltophilia
atgtttaacagaccgaaccgaaacgatattaacgacgacacccaggatatccgtaacgatgtcagccaattagcggacacgctggaagccgtattgaaatcctggggctctgacgcgaaggacgaagcagatgccgcgaaacgtaaggctcagtctctgctgcgtgaaacgcgagcaaggatgaatggccgctcacgtaccactcaggcggcctgcgatatggcaagctgcgccaccaccttcgtacgtgaaaaaccgctgtgtacgttgggaacggtcgcggcagtcgggatttttgtcggcgccctgcttagcctgcgtaagtaa

SEQ ID NO: 524228 - DNA, 240 bp, Stenotrophomonas maltophilia
atgagcattattatttacactcgtaacgattgtgttcagtgccacgccacgaaacgggcgatggagagtcgcggcgtggcatttgagatggtcaatatagatcaggtgcctgacgcggcagacaccctgcgggcgcagggtttccgtcagcttccggtcgtggttgccggcgacaccagctggtctggctttcgtccggacatgatcaaccgccttgccgctcagggcgtcagtgcatga

SEQ ID NO: 524229 - DNA, 411 bp, Stenotrophomonas maltophilia
atgagcaggctggtctacttttccagcagctcggaaaacacgcttcggtttatggagcgtctcgggctgcccgcgattcgcattccgctgaacgagcgggagcgtattcaggtagacgaaccctacattctggtagtgcccagctatggcggtggcggcaccgcgggggctgtgcctcgtcaggtgatccgctttctgaacgacccccataaccggcagctgattcgcggcgtgatcgcggcaggcaatcgcaacttcggcgaggcctttgcccgcgccggggatgtcatctctcaaaaatgcggcgtgccgtatctctatcgttttgaactgatggggacacagcaggacgtagagaacgtgcgtaaaggagtgaacgaattttggcaacgacaaccgcagagcgcgtga

SEQ ID NO: 524230 - DNA, 2145 bp, Stenotrophomonas maltophilia
ttggcaacgacaaccgcagagcgcgtgattcaggcgacgccggattaccatgcattaaacgccatgctaaacctctatgaccgggaggggcgcattcagtttggcaaagatcgtgaggcggtggacgccttttttgccgctcatgtacgcccgaacagcgtcgtctttggcagccagcaggaacgtctcgactggctggtaaaagagggttattacgaagagcgcgtcctgacccgctacgaccgcgccttcgcggtggcattgtttgaacgggcgcacgccagcggttttcgcttccagacgtttctcggcgcgtggaagtattacaccagctacaccctgaaaaccttcgacggcaaacgctatttagaaagctttgaagatcgggtggtgatggtagccctgacgctggcgcagggcgatgaagctctggccgaaaggctgacggaggagatcctctcaggccgcttccagcctgccacgccaaccttccttaactgcggcaaagcccagcgcggcgagctggtctcctgcttcctgctgcgtattgaagacaatatggagtcgattggccgtgcggtgaattcggcgctacagctgtcgaaacgcggcggcggcgtggcatttctgctttcgaacctgcgggaagcgggcgcgccgatcaagcgcatcgaaaatcagtcctccggcgtcatcccggtgatgaagatgctggaagatgccttctcatacgccaaccagcttggcgcacgtcagggcgcgggtgcggtttatctgcacgcgcatcatccggacattctgcgttttctggataccaaacgtgaaaacgccgacgaaaagatccgcattaaaaccctgtcgctcggcgtggtgatcccggatatcacgtttaagctggccaaagaaaatgccgacatggcgcttttctcgccgtatgacgtcgagcgtatctacggcaaagcctttggcgatgtggccatcagcgaactgtatgacgaactggtggcggacgagcgcattcgtaagaaatacattaacgcccgcgactttttccagacgcttgccgaaattcagtttgagtccgggtacccgtacatcatgtacgaggatacggtgaaccgcgccaacccgattgccgggcgcatcaacatgagcaatctgtgctcggagattttgcaggtcaacagcgcgtccagttacgacgagaacctcgactacgcggatatcggcaaagatatctcctgcaatctcggttcgctgaatattgcccacaccatggattcccccgattttggccgcacggtagagaccgccattcgcgggctgacggcggtatcggacatgagccacatccgcagcgtaccgtccattgaggcgggcaacgccgcgtcgcatgccatcggccttgggcagatgaacctgcacggctatctggcgcgggagggtatcgcctacggcagcccggaagggctggatttcaccaacctttatttctataccatcacctggcatgcgctgcatacctcgatgctgctggcgcgcgaacgcaaccagcggttcgcaggctttgagcagtcccgctacgccagcggagagtatttcagccagtatctggaaggcgactggcagccgaaaaccgaaaaagtacgcgcgcttttcgaccgcgccggcattaccctgccgacgcgtgagatgtggcaacagctgcgtgaggatgtgatgcactacggcatctataaccagaaccttcaggcggttccgccaaccggctccatttcctatataaatcatgccacgtcgagcatccatccgatcgtgtcgaagattgaaatccgcaaggaaggcaaaaccggacgcgtctactaccctgccccgtttatgactaacgagaatctggctctgtaccaggacgcctatgagatcggcccggaaaagatcattgatacctacgccgaggcgaccagacatgtggaccaggggctgtcgctgacgctcttcttcccggacaccgccaccacgcgggatatcaataaagcgcagatctacgcctggaagagaggcatcaaaacgctgtactacattcgcctgcgccagctcgcgctggaaggtaccgaaattgaaggctgcgtgtcctgcgcgctgtaa

SEQ ID NO: 524231 - DNA, 960 bp, Stenotrophomonas maltophilia
atgaaactgtcacgcgtaagtgccgttaactggaacaaaattcaggatgataaagacctggaggtctggaaccgcctgaccagcaacttctggctgccggaaaaggtgccgctctccaacgatattccggcctggcaaaccctgagccatgccgagcagcagctgacaatccgcgtctttaccggcctgacgctgctggacaccattcagaataccgtgggtgcgcccgcgctgatgagtgatgcgctgaccccgcacgaagaggcggtaatgtcgaatatcagctttatggaggcggtccatgcccgctcttacagctcgattttctccaccctgtgccagaccagagacgtggacgcggcctacgcctggagcgaagagagcgcgtcattgcagcgcaaggcagatctggtgctggaatattaccgggccgacgagccgctgaagaagaagatcgccagcgtgttcctggaatcttttctcttctattccggcttctggctgcccatgtactggtcgagccggggcaagctcactaataccgccgatttgattcgcctcatcatccgcgatgaagcggtacacgggtattacatcggctataagtaccagaaaggactggagaaagtcaccccggaaaaacgcgaggaactcaaaggttttgccctcgatttactgatggatctgtatgacaacgagctgagctataccgaggagctgtacgccggaacgggctgggaagaggacgtaaaagccttcctctgctacaacgccaacaaggcgctgatgaacctgggctacgaagcgttattcccaccggaaatggcggaagtgaacccggcgatcctcgcggcgctgtcgcccaacgccgatgaaaaccacgacttcttttccgggtccggctcgtcgtacgtgatgggtaaagcggtggagacgcaagacgaggactgggatttttaa

SEQ ID NO: 524232 - DNA, 1203 bp, Stenotrophomonas maltophilia
atggcaattaaattagaagtgaaaaatctttataaagtatttggcgagcacccgcagcgtgctttcaaatatattgagaaaggcctttcgaaagagcaaattctggaaaaaaccgggctatcgcttggcgttaaagacgccagtctggccattgaagaaggcgagatttttgtcatcatgggattatccggttcgggtaaatccactatggttcgccttctcaatcgcctgattgaacccacccgcggacaggtgctgattgacggcgttgatatcgccagaatatcagacgcggaactccgcgaggtgcgcagaaagaaaattgcgatggtgtttcagtcatttgcactgatgccgcacatgacggtactcgataataccgcctttggcatggagttagccggcacgcccgctcaggaacgtcaggaaaaagcccttgatgcactgcgtcaggtcgggctggaaaattatgctcatgcgtatccggatgagctctccggcggtatgcgtcagcgcgtaggattagcgcgcgcattagcgattaatccggatattttattaatggacgaagccttctcggcgctcgatcccttaattcgcaccgagatgcaggatgagttggtaaaattacaggccaaacatcagcgcaccattgtttttatttctcacgatctggatgaagccatgcgtattggcgaccgtatcgccattatgcaaaatggtgaagtggtgcaggtcggcacaccggatgaaattctcaataatccggcgaatgattatgtgcgcaccttcttccgcggcgtggatattagccacgtattcagtgcgaaagatattgcccgtcgaacaccaaacggcattattcgaaaaacgccaggttttggtccgcgctccgcgctgaagctgttgcaggacgaagaccgtgaatacggttatctggttgaacgcggcaataaatttgtcggcgttgtctccatcgactccctgaaaaccgccctgagcgaaaaccagggaatcgatgcggcgttgattgacgctccgcttgccgtggacgccgaaacgccgctcagcgagttgctctctcacgtgggtcaggcgccgtgcgccgtgccggttgtcggtgaagaacaacagtacgttggcatcatctcaaaacggatgctgctacaggctttagatcgcgaggggacaaacaatggctga

SEQ ID NO: 524233 - DNA, 1065 bp, Stenotrophomonas maltophilia
atggctgatcaatcaaacccatggggcaccactgaagcagcggacagcgcggcgcaatctgccgatgcgtgggggtcgacgcctgcgcctgccgatggcggcggcgcggcagactggctcaacagcgcaccggcgcctgccccagagcatttcaatattatggatccgttccacaagacgctgatcccgctggatagctgggtaacggaggggatcgactgggtcgttacccacttccgtccggtgttccaggggatccgtatcccggtggattacatcctgaacggcttccagcagctgatgctgggcatgcccgcgccggtggcgattatcctgttctcgctgatcgcatggcagttcggcagcgcgggtatggggatcgccacgctgatctccctgattgccatcggcgcgattggcgcgtggtctcaggcgatgatcaccctggcgctggtgctgaccgccctgctgttctgcgtggcgatcggcctgccgatggggatctggctggcgcgcagcccgcgggccgcaaaaattatccgcccgctgctggatgcaatgcagaccacgccagcgttcgtttacctggtgcctatcgtgatgctgttcggcatcggtaacgtaccgggggtggtcgtgaccattatcttcgccctgccgccgattattcgcctgaccattctgggcattaaccaggtgcctgcggatctgatagaggcatcacgctcgtttggcgccagcccgcgtcagatgctgtttaaggttcagcttccgctggcgatgccgaccattatggcaggtgttaaccagacgctgatgctggcgctgtcgatggtggtgatcgcctcaatgattgccgttggcgggttaggtcagatggtactgcgcggcattggccgtctcgatatggggctggcgaccgtcggcggtgtcgggattgtgatcctcgccatcattcttgaccgcctgacccaggctgtcggtcgtgattcacgcagtcgcggcaaccgtcgctggtataccaccggccctgtcgggttactcacccgcccattcacaaaataa

SEQ ID NO: 524234 - DNA, 996 bp, Stenotrophomonas maltophilia
atgcgacataacgtactttttgccacagcgtttgcgacccttgtctccaccagcgcagttgccgctgacctgccgggcaaaggcattaccgtgcagccggtgcagagcaccatttcggaagagtccttccagacccagattgtcagccgtgcgctggagaaactgggctatacggtgaataccgccagtgaagtggattacaacgtgggctatacctctattgcctccggcgatgccacctttaccgccgtgaactggcagccgctgcacgacgatatgtatgccgccgcaggcggtgacaagaaattctaccgcgaaggcacctttgtgaccggcgctgcgcagggatatttgatcgacaagaaaaccgccgataagtatcacatcaccaatattgaacagttgaaagatccgaagatcgccaaactctttgataccaacggtgacggcaaagccgacatgatgggctgctcgccgggctggggctgtgaagcggtgattaaccaccagaacaaagccttcgatctggcgaagaccgtcgacgtgagccacggcaattactctgcgatgatggccgataccatcgcccgctttaaagaaggcaagccggtgatctactacacctggacgccgtactgggtgagcgacgtgctgaagccgggcaaagacgtggtgtggttgcaggtgcccttctcctccctgccgggcgagcagaaagatatcgacaccaaactgccaaacggcatgaactatggcttcccggtgaataccatgcatatcgtggcgaacaaagcctgggccgagaaaaacccggcggcggcgaagctgttctcggtaatgaaactgccgctggcagacattaacgcccagaacgcgatgatgcacgcgggtaaatcatccgaagctgatatcaaaggccacgtggatggttggatcaaagcccaccagcagcagttcgatggctgggtgaaagaggcgcttgaggcgcagaagtaa

SEQ ID NO: 524235 - DNA, 1185 bp, Stenotrophomonas maltophilia
atgacaaaaacaactcaagggcttagccccgcactcatccttttaatgtccgtggcaacgggactggccgtcgccagcaactattacgcgcaacctctgcttgatactatcgcgcgtgctttcgatctttcagccagctccgccggctttatcgtcaccgctgcgcagctcggctatgcggccgggctgctgttcctggtgccattaggcgatatgtttgagcgccggatgcttatcgtctccatgacgctgctggccgcaggcgggatgttgatcaccgccagcagccagtcgttaacgatgatgattatcggtaccgcgctgacggggctgttctcggtggtggcacaaattctggttcccctcgcggcgacgttggcttccccggaaaaacgcggcaaagtggttggcactattatgagcggcctgctgctgggcatcctgctggcgcgaaccgttgccgggctgctggcgagcctcggcggctggcgcaccgtttactgggtggcaagcgtgctgatggttatcatggcgctggccctgtggcgcggcctgccaaaggtgaagcaggagaatcacctgaactatccgcagctcctcgcctccgttttcagcctcttcacccgggataaactcctgcgcacacgcgccgttctggggtgtctcaccttcgccaacttcagcatcttatggacgtcgatggcgtttctgctcgccgcgccgccgtttaactactcagaaggcgtgattggcctgttcgggctggcaggcgcggctggcgcactgggcgcgcgcccggcgggtggcctggccgacaaaggtaaatctcatatgaccacctccgcagggctggttttactcctgctctcctggggggctatctggtacggacacgtctcagtgctggcgctaattgtcggtattctggtactcgacctcaccgtgcagggcgtacatatcaccaaccagaccgtgatttaccgcgtgaaaccagacgcccgtaaccgtctgacggccgggtacatgaccagctactttatcggcggcgcggcgggctcgctaatctcagcctccgcctggcagcatgcgggctggacgggcgtgtgcgcaatcggcgccatcgtggcggcgataaatctgctggtatggtggcgcggctatcaccgccaggaagcaattcactaa

SEQ ID NO: 524236 - DNA, 531 bp, Stenotrophomonas maltophilia
atggatagttcgtttacgcccattgaacaaatgcttaagttccgcgccagtcgtcatgaggacttcccgtatcaggagatcctgctgacccgcctgtgcatgcacatgcagggtaagctgctggaaaatcgtaacaagatgctgaaagcgcaagggattaacgagacgttgtttatggcgttgattacgcttgagtctcaggaaaaccacagcattcagccgtctgaactgagctgcgcgctgggttcatcccgtaccaatgcaacccgtattgctgatgagctggagaagcgcggctggatagagcgccgtgagagcgataacgatcgccgctgcctgcatctgcaactgaccgagaaaggtcacgaattcctgcgcgaagtgctgccaccgcagcataactgcctgcaccagctttggtctgccctcagcaccgccgagcgcgaccagcttgagcacattactcgcaagctgctcacccgtctggaccagatggatgaagatggcgtcattcttgaggcgctgcgctaa

SEQ ID NO: 524237 - DNA, 1173 bp, Stenotrophomonas maltophilia
atgagcgcaaatgcggagaacacccccccgcagcaaccggtcaacaagaagggcaaacgtaagagcgcccttattctgctgaccttgctctttattattattgccgtggcatatgggatctattggtttttagtcttgcgtcatgttgaagagacagacgatgcatacgtggcagggaatcaggttcaaatcatggcgcaggtgtcaggcagcgtgacgaaagtctgggctgacaacaccgactttgtgaaaaaaggggatgtgctggtcacgctcgacccgaccgacgcccaacaggcttttgaaaaagcacagacggcgctggcctccagcgttcgccagacccgccagctgatgatcaacagcaaacagcttcaggccaatatcgacgtgcagaaaacggccctggcccaggcgcagagcgacctcaagcgtcgtgttcctctcggcaccgccaacctgattggccgtgaagagttgcagcacgcccgcgatgctgtggcgagcgcacaggcgcagctggacgtggcgatccaacagtacaacgccaaccaggcgatggtgctgggcacctctctggaaaaccagccggcggtgaaacaggcggcgaccgaagtgcgtaacgcatggcttgccctgcaacgtaccaaaatcgtcagcccgatgaccggttacgtttcccgtcgttccgtgcagccgggtgcgcaaattagcaccaccacgccgctgatggcggtcgttccggcgaacaacctgtgggtggacgcgaacttcaaagagacccagctggcgcatatgcgtatcggccagaccgcaaccgtggtcagcgatatctacggcgatgacgtgaagtacaccggtaaagtagtcggtctggacatggggaccggcagcgccttcagcctgctgcctgcacagaacgccaccggcaactggatcaaagtggtacagcgcttgcctgtacgtatcgagctggatcctaagcagctggcagaccatccgctgcgaattggcctttccacgctggtgacggtcgataccgccaaccgcgacggtcagatcctcgcaagccaggtgcgcagcacgccagcttatgaaagtaacgcccgtgaaattagcctcgatccggtcaataagctgatcgatgacatcgtgaaggcaaacgccggttaa

SEQ ID NO: 524238 - DNA, 1548 bp, Stenotrophomonas maltophilia
atgcaacagcaaaagccgcaaaaaccgcttgagggggcgcagctggtcattatgaccattgcgctgtcgctggcgacattcatgcaggtgctggactccaccatcgcaaacgtggcgatccctacgatcgccgggaaccttggctcatcgctgagccaggggacctgggtcattacctcattcggggtggcgaacgccatctctattcccatcaccggctggctggcgaagcgcgtcggtgaagtgaagctgttcctctggtcgacgatcctgttcgtactggcctcctgggcctgcggcatgtccagcagcctgacgatgctgattttcttccgcgtcattcaggggattgtcgccgggccgttgattccgctatcgcagagtttgctgctgaacaactatccgcccgccaagcgctccatcgcgctcgcgctgtggtcgatgacggtgattgtcgccccaatttgcgggccaatcctcggcggctatatcagcgataactatcactggggctggatcttcttcatcaacgtacccatcggtgcgctggtggtgctgatgacgctacagtctctgcgtggtcgcgaaacgcggaccgaacagcggcggatcgacggcatcgggctggcactgctggttgtcggcatcggcagcctgcaaatcatgctcgaccgcggcaaagagctggactggttcgcctctacggaaatcatcgtgctgacggtggtcgccgtggttgccatcagcttcctgattgtctgggagctgacggacgaaaatccgatagtcgacctctcgctgtttaaatcgcgaaacttcaccatcggctgcctctgtatcagcctcgcctatatgctctacttcggcgcgattgttctgctgccgcagctgttgcaggaggtgtacggctataccgcaacctgggcggggctggcctccgcgccggtggggttaattccggttctgctgtcgccgattattggccgtttcgcccataagctcgacatgcgcaggctggtgacgttcagcttcatcatgtacgccgtgtgcttctactggcgcgcgtatacgtttgaaccgggaatggactttggcgcctccgcgtggccgcagtttattcagggctttgctgtggcgtgcttctttatgccactgaccaccattacgctttccggcttgccgcctgagcggatggcggcggcatcgagcctgtcgaacttcacccgtacgctggcgggctccatcgggacatcgatcaccaccacgctgtggaccaaccgggaagcgatgcaccatgcccagctgaccgaagcggtgaacccgttcaaccctaacgctcagcagatgtatagccagcttgaggggatggggatgacggagcagcaggcgtccggctggcttgcccagcagatcaccaaccaggggctgattatctcggcaaacgagattttctggatatcggcggggatcttcatcgtcctgctggggctggtgtggtttgccaaaccaccgtttggtgccggtagcgggggcggtggagcgcactag

SEQ ID NO: 524239 - DNA, 330 bp, Stenotrophomonas maltophilia
atgctgaacacacccgcgccacgcgctggctctcgacagacttacgtcgaagtgagcacgccgaacgtctatctcgaccagatcgaatatttctgccactacttcagccgccgcagcgacgtctgtaacagcgtgcatccgcaaaacgatcgcgataccggcgtcgccagcgcggagctggccgtggttgtcgtcatcagtattgtaggcccggtcagcgaagcaccaccgggcatccacaggcacaatactaaatgtgcagttcctgaagtttttcttttggcagggccagctcgtcgttgctgtttacacgaacatcacgttcgatga

SEQ ID NO: 524240 - DNA, 516 bp, Stenotrophomonas maltophilia
atgccgttattagatagctttactgtcgaccatacccgtatggaagcaccagcagtccgcgtggcgaagaccatgaacacgccgcacggcgacacgatcaccgttttcgacctgcgcttctgcgtgccgaataaagaagtgatgccagagaaaggcattcacacgctggaacaccttttcgccggattcatgcgcgaccacctgaacggcaacggcgtggagatcatcgatatctctccgatgggctgccgcaccggtttctacatgagcctgattggtcagcctgaagagaaacgcgtcgcggatgcgtggaaagcggccatggaagacgtgctgaaggtgaaagagcagaaccagatcccagagctgaacgtttaccagtgcggtacttaccagatgcactctctggaagaagctcaggagattgcccgccatatcatcgaacgtgatgttcgtgtaaacagcaacgacgagctggccctgccaaaagaaaaacttcaggaactgcacatttag

SEQ ID NO: 524241 - DNA, 1545 bp, Stenotrophomonas maltophilia
ttgatcccggacgtatcacaggcgctggcctggctggaaaatcaccctcaggcactgaaggggattcagcgtgggcttgagcgcgaaacgctgcgcgtaaatgcggatggtagcttagcgactacgggacacccgaaggcgttaggctcggcgctgacacataaatggatcacaaccgatttcgccgaagcgctgctggagttcattacgccagtagacggtgatattgatcatatgctgacgatcatgcgcgacgtgcatcgcttcaccgcccgcaacctcggcgacgagcgtatgtggccgctcagcatgccgtgctatatcgagcaggggcaggatatcgagctggctcagtacggcacctcgaatatcggacggctgaaaacgctgtatcgcgaaggactgaaaaatcgctacggcgcactgatgcagacgatctctggcgtgcactacaatttctctctgccgatggcgttctggcaggcgaagtgcggtgaaacggataaagaagcgatctccgcgggctacttccgcctgatccgcaactactaccgttttggctgggttattccttatctgttcggcgcgtccccggccatttgttcatcgttcctgcaagggaaaccgaccacgctgccgttcgagaagaccgagtgtggcatgtactatctgccgtacgcgacctcgctgcgcctgagcgaccttggctataccaataagtcgcaaagcaatctcggaattacgtttaacgatctgcacgaatatgtggcaggcttgaagcgggcgataaaaaccccgtcggaagagtacgaaaaaatcggcctcgaaaaagacggcaagcgcctgcaaattaacaccaacgtattgcagattgaaaatgaactgtatgcgccgattcgtccgaagcgcgtgacgcgcagcggtgaaacgccgtcggatgcgctacagcgcggcgggatcgaatacattgaagtgcgctcgctggatatcaacccgttctcaccgattggcgttgacgagcagcaggttcgcttccttgacctgtttatggtctggtgcgtactggcggatgcgccggaaatgagttccgacgaactgctgtgtactcgtaccaactggaatcgcgtaattctggaagggcgcaagccgggtctgacgttaggtattggctgtgaaacggcccagttcccactgtctaaggtagggaaggatctgttccatgacctgaagcgcgtagcccagacgctggatagcgtgtacggcggcgaagcttaccagaaggtctgcgacgaactggttgaaagcttcgataacccggaactgacattctcagcacgtattctgcgttctatgattgaacagggaattggtggcacagggcgttcactctcagcggagtaccgtgagatgctgatgcaggagccgttagagatcctgagcgaagcggattttgtggcagagcgcgatgcgtccgttgtgcgtcagaaagaggtcgaagcggcggatacggagtcgtttgaggcgtttctggcgaagcaggcctga

SEQ ID NO: 524242 - DNA, 429 bp, Stenotrophomonas maltophilia
gtgagtgacgcgctgtcactcgcttcattattcgccagcagttttttaagctccaccctcttaccggggaattcggaagtggtgctggtggcgatgctgttgtccggcgtgagtcagccctggttgctggtcttaatagcaacaatgggtaatagccttggagggctgactaacgttattcttggacgtttctttccgctacgcgaaaaatctcgctggcaggaaaaggcagtgggctggctaaaacgctatggcgctgccacgctgttattaagctggatgcctgtaataggcgatttactgtgtctgctggcgggatggatgcgcatctcctggggaccggtgctcttttttttgtgccttggcaaggcgttacgctatgttttactggcatgggtaacactacagggtatgacgtggtggcactaa

SEQ ID NO: 524243 - DNA, 567 bp, Stenotrophomonas maltophilia
atgtacgcacagtatgacggtttgatcttcgacatggacggcaccctcctggataccgaacccacgcatcgtcaggcctggaccgaagtcctgggccgttacggtatgcgcttcgatttacaggcgatgattgccctcaacggatcgcccacctggcgtatcgcacaggccgtgattgagctgaatcaggccgatctcgacccgcaccagctcgcgcgtgaaaaaaccgacgcggtaaaagccatactgttagacaccgtgcagcctttaccactcattgacgttgtcaaggagtggcacggccttcgtcctatgtctgtcggtacgggcagcgagagcgcgattgctgaagcgctactcaaacaccttggcctgcgccactatttttctgccgtcgttgccgccgatcatgttaaacatcacaaacccgcaccggataccttcctgcgctgtgcagaattaatgggtgtaccacctgcaaaatgcgtggtgtttgaagatgctgattttggcattcaggccgcgcgtgatgccggaatggcggcggtggatgttcgcttactgtga

SEQ ID NO: 524244 - DNA, 186 bp, Stenotrophomonas maltophilia; identical to SEQ ID NO: 116437

SEQ ID NO: 524245 - DNA, 2628 bp, Stenotrophomonas maltophilia
atgagcaagagcaccgctgagatccgtcaggcgtttctcgattttttccatagtaagggacaccaggttgttgccagcagctccctggtaccgaacaatgacccgactctgctgtttaccaacgccgggatgaaccagttcaaggatgtgttccttggtctcgacaagcgtaattattcccgcgccacaacctcacagcgttgcgtgcgtgcgggcggtaaacacaacgatctggaaaacgtcggttacaccgcgcgccaccacactttcttcgaaatgctgggtaacttcagcttcggcgactacttcaaacacgacgccattcaatatgcgtgggaactgctgaccggtgaaaactggtttaatctgccgaaagagcgtctgtgggtgaccgtgtatgagaccgatgacgaagcgttcgacatctgggaaaaagaagtgggtatccctcgcgaacgtatcatccgtatcggtgacaacaaaggcgcgccttacgcgtctgataacttctggcagatgggtgacaccggcccttgcggtccgtgcaccgagatcttctacgatcatggtgaccacatctggggcggccctccgggaagcgcggaagaagatggcgatcgctacattgagatctggaacatcgtcttcatgcagttcaaccgtcaggccgacggcaccatggagccgctgccaaaaccgtccgtagataccggtatgggtcttgagcgtatcgcggccgttctgcaacacgttaactccaactatgagattgacctgttcagcaccctgatcaaagccgttgccgaagtgacgggcgcaaccgatctgaacaacaaatcactgcgcgttatcgcagaccatattcgttcttgtgcgttcctgattgctgacggcgttatcccgtcgaatgaaaaccgtggctatgtgctgcgtcgtatcattcgtcgtgcgatccgtcatggcaacatgctgggcgcgaaggacaccttcttctataaactcgttgggccactgattggcgtgatgggctctgccggtgacgagctgaaacgccagcaggcgcaagttgaacaggttctgaaaaccgaagaagagcagtttgcccgtacgctggagcgcggactggcgctgctggacgacgagctggcgaaactcaagggcgacacgctggatggcgaaaccgctttccgcctgtacgacacctacggcttcccggttgacctgacggcggacgtttgccgcgagcgcaacatcaaagttgacgaagcaggctttgaagccgcaatggaagagcagcgtcgtcgtgcgcgtgaatccagcggttttggcgcggactacaacgcgatgatccgcgttgatagcgcgtctgaatttaaaggctacgaagagctggctctgaccagcaacgtgaccgcgctgtttgttgacggtaaagccgtagacagcattagcgcaggtcaggaagcggttgttatcctggataaaacaccgttctatgcggaatccggcggccaggttggcgataaaggcgaactgaaaggcaatggcttcagcttcagcgtaagcgatacccagaaatacggtcaggcaattggtcaccagggcaaactggtttccggttctctgaaagtgggcgagggcgttcaggccaacgttgacgaagctcgccgcgcgcgcattcgtctgaaccactcggcaacccacctgatgcacgcagccctgcgcgaagtgctgggtacgcacgttgcacagaaaggttctctggttaacgacaaagtgctgcgtttcgacttctcgcattttgaagcgatgaagccgtctgaaattcgtgcggtggaagacctggtgaatgcccagatccgccgtaacctgccaatcgaaacccacatcatggatcttgaggcagcgaagaagaaaggtgcgatggcgctgtttggcgagaaatatgacgaccgcgttcgcgtgctgagcatgggcgacttctctaccgaactgtgtggcggtactcacgcatcccgcaccggtgacatcggcttgttccgcatcgtttccgagtcgggtacggcggcaggcgtgcgtcgtattgaggcggtgaccggggaaggtgcaattgccagcctgcatgcgcagagcgaccagctgcacgagatcgcgcagctgctgaaaggcgatagccagaacctgggcgagaaagtgcgtgtcgcgctggatcgtacccgtcagctggaaaaagaactccagcagctgaaagaacaggctgcggcgcaggagagcgcaaacctctccagcaaagcggtagacattaagggcgtcaaactgctggtcagcgacctggcgggcgttgagcctaagatgctgcgtaccatggtcgacgatctgaagaaccagcttggttcgacggttatcgtgctggcaacggtcgcagagggtaaggtttctctgattgcgggcgtctctaaggatgtgacggatcgtgtcaaagcaggggaactgattggcatggtcgcccagcaggtgggtggcaaaggtggcggtcgtccggacatggcgcaagccggtggtacggatgcggcggcacttcccgcggcattagccagcgttgaaagctgggtaagcgcgaaactgtaa

SEQ ID NO: 524246 - DNA, 501 bp, Stenotrophomonas maltophilia
atgagtgaaccgacatcacgccgaccagcctactcacgcttgctggatcgggccgtgcgtattcttgccgtgcgtgaccatagcgaacaggagctgcggcggaaactgtcagcgcccgtcatgagcaaaaacggtccggaagacattgatgccaccgcggaagattatgaccgcgtggttgcctggtgctacgagcatcactatctggatgacggccgttttgccgctcgctttcttgccagccgtggtcgtaaaggctatgggccagcgcgtatccgccaggagctgaaccagaaaggtgtagcccgtgaatcgattgaaaaagccatgcgcgaaagtgaaatcgactggtgcgaactggcgcgtgagcaggcggtacgaaagtacggtgagccgctgccgcgtgaattttcagaaaaagttaaaatccagcgctttttgctctaccgcggcttcctgatggaagatattcaggatatctggcgtaattttaccgattga

SEQ ID NO: 524247 - DNA, 1059 bp, Stenotrophomonas maltophilia
atggctatcgacgaaaacaaacagaaagcgttggcggcagcactgggccagatcgaaaagcaattcggtaaaggctccatcatgcgcctgggtgaagaccgttccatggacgtggaaactatctccactggttcgctttctcttgatatcgcactgggcgctggcggtttgccgatgggccgtatcgtagaaatctacggtccggaatcctcgggtaaaaccaccctgacgttgcaggttgttgcggcggcacagcgcgaaggtaaaacctgtgcgtttatcgatgccgagcacgcgctggacccggtctatgcccgtaaactgggcgttgatatcgacaacctgctgtgctcacagccggacaccggcgagcaggccctggaaatttgtgacgcgctggcgcgctcaggtgcggttgacgtgatcatcgtcgactccgttgcggcgctgacgccaaaagcggaaattgaaggtgaaatcggtgactctcacatgggcctcgcggcacgtatgatgagccaggcgatgcgtaagctggcgggtaacctgaagcagtccaatacgctgctgatctttatcaaccagatccgtatgaaaattggtgtaatgttcggtaacccggaaaccaccaccggcggtaacgctctgaaattctacgcttctgtccgtctggatatccgccgtatcggcgcggtgaaagagggggataacgtcgtcggtagcgaaacccgcgtgaaggttgtgaagaacaaaatcgcagcaccgttcaaacaggctgaattccagatcctctacggcgaaggtatcaacttcctcggcgagctggttgacctgggcgtgaaagagaagctgattgaaaaagcgggcgcatggtacagctacaacggtgacaagattggtcagggtaaagcgaatgctatctcctggctgaaagagaacccggcggcggcgaaagagattgagaagaaggtgcgtgaactcctgctgagcaaccaggactctaaacctgatttcgtggtcgacggcgcggatgctgaagaaaccaacgaagacttttaa

SEQ ID NO: 524248 - DNA, 498 bp, Stenotrophomonas maltophilia
atgactgaccatgaattgatgcagctaagcgaagtggtggggctggcgctgaaacagcgcggcgcgactctcacgaccgcagaatcctgcaccggcggctgggtggcgaaagcaattaccgatattgctggcagttccgcctggtttgaacgcggctttgtgacctacagtaacgaggctaaagcgcagatgattggcgtgcgtgaagccacgcttgagcagcatggcgcggtcagcgagccggtggtgatcgaaatggcgattggcgcgctgaaagaggcgcgcgcagattacgctatctccatcagcggtatcgcggggccggacggcggcagcgacgtgaagcctgtcggcaccgtctggtttggctttgccacctcaaaaggtgaagggatcacccgccgggaatgcttcagcggcgatcgcgaaagcgtgcgtcgtcaggcaacggaatacgcgttaaaaacgctctggcaacaatttctacaaaatacttga

SEQ ID NO: 524249 - DNA, 879 bp, Stenotrophomonas maltophilia
atgaaacgtacagggttagccgtggcgctcgcgctcggcatgatgacgcacggcgtaatggcgaaaacgcttaatgtggtgaccagcttttccatcctgggagacatcacgcagcaggttggcggcgatcgtgtgaaggtgaagacgctggtggggccggacggtgatccccatactttcgaaccctcgcccaaagacagcgcggcgctgagtaaagccgacgtggtggtggtcaatgggctggggctggaaggctggctcgatcgtctggtgaaagcctccggattcaaaggccagctggtggttgcttcggacggcgtgaaaacgcacacgctggaagaggacggtaaaaccgtgaccgatccgcacgcgtggaacagcgcggcgaacggcgcgctgtatgcgcaaaatattctctcagggctggtgaaggccgatcctgaagatacggcggcgcttgaagctaccggtaaaccctatattgcgcatctctctcagctggacggttgggctaaaaagcgtttcagcgacatcccacaggcgaagcgcaaagtgctgaccagccacgacgctttcggctatttcagccgcgcctacggcgtgacgtttatggcgcctcaggggctgtcgtctgagagtgaagccagcgcggcgcaggtagcggagatcatcaatcagattaaagctgacggtgtgaaaacctggtttatggaaaaccagcttgatccgcgcctggtgaagcagattgcgaccgccacgggcgcccagccgggcggtgaactttacccggaagcgctgtccgcgaagggcggcgtggcggacacctacgtcaaggcgtttcgccacaatgtggataccctcgctaacagcatgaaataa

SEQ ID NO: 524250 - DNA, 861 bp, Stenotrophomonas maltophilia
atgatctggcatacattcttccagccgtttattgagtacggctttatgcgccgtgcactggtggtttgcctggcgctctccgtcagcaccacggcgctgggggtattccttcagctgcgtcggatgagcctgatgggggacgccctttctcatgccattttgccgggtgtcgcggtgggctatctgctcagcggtatgtcgcttctggcaatgactgtcggcgggtttattgccggtatcgccgttgcgctggtggccgggctggtcagccgccgcacgccccttaaagaggatgccagcttcgcggggttttacctgggttccctggcgctgggcgtcacgctggtgtcgctgcgcggttcaaatgtcgatctgcttcatcttctgtttggctccattctcgccgtggatagcgcgtcagccctgttcgtgacgggcgtttgcatgttcacgctcctcacgctggcaatgttttatcgtgggctggtcagcgaagcgttcgataccgcgtggttgcaggtgaacgcgcgctggctgcccgggatgttacacggtctgtttctggcgctgctggtgctcaacctggtggccggttttcaggtgctcggcacgttgatggccgtcgggctgatgatgttacccgccgtggcggcacgctgctgggtgcgcaccctgcctgggttacttctaatggcgggtatcagcggtattttttgcgcctggctgggcttaagcctttcctgggcagtgagtctgcccgccgggccctccattgtgctgaccgccagcgcattgttctttatttccgttttatttggcacgcgcagcaggctggcggatagcctgcgggcgcttttttaa

SEQ ID NO: 524251 - DNA, 333 bp, Stenotrophomonas maltophilia
atgcgcattgccggcgcgcttgagcgcgtggggctggcgtccatggcgttatccaccatcgatgaactctccggcgggcaattccagcgcatgctgtttgcccgcgttttagtgcagcaggcaccgctggtgatgctggacgaacccttcaccggcgttgatgaagcgacctgcaacgtgctgatggatctgatgctggagatgtatatgcaggggcagaccctgctggcggtactacatgacagcgagcgcgtagcacgtcacttcccgcagacgttacgtctggacgctgatagtccccaatggaaaaccgagcgggtgagggtggcatga

SEQ ID NO: 524252 - DNA, 210 bp, Stenotrophomonas maltophilia; identical to SEQ ID NO: 491571

SEQ ID NO: 524253 - DNA, 1215 bp, Stenotrophomonas maltophilia
atgtcccctatcgaaaaatccagcaagctcgacaacgtctgttacgacatccgtggcccggtactcaaagaggcaaaacgccttgaagaggaaggcaataaggttctgaaactcaacatcggcaaccccgcgccatttggttttgaagcgccggatgagatcctggtggatgtgatccgtaacctgcccactgcacaaggctactgcgattcaaaagggctctactccgcccgtaaagccattatgcagcactaccaggctcgcggtatgcgcgacgtcaccgttgaagatatctacattggcaacggtgtctcggagctgatcgttcaggcgatgcaggcgctcctgaacagcggcgatgaaatgctggttcccgctccagactatccgctgtggacggctgcggtatcgctctccagcggtaaagcggtgcactatctttgcgatgaatcgtcggactggttcccggatctggatgacattcgcgccaaaataacaccgcgcacccggggaatcgtgatcattaacccgaataacccgacgggcgcggtctattcaaaagagctgctgatggagatcgtcgagatcgcccgcctgcacaacctgatcatctttgccgacgagatttacgacaagatcctgtacgacgcggcgcagcaccactctatcgccgcgctggcgcccgatctgctgacggtcacctttaacggactgtctaaaacttaccgcgttgccggtttccgtcagggctggatggtactgaacggtccgaaaaaacatgcgaaaggctacattgaagggctggagatgctggcatccatgcgtctgtgcgccaacgtaccggcgcaacatgcgatccagacagcactcgggggctatcaaagcatcagcgagtttatcgttccaggcggccgcctctatgaacagcgcaaccgtgcatgggaattaattaatgatattccgggcgtctcctgcgtgaagcctaacggcgcgctgtatatgttcccgaaaatcgacgcgaagcgcttcagtattcacgacgaccagaaaatggtgctcgacttcctgttgcaggaaaaagtgctgctggttcaggggacggcgtttaactggccgtggccggatcacgtgcgtattgtaaccctgccgcgcgaagacgatctcgaaatggccatcagccgcttcgggcgattcctctcggggtaccatcagtaa

SEQ ID NO: 524254 - DNA, 600 bp, Stenotrophomonas maltophilia
atgagtcagagtcatttctttgcccacctctcccgcctgaaactcatcaaccgctggccgctgatgcgcaacgtgcgcactgaaaatgtgtctgagcacagtttgcaggttgccatggtcgctcatgcgctggccgcgattaaaaaccgcaaattcaacgggcaggttaatgccgaacgtatcgccctgctggcgttgtaccacgatgcatcggaagtgctgaccggggatctgcctacgccggtgaaatatttcaactcgcagattgcccaggaatataaggccattgagaagattgcccagcagaagctgatcgacatggtgcctgatgagctgcgtgatatcttcgggccgctgatcgacgagcatcagtatacggaagaggagaaatccctggttaagcaggccgatgcgctgtgcgcctacctgaaatgtctggaagagttatccgcggggaataacgagttcctgctggcgaaaacgcgcctggagaaaacgctcgactcccgccgtagcgaagagatggattactttatgcaggtgtttgtgccgagcttccatttgtcgctggatgagatcagtcaggattcaccgctgtag

SEQ ID NO: 524255 - DNA, 1833 bp, Stenotrophomonas maltophilia
gtgaacggtgaactgatttgggtcctgagcctgctgttaatcgccatcattctttttgctacgggcaaggtgcgcatggatgccgtcgccctgtttgtgattgtcgcgttcgttctgagcggtaccctttccctgccggaagccttttccgggtttagcgatcccaacgttattttgattgccgccctgtttattattggcgacgggctggtacgcaccggcgtggcgacaatgatggggtcgtggctggttaaagtggcgggcagcagcgaaaccaaaatgctgatttacctgatgctgacggtcgccggactgggtgcgtttatgagctcgacgggggtcgtggccatctttattccggttgtgctgagcgtctgcatgaggatgcagatctccccgtcgcggctgatgatgccgttgagctttgccgggctcatcagcggcatgatgacgctggtcgcgacgccgccgaacctcgtcgtaaacagcgaactgatccgtgaggggcttgaggggtttagctttttcagcgtcacgccgatcgggctggttgtactggtgatgggcattatctatatgctgttgacccgtttcgcgctgaaaggggagaagcaggacaaagccaaagagggctggaagcggcgaacttttcgcgatttgatcaaagagtaccgtctgaccgggcgcgcccgtcggctggctatccgccccggttcgccgatgataggccagcggctggacgaccttaagctacgcgaacgctatggcgcgaacgtcatcggggttgagcgctggcgtcgttttcgtcgggtaatcgttaacgtgaatggggtgtcagagtttcgcgcgcgtgacgtcctgctgattgatatgtccaccgcggacgtggatctgcgagagttttgtagcgagcaactgctggagccgatggtgctgcgcggcgagtatttctccgaccgggcgctggatgtgggaatggccgaggtgtcgctgatcccggaatcggagttattgggcaaaaccgtgcgcgaaatcggctttcgtacccgctatggcctcaacgtagtgggcctgaagcgcgatggcgtagcccttgaaggggcggtggtggatgagccgatcctgctgggggatatcttcctcgtggtcggcaactggaaactgattagccagctcgggcagaaaggccgcgattttgtggtgctgaatatgccgattgaagagagcgacgcgtcaccggcgcacagtcaggcgccccatgcgattttttgcctggtgttgatggtcgcgttgatgctgacggacgagatccctaacccggtggcggcgataatcgcctgtctgttaatgggcaaattccgctgtatcgacgccgaaagcgcttacaaagcgattcactggccaagcatcattctcatcgttgggatgatgcccttcgccctggcgctacagaaaaccggcggggtggatttgatcgtaaaaggcttaatggacgcgggcgggggatatggtccgtacctgatgatggtttgcctgttcgtcatgtgcgccaccattggtttgttcatctccaataccgcaacggcggtgctgatggcgcctattgcgctggcgatggcaaaatcgatgggcgtttcgccctatccgtttgcgatggtggtagcgatggcggcgtccgcggcatttatgacgccggtatcttccccggtcaataccctggtgctggggccgggaaactatcgattcagcgattttgtaaagctgggcgtgccgttcaccgtgctggtgatgctagtatgcgtggtgctgattccggtgttattcccgttctga

SEQ ID NO: 524256 - DNA, 660 bp, Stenotrophomonas maltophilia
gtgcagtgtaaaggttttctgtttgatctggacggtacgctggtggattcgctgccggtagtggagcgttcctggtgtcattgggccgacaggcacggcattgaccatcaggatgtactgaatttcatccatggcaaacaggccattacctcattgcggcacttcctggcgggacgtcctgaggaagagattcaggcggagttcaaatatctggagcagattgaagctaccgacactgagggcatcaccgcgctgcccggtgcgcgcgaactgcttgagcatctgaatgaagcgcagatcccgtgggctatcgtcacctccggctcggttcctgtcgcgcatgcccgccataaggcggccggtttaccgacgccggacgtcttcattaccgctgagcgcgtaaagcgcggcaagcccgaaccggatgcgtttctgctcggcgctgaactgctcggccttgcgccagcggagtgcgtggtggtggaagacgcggcggcaggtgtgctggccggactgaacgccggaagccacgtcattgccgttaacgtcccggcggggtccccccggctggaggaggcggattttgtgcttaatactctgaccgccatcgacgtctcgaaggcatcagacggcgttgtaaccgtctcgctaaaaatgtaa

SEQ ID NO: 524257 - DNA, 495 bp, Stenotrophomonas maltophilia
atggaaatgacccatgctcaacgtctgattttgtctaaccagtacaagatgatgactatgcttgatcccgataacgctgcgcgctacagccgcctgcaaaccattgttgaacgtggttttggcttgcagatgcgcgaactggatcgcgaatttggcgaactgaaagaggaaacctgccgtatcgttatcgacatcatggagatgtaccatgcgctgcatgtgtcctggaccaatctgaaagaccagcagtctattgatgagcgccgcgtgacgttcctgggctttgatgccgcgacggaggcgcgctatctgagctatgtgcgctttatggtgaacaccgaagggcgctacacccattttgatgcgggtacgcacggcttcaacgcccagaccccgatgtgggataagtatcaacgtatgctgagcgcgtggcacgcctgtccgcgtcagtaccatttaagcagcaacgaaattcaacaaatcattaatgcctga

SEQ ID NO: 524258 - DNA, 456 bp, Stenotrophomonas maltophilia
atgtcaacacctgaaatcccgtccgtgaacttttttagtctgtttcgtcggggacagcattacgcaaagacatggccgatggaaaagcgcctcgcgcccatgtttattgaaaatcgcactattcgcgccacgcgctatgcgattcgctttatgcccccgatcgctgtctttactctttgctggcaaattgcgctgggtggacagcttggacctgccgtcgcgacggcgctctttgcgttaagcctgccgatgcagggattgtggtggttaggtaaacgttccgtcacgccacttccgccttctattttacactggttttatgaagtgcgtggaaaactggaggaggccggccaggcgctcgccccggttgaaggcaagccggattatcaggcgctggcggacaccctcaagcgcgcgtttaaacagcttgataaaacattcctcgatgacttgtga

SEQ ID NO: 524259 - DNA, 1203 bp, Stenotrophomonas maltophilia
atgtcgagtaagttagtactggttctgaactgcggtagctcttcactgaaattcgccatcatcgatgcgctcaacggtgatgagtacctctctggtttggccgaatgtttccatctgcctgaagcacgtatcaagtggaagatggacggcagcaaacaagaagcggctttaggtgcaggcgccgctcacagtgaagcgctgaactttatcgttaacactattctggcacaaaaaccagaactgtctgctcagctgactgcgattggtcaccgtatcgtccacggcggcgaaaaatacaccagctccgtggtaatcgacgactctgtgattcagggcatcaaagactctgcgtctttcgcaccgctgcataacccggctcacctgatcggtatcgctgaagcactgaaatccttcccgaatctgaaagataaaaacgtggccgtgtttgacaccgcgttccatcagaccatgccggaagagtcttacctctatgccctgccatacagcctgtacaaagagcacggcgtacgtcgctacggcgcacacggcaccagccacttctatgtgactcaggaagccgcaaaagtactgaacaagccggttgaagaagtcaacatcatcacctgccacctgggcaacggtggttctgtttctgctatccgcaacggtaagtgtgttgatacctctatgggtctgaccccgctggaaggtctggtgatgggtacccgttccggtgatatcgacccggcgatcatcttccacctgcacgacaccctgggcatgagcgttgacgacatcaacaaaatgctgaccaaagagtctggcctgctgggtctgaccgaagtcaccagcgactgccgttacgttgaagacaactacgcagaaaaagctgacgctaaacgtgcaatggacgtttactgccaccgtctggcgaagtacatcggttcttacaccgcgctgatggacggtcgtctggacgcggttatcttcaccggcggcatcggtgagaacgcggcaatggtacgtgagctgtccctgggcaaactgggcgttctgggcttcgaagtcgatcacgagcgtaacctggctgcccgcttcggcaagtctggcttcatcaacaaagaaggcacccgcccggctatcgttatcccaactaacgaagagctggtcatcgcgcaagacgcgtgccgcctgactgcctga

SEQ ID NO: 524260 - DNA, 2142 bp, Stenotrophomonas maltophilia
gtgtcccgtactattatgctgatccctaccggaaccagcgtcggcctgaccagcgtcagcctcggcgtgatccgcgctatggaacgcaaaggcgttcgtctgagcgtctttaagcctatcgcccagccacgtgccggtggcgatgcgccagaccagaccacctccatcgttcgtaagaactccaatctgccagcggctgaaccgctgaagatgagccacgttgaatctctgctctccagcaaccagaaagacgtgctgatggaagagatcatcgccaactaccacgcaaacgcgcaggacgctgaagtggtgctggttgaaggcctggtcccgacccgtaaacaccagtttgcccagtctctgaactttgaaatcgcgaaaaccctgaacgcagagattgttttcgtgatgtctcagggcacggacaccccagagcagctgaaagagcgtatcgaactgacgcgcagcagcttcggcggtgcaaaaaacaccagcatcaccggcgtgattgttaacaagctgaacgcgccagtagatgagcagggccgtacgcgtcctgacctgtccgaaatcttcgacgactcttccaaagcgaaagtcatcaaagttgacccggccaagctgcaggattccagcccactgccggtgctgggtgcggtgccatggagcttcgatctgattgccacccgtgcaatcgatatggcgcgtcacctgaatgccaccatcgttaacgaaggcgatatcaacacccgccgcgtgaagtccgtgaccttctgcgcgcgcagcattccgcacatgctggaacacttccgcgcaggttccctgctggtgacctctgctgaccgtccagacgtgctggttgcagcgtgcctggctgcgatgaacggcgtggaaatcggtgcgatcctgctgaccggtgcctacgagatggacccgcgcgtcagcaagctgtgcgaacgtgcgttcgccactggcctgcctgtcttcatggtgaacaccaacacctggcagacctccctgagcctgcaaagcttcaacctcgaagtgccggttgatgaccacgagcgtatcgagaaagttcaggaatacgttgcgggctacatcaacgcagactggatcgaatccctgacggcgacgtccgagcgcagccgtcgtctgtctcctccagccttccgttaccagctgaccgagctggcgcgtaaagcgggcaaacgcgtggttctgccagaaggtgacgaaccacgtaccgttaaagcggcggccatctgtgcagagcgcggtatcgcgacctgtgtgctgctgggtaacccggatgagatcaaccgcgttgcggcgtctcagggcgttgagctgggcgctggcattgagatcgttgacccggaagtggttcgcgaaagctacgttgcccgcctggttgagctgcgtaagaacaagggcatgaccgaagccgttgcgcgcgagcagctggaagacaacgtcgtgctgggtacgctgatgctggagcaggacgaagttgacggcctggtttccggtgcggttcacaccaccgcgaacaccatccgcccaccgttgcagctgatcaaaaccgcaccgggcagctctctggtctcctccgtgttcttcatgctgctgcctgaacaggtttacgtttatggcgactgcgcgatcaacccggacccaaccgcagagcagctggcagaaatcgctatccagtctgcggactccgcgactgccttcggtatcgaaccgcgcgtcgcgatgctctcctactccaccggtacttctggtgcaggcagcgacgtagagaaagtccgtgaagcaacccgcattgcgcaggaaaaacgtccggatctgatgatcgacggcccgctccagtacgatgccgcggtaatggctgacgttgcgaaatctaaagcgcctaactcgccggttgcaggtcgcgctaccgtgttcatcttcccggatctgaacaccggtaacaccacctataaagcggtacagcgttcagcagacctgatctccatcgggccaatgctgcaaggtatgcgcaagcctgtgaacgacctgtctcgtggtgcgctggttgacgatatcgtctacaccatcgcgctgacggcgattcagtcttcgcagcagcagtaa

SEQ ID NO: 524261 - DNA, 954 bp, Stenotrophomonas maltophilia
atgattaaggttgcaccgacaggacagaaagattcggttgagatgcgtaaggtctatgcgggttttgtggcaaaacagattgaggccgggagcgagattattgcgctcgaagcggatctgatgagttcgatggcgatggacggcgtagcgcgtgattatccacagcacgtcatcaactgcggcattatggaggccaacgtgattgggacggccgccgggctgtcgctcaccggacgtaagccgttcgtccatacctttaccgcctttgccagccgtcgctgcttcgaccagctgtttatgtccctggactaccagcgcaataacgtgaaggtgattgcctcggatgcgggcgtgacggcctgccacaacggcgggacgcatatgtcgtttgaggatatgggcatcgtgcgcggtctggcgcattcagtggtgctggaggtgaccgatgcggtgatgttcgaagatgtgctgcgtcagcttatcgacctggaaggcttctactgggtgcggaccatccgtaaacaggcgccgagcgtctatgccccggggtcaaccttcaccatcggcaagggcaacgtgctgcgcgagggaaccgatattaccctgattgctaacggcattatggtggcggaagcgctggaggcggcgcgccagctggagcaggagggggtaagcgcagcggtcatcgacatgtttaccctgaagcccatcgatcggatgctggtgaaaaattatgccgagaaaaccaggcgtattgtgacctgcgaaaaccacagcattcacaacgggctggggtcggcggtggcggaagtgctggtggaaacctgtccggtgccgatgcggcgggttggggtgaaggagcgttacggtcaggtaggcacgcaggacttcctgcagaaggagtatggcctgacggcacatgacattgtgtcggcggcacgagagttgctgtaa

SEQ ID NO: 524262 - DNA, 831 bp, Stenotrophomonas maltophilia
atgaatgagaatgaaataaccgaactggcgcgtcagatccgccttgagacgctgaaatccctgacgcagctgggttttggtcactacggcggcagcatgtcagtcgttgaaacactggcagttctgtacggcgcggtaatgaaaattgacccggccgatccggactggccagagcgcgattactttgtgctgtcgaagggccatgcgggcccggcgctgtacagcacgctggcgattaagggctacttcccgattgaagagctgagcacgctaaaccagaacggaacgcgtctgccaagccacccggatcgcctgaaaacacgcggcgtggatgccaccaccggatcgctggggcaggggatctccattgcaggcggcatggcgctgtcgcacaagctggcagaaaggccaaaccgggtgttttgcatcgttggcgacggggagctgaacgaagggcagtgctgggaagccttccagtttattgctcaccatcgactgaacaatctgacggtgttcgtggactggaacaaacaacagctcgacggcgagctggacgaaatcatcagcgccttcgatctggaaggcaaattccgggcctttggttttgacgtggtgacggtgaaaggggacgacattccggcgctgctggaggtgaccgcaccgatccctgcgaccgatgcgcgtccgcgagtggtgatcctcgacagcatcaaagggcagggggtgccatacctggaacagctcagcaactcgcatcacctgcgattaactgaggaaagcaaagcggcgctcaacgagacgattcgccaactggaggattcacatgattaa

SEQ ID NO: 524263 - DNA, 1392 bp, Stenotrophomonas maltophilia
atgtttatccttgaaacgctgaatttcgttgttgatattttaaaagtcccttcagtcctggtcgggttaattgccctgattggtctggtggcgcagaaaaaagccttttcagatgtggtaaaaggcacaattaaaaccattctcggctttattgtactgggcggcggcgcaaccgtgctggtgggctctttaaatccgctcggtggtatgtttgagcacgcctttaatattcagggcattattcccaacaatgaagctattgtgtcaattgccctggaaaaatatggtgcctccaccgcgctcattatggctttcgggatggtggcgaatattattgtcgcgcgctttacccgcctgaagtacatcttcctgaccgggcatcacaccttctacatggcgtgcatgattggcgtgatcctgacggtcgcaggcttcgaaggggtagggctggtcttcaccggttcgttgatcctcggcctgattatggccttcttcccggcgattgcgcagcgctatatgaagcgtattaccggcaacgatgagatcgccttcggtcatttcggcacgctgggctacgtgctgtccggctggattggtagcaaggtcggtaaaggctcgcgctccaccgaagagatgaacctgccgaagaacctcagcttcctgcgcgacagttcgatctccatctcactgaccatgatgattatctacctgattatggcggtgagcgccgggcgtgagtacgtggaggccaccttcagcggcggccagaactacctggtgtacgccatcattatggccatcaccttcgcggcaggcgtgtttatcatcttgcagggcgtgcgcctgattctggcggaaattgtcccggcctttaccggcttctcggaaaaactggtgcccaatgcgcgacctgcgctggactgcccggtggtctacccgtatgcgccaaacgcggtgctgattggcttcctgttcagcttcctcggcgggattgtaggcttgttcatctgcggtcagtttagctgggtgctgatcctgccgggcgtcgtgccgcatttcttcaccggtgcaacggcgggcgtgtttgggaacgccaccggcggacgtcgcggggcgatgattggcgcctttgctaacggcctgctgatcaccttcctgccggtcctgctgctgcctgttctgggcgcgattggctttgcgaatacgaccttctcggacgccgactttggcgccgtcgggattgtgctcggcaacctggcgcgcttcctgtcgccgcttgccatcaccggactggttgttgtgttgtttgcgctgctggtggcctacaacgtcttcgctaaaaacaaacctgccagcggtaacgcgcaggaaaaccccggagccaaatcatga

SEQ ID NO: 524264 - DNA, 273 bp, Stenotrophomonas maltophilia
atgaaaatcatggctatttgcggctccggcctgggcagcagttttatggtcgaaatgaatattaaaaaggtgctcaaaaaactggaaattgaggcagaggttgaacactccgatctctcctcggccacgccaggcgcggcggacctgtttgtaatggcgaaagacattgccgccagcgccagcgtgccggaaagccagctggtggtgatcaacaatattatcgatatcaacgaactcgaagcgcagctgcgcgcctggttcgaaagacaataa

SEQ ID NO: 524265 - DNA, 444 bp, Stenotrophomonas maltophilia
atgctcaaaaagtggatatatgatacaaccatcatcctacaggatagcgttgaaagctggccccaggcgctggaactgtgcgcgaaaccgctgctgaatttgcaggtcattgcgccggaatatgtcacggctatcattgagcagcatcacaggttaggtccctactatgtgctggctccaggactggcaatgccacatgcgcgaccggaagaaggagcgaaaggacttggcctgtcattattaaaactgaaacagggcgtctcttttggtgccggtgagtttgaccccgtcgatgtgattgtgatgctggcggcgccggacaagcatagccatatcgaaatgatctctgccttagcggaattattttccagcgacgaagatatggctgaattacatcgggcgaatacgctggaggagataaaaaccatcatcaatcgcttctga

SEQ ID NO: 524266 - DNA, 1020 bp, Stenotrophomonas maltophilia
atgtctttaacccgaaaacggcgcagtaccggaaaagtaacgctcgcggatgtcgcgcagcttgccggcgtaggcacgatgactgtttcccgtgccctccgcacgcccgaacaggtttccgataaactgcgtgaaaaaattgaagccgcggtgcaggagctgggttacatgcccaatcttgccgccagcgcactggcatcggcatcgtcatggacgattgcgatggttgtacccaatctttccgaagctggctgttccgagatgttcgccgggctacagcaggtgctccagccagccggatatcagatcatgctggcggaatctcagcatcgtcttgaacaggaagaaaaattgcttgaaacgctgctggcttcgaacatcgccgcggcgatactgctcagcgtcgagcactccgataccgtgcgacactggctaaaaaacgcctctatcccggtgatggaaatgggtgcaatgcgtgccgatcctattgatatgaatatcgggattgataacgtcgccgccatgtatgaacttaccgaaatggtgattcagcgcggctaccagaatattggcctgctgtgcgctaaccaggagcagtggatttttcagcaacatttgcagggctggtacaaggcgatgctgcgccaccacctggcgccaaatagagtgattaatgccgccatgccgccgaacttctccaccggtgcggcacaattgccagagttcctgctggcgtggccggagctggatgcgctggtgtgcgtgtcagatgaactggcctgcggcgcgctgtatgagtgccagcgtcggcgcatcaaggtgccggacgatttagcggtcgtgggctttggcgacagcgacgtcagccgcgtctgtcagccgccgctgacgacgatggcagtaccgcatcgcaagattgggattgaagccgggaaagcgttactggaacgtctgaatgacggagactggcgcgaccataaacccatcgcgtccagcctgtgtctgcgggaaagctgttaa

SEQ ID NO: 524267 - DNA, 567 bp, Stenotrophomonas maltophilia
atggtggagcagaatcatttggcaagtactgagtgggttgacattgtcagcgaagagaatgaagtgatcgcgcaggccagccgcgaacaaatgcgtgcggagcgtctgcgtcaccgcgcgacttacatcgttgttcatgacggcatgggcaagattctggtccagcgtcgcactgacaccaaagattttcttcctggtatgctggatgccacagcgggtggcgtcgtgcaggccgatgaagtattgctggattccgcgcgtcgtgaagcggaagaagagttaggtatcgctggcgtgccgtttgccgagcacggacagttttatttcgaagatgagcattgtcgcgtctggggcgggctgtttagctgcgtttcccacggacctttcgccttgcaggaagaggaagtgagcgaagtgtgctggatgacgccggaagagatcaccgcgcgttgcgacgaattcacgccggattcccttaaagcactggcgctgtggatgacccgcaacgccaaaaacgaatccgctaaaccggaaaataaggcggaaaaagaggaagaggctgagtaa

SEQ ID NO: 524268 - DNA, 552 bp, Stenotrophomonas maltophilia
atgaaactgatgtttgcgtcggatattcatggatcgctgcccgcgaccgaacgcgtgttatctctgtttgcccaaagcggggcgcaatggctggtgatcctgggcgatgtgttaaaccacggcccacgcaatgcgttgccggaagggtatgctcccgcgcaggtggcggaaaaacttaatcattttgcctcgcgcattatcgccgttcgcggcaactgcgacagcgaagttgaccagatgctgctgcaatttcccatcaccgctccctggcaacaggtgttgatggaaaacagccgtttgttcctgacccacgggcacctgttcggcccggataacctgccgtcactcgccgctggcgatgtcctggtttatggtcatactcatattccggtggcggaaaaacgcggggcgttttaccactttaaccccgggtctgtcagcattcctaaaggcggtaacccggcaagctacggcatgtatgaagacgggacattaagcgttatcgcacttaatgatcagcaagttattgcgcagatagcgattaatccgtaa

SEQ ID NO: 524269 - DNA, 645 bp, Stenotrophomonas maltophilia
atgagccagcctgtaataacgttgtggtccgatgcgaactttttttctccttatgtcatgagcgtttatgtggcgctggcagaaaaggggctaacttttagtctgaaaaccgttgacctggacagcggcgaacatctgaagcctcagtggcagggctacgcgctcacccgccgtgttcctgtgctggagattgacggttttgagttgagtgaatcctcagcgattgacgagtaccttgaagaccgctttgccccaccagagtgggaacgcatctatcctcacgatctgcaaaagcgcgcccgcgcccgccagatccaggcgtggctgcgtagcgacctggtgccgattcgcacagaacgctccacggacgtggtgttcgctggcgtcaaaaagcccgccctcagcgaggaaggcttatccagcgcccggaagctgattgataccgcgtcatcgctgctgtcacagggtaacccaaacctgtttggcgagtggtgtattgccgacaccgatctggcgctgatgctcaatcgccttatcctcaacggcgatgacgtcccacagctactggtggattacgccacattccagtggcaacgcgcgtcggtacagcgctatttggcactctctgctaagcgcgcgggctga

SEQ ID NO: 524270 - DNA, 630 bp, Stenotrophomonas maltophilia
atgatagatctctattatgcccccacccctaatggccataagatcaccctctttcttgaagaagccgaactggactaccggatcattcgcgtggatatcagcaaaggcgatcagttccgccccgtttttctggccatctcgcccaacaataaaattccggccatcattgataacttgccttcagacggcggaaaaccgctaagcctgtttgaatccggagagatactgctttatctggcggagaaaaccggcaagcttctgagcggggagttgcgcgagcgtcatcacacgctgcaatggttattctggcagtcgagcggcctggggccgatgctggggcagaatcatcactttaccgcctatgcgccgcagacgatcccttacgccattgagcgatatcaggtcgaaacccagcgcctgtacggggtcctgaaccgtcggctggaaaaatcaccgtggctgggaggtgagcattacagcatcgcagatatcgcctgctggccgtggatcaacacccatgaacgccaccggatcgacctggccacttatccggcggttaacaactggtttgagcgcatccggacccgcccggcaaccgaacgcgccatgcaaaaaatccatcagatttga

SEQ ID NO: 524271 - DNA, 369 bp, Stenotrophomonas maltophilia
atgtcccagcatgacgctattattcgtataaaaaacctacgcttacgcacattcattggtatcaaagaggaggagatcgcgaatcgccaggatatcgtggtgaatgtcgtgatccattacccggcagacaaggcgcgcgccagcgaagacatcaatgacgcgctgaactatcgcacgatcaccaaaagcatcatccagtacgttgagaacaaccgttttgcgctactggaaaaattaactcaggatgtgctcgacatcgcacgcgaacaccactgggtcacttatgctgaagtggagatcgataaacttcacgccctgcgctacgccgactccgtctccatgacgttaagctggcagcgccaggcgtaa

SEQ ID NO: 524272 - DNA, 894 bp, Stenotrophomonas maltophilia
atgaagatcctgctcaccggcggtacggggctgattggtcgccatctcattccacgtttgcaggcgttgcatcacgacattaccgtggtcacgcgcagcccggagaaagcgcgccaggtgctgggcaccggcgttgagatctggaaaggcctggcggaacggcaggatctgaacggctttgacgccgtcatcaacctcgcaggcgagcctatcgctgataaacgctggaccgaagagcaaaaacagcgtttatgcagcagccgctggaacatgaccgaaaggctggttgagctgattcgtaacagcgagatgccgccctcggtgctgatttccggctctgcaacaggctactatggcgatcttggtgaagtggtggtgaccgaagaagagccgccgcacaacgagtttacccataaactctgcgcccagtgggagcgtatcgcctgcggggcgcagagcgataacacccgcgtctgcctgctgcgcaccggcgtggtgcttgctccgaaaggcggtattctcggtaaaatgttgccgccgtttaaaatggggcttggcgggcccatcggcaacggtcgtcagtatctggcgtggatccatatcgacgatatggtcaacggtattctctggctgctggataacgacctgcgcgggccgtttaacatggtatctccctaccccgtacgtaatgaacagtttgctcacgccctgggtcatgccctgcatcgcccggcggtactgcgcgtgcctgcgacggcgattcggctgttgatgggcgaatcttcggtgctggtgctgggcggccagcgcgcgctgccaaaacggctggaagcggccggatttacgttccgctggtatgacatggaagaggcgctgggggatgtggtgcagtga

SEQ ID NO: 524273 - DNA, 510 bp, Stenotrophomonas maltophilia
atggcaaccatcaccacaacccggcttcacctcacccctttcgaaccttctgactgggcgttctttcgctctctgcgcgaagaccccaacatcatgcgctatatggccgctatcatgcctgaaaaagagacgcgccgcgtatttgccgcgcgcctgatggcggagcatgtctttgtgatccgtctgcataacgacgttacgccgctcggggatatcggcctgcaaatcagtgcggcgaaccatgaagaggcggatattggctacacggttgtgcctgacgcgcagggaaaaggcattgccagcgaggcgctgcgggcggtgtgtgagtatgcatttaaccagacgggcgtgaaggcgataaacgcgtacgtgctggcggataacgttgggtcggtgcgggttcttgagaaagcaggttttgtgcgcacgcaggtactggagaaggcgtacgagattaacggcgtacggtatgacgactgggtgtatcggctggagtgtggtgcggtctga

SEQ ID NO: 524274 - DNA, 777 bp, Stenotrophomonas maltophilia
atgatggctgagaacaaattaaacgtaattgatttgcacaagcgctacggcgaacatgaagtgctgaaaggggtgtcgctggaggctaacgcgggcgacgtgatcagtattatcggctcatcaggttcgggtaaaagtaccttcctgcgctgcatcaacttcctcgaaaagccgagcgaaggatcgattgtggtgagcggacagaacatcaacatggtccgtgataaagacggtcagcttaaagtggcggataaaaaccagctgcgcctgctgcgtacgcgtctgacaatggtattccagcacttcaatctctggagccacatgacggtgctggagaacgtgatggaagcgccggttcaggtgctcggcttaagcaagcaggaagcccgcgagcgtgcggtcaaatacctggcgaaagtgggtatcgacgagcggcagcagatcaaatatccggtgcacctgtcagggggacagcagcagcgtgtttccatcgcccgcgcgctggcgatggagccggaagtattgctgtttgacgaaccgacttccgcgctggatcctgaactcgttggcgaagtgctgcgcatcatgcagaagctggcggaagagggcaaaacgatggtggtggtgacgcacgagatgggctttgcccgtaacgtttctaaccacgttatcttcctgcatcagggcaagattgaggagcaggggcatccggacgaggtgctggcgaacccgcaaagcccgcgtttgcagcagttcctgaaaggctcgttgaagtag

SEQ ID NO: 524275 - DNA, 714 bp, Stenotrophomonas maltophilia
gtgattgagattattcaggagtactggaaatccctgctgtggacggatggctaccgctttactggcgtggcgatcacgctgtggctgctgatctcctcggtggtcatgggcggcattctggcggtgtttctcgccattggccgcgtgtcgaacaataaatttatccagtttccgatctggctgttcacctacgtgtttcgcggtacgccgctgtacgtgcagctgctggtgttctattccggaatgtacacgctggagatcgtgaaaggcaccgagatgctgaacgcgttcttccgcagcggtctgaactgtacggtgctggcgctgacccttaatacctgcgcctataccaccgaaatcttcgccggggccattcgttccgtgccgcacggtgagattgaggcggcgcgcgcgtatggcttttcctccgtgaagctctaccgctgtattattctgccttcagcgctgcgcattgcgctgccggcgtacagcaacgaagtgattttaatgctgcattcgacggcactggcgtttaccgccacggtacctgatctgttaaagattgcccgcgatattaactctgccacctaccagccgtttacggcgtttggcattgcggcagtgctctatttgatcatttcttacgtcctgatcagcctgttccgtaaggctgaaaaacgctggttgcagcatataaaaccgtcgacgcactga

SEQ ID NO: 524276 - DNA, 687 bp, Stenotrophomonas maltophilia
atgctgtacggattttctggcgttattttacagggcgcgcttgtcacccttgagctggctatcagctccgtggtgctggcggtgctgataggcctggcgggcgcgggggcaaagttatccgccaacagaccgctggcgctgatatttgaaggctataccacgctgattcgcggcgtgcctgacctggtgctgatgctgctgatcttttatggcctgcaaatcgcacttaacggcgtcacggatgccatcggcatggatcagatcgatatcgacccgatggtggccggtattattacccttggttttatctacggtgcttatttcactgagacctttcgcggcgcttacatggccgtgccgaaagggcacattgaagcggcgaccgcctacggttttacctcctcacaaacgtttcgccggatcatgttcccggccatgatgcgctacgcgctgccgggcatcggtaacaactggcaggttattctcaaggcaacggcgctggtctccctgctgggtctggaagatgtagtgaaggccacgcagctggcgggtaaaagcacctgggaaccgttctattttgcggtagtctgcggcgtaatctatctggtctttacgaccgtctccaatggtgtgctgcttctgctcgaacgtcgctactccgtgggtgtgaagagggctgacctgtga

SEQ ID NO: 524277 - DNA, 783 bp, Stenotrophomonas maltophilia
atgaaaaaactggtgttgtcactttctctggtactggccttttgcagcgccaccgcagcattcgcagccattccgcagaaaattcgtattgggactgacccaacctacgcgcctttcgaatcgaaaaatgcgaagggggaactggtcggttttgacatcgatctggctaacgagctgtgcaaacgcattaaagcgcaatgtacctacgttgaaaacccgctggacgcgctaatcccgtccctgaaagcgaaaaaaattgacgtgatcatgtcctccctgtctatcaccgaaaaacgtcagcaggagattgccttcacggacaaactctacgcggctgactcacgtctggtggtggcgaaatcctctgacattcagccaacccttgaatctctgaagggcaaacgcgtgggcgtgttgcagggtacgacgcaggaaacctacggtaacgagcactgggcgccaaaggggattgaaattgtctcttaccagggtcaggaaaacatctacgcagacctgacggcaggccgtattgacgcggcattccaggatgaagtggcggcaagcgaaggcttcctgaaacagcctgtgggtaaagattacaagttcgggggtccgtccattaaggacgaaaaactctttggcgttggtaccggtatgggcctgcggaaagaagacaacgaactgcgtgaagccctgaacaaagcgttcgccgagatgcgcgcggacggcacttacgacaagctggcgaaaaagtacttcgattttaatgtttacggcggctaa

SEQ ID NO: 524278 - DNA, 165 bp, Stenotrophomonas maltophilia
gtgaaagacaaaaaatactttggcgacggcaccggtattggcctgcgtaaggatgataccgagctgaaagccgccttcgacaaagcgtttaatgagctgcgtaaagacggtacctacgacaaactggcgaagaaatactttgatttcaacgtctacggtgattaa

SEQ ID NO: 524279 - DNA, 429 bp, Stenotrophomonas maltophilia
  misc_feature (406)..(415): n is a, c, g, or t
atgaagaagacggttctggctctgtctttgctcgtgggcttgagtgcagcagcaagtagctatgcagcgctaccacagacagttcgtatcggtacagacgcaacctacgcgccattctcctccaaggatgcgaaaggcgatttcgtggggtttgatatcgatctgggaaatgagatgtgcaaacgcatggaagtgaaatgcacatgggtgggcagtgactttgacgcgctgatcccgtcgctgaaagccaagaaaattgatgccattatctcttctctctccatcacggaaaaacgtcagcaggagatcgccttctcagagaagctctacgctgccgactcacgtttgattgccgcgaaaggctcgccaatccagccgaccatcgactcgctgaaaggcaaacatnnnnnnnnnngaaccaggatctga

SEQ ID NO: 524280 - DNA, 570 bp, Stenotrophomonas maltophilia
atgaaacgactcattgtagggatcagcggtgccagcggcgcgatttatggcgtccggctgttacaggtgctgcgtgacgttgctggcgtagaaacccatctggtgatgagccaggcggcgcgtcagaccctctctcttgaaaccgatctctctctgcgcgacgttcaggcgctggctgatgttgtccacgatgcccgcgatatcgccgccagcatctcttctggctcgtttaaaacggccggcatggttattttgccctgttcgattaaaaccctctccggtatcgtaaacagctataccgacacgctggtgacacgtgcggcggacgttgtgctgaaagagcgtcgtcctctggtgctctgcgtgcgggaaacgccgctacacctgggacatctgcgtttaatgacgcaggcagccgaactgggagctgtgataatgccgccggtccccgcgttctatcatcgtccacaaacgctggacgatgtcatcaaccagaccgttaaccgcgtgctggatcagttcgatatagacctgcctaaagatctctttacccgctggcagggggcgtga

SEQ ID NO: 524281 - DNA, 1518 bp, Stenotrophomonas maltophilia
atgtgcggtattgtcggtatcgccggtttcatgccggtaaaccagtcgatttatgacgcgttaacggtgcttcagcaccgtgggcaggatgctgcgggtatcatcaccattgatgcaaacaactgcttccgtttacgcaaggcgaacggcctggtaaacgatgtgtttgaagcccgccatatgcagcgtctgcaaggtaatatggggatcggtcacgttcgttatcctactgctggcagttccagcgcctctgaggctcagcctttttacgttaactccccgtatggcatcacgcttgcccacaatggcaatctgaccaatgcccacgagctgcgtaaaaagctgtttgaagagaaacgtcgccacattaataccacctctgattctgaaatcctgctcaatatctttgccagcgagctggataacttccgccattatccgctggaagcagacaacatttttgccgccgttgccgcgactaaccgcctgatccgtggcgcgtacgcttgcgtagcgatgatcatcggtcacggcatggtggccttccgcgatccaaacggcattcgcccgctggtgctcggcaaacgagacctcggcgatggccgttccgagtacatggttgcctccgaaagcgtggcgctggacactctgggcttcgaattcctgcgtgatgtcgcgccaggcgaagcggtctacatcactgagaagggccagctgtttacccgtcagtgcgccgacaacccggtgagcaacccgtgcctgttcgaatacgtttacttcgcgcgtccggactcgttcatcgacaaaatttccgtttacagcgcgcgcgtcaacatggggacgaagctgggcgagaagattgcccgcgagtgggacgatctcgacatcgacgtcgtgatcccaatccctgaaacctcttgtgatatcgcgctggaaattgcccgtattctggacaagccgtaccgtcagggcttcgtgaaaaaccgctacgttggccgcacctttatcatgccgggccagcagctgcgtcgtaagtccgtacgtcgtaagctaaacgctaaccgtgccgagttccgcgacaagaatgtgctgctggtggacgactccattgtgcgcggcacgacgtctgagcagatcatcgagatggcgcgtgaggccggggcgaagaaagtatatctcgcctccgcagcgccggaaattcgcttcccgaacgtgtatggcattgatatgccaaccgctaatgagctgattgcgcatggccgtgaagtggatgagattcgccagatcatcggggccgacggcctgattttccaggatctgaacgatctgatcgacgcggtgcgcgccgagaacccggatattcagcagttcgaatgctcggtattcaatgggatctacgtgacaaaagacgtagaccagcagtatctcgactaccttgattctctgcgtaacgacgatgcgaaagccgtccagctgcaaaacgatctcgaaagcttagagatgcacaacgaaggttga

SEQ ID NO: 524282 - DNA, 489 bp, Stenotrophomonas maltophilia
atggtctggattgattacgccatcattgcggtgattggtttttcctgtctggttagcctgatccgtggctttgttcgtgaagcgttatcgctggtaacctggggttgtgctttctttgttgccagtcattactacacttacctgtctgtctggttcacgggctttgaagatgaactggtccgaaacggaatcgccatcgcggtgctgtttatcgcgacgctgattgtcggcgctatcgtcaattacgtgataggtcagctggtcgagaaaaccggtctgtcaggaacggacagggtgctcggcatctgtttcggcgcgttgcgaggcgtgctgattgtggccgcgatcctgttcttcctggatacctttaccgggttctccaaaagtgaagactggcaaaaatcgcagctcattccggagttcagcttcatcatcagatggttctttgactatctgcaaagctcgtcgagtttcttgcccagggcataa

SEQ ID NO: 524283 - DNA, 696 bp, Stenotrophomonas maltophilia
gtggcgagtaagtttcagaaccgtttaacaggaaccattgtgctggtcgcgctcggggtgattattctcccgggattgctcgacgggcagaaaaagcattaccaggatgaatttgcggccattccgctggtacccaaaccgggcgatcgcgacgagcccgatatgctgccagcggcaacgcaggcgctgccagcccagccgcctgaaggcgcagcggaagaggtgcgcgcaggtgatgcagccgcgccgtctcttgacccgtcgcgtctggccgcgaataacaatgttgaaatcgatcccgtaccggtagagcaacccaaaccggttgaaaaaccgaaaccggtagagaaaacgcagcctaaaccgcagcgtgacaaagccgacgagcagctggctgcggcaaccgaaacgccgccaccggccaaacagacccagcaggaggctgcccctacgggcaaagcctatgtcgttcagctcggtgcattgaaaaatgcagataaggtcaatgagattgtgagtaaattgcgcggcgcgggataccgtgtttatacttcacccaccacgccggtacagggtaaaattacccgtatcctcgtggggccggatgcgtctaaagataagctcaaaggttcgcttggcgagctgaagcaaatctccggcctgagcggtgtggtgatgaactacagcgcaaactga

SEQ ID NO: 524284 - DNA, 1269 bp, Stenotrophomonas maltophilia
atggaaaataaaagcattcctcaagccacgtcgcccctggccgcgtggctttcttatctggaaaacctgcacagtaaaactatcgacatgggccttgagcgcgtaagccaggttgccgcgcgccttgacgtgctgaaacctgcgcctttcgtgtttaccgtggctggcactaacggtaaaggcaccacctgccgcacgctggaatctgtcctgatggcagccggttataaggtaggcgtttacagctcgccgcatctggtgcgctacaccgagcgcgtgcgggtgcaaaacaccgagctggccgaatcggcccatacggcgtcgtttgccgctatcgaagccgcgcgcggcgatacctcattaacctatttcgaatacggcaccctgtcggcgctgtggctgtttaagcaggcgcaactggacgtggtgatcctggaagtgggtctgggtggacgtctggatgccacaaatatggtagatgcggatgtcgccgtcgtcaccagcatcgcgctggatcacaacgactggctggggcccgaccgcgaaagcattggccgtgagaaggccggtattttccgggccgataagcctgccgtggttggcgaaccggacatgccacataccatcgctgaagtggcgaaagagaagggtgctcgtctgctgcgtcgcggcgtggactggcagtatgaggtgcaggacaacggctggcgcttcagcgatgcgcagggcgtgctggagaatctgccgctgccgcaggtaccacagcctaacgcggcgactgcgctggcagccctgcgcgccagcgggttagcggtgagcgagcaggcaatccgcgatggcattcagaacgcactgctgccgggacgttttcagattgtgagtgagtcaccgcgtctgattctggatgttgcacataacccgcatgcggcggcgtacctcgcaggacgtctcaaatcgttaccaaaaaccgggcgcgtgctggcggttatcggtatgcttcatgataaagatatcggcggcacgctggcctgcatggagagtgtggtcgatagctggtattgtgctcctctggaagggccgcgcggcgcgactgctgagcagttgatggaacatctcggcaaaggcgaaatctacagcagtgtgatttcggcctggcgtgccgcgatggcggaggctaaaccagaagataccgtgctggtgtgtgggtcattccacacggtggcacatgtcatggaagtgatggacgcggggagaaccggtggcgagtaa

SEQ ID NO: 524285 - DNA, 906 bp, Stenotrophomonas maltophilia
atgagctggattgaacgaattaaaagcaacattaccccaacgcgtaaagcgagcattcctgaaggggtatggacgaagtgtgatagctgcggccaggttctgtatcgcgcagagctggaacgcaatcttgaggtgtgtccgaagtgtgaccaccatatgcgtatgtcggcgcgcaaccgcctgcatagcctgctggacgaaggttctctggtagaactgggcagcgaactggagccaaaagatgtgcttaagttccgcgactccaaaaaatacaaagatcgtctggcctctgcacagaaagagaccggcgagaaagacgcgctgatcgtcatgaaaggcaccctgcatgagatgccggtggttgccgccgcgtttgagttcgcctttatgggcggctcaatgggctctgtggttggtgcgcgtttcgtgcgtgccgttgagcaggcgctggaagacaactgcccgctgatctgcttctctgcctccggtggcgcacgaatgcaggaagcgctgatgtccctgatgcagatggcgaaaacctctgccgcgctggcgaaaatgcaggagcgcggtctgccgtacatctcggtactgaccgacccaaccatgggcggcgtttctgcaagcttcgcgatgctgggcgacctgaacatcgctgagccaaaagcgctgatcggctttgccggtcctcgcgttatcgagcagaccgtacgtgagaaactgccgccgggcttccagcgcagtgagttcctcattgagaagggtgctatcgacatgatcgtccgccgcccggagatgcgcctcaaactggcaagcgtcctggcgaagctgatgaatctgccgtcgccgagcccggacgagccgcgcgaaggcgtggtggtaccggatcaggaacccgaggcctga

SEQ ID NO: 524286 - DNA, 660 bp, Stenotrophomonas maltophilia
atggacgtaatacgttttctgattgatttcatcctgcacattgatgttcacctggcggagctggtcgcgcagtacggcgtctggatatacgccattctgttcctcattctgttctgtgaaaccggccttgtggttacgccgttcctgccgggagattcactgctgttcgtggcgggcgcgttatccgcactgccaacgaatgacctgaatgtccatctgatggtcgtcctgatgatcatcgccgcgattattggtgatgcggtcaactacactatcgggcgggtgtttggcgagcggttgttcagtaatccggactcgaagattttccgccgcagttatttagataagacccatgcgttctatgagcgccatggcggtaagaccattatccttgcccgttttgtgcctattgtgcgcacatttgcaccgtttgtggcgggaatgggtcacatgtcctatcgtcattttgccatgtacaacgtggtgggcgcgctgctatgggtactgctgtttacctatgcgggctacctgtttggcgatctgccggtggttcaggaaaaccttaagttactgattgtagcgattattgtgctttccgttctgccgggtgtgatcgaaattattcgtcacaaacgcgcggcggcaaaacaagcgaagtaa

SEQ ID NO: 524287 - DNA, 813 bp, Stenotrophomonas maltophilia
atgtcagatgtggaacaaaagccggtccacagaattgccctcggcattgaatacgatggcagtaaatactatggctggcagcggcagaatgaggtgcgcagcgtccaggagaagctggagaaagcgctctctcaggtggcgaatgaaccgataagcgtcttctgtgcgggccgcaccgatgccggcgttcacggcacggggcaggtggtgcattttgacaccaccgccgtgcgcaaagacgcggcctggacgctgggtgtaaatgcgaatttgcctggtgacattgccgtgcgttgggtgaaagctgtgccggatgattttcacgcgcgtttcagcgcgacggcgcggcgctaccgttatgtcatctacaaccagcgcctgcgcccggcggtgttaagcaagggcgtgacgcatttttatgaaccgctggatgcacaacgtatgcagcgtgcggcgcagtgtctgattggagagaatgattttacgtcgtttcgtgcggtgcagtgtcagtcccgtacgccgtggcgtaacgtcatgcacattaacgtcagtcgttatggcgcgtatgtggtggtggatatcaaagccaatgcctttgtacatcatatggtgcggaatattgtaggcagcctgatggaagtgggcgccggacaccagccggagagctggattgcagaactgctggcagcgaaggacagaacgcttgcggcagcaacggcgaaagcggaaggtctgtatctggtttcggtggattatccggaccggttcgacctgccaaaaccgccaatgggcccgctgtttttagcggactaa

SEQ ID NO: 524288 - DNA, 1014 bp, Stenotrophomonas maltophilia
atgtctgaaggctggaacattgccattttgggtgccactggcgccgtgggcgaagccctgcttgaaacccttgctgagcgtcagttcccggtgggcgacatttacgcgctggcgcgtaccgacagcgcaggagaacatctgcgtttcggcgggaaatccgtgatggtgcaggatgccgccgcgtttgactggacacaggctcagctggcgttttttgccgcaggtgcggaagccacggcatcctacattgaagaagcgaccaattcaggctgtctggtgatcgacctgagcggcctgttctccctggagccggatgtgccgctggtggtgccggacgtcaacccgtttgtgctggctgactaccgcaaccgcaatatcattgcagtaccgaacagcctcaccagccagctgctgaccgcgctgaagccgctgatcgacgacggtggcctgtcgcgtatttccgtgaccagcctgctgtccgcctccgctaacggcaaaaaagccgtagacgcactggcagggcagagcgcgaagctgctgaacggtatcccgatcgacgaagatgatttctttggccgccagctggcgttcaacatgctgccgctgctgccggatcgtgaaggttcggtgcgggaagagcgtcgtatcgtcgatgaagcacgcaaaattctgcaggatgacggtctgatgatctccgcgaacgtcgtgcagtctccggtcttttacggccacgcgcagatggtcgggtttgaagccctgcgtccgctggcggctgaagaagcccgcgacgcgtttggccgcggagaggaccttgtcctgtccgaagagagtgaattcccgacgcaggtgggcgacgctaccggcagcgcgcatctctctgtgggctgcgtgcgtaacgattacggtatgcctgagcaggtgcagttctggtccgttgccgacaacgtgcgttttggcggcgcgctgatggcggtcaaaatcgcggaaaaactggtgcaggagtatctgtactga

SEQ ID NO: 524289 - DNA, 1137 bp, Stenotrophomonas maltophilia
gtgaaaatcctcgttgatgaaaatatgccttacgcccgtgagctgttcagccgcctgggtgaggttaaggctgtccctggtcgcccgattccggtcagcgaactggacgatgcagacgccctgatggtgcgctcggtgaccaaagtaaatgaggcgctgctcaccggcaaaggggttaaatttgtcgggacggcaacggccgggaccgatcatgtggatgaccagtggcttaagcaggcggggattggtttttccgcggcaccaggctgtaacgccattgccgtcgtggaatatgtattctcctcgctattgatgctggccgagcgcgatggttttgcgctgaaagaccgcaccgtcgggattgtgggtgtgggcaacgtgggcggacgtctgcaaaagcgtctggaagcctggggcatccgcactctgctgtgcgatccgccgcgtaaggataacggcgatgagggcgatttccgcacgctggatgagctggtcgacgagtgcgacgtcatcaccttccatacgccgctctttaaagaagggccgtacaagactctgcacctggccgacgaaaagctgatccgccgtctgaaggctggcactattctgataaatgcctgccggggaccggtggtggataacgcggcgctgctgacatgtctcgacgagggtcaagatcttagcgtcgtactggacgtctgggagccagagccggatctcaacgtcgcattgctgaataaggtggacgtgggtaccgcgcatatcgcgggttatacccttgaaggcaaagcgcgtggcacaacccaggtgtttgaggcttacagcgcctttatcggccatccgcagcaggtagcgctggatacgctgctgcccgccccggaatttggtcgcattacccttcatggaccgctggatgaggcaacgctgaaaagactggtgcatttggtgtatgatgtgcgccgcgatgacgcgctgctgcgtaaagtggcgggtattccgggtgagtttgacaagctgcgcaaaaattaccttgagcgccgcgagtggtcctccctgtatgtgatgtgcgatgacgcccccgcggcggcgctgttgcatcagctgggatttaacgccgttcaccacccggcacgttaa

SEQ ID NO: 524290 - DNA, 1005 bp, Stenotrophomonas maltophilia
atgcagcccatttcaggtacgcctccgcgccctccgggtgaaggccccgtaacgcccaacacgccaggcgaacaaccgctctccacgcagcaacgcaccgtactggagcgtcttatcacgcgtcttattgcgttgacctcacagcaaaacgcagaggtatgggccggcgttaagcacgatttgggcgtcagaaacgatgcgccgctacagtcgcgccatttccctgccgccgaacaaaacctgaaccagcgtcttaccagcgcacagcagcaacatactacccgccagattatctcgcagctgaccgagctgttgggccaggggaataatcgtcaggcggtgagtgattttatccgtcagcaatacggtcataccgccctgagccagctttcgccggaacagctgaaaaccgtgttgaccctgctgcaaagcaatcagctttctatcccgcagccgcaacagcgcccgtctacagaacggccattgcagcctgcggagcataatacgctcaagcagatggtcactaagctggctgccgccaccggcgaaccgacaaagcttatctggcaatccatgctggaactttccggtgtgaaagcgggcgagatgatcccggcaaaacagtttacccatctggtcacctggctccaggcgcgtcagacgctcagcacccagagcgctccgaccctgcacagcgtacaggcggcactgaaacaaccgctggaaccgcacgagttcgatatgatccgggattacgcccagcagagctggcaggcgacaccgcaaaccgtgctgaccaccgcgcaggtacaggatttactgaatcagatcttcgttcgccgcgccgagcgggaaggcggcgtgccggaggtaagaaacattcagccgatctacaacccgctgtttgcccccgttgttgacacgttcaagacgctttctgcccgtccgggattgatgtttatcgcgttgctgattgcgctggcgattttctggctggtttcttaa

SEQ ID NO: 524291 - DNA, 1179 bp, Stenotrophomonas maltophilia
atgaaggctgttacccctgagaagagcgctccttccgggaacctttcccttttccgcatcgcctttgcggtgtttctgacctacatgaccgttggtctgccgctgccggtgatccccttgttcgttcaccaggagctgggctatggcaacaccatggtcggtattgcggtgggcattcagtttttagcgacggttttaacccggggctacgccggtcgcctggcggatcagcacggcgcaaaacgctcggcgttgcagggcatgtttgcctgcgggctggcggggggagcctggctgctggcggcgctgttgccgatagatgcagcgtataaattcgcgctgctggtggcggggcgcctgatcctcggctttggcgaaagccagctgctgaccggcaccctgacctggggaatggggctggtgggacctgcgcgttccggaaaagtgatgtcctggaacgggatggcgatttacggcgcgctggcggcaggcgcaccactggggctgctgatccacagccagtttggttttgcggcgttggcaggcaccaccatggtattaccgctgctggcgtgggcgtttaacggttcggtgcgcaaggtgcccgcccataaaggcgagcgtccttcgctgtggagcgtggtggggcaaatctggcaaccggggcttgggctggcgcttcagggggtaggcttcgcggttatttgtacctttgtctccctctatttcatgagccgcggctgggcgatggcgggctttacgctgacggcctttggcggcgcgtttgtattgatgcgcgtgctgtttggctggatgccggatcgctttggcggcgtgaaggtggcggtggcgtcactggtcattgagaccgtgggtctggtactgctctggcaggcgccgtccgcatccgttgcgctgctgggtgcggcgttaaccggctgcggctgctcactgatcttcccggcgctgggcgttgaagtggttaagcgcgtggctccgcaggtgcgcggcacggcgctgggcggctatgcggcgtttcaggatatctcttacggcatcaccgggccgctggcggggctgcttgcaacgtcgtttggctatccttccgtatttctcgccggtgcggtgtcagcggtagtggggattgtggtgacgctggtggcgtttcgcaggtcgtag

SEQ ID NO: 524292 - DNA, 1218 bp, Stenotrophomonas maltophilia
atgaaacgtgcagtgattactggcctgggcatcgtttccagcatcggtaataaccagcaggaagtcctggcatctctgcgtgaaggacgctccgggatcactttctctgaagagtttaaagattctggaatgcgtagccacgtatggggtaacgttaaactggataccaccggtttaattgaccgtaaagtggttcgtttcatgaacgatgcctctatctacgcctatctttccatgcaggaagcgatcatggattctggtctgagcgaagacgcttaccagaacaacccacgcgtgggcctgattgcaggctccggcggttcctctaaagctcaggtgttcggtgctgacgccatgcgcagcccgcgcggcctgaaagcggttggtccatatgttgtgaccaaagccatgggttcagcggtttccgcgtgcctggcaacgccgttcaaaatccacggtgtgaactactccatcagctccgcatgtgcgacctccgcacactgtatcggtaatgcggttgagcagatccagctgggcaaacaggacatcgtatttgctggcggcggcgaagagctgggctgggaaatggcctgtgagttcgacgcgatgggcgcactgtccaccaaatacaacgaaacgccagacaaagcatcccgtacctatgatgcacaccgcgacggttttgttatcgctggcggcggcggtatggttgtggttgaagagctggaacacgcgctggcgcgtggcgcgcacatctacgctgagatcgtgggctacggcgcaacgtctgacggcgctgacatggttgctccatccggcgaaggcgcggtgcgctgcatgaagatggcgatgcacggcgttgataccccaatcgactacctgaactctcacggcacctcaacgccggtaggcgacgtgaaagagctgggtgcgatccgtgaagtgttcggcgacaacagtccggctatctctgcaaccaaagccatgaccggtcactctctgggtgcggcgggtgtgcaggaagcgatctactctctgctgatgctggaaaacggttttatcgcgccaagcatcaacatcgacgagatggacgagcaggcggcaggcctgaacatcgtgaccgaaaccaccgaacgtgagctgacgaccgttatgtccaacagcttcggtttcggcggcaccaacgccacgctggtgatgcgtaagctgaaagcgtaa

SEQ ID NO: 524293 - DNA, 1998 bp, Stenotrophomonas maltophilia
gtgaaacaaaacgccatacaacctgccaacctcgaattcaacgctgagggtacacctgtttcccgagattttgatgacgtctacttttctaatgataacggactggaagagacgcgctatgtcttcctcgaaggaaatcatctcagcacccgcttccctgagcatccgcgcagcctgtttgtcgtcgcggagagcggtttcggcaccgggctgaattttttgaccctctggcaggccttcgaccagtttcgcgctgcacaccccgaggctaccttacaaagattacatttcatcagtttcgaaaaatttccgcttaccgcgcacgatctgcggcttgcccatcagcgctggccggagcttgcccactgggcggaacagcttcaggcccagtggccaccggctatcggcggctgtcatcgtctgattctggacgacggacgcgtcacgctcgacctgtggcttggcgacattaacgacctgaccgataagctcgatgactcaatgcatcagaaagtggacgcctggttcctggacggttttgcgcccgccaaaaaccctgacatgtggagtccgcacctgttcagcgcaatggcacgtctggcacgcccgggcgcgacgcttgccaccttcacctcggcgggctttgtccgccgtgggttgcaggaggcggggtttaccatgcggaaaaccaaaggctttggccgcaaacgcgacatgctggtgggggtgatggagcaggatctggcgatcccggcacaggcaccctggtttgctcgccgccccagtgcgtcgcgtgaggtcgccattgtgggcggaggtattgccagcgccctgctctcactggctctgctgcaccgtggctggcaggtgacgctctactgcgctgacgaggcaccggcgatgggtgcatcaggcaaccgtcagggcgcgctttatcccttattaagttcacacgatccagcactgttccagttcttcccggctgcgtttacgtttgctcgtcgcctttacgatagcctgccggttgcgttcgaccacgactggtgcggtgtgacgcagttgggctgggatgagaagagccagcagaaaatcacccaaatgctgtcgctggggctgccggaaaccatcgcccatgcagtgacggctcagcaggttgctgagaccgctggcgtcgacaccggctgcggcggaattcagtatccactcggcggctggctgtgtccggctgaactgacttctgcggcgatagccctcgggcagtcgcgtgggttgacagtgcattatgcccacaaggttgaatcgcttagtcgcactgcgcactgggaactgcgttttgctgacggcaaagcgtcgcagcatgccagcgttgtactggccaacggacatcacatcactcagtttacccagacagcgtcattgccggtttatccagtcggcggccaggtgagccatatcccgaccgcgcccgaactgagcaaactgcgtcaggtgctgtgttacgacggctacgcgacgccgcaaaatccgtccaacggccatcactgcatcggtgccagctatcatcgcggtgaaacagatatgcagtacagcgaagcggatcagcagcaaaaccgccagcgcctgctcgactgtttcccgaatgcgtcgtgggcgaaagaggttgatgtcagtgagggtcaggcgcgctgcggcgtacgctgcgcgacccgcgatcacctgccgatggcgggaaacgtgccggactatgacgccacgcttgaagtctatcaggatcttacagacaacaaagaaacggcggtaagtgcgcccgtttatccggaactgtttatgttgggtggcttaggctcgcggggattatgctctgcgccattgctggctgaagtgctagccgcgcaaatgagcgatgagccggttccgctggacagggtaacgctcgcggggcttaatccgaaccgactatgggtgcggaaattgctgaaggggaaaagggttaagtag

SEQ ID NO: 524294 - DNA, 276 bp, Stenotrophomonas maltophilia
atgatcgcagaatttgaatcacgcattctggcgttaattgatgacatggtggaacacgccagcgatgatgagctgttcgccagcggttatctgcgtggtcacctgacgctggcggtagccgcgctggaagccggggacgatcactctgccgacgccgttcacgcggaagttactcgcagccttgaaaaagccattctggccggggaactgtctccacgcgaccagtctttagtgctgggcatgtgggacaatttgttccagcaggctaaacgctaa

SEQ ID NO: 524295 - DNA, 546 bp, Stenotrophomonas maltophilia
atgaacagtacgcataaatacgaacagctgattgagatctttgacagctgttttgctgatgattttaatacccgtctgattaaaggcgacgacgaaccgatctatcttcctgctgatgaccaggttccatacaaccgcatcgtctttgcccacggcttttacgccagcggtttgcacgagatttcgcactggtgcatcgcggggaaagcgcgtcgcgagctggtggactttggttactggtactgcccggacgggcgcgacgccgccacccaggggcagttcgaagatgtggaggtgaaaccgcaggcgctggagtggctgttctgcgtggcggcgggtttcccgttcaacgtcagctgtgacaaccttgaaggcgacttcgagccagaccgtatcgtcttccagcgccgcgtgcatgcgcaggtgatggaatatcttgagaaaggcatcccggaacgtccggcacgcctgatcgaggctttacaaaattattaccatacgccggagatcacggcggaatgcttcccgtggccggaagatttataa

SEQ ID NO: 524296 - DNA, 810 bp, Stenotrophomonas maltophilia
atggataatttcgtcgatctgtttatggtgtcaccgctgctgctggcggtgctcttttttgttgcgatgttagccggatttatcgatgccctggcgggcggtggcgggttgctcaccgttccggcgctgctggcggcaggcatgagccctgcccaggcgcttgccaccaacaaactccaggcatgcggcggttcgctctcctcatcactctactttgttcggcgcaaagtggtgaatcttgccgatcagaagctcaatatcctgatgacgtttattggctcgacggcgggcgcgctgctggtccagcacgtacagtccgacattctgcgccagatcctgccgattctggttatctgtattggcctctatttcttactgatgccaaagctcggcgaggaagaccgggcgcggcgactgcacggcctgccgtttgcgctgattgccggtggctgcgtcggtttttacgacggcttctttggtccgggagcaggctcgttttacgcgctggcattcgtgacgctggccggcttcaacctcgccaaatccaccgcccacgccaaagtcctcaacgcaacctccaacgttggcggtctgctgctgtttatcattggcggcaaggttatctgggctaccggatttgtgatgatggcggggcagttcttgggcgcgcgcgcaggctcgcgtctggtattaagcaaagggcaaaagctgatccgcccgatgattgttgttgtctcggcggtgatgagcgccaaacttctttatgacagccatggacaggagatcctcacctggttggggatgaactaa

SEQ ID NO: 524297 - DNA, 825 bp, Stenotrophomonas maltophilia
atgaaaaaaaccgcaatcgctctgctggcgctgctggccagtggagcaagcctggccgccacgccgtggcagaaaatcacccacccggtagcgggaagcgcgcagtccattggcgctttctccaacgggtgtatcgtcggcgcgcaggaacttccgctgcagtcggacacctatcaggtgatgcgcaccgaccagcgccgttacttcggccatcctgacctggtactgtttattcagcgtcttggcaaccaggtgcataacctggggctggggacgatgctgattggcgatatggggatgcctgcaggtggtcgcttcaacggcggtcacgccagccaccagaccggactggatgtggacatcttcctgcaactgccgaaaacacgctggagctcagcgcagctgctgaaaccgcaggcgctggatctggtctcggccgacggtaaacgggtcgtcgcctcgcgctggtcgccggaaatttccagcatgattaagctggcggcagaggataacgacgtcacacggatctttgttaacccggccatcaagcagcagctttgcctggatgcgggaatggatcgcgactggctgcgtaaagtgcgcccgtggttccagcaccgggcgcatatgcatgttcgcctgcgctgcccgacgaacagcctggaatgtgaagatcagccgctgccaccgcctggcgatggttgtggttacgaactgcaaagctggtttgaaccggccaagcctggaacctctaagcctgagaagaagacaccgcctccgttgccgccttcctgccaggcgctactggatgagcatgtactttaa

SEQ ID NO: 524298 - DNA, 1086 bp, Stenotrophomonas maltophilia
atggcaggaaacagtattggacaggtattccgtgtgaccacctttggcgagtcgcacggtctggcactgggttgtatcgttgatggcgtcccgccaggcatcgaactgaccgaagccgatttacagcatgaccttgaccgtcgtcgtccgggtacctctcgctacaccacgcagcgtcgcgaaccggaccaggtcaaaattctctccggcgtttttgaaggccgtaccaccgggaccagcattggtctgctgattgaaaacaccgatcagcgctcccaggactacggcgcgattaaagacgtcttccgtccgggccacgccgactatacctacgaacaaaaatatggctttcgcgactatcgcggcggcggacgttcttccgcgcgtgaaaccgcgatgcgcgtggcggcaggtgcgattgccaaaaaatatctccagcagaaattcggcatcgttatccgcggctgtctgacccagatgggcgacattccgctggcaatcaaagactgggatcaggtagaacttaacccgttcttctgcgccgatgccgacaagctggacgcgctggacgagctgatgcgtggcctgaaaaaagagggcgactccattggtgcgaaagtcaccgtggtggccgacggtgtgccggctggctggggcgagccggtatttgaccgcctcgacgctgacatcgcccacgcgctgatgagcatcaacgcggtgaaaggcgttgaaatcggcgacggttttgacgtggttaagcttcgcggcagccagaaccgcgacgaaatcacgaaggcgggtttccagagcaaccatgcgggcggcattctgggcggcatcagcagcgggcagcaaattattgccaatatcgcgctgaagccaacgtccagcattaccgtgccgggccacacgattaaccgctcaggcgatgaagtagagatgatcaccaaaggacggcacgatccatgcgtggggatccgcgcggtaccgatcgcagaagcgatgctggcgatcgtgctgatggatcacttcctgcgccagcgcgcgcagaatgcggatgtgacgaccaccattccacgctggtaa

SEQ ID NO: 524299 - DNA, 933 bp, Stenotrophomonas maltophilia
gtggataaaatttttgtcgatgaagcagtaaacgagctgcataccatacaggacatgttgcgctggtcggttagccgcttcagcgccgccaatatctggtacggtcacggcaccgataacccgtgggatgaggccgtccagctggtgctgccgtcactctatctgccgctggatattccggaagacatgcgcaccgcgcgcctgacctccagtgaaaaacaccgcatcgttgagcgcgtgatccgtcgcgtgaacgagcgtattccggtggcttacctgaccaacaaagcctggttctgcggccatgagttctatgttgatgagcgtgtgctggtgccacgttcgccgattggcgagctgatcaacaaccactttgacggcctgattaaccatcagccgcagcacatacttgatatgtgcaccggcagcggctgcatcgcgattgcctgcgcgtacgccttcccggaagcggaagtggacgccgtcgatatctccaccgacgcgctggccgtcaccgaacacaacattgaagagcacggcttgatacatcacgtcacgcctatccgctctgacctgttccgcgacctgccgacgctgcaatacgacctgatcgtcaccaatccaccgtacgtggatgccgaagacatgtccgatctgccgaacgagtaccgtcacgagccggagctgggcctggcgtcaggctctgacgggctgaagctgacccgccgcatcctggcctgcgcgccggattatctgaccgacgatggcgttctgatttgtgaagtgggtaacagcatggtacatctgatagagcagtacccggatgtgccgttcacctggcttgagttcgacaacggcggtgacggcgtctttatgctgaccaaaacgcaactgcttgatgcacgcgaatacttcagcatttacaaagattaa

SEQ ID NO: 524300 - DNA, 552 bp, Stenotrophomonas maltophilia
atgaaaaagaaaacatcgctcagcgaggaggatcaggctctcttccgtcagctgatgaccgggacgcgtaaaatcacgcacgacaccattgtccatcgcccgcagcgtaaaaaaatcagcgaggttccggtcaaacggttgcttcaggagcaggccgataacagccactatttttcagatgagtttcagccgctgctaaatacgcagggcgcggtgaaatacgtgcgcgaagacgtcagccattttgaactgaaaaaattacgccggggagattactcgccggagctgttcctcgatctgcatgggttgacccagatgcaggcgaagcaggagctgggggcgttgatcgcggcgtgccgacgcgagcatgttttttgcgcctgcgtgatgcacggtcacggcaaacatattctcaaacaacagacgccgctgtggctggctcagcatccacacgtgatggcttttcatcaggcaccgaaagagtacggcggagatgccgcattgctggtattgattgaggtggaggagtggcagccgccagagttgccctga

SEQ ID NO: 524301 - DNA, 471 bp, Stenotrophomonas maltophilia
atgcgtcacggcgacgcggcactcgatgccgccagtgactcagtacgtcctttaaccgtttgtggctgcgacgaatcccgtcagatggcgacatggcttaaaggtcaaaaagtggacattgaacgcgttctggtgagtccgttcctgcgggcagaacagacgctggatgtggtaggggagtgtatgaacctgccatccagtgtggatgttctccctgaactcacgccgtgtggcgatgttggccttgtcagtgcttaccttcaggcgctgtgcaacgaaggtgtcgcttccgcactggtcatttcccacctgccgctggtcggctatctggtatctgagctgtgcccgggcgaaacgccgccgatgttcacaacgtccgccattgccaacgtcaccctcgacgaaaccggcaaaggggtctttaactggcaaatgagtccatgcaacctgaagatggctaaagccatctga

SEQ ID NO: 524302 - DNA, 2148 bp, Stenotrophomonas maltophilia
atggaaacgacatctgcatttaaccttgctgttcgccttgataacgtggccgttatcaccattgatgtgcccgacgaaaaaatgaataccctgaaggcggagttcggcgttcaggtgcgtgcgatgctcagacagatccgcgaaaacaaagcgatacgtggcctggtatttatctcggcaaagccggataactttattgccggggccgatatcaacatgattgcccgggcgacaagcgctcaggaagcagaagatctggcgcgtcaggggcagcaggtgatggcggagatccatgcgctgtcgatacccgttgtcgctgcgatccacggggcttgcctgggcggcgggcttgagctggcgctggcctgccacagtcgcatctgtaccgacgatgcgaaaaccgtactcggactgcctgaagtacagcttggattgctgcccggttcaggtggcacgcagcgcttgccgcggctggtgggcgtcagtactgcgctggagatgattttaaccggtaaacagctgcgcgcccgtcaggcgttaaaggcgggtctggttgatgaggtcgttccgcacgcaatcttgcttgaggctgccgttgagcgggcgctgaaaggtcgtcaggcgaaacgccccctgccggtgcgtgagcgtatcctcgccgggccgctggggcgcacgctgctgtttaatatggtgggtaaaaaaaccgagcaaaaaaccagagggaactatccggcagcgacgcgcattctgaaggtgattgaaaccggtttatcccagggcagcagcagcggttatgccgcggaagcgaaagcgtttggcgagctggcgatgacgccgcagtcgcaggcgctgcgcggcattttctttgccagcacggaggttaaaaaagatccgggcagtgaagctgaaccggctccgctgcgcgccgttggggttctgggtggtgggctgatgggcggaggcatcgcgtttgtcaccgccagcaaaggcaaattgcccgtacgtatcaaagatatcaatcctcagggcatcaaccacgcgttgcagtacagctggcagaaccttgatcgcaaagtgaaacgccgccatatcaaggccagcgatcgcgataaaatcctcgcgatgatcactggcgccaccgactacagtgggtttgcacaccgcgatctggtgattgaagccgtgttcgaagatctggcccttaagcagcagatggtagcggacgttgaacagcattgcgcgccgcacaccattttcgcgtcaaacacctcgtctttgccgatcggcgacatcgcggcgaaagccatgcgcccggagcaggtgatagggctgcactatttcagtcctgtcgaaaaaatgccgctggtggaggttatccctcatgccacaaccagcccgcaaactattgccaccgtggtgaagctggcgaaaaaacagggcaaaactcctgttgtggtcgcggacaaagccggcttctacgtcaaccgcattctggcgccgtatattaacgaagcgatgcggttgctggcggaaggggagaaaattgagcacgtcgatgacgccctggtgaagtttggtttccccgtcggcccaatccaacttttggatgaggtaggaattgatacggggactaaaattatccctgtgctggaagcggcttatggcgatcgttttgcgccgcctgcaaactttgtttccgcaattttgaaggacgatcgcaaaggcagaaaaaatgaacgcggtttctatctttacgccgcgaaagggcgtaaaagcaagaaacaggtcgacccttcggtttatgcgcttattcctgtcacgggtcagggaaaactgtcggcggttcagtgtgctgagcgctgcgtgatgatgatgctcaatgaagcggcgcgctgctttggtgagcaggtgatcaaaagcgcgcgcgacggcgacatcggtgccgtgtttggtatcggttttccgccattccttggcggcccgttccggtatatggataccctcggggcgggtgaagtggttgcgatcctgcaacgtctggcctcgcaatacggtccacggtttacaccttgtgacgaattattgcagatggcggaacggggtcagacattctggcccgcaagggaaactgattgcgtaaactga

SEQ ID NO: 524303 - DNA, 1311 bp, Stenotrophomonas maltophilia
atgagtcaggcattaccgcttatcacccgacacggtgaccgcattgccattgtcagcgggttacgtacgccgtttgcacgtcaggcaaccgcgtttcacggtataccggctgtcgatctgggaaaaatggtggtgggggagatgctggctcgcagcgagatcccgccagaggttattgagcaactggttttcggccaggtggtacagatgccggaagcacccaatatcgcgcgtgaaatcgtgctgggtgccggcatgaatgttcataccgacgcctacagcgtcagccgcgcctgcgccacaagtttccaggcggtggcgaacgtggcggaaagcctgatggcggggaccattcgcgcggggatcgccggcggcgcggattcctcctccgtgctgcccatcggcgtcagcaaacagctggcccgcatcctcgtggatgccaacaaagctcgcactaccggtgcaaagcttaaactcttctcgcgtttacgcctgcgcgacctcatgcccgtgccacctgccgttgctgaatactccaccggcctgcgcatgggcgatacagccgagcagatggcaaaaacctatggtattacccgcgaacagcaggatgcgctggcgcatcgctcgcatcagctggcagcgaaagcctggtcggagggcaaactgaccaacgaagtgatgaccgcctatgtaccgccttaccgggaaccgctcgcggaagataacaacattcgcggcacctcaaccctggcagattacgcaaaactgcgcccggcctttgaccgtaaacatggcaccgttacggcggccaacagtacgccgctgacggacggtgccgccgccgtgatcctgatgacggaatcccgggcgaaagagctgggcatcacaccgctgggctatttgcgcagctacgcctttaccgccatcgatgtctggcaggacatgctgctcggaccggcctggtccacgccgctggcgctggagcgcgcggggctaacgctctccgatctcacgttaattgatatgcacgaagcctttgccgcacaaacgctggcaaacgtgcagcttatggcgagcgaacgttttgcccgcgacgtgctgggccgcgcacatgccacaggcgaagtggatcaaagtaaattcaatgtgctgggtggctccattgcttacggtcatccgtttgcagcgaccggggcgagaatgatcacccagacgttgcacgaactgcgtcgccgtggcggcggctttggtctcgtcaccgcctgtgcggcgggcggcctgggcgcagcaatggttctggaggctgaataa

SEQ ID NO: 524304 - DNA, 285 bp, Stenotrophomonas maltophilia
atgagtaaatgcagtgctgatgaaaccccggtttgctgctgtatggatgttggcaccattatggacaacaccgattgcaccgcctcttacagccgcgtattccctaaccgcgctgaagcggaagagacgctggccgcgctgagcaagcgtgcgcgtgaagtcgaatccgatccatgtgaaatcaaatctaccttcacggaagtggaaggcggcgtacagctggatatcgactttgtgttcgcctgcgaggcagaaacgctgatcttccagctgggcctgcgttaa

SEQ ID NO: 524305 - DNA, 210 bp, Stenotrophomonas maltophilia; identical to SEQ ID NO: 491571

SEQ ID NO: 524306 - DNA, 2298 bp, Stenotrophomonas maltophilia
atgttcgccagcaataaaaataacaccctggtacttgatacgggttccactcttatcggtgacgttatttccaccaattccatgggaaacactctcactctgatcggcaccggtacggaagacagtaacttcgtgggtctgaatgaaggcgacggttttgccagcgtaaaaatggagggtgaaagctgggcactgtcgggcgatctcgacattattggctctggcgactccttgctgatagagactggcgcgttaaccctgtcgggtgcggtatcgaataccggtaatacgcgggtggccaaagacgcctcgctgcaactgggcgatggcgaaaaaactgcgacgctcagcggtgggctcaccaacaatggtaccgtcatttttaatcagggtagcgatttcactttcgccaccgacatgaccggtagcggtaacgtcgaaaaagttgattccaacacgctgaccctgacaggcaaaaatagctatacagggaatacggttctgcacggtggcaccacgcttatctccaccggagcaacgctcggcgtcaagggcagtaacgccaccgttaccgttgaaaacggtgcgacctttgccaccgcaggcgaagtgaacaacaacatcgcgattcttagcggcggtacgctggcggcatggaatgcagtccagggtaattccacgctcagcgcttccggtgttgataccatcaacggcaacgtggctaatggcggcacgctgttgctgagtgcggctgataatagcgttggcaataattttacgattaatggcgactacaccggctctgacggtagccagattgtgatgaacagcactctgggtgaagataactcaccaactgaccacctcaccattacgggcagcagcttcggtcagtccggcgtcagcattaccaacattggtggcgcaggcgcgcaaaccattaacggtatggaaattgtcagcattggcggcagttccgaagcccagctgacgctggcaaaaccggtcgtcgcaggcgcctgggaatataacctctaccagcacagtgacggaaactggtatctggaatcaaaggcgacgccttctgatgatccttccgacgacaccgatgacggtggcaataatgatgacggcggtaacaccgacggcggtggcaacaccgataatggtggtaacaccgatgacggtggtaacacagatgacggtggtaacaccgacaacggcggcaacactgacaacggcggcaacaccgataacggcggcaacaccgataacggcggtaacaccgacaacggcggcaacaccgataacggcggcaacaccgataacggcggcaacaccgataacggcggtaacagtgccccggaagttatggcacctgaagtgggtgcttacttaggtaactaccttgccgcgcagagcatgttcctgcataagcgcgacgatcgcgaccagctcactttccgcaatgaagacgatctgaacacctggatgtacgttaagggtcgctatcatgagaacgatgcgggtggcgataaagtcagctacgacaccaccaccaccgttctgcaagtcggcagcgatttcatgagcaagccaatggataacggcatcctgcgtgccggtggtatgttcggtgcaggccaggcgaagacccactctgatgcgaagcacaacgtgcgtgacgcacagggtaaagttgatggcttcaatgttgggctgtacgccacctggcaggaagatcagaaattacgtctgggcagctacgttgatacctgggccgcttatagctggtacaacaacaaagtcaccagcaatcgtaacgatgaagattacgatagcgaaggtttcgccgcgtctgttgaagtcggccacgcgtgggttatccagtctgaaaatgaacgtacatggaagatcgagccacaggcgcaggtgatctacagctatctcgatcaggaaaatcacaccgatcgcgacggcgtacgcgtaaccacgctggacaatgacagcgtctttggtcgtcttggcgttaaagcaagctacttccagcagaaggacgtcaaggcctggcagccatacgtcgcagttaactggttgaaaggtgctggtcaaaacgatctggcattcaatgacgaaaccgtcagcaacgatacgccagaagatcgtggtcagttagagctgggcgtaaccggcaacctgaacgaaaccacaacgatctccctgcgtgccagcggtgagtggggtgaaaacagctatgccgcttacggcggtcatattttgttaaaccatcgctggtaa

SEQ ID NO: 524307 - DNA, 234 bp, Stenotrophomonas maltophilia
atgcaaaataaactactgatcgcttccgttctgactgccactgcaatgttcaccgtggcgggctgttcgtcaaatcaggccgtaaaaaccaccgatggtaaaactatcgttactgacgggaaaccgcaggtggatgacgataccggtctggtatcgtacaaaaacgccgaaaccggtcaaactgaacagattaaccgtgaccaggttaaatcaatgggtgagctggataactaa

SEQ ID NO: 524308 - DNA, 2262 bp, Stenotrophomonas maltophilia
gtggcggcgaaactggcggtgggttacccccttgacgagctgatgaacgacatcaccggtggccgcacgccagcgtccttcgaaccgtccatcgactacgttgtgaccaaaattcctcgctttaacttcgagaaattcgccggcgcgaacgaccgtctgactacccagatgaaatccgttggtgaagtcatggcgattggccgcacgcagcaggaatccctgcaaaaagcgctgcgtggcctggaagtgggcgcgaccggctttgacccgaaagtcagcctggacgacccggaagcactgaccaaaatccgccgcgagctgaaagacgcgggcgcagagcgtatctggtacatcgccgatgccttccgtgcgggcctctccgtcgacggcgtatttaacctgactaacatcgaccgctggttcctggtgcagattgaagagctggtgcgtctggaagagaaagtggcagagctgggcatcaacggcctggacgcagacttcctgcgcatgctgaagcgtaaaggcttcgccgatgcgcgtctggctaaactggcgggcgtacgtgaagcggagatccgcaagctgcgcgaccagtatgacctgcacccggtttacaagcgcgtggacacctgtgcggcagagttctcgaccgataccgcgtacatgtactccacctatgaagatgagtgcgaggcgaacccgtccgtcgaccgcgacaagattatggtgctgggcggcggtccaaaccgtatcggccagggcattgagttcgactactgctgcgtgcatgcctcgctggcgctgcgcgaagacggttacgagaccatcatggtcaactgtaacccggaaaccgtctcgaccgactacgacacttccgaccgcctctacttcgagccggttacgctggaagacgtgcttgaaatcgtgcgcatcgagaagccgaaaggcgtgatcgtgcagtatggcggccagactccgctgaagctggcgcgtgcgctggaagcagcaggtgtgccggtcatcggcaccagcccggacgcgattgaccgtgcggaagaccgcgagcgtttccagcaggcagttgatcgtctcaagctgaaacagccggcgaacgccaccgtgaccgcgattgaaatggccgttgagaaagcgaaagagattggttacccgctggtggtgcgtccatcctacgtactgggcggccgtgcgatggaaatcgtctatgacgaagccgacctgcgtcgctacttccagacggcggtgagcgtttccaacgatgcgccagtgctgctcgaccgcttcctcgacgacgcggttgaagtcgacgttgacgctatctgcgacggcgaaatggtgctgattggcggcatcatggagcacatcgagcaggctggtgtgcactccggtgactccgcatgttctcttcctgcgtacaccctgagccaggagattcaggatgtgatgcgtcagcaggtgcagaagctggccttcgagctacaggttcgcggcctgatgaacgttcagttcgcagtgaaagacaacgaagtttatctgattgaagtcaacccgcgtgcggcacgtaccgtaccgttcgtctctaaagcgaccggtattccgctggcgaaagtggcggcgcgcgtgatggctggccagacgctgactcagcagggcgtcacgaaagaaatcatcccgccgtactactcggtgaaagaggtggtgctgccgttcaacaaattcccgggcgttgacccactgttagggccagagatgcgctctaccggggaagtgatgggcgtgggccgcaccttcgcagaagcgtttgccaaggcacagctgggcagcagctccaccatgagaaaatcgggccgtgcgctgctctccgttcgcgaaggcgataaagagcgcgtggttgacctggccgccaagctgcttaaacagggcttcgagctggatgcaacccacggcacggcaattgtgctgggtgaagctgggatcaacccgcgtctggtgaacaaggtgcatgaaggtcgtccgcacattcaggaccgtatcaagaatggtgagtacacctacatcatcaacaccaccgcaggtcgccaggcgattgaagactccaagctgattcgccgcagcgcgctccagtataaagtgcattacgacaccaccctgaacggcggtttcgcgacggccatggcgctgaatgcggatgccaccgagaaggtgatttcggtgcaggaaatgcacgctcagattagcaagtaa

SEQ ID NO: 524309 - DNA, 1029 bp, Stenotrophomonas maltophilia
  misc_feature (961)..(970): n is a, c, g, or t
atgccaaaacgtacagacataaaaagcatcctgatccttggcgctggcccgatcgtgatcggccaggcctgcgaatttgactactccggcgcgcaggcgtgtaaagccctgcgcgaagaggggtaccgcgtcatcctggtcaactctaacccggccaccatcatgaccgacccggaaatggcagatgcgacctacattgagccgattcactgggaagtggtacgcaaaattatcgagaaagagcgtccggatgcggtgctgccgaccatgggcggccagacggcgctgaactgtgcactggagctggagcgtcagggcgtgctggaagagttcggcgtgaccatgattggtgcaaccgccgacgcgattgataaagcagaagaccgtcgtcgcttcgacgtagcaatgaaaaaaattggcctcgacaccgcgcgttccggtatcgcacacaacatggaagaagcgctggccgtcgcggctgacgtgggctatccgtgcatcatccgtccatcattcaccatgggcggcaccggcggcggtatcgcctacaaccgcgaagagttcgaagagatttgcgaacgcggtctggatctctccccaaccaaagagctgctgattgatgaatcgctgattggctggaaagagtacgagatggaagtggtgcgtgataaaaacgacaactgcatcatcgtctgctccatcgaaaacttcgatgcgatggggatccacaccggcgactccatcaccgttgcgccagctcagacgctgaccgacaaagagtaccaaatcatgcgtaacgcctcgatggcggtactgcgtgaaatcggcgtggaaaccggcggctcgaacgtgcagttctcggtgaacccgaaaaccggccgtctgattgttatcgaaatgaacccgcgcgtgtcccgttcctccgcgctggcctccaaagccaccggcttcccgatctgtnnnnnnnnnncttcccgattgcgaaagtggcggcgaaactggcggtgggttacccccttgacgagctga

SEQ ID NO: 524310 - DNA, 1149 bp, Stenotrophomonas maltophilia
ttgattaagtcagcgctattggttctggaagacggaacccagtttatcggtcgggccataggggcaacgggttcggcggttggggaagtcgttttcaatacttcaatgaccggttatcaagaaatcctcactgatccttcctattctcgccaaatcgttactcttacttatcctcatatcggcaatgtcggcaccaatgcggctgacgaagaatcctctcaggtacatgcgcaaggcctggtcattcgcgacctgccgctgattgccagcaacttccgcaacaccgaagacctctcttcttacctgaagcgccataacattgtggcgattgccgatatcgatacccgtaagctgacgcgtctgctgcgcgagaagggtgcacaaaatggctgcatcatcgcaggggacaacctcgatgcggcgctggcgctggaaaaagcgaaagccttcccgggcctgaacgggatggacctggcgaaagaagtgactaccacagaagcctacagctggacgcagggaagctggacgctggaaggcgacctgccggaagcgaaaccggaaagcgagctgccgttccacgtggtggcctacgattttggtgccaagcgcaacatcctgcgtatgctggttgaccgtggctgccgcctgacggtcgtcccggcacaaacgtctgcggaagatgttctgaagatgaacccggacggcatcttcctctctaacggtcctggcgacccggcgccgtgtgactacgctatcgacgccattaagtccttccttgaaaccgatatcccggtattcggcatctgtctcggccatcagctgctggcgctggcgagcggagcgaacaccgtcaagatgaagttcggccaccatggtggtaaccacccggtgaaagatatcgacaacaacacggtaatgatcaccgcgcagaaccacggcttcgctgtggatgaagcgacgatgccagctaacctgcgcgtgacgcataagtcactgttcgatggtaccttgcagggtatccatcgcaccgataagcctgcgttcagcttccagggccaccctgaagccagcccgggcccacacgatgccgcgccgctgttcgatcacttcatcgaacttatcgagcaataccgtaagactgctaaataa

SEQ ID NO: 524311 - DNA, 822 bp, Stenotrophomonas maltophilia
atgcatgatgcacagatccgtgtcgccattgcgggcgcgggtggacgtatgggtcgccagctgattcaggcggcactacagatggatggcgtggcacttggcgcggcgctggagcgtgaaggttcatccctgctgggctccgatgcgggcgagctggcaggcgcgggcaagacaggcgttaccgtgcagagcaacctggaggcggtaaaagaagactttgacgtgttcatcgactttacccgtccggaaggcactttgactcacctggcgttttgccgccagcacggtaaagggatggtgattggcaccaccggtttcgatgatgccggtaaacaggccattcaggaagcagccgccgacattgcaattgtcttcgccgcgaactttagcgtaggcgttaacgttatgctgaaactgctggaaaaggcagcgaaggtgatgggcgactataccgacattgagattattgaagcgcaccaccgccataaagtcgatgccccatctggcacggcgctggcgatgggcgaagcgattgcttatgcaatggataaagatttgaaagacatcgcggtctattctcgcgaaggtcacactggcgagcgcgtgcctggcaccattggttttgccaccgttcgcgcgggtgatatcgtcggcgaacataccgctatgttcgccgatattggtgaaagggtcgaaatcacacataaagcatccagccgcatgacgtttgcaaacggggcggtacgctccgcactgtggctaaaaggtaagccaaatggtctttttgaaatgcgagatgtgctcgaactcaacaatttgtaa

SEQ ID NO: 524312 - DNA, 951 bp, Stenotrophomonas maltophilia
atgcagatcctgttggctaacccgcgcggtttttgcgccggtgtagaccgcgctatcagcattgttgaaaatgcgctggagatttacggcgcgccgatttacgtgcgtcacgaagtggtgcacaaccgctacgtggtcgacagcctgcgcgagcgcggtgcgatttttatcgagcagatcagcgaagtgccggacggcgcaatcctcatcttctccgcgcacggcgtatcccaggccgtacgtaacgaagccaaaagccgcgatctgaccgtattcgatgccacctgtccgttagtgaccaaggtgcatatggaagtggcgcgtgcaagccgtcgtggtgaagagtcgattctgattggccatgccggtcacccggaagttgaaggcaccatgggtcagtacagcaacccggaagggggtatgtatctggttgagtcgccggaagacgtttttacgctgaatgtgaaaaacgaagcgcgtctgtcgtttatgacccagacgacgctttccgtggacgacacctcagacgtgattgacgccctgcgccagcgcttcccaaaaatcgtcgggccgcgcaaagatgatatctgctacgcaaccaccaaccgtcaggaagccgtgcgcgcgttggctgaacaggcggacgtggtgctggtggtcggttcaaaaaactcctctaactctaaccgtctggccgaactggcgcagcgtatggggaaagcggcgtttctgatcgacgacgcaacggacattcaggaagcgtgggtgaaaaacgcggcctgcgtcggtgttaccgcaggtgcttcagcgccagatattctggtgcaaaacgtcattgcccgcctgcaagagctgggtggtggcgaagcggtgccgctggaaggccgtgaagagaatattgtctttgaagtgccgaaagagctgcgaattgacgcccgcgaagtggaataa

SEQ ID NO: 524313 - DNA, 450 bp, Stenotrophomonas maltophilia
atgtctaaatccgtacagagcaacagcgcggttctcgttcatttcacgctgaagctggatgacggctccacggccgaatccacccgcaacaatggcaaaccggcgctgtttcgtctgggcgacacctccctgtctgaaggcctcgaacaacagcttctcgggctgaaagagggtgagaaaaaagcgttctcactggagccggatgcggcattcggtgtgccaagcccggatctgattcagtacttctcgcgccgtgagtttatggatgcgggtgaaccggagatcggggcgattatgctctttaccgctatggacggcagcgaaatgcctggcgtgatccgcgaaatcaacggggattccatcaccgttgacttcaaccatccgcttgccgggcgtaccgttcattttgatgtagaagtgctggagatcgatccggcgctggaggactga

SEQ ID NO: 524314 - DNA, 501 bp, Stenotrophomonas maltophilia
atgagtaaaactctctgttcaacaggactgcgctggctgtggctggtggtagtggtgctgattattgatttgggcagcaagttcctgatcctccagaatttcgctctgggggatacggtcccgctgttcccgtcgcttaacctgcactacgcccgcaactacggcgcggcgtttagtttccttgccgacagcggtggctggcagcgttggttcttcgcaggtatcgcaatgggtatctgcgtcgtgctcgcggtgctgatgtaccgctcgaaggccacgcaaaagctgaataacatcgcctacgcgctgatcattggtggcgcactgggtaacctgtttgaccgcctgtggcacggctttgtagtcgatatgatcgacttctacgtcggcgactggcactttgcgacctttaacctcgccgatagcgcaatatgcgttggtgcagcgttaatcgtgctggaaggcttcttgcctaaaccggccgcgaaagagcaggtgtaa

SEQ ID NO: 524315 - DNA, 2817 bp, Stenotrophomonas maltophilia
atgagtgactataaatcaaccctgaatttgccggaaacagggttcccgatgcgcggcgatctcgccaagcgcgaaccgggaatgctggcgcgttggactgatgatgacctgtacggcatcattcgtgcagccaaaaaaggcaaaaaaaccttcattctgcatgatggccctccctatgcgaatggcagcattcatattggtcactctgtaaacaagattctgaaagacattatcgtgaagtccaaaggactcgcgggatatgactcgccttatgttccgggctgggactgccatggtctgccaatcgagctgaaagtcgagcaagagtacggtaagccgggtgagaagttcaccgccgcagagttccgcgcgaaatgccgcgaatacgctgccacccaggttgacggtcagcgcgctgacttcatccgtctgggcgtgctgggcgactggtcgcacccgtacctgaccatggacttcaaaaccgaagccaacattatccgtgcgctgggtaaaatcatcggcaacggtcacctgcataaaggcgctaagccggtgcactggtgcgtggactgccgttctgcgctggcagaagcggaagtagagtattacgacaaaacctcgccttctatcgacgtggcgttcgaagcggtcgatcaggatgcgatcaaagctaaatttggcctgccaggcgtaagcggtccagtctcgctggttatctggaccaccaccccgtggacgttaccagccaaccgtgccatttccctgtccggtgagtttgagtacgccctggtacaaattgatggtcgcgcggttatcctggcaaaagatctggttgaaagcgtgcttaaacgcgcgaacatcactgattacagcgtgctgggtaccgtaaaaggcgacgcgctggagctgatgcgcttcaaacacccgttcctggacttcgacgttccggcgatcctgggcgaccacgtcacgctggacgcgggtaccggtgcggtgcataccgccggcggccacggtcctgacgactacaacatcagcctgaaatacggtctggaaatcgccaacccggtcggtccggatggctcttacctgcctggcacctacccggcgctggacggtatcaacgtctttaaagccaacgacatcatcgttgacatgcttcgcaccagcggcgcgctgctgcacgttgagaaaatgcagcacagctatccgtgctgctggcgccataagaccccgattatcttccgtgcgaccccgcagtggttcgtcagcatggaccagaaaggcctgcgcgagcagtctctgaaagagatcaaaggcgtgcagtggatcccggactggggccaggcgcgtatcgaatccatggtggctaaccgtcctgactggtgtatctcccgtcagcgcacctggggcgtgccgatgtcgctgttcatgcataaagagacgcaggaactgcacccgaacaccctggaactgatggaagaggtggcgaagcgcgttgaagttgacggcattcaggcgtggtgggatctcgattcccgtgacatcctgggcgctgacgcggacaactacgagaaagtgccggataccctggacgtgtggttcgactccgggtctacccactcctccgtgattgacgtgcgccctgagttcgccggtcacgctgccgacatgtatctggaaggctccgaccaacaccgcggctggttcatgtcatccctgatgatctccaccgccatgaagggcaaagcaccttaccgccaggtactgacccacggcttcaccgtggatggtcagggccgtaagatgtccaaatccatcggtaacaccgtttctccgcaggacgtgatgaacaagctgggcgcggatattctacgcctgtgggtggcatccaccgactacacgggcgaaatggcggtgtctgacgagatcctgaaacgtgctgctgacagctatcgtcgtatccgtaacaccgcgcgtttcctgctggcgaacctgaacgggtttgatccggtaaaagacatggtgcagccggaagagatggtggtgctcgatcgctgggcggtaggctgcgcgaaagcggcacaggaagatattctgaaagcctatgagtcttacgacttccacgaagtggtgcagcgcctgatgcgcttctgctccattgagatggggtcgttttatctcgacatcatcaaagaccgccagtataccgcgaaagcggacagcgtagcgcgtcgtagctgccagaccgcgctgttccacatcgcagaggcgctggtacgctggatggcgccgattatgtccttcaccgcagatgaaatctggggttacctgccgggcgaccgtgagaagtatgtcttcaccggcgagtggtacgaaggtctgttcgacctctccagcactgaagcaatgaacgacgcctactgggacgagctgctgaaagtgcgtggcgaagtgaacaaggttatcgagcaggcgcgcgctgacaagaaagtcggtggctctctggaagcgacggtgaccctgtacgcagagcctgagctggccgcgaagctgaccgcgctgggcgatgaattacgatttgtcctgttgacctccggtgcgaaagttgcggattatgccgaggcatctgctgatgctcagcagagcgaactgctcaaaggactgaaggtcgcactgagcaaagccgatggtgaaaaatgcccgcgttgctggcattacactaccgatgtcggccaggtggcggaacacgcagacatctgcggacgctgtgtaagcaacgtcgccggcgacggcgaaaaacgtaagtttgcctga

SEQ ID NO: 524316 - DNA, 927 bp, Stenotrophomonas maltophilia
atgaagctgatacgcggcatacataatctcagtcaagccccgcacgggtgcgtactgaccattggtaattttgacggcgtgcatcgtgggcatcaggcgctgttgcagggattgcgtaaagaaggggaggcgcgtggcctgcccgttgtggtgatgattttcgaaccgcagccgccggagctgtttgctggcgagaaatcccccgcgcggctgacgcgtctgcgtgagaagttacgctacctggcggagtccggcgtggactacgtcctgtgcgtacgcttcgaccgtcggtttgccgcgctgaccgcacaaaactttgtcagcgatctgttggtcaggcagcttggcgtgcagtttctcgccgtgggcgatgatttccgctttggcgctggtcgtcagggcgatttcttgttattacagaaggctggcctggagtacgggtttgacgtcaccagtacgatgaccttctgtgagggcggggtgcgcgtcagcagcacggcggtacgtcaggctctggcgaacgatgaactggacacggcagaaacgctgctgggtcatccgttcacaatttcaggtcgtgtggtccatggcgatgcgctgggccgcacgataggttttccgacggcgaatataccgctgcgtcgtcaggtctccccggttaaaggggtctatgcggtggaagtggcaggactgggtgagaagcctttctacggtgttgccaacattggtacacgtccaacggtttccggtgtgcgtcaacagttagaagtacacctgctggacgttgtaatggacctctacggtcgccatatagatgtgatactgcgtaaaaaaatacgcaatgaacagcgattcgcttcgctggatgaacttaaggcgcaaatcgcgcgagatgaattaacggcccgcgagttttttgggctttag

SEQ ID NO: 524317 - DNA, 264 bp, Stenotrophomonas maltophilia
ttggctaatatcaaatcagctaagaaacgtgccgttcagtctgaaaaggctcgtaagcacaacgcaagccgtcgctctatgatgcgtactttcatcaagaaagtatacgcagcaatcgaagcaggcgacaaagctgcagcgcagaacgcatttaacgaaatgcaaccaatcgtggatcgtcaggctgctaaaggtctgatccacaaaaacaaagcagcgcgtcataaagcaaacctgaccgcgcagatcaacaaactggcttaa

SEQ ID NO: 524318 - DNA, 900 bp, Stenotrophomonas maltophilia
atgtctcatttgaactataaccatctctattacttctggcatgtctacaagcagggctcggtcgtgggagcggcagaggcgctctacctgacaccacaaactattaccgggcaaatcaaagccctggaagagcgcttacagggcaagctttttaagcggaaaggacgtggcattgagccgagcgagctgggcgaactggtgttccgctatgcggacaagatgttcaccctgagccaggagatgctggatatcgttaactatcgcaaagagtcgaacctgctctttgacgtgggcgtggcggatgcgttgtccaaacggctggtaagcggtgtgctggatgcggcggtggtggaagatgaacagattcatttacgctgctttgagtccactcacgagatgctgctggaacagctgagccagcataagctggatatgattatctcggactgcccaatcgactccacgcagcaggaaggcttgttctcggtgaaaattggcgaatgcggcgtcagtttctggtgcattaatccgccgccggaaaaaccgtttcctgcttgcctggaagagcgccgcctgctggtgccgggtaggcggtctatgctcggacgtaagctgctgaactggtttaactcgcaggggctgaacgtggagatcctcggtgagttcgacgatgcggctttgatgaaggcttttggcgaggcgcacaacgctatcttcgttgccccgacgctgtacgcgcacgatctctattcagacgacaagattaccgagattggcagggtggataacgtgatggaagagtatcacgccatattcgccgaaaggatgattcagcacccggcggtgcagcgaatctgcaaccgcgactactcggcgctgtttacgccgccggcaatctga

SEQ ID NO: 524319 - DNA, 1176 bp, Stenotrophomonas maltophilia
gtgaaattactacaccgtttcttaagcagtgaggcatccggcggcgtcatcctgattattgctgctgcagccgccatgctgctcgccaatatgggcatgacgcgcgatctctatcacgcatttctggaaacccccgtcgagctgaaggtcggggcgctggaaattaacaagaacatgctgctgtggatcaacgatgcgctgatggcggtgttcttcctgctggtaggcctggaggtcaaacgtgagctggtgatcggttctcttgccagccgtcagcgcgcggcgtttccggtgatcgcggcgattggcgggatgatcgttcccgcgttgctctttctcgcgtttgcgtggcaggatccggttgcgcgtgacggctgggcgatcccggccgcaacggatatcgcgtttgcgctcggggtcttagccttgctcggtagccgcgtcccggtagcactgaaaattttcctgatggcgctggcgattatcgatgacctgggcgctatcgtgattatcgcgctgttctacaccagcgatctgtcggttctgtcgctgagcgtggcggccgtggctattgcggtgctggcgttgctgaacgtcttcaacgtccgacgcacgggtatttatattctggtggggatggtgctgtggacggcggtgctgaagtctggcgtgcatgccacgctggcgggcgtcatcgttggcttctttattccgctgaaggagcaggacggcaaatcgcctgccagacagctggagcatgtgcttcatccgtgggtgggctttatgatcctgccgctgtttgcatttgccaacgcgggtgtttccctggccggtgttaccctggacggactcacctctgtgctgccgctgggtatcatcgctggtttgtttatcggtaagccgctgggtatcagcctgttctgctggctggcgctgaagctgaagctggcgtcattgccaaatggaaccacctttagtcagattatggccatcggcgtgctgtgcggtattggattcaccatgtcgatctttatctcgacgctggcgtttggcaccagcgcgcctgagcttatcgtctgggcgaaactcggcattcttatcgggtcgttactggccgcggttattggttataccttgttgaaggtgaagttgtccggacaggctgtccaggcataa

SEQ ID NO: 524320 - DNA, 1146 bp, Stenotrophomonas maltophilia
atggcaaagcaagactattacgagattttaggcgttccgaaaactgcggaagagcgtgaaatcaaaaaggcatataagcgcctggccatgaaattccaccctgaccgtaaccagggtgacaaagaggctgaagccaaatttaaagagattaaagaagcctacgaagtccttaccgatgcacaaaaacgtgcggcttatgaccagtatggtcacgcggcctttgaacagggcggcatgggcggcggtggatttggtggcggcggcttcggcggcggcgctgatttcagcgacatctttggcgatgtatttggcgatatcttcggcggcggtcgtggtcgtcagcgcgcggcgcgcggcgcagatctgcgctataacatggacctgacgctggaagaagcggttcgtggcgtaaccaaagagatccgtatcccgacgctggaagagtgtgacgtttgccacggcagcggcgcgaaagcggggactcagccacagacctgtccaacctgtcacggttccggtcaggtgcagatgcgccagggcttcttcgcggtgcagcaggcctgtccgcattgtcatggtcgcggtacgctgattaaagatccgtgcaccaaatgccacggtcacggtcgtgtggagaaaaccaaaacgctgtccgttaagatcccggcaggcgtggatacgggcgaccgcatccgtctggcaggtgagggtgaagctggcgagcacggcgcaccggcaggggatctgtacgttcaggttcaggttaaacagcacgccatcttcgagcgtgaaggtaacaacctgtactgtgaagtgccgatcaactttgcgatggcggcgctgggcggcgaaatcgaagtgccgacgcttgacggtcgcgttaacctgaaaatccctggcgaaacccagaccgggaagctgttccgcatgcgcggcaaaggcgttaaatccgttcgcggtggcgcgcagggtgacctgttatgccgcgtggtcgttgaaacgccggtcggcctgaacgacaagcagaaacagctgctgaaagagcttcaggagagttttggtggcccgacgggtgagaaaaacagcccgcgctccaaaagcttcttcgatggcgtcaaaaaattcttcgacgatttaacccgctaa

SEQ ID NO: 524321 - DNA, 1896 bp, Stenotrophomonas maltophilia
atgggtaaaattattggtatcgacctgggtactaccaactcttgtgtagcgattatggatggcactactgcacgtgtgctggagaacgccgagggcgatcgcaccacgccttctatcattgcttatacccaggatggtgaaactctggttggtcagccggctaaacgtcaggcagtgacaaacccgcaaaacaccctgtttgcgatcaaacgcctgattggccgccgcttccaggacgaagaagttcagcgtgacgtttccatcatgccttacaacggcgatgcatggcttgatgtgaaaggcaccaaaactgcacctccgcagatctctgctgaagtgctgaagaaaatgaagaaaaccgcggaagattacctgggtgaaccggtaactgaagctgttatcaccgtacctgcttacttcaacgatgctcagcgtcaggcaaccaaagatgctggccgtatcgcaggtctggaagtaaaacgtatcatcaacgaaccaaccgcagctgcgctggcttacggtctggataaagaagttggcaaccgtactatcgcggtttacgacctgggtggtggtaccttcgatatctctattatcgaaatcgacgacgttgacggcgaaaaaaccttcgaagttctggcaaccaatggtgatacccacctgggtggtgaagacttcgatacccgtctgatcaactacctcgttgacgagtttaagaaagatcagggcattgacctgcgtaacgacccgctggccatgcagcgcctgaaagaagccgctgagaaagcgaagatcgagctgtcttccgctcagcagaccgacgtgaacctgccgtacatcaccgcagacgcgaccggtccaaaacacatgaacatcaaagtgacccgtgcgaaactggaaagcctggtagaagacctggttaaccgttctatcgagccactgaaagttgcattgcaggacgctggcctgtccgtgtctgatattcaggacgttatcctggtaggtggtcagactcgtatgccaatggttcagaagaaagttgctgaattctttggtaaagagccacgtaaagacgtgaacccggacgaagcggttgctatcggtgctgcggttcagggtggtgttctgacgggtgaagtgaaagacgtactgctgctggacgttactccgctgtcactgggtatcgaaaccatgggtggcgtgatgactccgctcatcaacaaaaacactactatcccgacgaaacacagccaggtgttctctaccgctgaagataaccagtctgcggtaaccatccatgtgattcagggtgagcgtaagcgtgcggcggataacaaatctctgggtcagttcaacctggacggtattaacccggcaccacgcggcatgccacagatcgaagtcaccttcgacatcgatgctgacggtatcctgcacgtgtctgcgaaagacaaaaacagcggtaaagagcagaagatcaccatcaaggcatcttctggcttgaacgaagcggaaatcgaaaaaatggttcgtgatgccgaagctaacgcggaatccgaccgtaagttcgaagagctggttcagacccgtaaccagggtgaccatctgctgcacagcacccgtaagcaggttgaagaagcgggcgataaactgccagcggaagacaaaactgcgatcgaaactgcactgagcgcgctggaaacgtctctgaaaggcgaagacaaagcggacattgaagcgaagatgcaggagctggcacaggtttctcagaagctgatggaaatcgctcagcagcagcacgcacagcagcaggcgggcgctgatgcttcccagaacaacgcgaaagacgacgatgttgtcgacgctgagttcgaagaagtgaaagataaaaaataa

SEQ ID NO: 524322 - DNA, 567 bp, Stenotrophomonas maltophilia
atgggcaacactaagttggctaatccggctccgctgggcctgatgggttttggcatgaccaccattctgctgaacctgcacaacatcgggatgttcccgatggacggcgtaatcctggcgatgggcattttttacggcggtatcgcgcaaattttcgcgggcctgctggaatataagaaaggcaataccttcggcttaaccgcctttacctcttacggttcgttctggctgacgctggtcgccattctgctgatgcctaaaatgggcctggcagatgcttcaaacgcccatttcctgggcgtgtacctgggactgtggggcgtgttcaccctgttcatgttcttcggcaccctgaaggcgaaccgcgcgctgcaattcgtcttcctgagcctgaccgtgctgttcgctctgcttgccgcgggtcacctggcggataacgaaggcatcgttcacgttgccggctgggtcggtctggtgtgcggcgcaagcgctatctacctggcaatgggtgaagtgctgaacgagcagttcggccgcaccgtattaccgattggtgaaaaacactga

SEQ ID NO: 524323 - DNA, 1365 bp, Stenotrophomonas maltophilia
atgtcacataacacccgacctctgaatcgacaggactacaaaaccctcacgctcgctgctctgggcggcgcgctggagttttacgacttcatcatctttgtcttcttcgccgccgtcgtgggggcgctgtttttcccggcggatattcctgaatggctgcgtcaggtgcaaaccttcggcattttcgctgccgggtatctggcgcgtccgctgggcggcattgttatggcgcactttggcgatctggttgggcgcaagaagatgtttaccctcagcatcctgctgatggccgtgccgacgctggcgattggccttttgcctacctatgagtcgatgggcattatcgccccgttattgctgctgctgatgcgtattctccagggcgcggccatcggcggggaagtgccgggcgcgtgggtgtttgtcgctgagcacgtcccggtgcgccgcatcggcattgcgtgcggaacgctgaccgcaggactgacgattgggatcctgcttggctccgtggttgcaaccatcatcaataccagcatgacgcaacaggccgttcacgactggggctggcgtatcccgttcctgctgggcggggcgtttgggctggtggcaatgtacctgcgacgttggttgcaggagacgccagtatttctggaaatgcagcagcggaaggcgctggcgcaagaattgccggtaaaaaccgtagtagtgcggcataaaaaagcggtagtcgtgtcgatgcttctgacctggctgctgtctgcgggtatcgtggtggtcattttgatgtcgccggtctggctgcaaaaacagtacggttttgcgcctgcggtgacgttacaggcgaacagtatcgcgacaattatgctctgctttggctgtctggccgcgggactggcggcggatcgtttcggtgccagcgtgacctttattgtcggcagcctgctgctggccgcgtcgagctgggcattctaccatcttgcgggcagccatcctgaacagttgttcctgctgtacggcatcgtcgggctgtgcgtgggcgtcgttggcgccgtaccgtacgtaatggtccgcgccttcccgccggaggtacgcttcaccggcatctctttctcttataacgtctcgtatgccattttcggtgggctgaccccgattgtggtcacggtgttgatggggctgtcaccccttgcacctgcatggtacgtgctggcgttatcgctgatggggctggtattggggatgtggcttcgccagtcagagggatgtcgtgcccacgacagagggatcagtgtttttcaccaatcggtaatacggtgcggccgaactgctcgttcagcacttcacccattgccaggtagatag

SEQ ID NO: 524324 - DNA, 588 bp, Stenotrophomonas maltophilia
atgaataccttacgcatcggcttagtgtcgatttctgaccgcgcctccagcggtgtttatcaggataaaggcatccctgctctggaagcgtggctgggcagcgcgctcactaccccgtttgagatccagactcgcctgatcccggacgagcagccgatcatcgagcagaccctgtgtgagctggtggatgagatgagctgccaccttgtgctgacgacgggcggaaccggccccgcgcgccgcgatgtaacgccggacgcgacgctggctatcgccgatcgtgaaatgccgggcttcggtgaacagatgcgccagatcagtctacactttgtcccgacggccattctttcccgtcaggtcggggtgatccgcaaacaggcgctgatcctgaacctgccggggcagccgaagtcgataaaagaaacgctggaaggagtaaaagccgaagacgggagcgttatcgtccacggtatctttgcaagtgtaccgtattgtatacaactgcttgacggtccgtacgtggaaactgacggcaacgtggtagcagcatttcgccctaaaagcgctcgccgcgaaacaatctcctga

SEQ ID NO: 524325 - DNA, 954 bp, Stenotrophomonas maltophilia
atgacggataaattgacctcccttcgtcagttcaccactgtcgtcgctgacaccggagatattgcggcaatgaagctgtaccagccgcaggatgctacaaccaacccttctctgatccttaacgccgcgcagatccctgagtatcgcaaactgatcgacgaggcggtgacctgggcaaaagcacagagcaatgaccgcgcgcagcaggttgtggatgcgactgacaaactggcagtaaacatcggtctggaaatcctgaagctcgttcctggccgtatctctactgaagttgatgctcgcctgtcctacgacaccgaagcgtctattgccaaagcaaaacgcctgatcaaactgtacaacgatgcgggcatcagcaacgaccgtatcctgatcaaactggcctctacctggcagggcattcgcgccgctgaacagctggaaaaagaagggatcaactgtaacctgactctgctgttctccttcgcacaggcgcgtgcatgtgccgaagctggcgtatacctgatttctccgtttgtgggccgtattctggactggtacaaagccaacaccgacaagaaagagtatgcggcgtctgaagatccaggcgtgatttccgtgacggaaatctacgaatactacaaacagcacggctatgagaccgttgttatgggcgcaagcttccgtaacgtcggtgaaatcattgagctggctggctgtgaccgcctgaccatcgcccctgcgctgctgaaagagttggcagaaagcgaaggagctatcgagcgtaagctgtcctacaccggtgaagtgaaagcgcgcccagagcgcatcaccgagtccgagttcctgtggcagcacaaccaggatccaatggccgtagataaactggcggacggtatccgtaagtttgctatcgaccaggaaaaactggaaaaaatgatcggcgacctgctgtaa

SEQ ID NO: 524326 - DNA, 1434 bp, Stenotrophomonas maltophilia
gtgcctgatttctttttctttattaacgaagtcctctggggttctatcatgatatacctgctttcaggagcaggtatctggtttacgtggcgcagcggactgattcagtttcgctatattcgcaaatttggcagaagtctgaaaaacagcgtcacaccacagccgggcggcctgacctcgtttcaggcgctctgtaccagcctggccgcgcgcgtcggcagcggtaacctggccggtgtcgcgctggcaatcggcgcgggcggtccgggcgcggtattctggatgtgggtgacggcgattatcggtatggccacctcctttgctgaatgctcgcttgcgcagctctacaaagaaaaagacggcaacggtcaatttcgcggcggccccgcctggtatatggctcgcggactgggaatgcgctggatgggcgtcctgttctcaatctttttactgatggcctatggtcttattttcaataccgttcaggctaattccgtcgcccacgcgctgcgctttgccttcaattgtccggagtggctaacgggcagcgcgcttgcccttctcaccctgctgaccattgtgaccgggctgagaggggttgcccgcctgatgcagtggctggttccgctgatggcgctgctgtgggtgtcaaccagcctgttggtatgcgcgatacatatcgacgaagtgccgaacgtcatcgtcaccattttccaaagcgcgttcggctggcgcgaagcggcttccggcgcgctgggttacacccttagccaggcgctcactgcgggttttcagcgaggcatgttctccaacgaggcgggaatgggctccacgccgaatgccgccgcagcggccgcatcctggcccccgcatcccgccgcgcagggcattgtacagatgattggcgtcttcacagacaccattgttatctgctccgccagtgcgatgataatgttgctgtccggcgccgttgaacatccatccggcagtacagcaggcattcactgggtacaacaggcgctggtctccctcgtcggcggttggggcgcaggccttgtcgcccttgtcgtggggctttttgccttcagttctattgtggtgaactatatctatgccgagaacaaccttattttcctgaaagttgactcgcgtctggcccgcaacatccttcgcgcgggtgtgctggcgatggtatttgtcggttgcctgctcagcatgccgatgatctggcaactggcggatgtcattatggcgctgatggccatcaccaatttgacggcaattttgcttctttcaccggttgtggcgctgatcgcgcgcgattatctgcgtcagcgcaagctcggcgtacagcccgtctttgacgcctcacgctatcccgaaatcgaatcacaaattgctcctggcacctgggatgatttgccgcggcaataa

SEQ ID NO: 524327 - DNA, 774 bp, Stenotrophomonas maltophilia
atgctgattctgatttcacctgccaaaacgctcgactaccagagcccgctcgccactgagcgttatacccagccggaattgctggactactcgcaacagctgatccacgaggcgcgtaagctttcggctccgcaaatcgcttcgctgatgagcatcagtgataaactcgccgacctgaacgccacccgttttcatgagtggcagcctgacttcacgcccgctaacgcccgccaggcgctgttggccttcaaaggtgacgtctacactggcctgcaagcagaaacgtttagcgaagccgatttcgattttgcccagcagcatctgcgcatgttatccggcttgtacggggtgctgcgcccgctggatctgatgcagccgtatcgtctggagatgggtatccgcctggaaaatgccaaaggcaaagatctgtaccagttctggggcgatgtcattaccgataagcttaacgcggcgctgcaagcccagggggacaacgtggtgatcaacctggcctccgatgagtacttcaaatcggtgaagccgaaaaagctggatgcggacattatcaagccggtgttcctcgacgagaaaaacggcaaatttaaagtgatcagcttctacgccaaaaaagcgcgcggtctgatgagccgtttcatcattcaaaaccgcctgacgaagccagagcagctcactggctttaacagtgaagggtatttcttcgacgaggcatcgtcaggaaaaaacgagctggtgtttaagcgtcacgagcaataa

SEQ ID NO: 524328 - DNA, 288 bp, Stenotrophomonas maltophilia
atgtctacactgaaacctgcacttatcgcgctttcactgatgctggtcgctcccatggcggtgcaggcagctgagatcaccctcgtccctgcggtaaaactgcaaattggcgatcgggataataacggacactactgggatggcggccgctggcgcgaccatgactggtggaaagcgcactatgactggcgcgataaccactggcgtccgcacgatgaacatcgcgatcgtcacgatcatcaccgtcatgacgatcatcgcccggggccggaccggaagcaccattaa

SEQ ID NO: 524329 - DNA, 1287 bp, Stenotrophomonas maltophilia
atgaaactctacaaccttaaagatcataacgagcaggtcagctttgcgcaggcggtaacgcagggtttgggcaaaaatcaggggctgttcttcccccacgacctgccggaatttcaactgactgaaatcgatgaactgcttaagcaggactttgtcacccgcagcaccaaaattctgtctgcgtttattggcgacgaaatcccgcaggagctgctcgaagagcgcgtgcgcgcggcgtttgctttcccggccccggtgaagcaggtggagcctgacgttggctgtctggagctgttccacggcccgacgctggcgttcaaagatttcggcggtcgctttatggcgcagatgctgacccacatcagcggcgacaaaccggtgaccatcctgaccgcgacctcaggtgataccggtgcggcggtggctcatgcgttctacggcctgaaaaacgtccgcgtggtgatcctctatccgaaaggcaaaatcagcccgcttcaggaaaaactgttctgcactcttgggggcaacattgaaaccgtggcgatcgacggcgatttcgatgcctgccaggcgctggtgaagcaggcctttgatgacgaagagctgaaggcggcgctggggctgaactctgccaactccatcaacatcagccgtctgctggcgcagatctgctactacttcgaagcggtggcccagctgccgcaggacgcgcgcaatcagctggtagtttctgtgccaagcgggaacttcggcgatctgacggcgggcctgctggcgaaatcactcggcctgccggtgaagcgctttatcgccgctaccaacgccaacgacaccgtgccgcgtttcctgaaggacggaaaatgggcgccgaacgcgacgcaagccacgctctccaatgcgatggatgtgtcacagcctaacaactggccgcgtgtggaagagctgttccgccgtaaggtctggcgtctgggcgacctgggctacgcagcggtgacggacgaaaccacgaaagccaccatgcgcgagctgaaagcggtgggctatacctctgagccgcacgcggcgattgcctatcgtgccctgcgcgatcagcttcaaccgggtgagtatggcctgttcctcggtaccgcccatccggccaagttcaaagagagcgtggaagcgatcctgggtgaaacgctgccgctgccaaaagagctggccgagcgcgccgacctgccgttgctgtcccatgagctgcccgcagactttgccgcactgcgtaagctgatgatgacccgagcgtga

SEQ ID NO: 524330 - DNA, 930 bp, Stenotrophomonas maltophilia
atggttaaagtatatgccccggcttccagcgccaatatgagcgtcggatttgacgtgctgggcgcggcggtcacgccagtggatggttcgctgctgggcgatacggtaacggttgaggcggcagagcgcttcagcctgaataacgtcggccgttttgccagcaagctgccgcctgaaccgcgtgagaatatcgtttatcagtgctgggaacgcttctgtcaggagatcggtaaaaacgtgccggtcgccatgacgctggaaaagagcatgccgattggttcgggactcggctccagcgcctgctcggtggtcgccgcgctggtggcgatgaatgagcactgcggcaagccgctgaacaacagccgcctgctggcgctgatgggtgagctggaagggcgcatctccggcagcattcattatgataacgtggcgccgtgcttccttggcggcatgcagctgatgattgaagaaaatggcatcatcagccagcaggtgccagggtttgatgagtggctgtgggtgcttgcctatccgggcattaaggtttctaccgccgaagcgcgtgcgatcctgccggcgcagtatcgtcgtcaggactgtatcgcccacgggcgtcatctggcgggctttattcatgcctgctatacccgacagccgcagctggcggcgaaactgatgaaagacgttattgccgagccgtatcgcacgaagctgctgccgggctttaacgaagcgcgacaggcatccatggatatcggcgcacaggcgtgcggcatctccggctccggcccgacgctgttcgccttatgcgacaagccagacaccgcgcagcgcgtggcggactggctctctaaacactacctgcaaaatcaggaaggctttgttcatatttgccgtctggacacggctggcgcacgagtactgggataa

SEQ ID NO: 524331 - DNA, 2463 bp, Stenotrophomonas maltophilia
atgcgagtgttgaagttcggcggtacatcagtggcaaatgcagagcgttttctgcgtgttgccgatatcctggaaagtaacgccaggcaggggcaggttgctaccgtgctctctgccccggcaaaaatcacgaaccacctggtggcgatgattgaaaaaaccatcggtggccaggatgcacttccgaacatcagcgacgccgaacgtatcttcgctgaactgcttcaggggctggcagacgcccagcctggcttcccgctggcgcagctgaaaagcaccgtggaactcgaatttgcccagattaaacacgtccttcacggtatcagcctgctgggtcaatgcccggacagcatcaacgcggcgctgatttgccggggtgaaaaactctctatcgccatcatggcgggcgtgctggaagcgcgcggtcaccacgtgacggtcatcgatccggttgaaaaactgctggctgtgggacactaccttgaatccaccgtcgacattgccgagtcgacacgccgcattgcggcgagcaaaatcccgtctgaccacatgatcctgatggcaggcttcaccgccggtaacgagaagggcgaactggtggtgctggggcgtaacggctctgactactccgctgccgtgctggcggcctgtttacgtgcagactgttgtgagatctggactgacgttgatggtgtatatacctgtgacccgcgccaggtgccggacgccaggctgttgaagtcgatgtcgtaccaggaagcgatggagctttcctacttcggcgccaaagtgcttcacccacgtaccatctccccgattgcccagttccagatcccttgcctgattaaaaataccggtaatccgcaggcgccgggtacgctgattggcgccagcgctgatgaagatgacctgccggtaaaaggcatttcgaaccttaataacatggcgatgttcagcgtctctggcccgggtatgaaaggtatggttggcatggcggcacgcgtgtttgcggccatgtcccgtaatgggatctccgtggtgctgatcacgcagtcttcttccgaatacagcatcagcttctgcgtcccgcagggcgattgcctgcgcgcccgtcgcgcgctggaagaagagttctacctggagctgaaagaagagctgctggagccgctctctattcaggagcgtctggccgtgatctccgtggtaggcgacggcatgcgcaccctgcgcggaatctccgccaaattctttgccgccctggcgcgggccaatatcaatatcgtggcgattgcccagggctcatcagagcgttcaatttccgttgtcgtggataacgatgacgccactaccggcgtgcgcgtggtgcatcagatgctgttcaacaccgaccaggtgattgagctgttcctggtgggcgtcggcggcgtcggcggcgcgctgctggagcaggtaaagcgccagcaggagtggcttaagaagaaacatatcgatttgcgcgtctgcggaattgcgaactcgaaagcgttgctgactaacgtccacggtctgaacctggaaaactggcaggcggaactggaagaggcgaaagagccgttcaacctgggtcgtctgatccgtctggtgaaagagtatcacctgcttaacccggtgatcgtcgactgtacctccagccaggcggtggccgatcagtacgcggatttcctgcgcgaaggtttccatgtggtgacgccgaacaaaaaggccaacacctcgtcgatggattactatcaccagctgcgtctggcggcgagcaagtcgcgccgcaagtttctgtatgacaccaacgtgggcgcaggcctgccggtcatcgagaacctgcaaaacctgctgaacgcgggcgacgaactacagcgtttctccggcatcctctccggctccctgtcgtttatcttcggcaagctggacgaagggatgagcctgtcggaagccacccgcgccgcgcgcgagctgggctacaccgagccggatccgcgcgacgacctctccggtatggatgtggcgcgtaagctgctgatcctggtgcgcgaaaccggccgcgagctggagctttcggatatcgtgattgagccggtgctgccagcagaatttgatgacagcggcgacgtcagcgcctttatggccaggttgccgcagcttgacgacgcctttgccgcccgcgttgcgaaagcccgtgatgaaggtaaggtattgcgctatgttggcaatattgaagaagacggcgtctgccgcgtgaagattgccgaagtggatggcaacgatccgctgtacaaggtgaaaaacggcgagaacgccctggcgttctacagccattattatcagccactgccgctggtacttcgcggctatggcgcagggaatgatgtgacggcggcgggcgtgtttgccgatctgctgcgtaccctgtcatggaagttaggagtttaa

SEQ ID NO: 524332 - DNA, 687 bp, Stenotrophomonas maltophilia
atgcatctgtcgattgtgctggtggcaccagcaagagctgaaaatattggcgctgcggcgcgtgccatgaagaccatgggttttaccgatttgcgtatcgtagacagcacggcgcatctggagcctgctgcgcgatgggtggcgcacggttcgggtgatattctcgataatataaccacttacgctacgctcgctgaggcgctgcacgatatttcgtttaccgtcgcgacgaccgcgcgcagccgggcgaagtttcattattacgccacgcctgctgcactggtgccaatgctggaagagaaaagccagtggctggagaaagccgcgctggtgtttgggcgagaagattccgggctgactaacgaagaactggaactggctgacgtgctgacgggcgcgccgatggtggcggattatccgtcactcaatctggggcaggcggtgatggtgtactgctatcaattagcatccttaatacaaatttctcagccgccagcgtcagtaacggatgaaaaccagctggcggcgctgcgtattcgtgcagataagcttctcgagcaactgggcgtcgctgacgatcaaaaaatggtggactggttacagcagcgcctggggcgtcttgaacagcgcgacacggcaatgctgcaccgattgcttcatgatattgaaaaaaaattagccgagtaa

SEQ ID NO: 524333 - DNA, 717 bp, Stenotrophomonas maltophilia
atgcagaccccgcacattcttatcgttgaagacgagttggtaacacgcaacacgttaaagagcattttcgaagcagaaggctacgatgtctttgaagcgaccgatggcgcagagatgcatcagatcctttctgaaaatgatatcaacctggtgattatggatatcaatctgccgggcaaaaacgggcttcttctggcgcgcgaactgcgtgaacaggcgaacgtcgcgttgatgttcctgacaggccgtgacaacgaggttgataaaattcttggtctggaaatcggcgcggatgactacatcaccaagccgttcaaccctcgcgagttaaccattcgtgcacgcaacctgctgtcccgcaccatgaatctgggtacggtcagtgaagagcgtcgtagcgtcgacagctacaaattcaacggctgggaacttgatatcaatagccgttcgctgattagcccgaacggtgagcagtacaaactgccgcgcagtgaattccgcgcgatgctgcacttctgcgaaaacccgggcaagatccagtcccgtgcagaactgctgaagaaaatgaccggtcgtgagttgaagccacacgatcgtaccgttgacgtaaccatccgtcgtattcgtaaacatttcgaatctacgcctgatacgccggaaatcatcgccacgatccatggtgaaggctatcgtttctgcggtgacctccaggagtaa

SEQ ID NO: 524334 - DNA, 486 bp, Stenotrophomonas maltophilia
atgaatggtaacaatatgaaatacaaggttttagtctttgcagcactggcgctgatggcagggcgcgtggcacaggcggagcaaattggctccgtggacaccgtgtttaaaatgtttgggccggaccacaaaattgtggtggaggcctttgacgatccggacgttaaaaacgtcacctgctatgtcagccgggcgaagaccggcgggattaaaggcggcctggggctggctgaagacacgtctgacgcggccatctcctgccagcaggttggtccggtggaattgagtgacaaaattaaaaacggcaaagcgcagggcgacgttgtattccagaaacggacctcgctggtgttcaaaaagctacaggtggtccgtttttatgacgcgaagcgcaacacactggcttatctggcttattccgacaaagttgtggaaggctcaccgaaaaacgcgattagcgcggtgccgattatgccgtggcattga

SEQ ID NO: 524335 - DNA, 870 bp, Stenotrophomonas maltophilia
atggatcaggctggaattattcgcgacctgctcacctggctggaaggtcatctcgaccagcctttgtcactggataatgtggcggcaaaagcaggctattccaagtggcatctgcaaaggatgttcaaggatgtcaccggtcatgctatcggtgcctatattcgcgcacgtcgtttatcaaagtctgctgtcgcgttgcgcctgaccgcgcgaccaatcctggatattgccctgcaatatcgcttcgattcacagcaaaccttcactcgcgcctttaaaaaacagttctcgttaacgccagcgctttatcgccgctcgccggactggagctcctttggtatgcgtccgccgctgcgtctgggcgagtttgcgatgccaaaatatgaaatcatcaccctgccggaaacgcacctggtcggcaccacgcagagctactcctgttccctggagcagatatccgagttccgccatcagatgcgcgttcagttctggcgcgaatttttaagccacgctccggcgatcccgccgattctgtatggcctgaacgaaacgtatccaagccaggaaaaagacgacgagcaggaagtgttctataccacggcgctgacgcctgacatggcgaacggttacattcatggctcgaagcctgtcgtgctggaaggcggcgagtatgtgatgttctcatacgaagggctaggaacgggcgttcaggagttcatcctgaccgtttacgggacctgcatgccaatgctgaatctgaatcgccgtaaaggtcaggacattgagcgctactatccggcgcaagatgcaaaaccggaagaaggccctatcaatctgcggatggaattcctgattccggtacgtcgttaa

SEQ ID NO: 524336 - DNA, 648 bp, Stenotrophomonas maltophilia
atgttacaggtataccttgttcgccacggtgaaacgcagtggaacgccgagcgacgtattcaaggccagtcagacagtcctctcaccgacaaaggtgtgcagcaagcgtggcaggtggcggagcgcgccagaacgctgggtatcactcacgtcatctccagtgatttaggccgcacgcagcagacggcacgcatcatcgccgatgcctgtggctgcgacgtgacccttgaaccgcgcctgcgcgagctggatatgggcgtgctggaaaaacgccctatcgatacgctgacggaaaccgaagaaggctggcgtcgcacgctggtgaacggcactgaagatggtcgcatccctgagggggaatccatgcaggagctgagcgtgcgcatgcatgccgcgctggccgagtgcctgaaactcccggcaggtagccgaccgctgctggtgagccacggtatcgcgctgggttgcctggtgagtaccattctggggctgccagcttacgccgagcgccgtttgcgtctgcgcaactgttccatttcccgtatcgactatcaggaaagtgcctggctggcatcggggtgggtggttgagatggcaggggacatttcgcatcttgatgcccctgcactggatgagttgcagcgttaa

SEQ ID NO: 524337 - DNA, 516 bp, Stenotrophomonas maltophilia
atgcaccatgttgtctctgctaccaccaatcctgccaaaattcaggcaattctaagggcatttgaagagatcttcggcgaaggatcctgccatattgacgccgtcggcgtcgagagcggtgtgccggaacagccgtttggcagcgaggaaacacgcgctggcgcacgaaatcgcgtggcgaatgcaaaagccgccgcgccagatgctgacttctgggtcgcgattgaagcaggtatcgacgaaggggcgaccttcagctgggttgtcatcgaaagccgcgagcagcgcggcgaagcgcgttcagccacgctgccgctgccggaggtcatactggagaaagtccgcgcgggtgaggcgctggggccggtaatgtcgcactacaccggcattgatgagattggtcgtaaagagggggcgattggcgtctttaccgcgggcaagctcacccgttcgagcgtttaccaccaggccgttattctggcgttaagtccgttccataacgcgatttatcgttaa

SEQ ID NO: 524338 - DNA, 330 bp, Stenotrophomonas maltophilia
atgacccagcattccccgtattcctcggccatggccgaacagcgtcatcaggagtggcttcgttttgtggagttgctccgccagtcttacgacaaagatctgcatttacccttgctacagctgatgctgacgccagacgagcgtgaagcgctgggtacacgggtacgcattattgaggaactgctgcgtggcgaaatgagccagcgtgaactgaaaaacgagctgggcgcgggcatcgcgacgattacccggggttcaaacagcctgaagtcggcgccggttgaactgcgtcagtggctggaagcggtattgcttaaaaacgccggatga

SEQ ID NO: 524339 - DNA, 1938 bp, Stenotrophomonas maltophilia
gtggaaaaagccaaacgggtggtctggcgtctgctggctgccagcgtatgcgtaatggcggtaagccaggcggtgcatgccgattcactggatgaacaacgtaaccgctatgcccagattaagcaggcatgggacaacaagcagatggataccgtgcaggcgctgatgccgacgctgaaggattatccgctgtatccgtatctggagtatcgtcagatcactgatgatctcatgaatcaaccgaccgtcaccgtaaataacttcattcaggcgaacccgacactgccgcctgcgcgcaccctgaagtcacggtttgtgaacgagctggcccgtcgcgaagactggcgcggcctgctggctttcagcccggataagccgggcgcgacggaagcgcagtgtaattactattatgcgaaatgggcgaccggtcagcaggaggaagcctggaccggcgcgaaagagctgtggttgacgggcaaaagccagccaaacgcctgtgacccgctgttcagcgcctggcgcgcctcgggcaagcaggatccgctctcttacctggaacgtattcgcctggcgatgaaggccggtaacacccggctggttaccgtgctggcgggccagatgcccgcggattatcagaccattgcctctgccgttatcagtctggcaaacgatcccaataccgtgctgacgtttgcgcgtaccaccggcgcgaccgattttacccgccagatggcggcggtggccttttccagcgtggcgcgtgaggatgtggaaaacgcccggctgatgatcccgcagctggtgcaggcccagcagcttaatgacgatcaaacccaggaactgcgcgatattgtggcatggcgactgatgggaacagatgtcaccgacgaacaggcgcgctggcgtgacgacgcggtaatgcgttcaaactctgtctcgctggtggagcgtcgcgtgcgcatggcgctgggaacgggcgatcgtcgtggcctcaatacctggctggcgcgcctgccgatggatgctaaagagaaagatgaatggcgttactggcaggcggacctgctgctggagcgtggtcgtgaagacgaagccaaagcgatcctccactccctgatgcagcagcgcggcttctacccgatggcggcggcgcaacgtctgggtgaggagtacaccctgaagatcgacaaagcgccagccaacgcgaacccggcgctgacgcagggtccggaaatggcgcgcgtgcgcgagctgatgtactggaatctggataataccgcgcgcagcgaatgggccaacctggtcaccagccgtaccaccgacgagaaggcgcagctcgcccgctatgcgtttgataatcgctggtgggatctgagcgtgcaggcgacgatcgccggcaagctgtgggatcatctcgaagagcgtttcccgctggcttataaggatctgttcgatcgctacaccagcggcaaagatattccgcaaagctacgcgatggccattgcccgtcaggaaagcgcctggaacccgaaagtgcgttcgccggtgggggccagcggcctgatgcaaattatgccgggcaccgcgacgcacacggtgaagatgtttaatatcccaggctacagcagcccgtcccagctgctggatccggagaccaacatcaacatcggtaccagctacttgcagtacgtctatcagcagttcggtaataaccgcatcttcgcgtcagccgcgtacaacgccgggccaggccgcgtgcggacatggcttggcaacagcgcagggcgactcgacgccgtggcgttcgtcgagagcattccgttctcggaaacgcgcggatatgtgaagaacgtgctggcgtatgacgcctactatcggcacttcatgggggagaaagatgccctgatgagcgatgccgagtggcagagacgttactga

SEQ ID NO: 524340 - DNA, 1668 bp, Stenotrophomonas maltophilia
gtggctcaattcgtttataccatgcatcgtgtcggcaaagttgtcccgccgaaacgtcatattcttaaaaatatctcgctgagctttttcccgggcgcaaaaatcggtgttctgggtctcaacggtgccggtaagtccaccctgctgcgcatcatggccggcatcgatacagacatcgaaggtgaagcccgtccgcagcctggcatcaagatcggctacctgccgcaggaacctcagctgaacccggaacacaccgtgcgtgaatccgttgaagaagcggtatccgaagtggttaacgccctgaaaggtctggatgaagtgtatgccaaatacgccgagccggatgcggacttcgacaaactggccgctcagcagggcaaatttgaagagattatccaggcgcacgacggtcacaacctgaacgtgcagctggagcgcgcggcagatgccctgcgtctgccggactgggatgcgaaaatcgcgaatctctccggtggtgaacgccgccgcgtggcgctgtgccgcctgctgctggaaaaaccagacatgctgctgctcgacgaaccgaccaaccacctggatgcggaatccgtggcctggctggagcgcttcctgcacgacttcgaaggcaccgtggtggcaattacccacgaccgctacttcctcgacaacgtggcgggctggatcctggagctggaccgcggcgaaggtattccgtgggaaggtaactactcctcctggctggaacagaaagatcagcgtctggcgcaggaagcgtctcaggaagcggcgcgtcgtaagtctatcgagaaagagctggagtgggttcgtcagggcgcgaaaggccgtcagtccaagggcaaagcccgtctggcacgcttcgaagagctgaacaacaccgaataccagaagcgtaacgaaaccaacgaactgtttatcccgcctggagcacgtctgggggataaagtggttgaagtgaccaacctgcgtaagtcatacggcgaccgcctgctgatcgacgatctgaccttctccgtaccgaaaggcgctatcgtgggcattatcggtccgaacggcgcgggtaaatccaccctgttccgcatgatgtccggtcaggaacagcctgacagcggctctatcaccctgggtgagaccgtgaagctggcctccgttgaccagttccgtgacgcgatggacaacagcaaaaccgtgtgggaagaagtctccggcggtctggatatcatgcgtatcggcaacaccgagatgccaagccgcgcctatgttggccgctttaacttcaagggcaccgaccagggcaaacgcgtgggcgagctgtctggcggtgagcgtggtcgtctgcacctggcgaagctgcttcaggttggcggcaacgttctgctgctcgatgaacctaccaacgacctggacatcgaaaccctgcgcgcgctggaaaacgccctgctggaattcccgggctgcgccatggttatctcgcacgaccgctggttccttgaccgtatcgcaacccacattctggactaccaggacgaaggtaaagtggagttcttcgaaggtaacttcaccgaatacgaagagtacaagaaacgcacgctgggcgcagacgcgctggagccgaagcgtattaagtacaagcgtattgcgaaataa

SEQ ID NO: 524341 - DNA, 900 bp, Stenotrophomonas maltophilia
atgtttaaacagctacaggatatggcgctgtttgcgctggtggctgagatgggcagctttactgcggcggcgcagaaggctgaactgccgaaatccagcgtcagccagcgcattagccagctggagcagcaggtggggatccgcctgcttaaccgcacgacgcgcagaataagcctgacgtttgcgggcgagcactatctggtgcactgccgcgagatgctggcggccagcgagcgcgcggagtatgccattcagcggctgcgagaaaaccccagcggacggctgaggatcacctgtccggcagggattggcgcgacgctgctggcgcatatgaatgccgagttccagcttcgctaccctgacgtgtcgctggatgtatcaatttcagacgatgtggtggatctggtcgagtcgggctttgacgtggcgctgcgcaccggcaaaccgcaggattcttccctgattggtcgcatgattgggcactgtccgcgctacatgctggcctcgcctgactatctggcgcgtcgggcgccgttaatccatccccgacagctggtggatcaccgctgcattacgcaccgggcatggtcggagtggcttctgcgaagcgagagtgaggattaccgctacctgccggataacgcccacatgacggataacctggtgtacgcccgagaatgcgccattgccggggcggggatcacgctgttacccgcattcctgctggaagataaaattgaaaagggcgcgctggtaaaggtgctaccggagtggcgcgttgaggggaacgatctctggctggcctatccgagccgtaagctcaattcgcctgcgctgatgagatatatcgactttgcgatgcagtttgatgaggtgaagcggtattacgtgggcaaataa

SEQ ID NO: 524342 - DNA, 1002 bp, Stenotrophomonas maltophilia
atgtctgttaaagccattgccgttaacccagaaaatccctccaccttcgttgaaattaccccgccgatgccgcagcccggcgagtacgatctgctggtggaggtgaaagccgtctccgtaaacccggtggataccaaagtacatgcaggcattgccaaaagcggactgaaggagccgcgcattctcgggtgggatgccagcgggatcgtcaaagccgtcggggctggcgtcaccggattcaaaccgggtgacgaagtatggtacgcgggggatatcacccgaccgggcagcaataccacgcaccagcttatcgatgcgcgcattgtcgggcacaagcctgcaaaccttggctgggcctctgcggcagcactgccgctgacggcgctcaccgcgtgggaaggcctgtttgaacggctgaagattcaggatgccgacgcagataaaacgctgctgataattggcggcgcgggtggagtcggatcgctggcgatcccgtttgcgaagcacaacagcaaggtgaagatcgtcgcaaccgcctcacgagaagattccacccgatggtgtcgcgatcgcggggctgacgttgtcgtagattaccgcgacctgaagggtgaactggcgaaacaggggctcacctttgtggattacatttttatcctcaacgacaccgacgggcactgggatgcggtcagcgatctgattgcccctcagggacacatttgttccatcgttgaaaatgcgcatccgctaaaccaggacaagctgaagtccaaatctgccgccctgcactgggaatttatgtacacccgcagcatgtaccaaaccgcggatatggcgcgccagggcgagattttaaatgaggtggcgaagctggtggataacggcgtggtggaaagctcgctcagcgaaacgctgcacgggctgagcgtggaaagcattaccgaagcgcaccgcatggtgctggaggggcatatgcgtgggaaagtggtggttgagttctga

SEQ ID NO: 524343 - DNA, 1233 bp, Stenotrophomonas maltophilia
atgtcatcatttgactacatcaagaccgctatccgccagaagggctgcacgttacagcaggtagcggacgccagcggcatgaccaagggctacctgagccaactgctgaacgccaaaatcaaaagccccagcgcgcagaagctggaagcgctgcaccgttttctggggcttgaatttccgcggatgcaaaagaacattggcgtggtgttcggtaagttctacccgctgcataccgggcatatctatctgatccagcgcgcctgtagccaggtcgacgagctgcatatcatcatgggttatgatgaaacccgcgatcgccagctgtttgaagacagcgccatgtcgcagcagcccaccgtgccggaccgcctgcgctggctgcttcagacctttaagtatcagaaaaatattcgtattcatgcctttaacgaagagggcatggagccgtacccgcacggctgggacgtgtggagcaacggcatcaaagcgtttatggaagagaagggcattgcgcctaactggatctacacctctgaagagtccgacgcgccacagttccgcgagcatctgggtatcgaaaccgtgctgatcgatcctaaacgcacctttatgaacatcagcggggcgcagatccgcgagaacccgttccgctactgggactacattccgaccgaggtgaagccgttcttcgtgcgtacggtggcgatcctcggcggcgagtcgagcgggaaatcgacgctggtgaataagctggcgaatatcttcaataccaccagtgcgtgggagtatggccgcgattacgtcttctcacacctcggtggtgacgagatggcattacagtattccgactacgataaaatcgcgcttggtcatgcccagtacattgattttgcggtgaaatacgccaataaagtcgcgtttattgataccgatttcgtcaccacgcaggcattctgtaaaaagtacgaggggcgcgagcacccgtttgtgcaggcgctgattgatgaataccgctttgatctggttatcctgctggaaaacaacaccccatgggtagccgacggcatgcgcagcctgggcagctcggtggacaggcgtgagttccagaccatgctggtggagatgcttaacgagaacaacgttgagtttgtgcatgtggaagagtcggattacgacacccgtttcctgcgctgcgtcgagctggtgaaagagatgatgggtgagcaggggtaa

SEQ ID NO: 524344 - DNA, 1386 bp, Stenotrophomonas maltophilia
gtggcgaaagctccaaaacgcgcatttgtctgtaatgaatgtggtgcggattatccgcgctggcaggggcaatgcagcgcctgtcatgcctggaacaccatcaccgaagtgcgtggtgtggcggcttcgccgagcgtggcccgcaatgtacgcctgagcggctatgcgggcaatgcaggcgtgtcgaaggtacaaaaactttcggatatcagccttgaggcgctgccgcgcttctcaaccggattcaaagaatttgaccgcgtgctcggcggtggcgtagtgccgggcagcgctattctcatcggcggtaacccgggcgcgggtaaatccaccctgctgctgcaaacgctctgcaagctcgccgaacagatgaaaaccctgtacgtcacgggcgaagagtcactccagcaggtggcgatgcgcgcgcaccgcctcggtctgccgaccggcaatctgaatatgctctcggaaaccagcatcgagcagatctgcatgatcgccgaagaagagcagccgaagctcatggtgatcgactccatccaggtgatgcacatggcggacattcagtcgtcaccggggagcgtggcgcaggtgcgtgaaacggctgcgtacttaacgcgctttgccaaaacgcgcggcgtagcgatagtgatggtgggccacgtcaccaaagacggctcgctggccggcccgaaagtgcttgagcactgtatcgactgctcggtgatgctcgacggcgatgcggattcccgttttcgtaccctgcgcagccataaaaaccgcttcggcgcggtgaatgaactgggcgtgtttgccatgaccgagcaggggctgcgcgaagtcagcaacccgtcggccatcttcctgagccgtggcgacgaaattacgtccggtagttcggtgatggtgctgtgggaggggacgcgtccgctgctggttgaaattcaggcgctggtggatcactcgatgatgggtaatccgcggcgcgtggcggtcggtctggaacagaaccgcctggcgatcctgctggcggtgttgcaccgtcacggcggcctgcaaatggcggatcaggacgtgttcgtcaacgtggttggtggggtgaaggttacggaaaccagcgcggatctggcgctgttgctggcgatggtctccagcctgcgcgacagaccgttgccgcaggatctggtggtatttggcgaagtagggctggcgggcgaaattcgcccggtgccgagcggtcaggagcgtatctccgaagcggcaaaacatggcttccgccgcgcaattgttccggccgccaacgtgccgaaaaaaatcccggaagggatgcaggtttttggcgttaaaaaactcgcagatgcgttaaatgtctttgacgacttataa

SEQ ID NO: 524345 - DNA, 969 bp, Stenotrophomonas maltophilia
atgccgaacattacctggtgcgacctgccaacggatgtctctttatggccaggattgccgctctctttaagtggcgatgaggtgatgcctctcgattaccacgctggccgtagcggctggctgctgtacggacgcggcctggataagcaacgcctcacccagtatcaaactaaactgggcgcagcgatggtcatcgttgcggcctggtgcgtggaagattatcaggttattcgcctggcgggttccctgacgcagcgcgccacgcgtctggcgcacgacgccgggctggacgtagccccgctcggcaagatcccgcatctgaaaacgccgggcctgctggtgatggacatggactctaccgccattcagatcgaatgtatcgacgagatcgctaaactggcgggcagcggcgagctggtggcggaagtcaccgagcgcgcgatgcgcggcgagctggatttcaccgctagcctgagacaacgcgtggcgaccctgaagggagccgatgcgaacattttgcgtcaggtgcgcgatgaactgcccctgatgccagggctgacgcagctggtgctcaagctggagacgctcggctggaaagtggcgattgcctccggtgggttcaccttctttgccgattacctgcgtgacaagctgcgtctgaccaccgtggtggcaaacgagctggagatcatggacggaaaactcaccggacaagtgattggcgacatcgtggatgcgcagtacaaagccaatacgctgacgcgtctggcggagaaatacaccattccggtcgaacagaccgtcgccatcggcgatggcgcgaacgatctgccgatgatcaaagttgccggactgggtatcgcctaccatgccaagccgaaagtgaatgaaaagacggaagtcactatccgtcatgctgacctgatgggcgtgttctgcattctctccggcagcattaatcaaaaatag

SEQ ID NO: 524346 - DNA, 645 bp, Stenotrophomonas maltophilia
atggctcgcgcaaaactgaaattccggcttcatcgcgccgtgattgtcctgatctgtctcgcactattagtggcgcttatgcagggggcatcctggtttagccagaatcaccaacgacagcgtaacccacagtttgaagaactggcccgtacgctggcgcgccaggtgacgctcaacgttgcgccgtctatgcgcaccgaaacgccggatgacaagcggatagcgcaggtattgcgccagcttacggaaaacagccgcattctggatgcgggcgtgtacgatgaacagggcgacctgattgcccgcgcgggtgagcatgtcgacgtgcgcgacaggctggcgctggacggcaaaaaagctggcggttatttcaatcaacaaatcgttgaacccattcagggcaagaatggcccactcggctatttacgtctgacactcgacacccacaccctgccaaccgaagccaaacaggtggataacaccaccaatattttgcgcctgatgctgctgctctcgctggcgattggcgtggtactggcgcgcacgctgctgcaaggcaagcgcacccgctggcagcagtcgccgttcctgttaaccgccagcaagtcagttcccgaagaggaagagagcgagaagaaagaatag

SEQ ID NO: 524347 - DNA, 1017 bp, Stenotrophomonas maltophilia
atgtcgacgttacgcctgcttatctctgactcttacgatccctggtttaatctcgcggtggaagagtgcatcttccgccagatgcccgccacccagcgcgtcctgtttctctggcgcaacgctgatacggtcgttattggccgcgcgcaaaatccgtggaaagagtgtaacacccgccgtatggaagaggacaacgtccgcctggcgcgccgcagcagcggcggcggtgcggtgttccacgatctcggcaacacctgctttacctttatggcgggcaagccggaatacgacaaaaccatctcgacctccattgtgctcaacgcgctcaattcgctcggcgtgacggctgaagcctcgggtcgtaacgatctggtagtgaaaacacctgaaggcgaccggaaagtgtcaggctcagcctaccgcgaaacgatggatcgcggattccaccacggcacattattgctgaatgccgatctgagccgtctggcaaactatctgaacccggacaagaaaaagctccaggcgaaaggcattacctccgtgcgcggtcgcgtggcgaatctggtggatctgctgccggggattactcatgagcagatttgcgacgcgatccgtgaagccttcttcgaacattacggtgagcgggtagaagctgaagtgatctcccctgacaaaacaccggacctgcccaacttcgcggaaacctttgcgcgccagagcagctgggagtggaacttcggtcaggcaccggcgttttcacacctgctggatgagcgatttacatggggcggcgttgagctgcactttgacgtggagaagggccatattacccgcacgcaggtctttacggatagtctcaatcctgcaccgctggaggcgctggccgcacgtttacagggctgtctgtatcgggcggatatgttgcagcaggagtgtgatgcattgattggggattttccggagcaggaaaaagagctgcgggatgtatcggcgtggattgctcaggccgtgcgctaa

SEQ ID NO: 524348 - DNA, 2505 bp, Stenotrophomonas maltophilia
atgcattctctcggcccacgcaatttaccccgcatttatacgctcgcgatgcttgcgggtgcggtcacgtctggcattcatgtgcgccgggcacaggccgatgagtacttcgatcctcaggcgctggagatcacagcagatcagcagcaggctagcgacttaagctatttttcccgacaaggcggtcagcagccgggacgttatcgtgtcgcggttgttgttaaccagacgcagcgggatgagcgcgaaattgcattcgttgataccgggggaacgctctcaccagtcctcaaccaggcgtacctcaagagacttggggtaaacatcgcggccttctcttcgttcgatgcgctgcatgacgaggagacatttacggacatcggcaaatatattcccgatgcgtcgacgcattttgacttcacccatcatcggctggttttcagcattccgcaggcagccatgttgcaaaaaagtgccgattatattcctcccgaacagtgggacgacggcatccccgctgcttttgtcgattacaatcttacgggctcgacaaccaacatcgacaatattcatgataacagcagctatctgagcctgcgatccggtatcaacctgggggcgtggcgtttacgcaattacgccacgtttgaatatggtaatacccatcactggcagtctcagggaacatccctccagcgggccattacgccgctgaagagcgcgttaacaatagggaatgcctacacgtctggcgaggtttttgacagttttcagtttacggggcttcagcttgcctcggatgagaatatgctgccggacagccagcgcggtttcgcgcccacgatccgcggggtcgctcacagcaatgcccgcgtcagcgttcgccagcacggttacaccatctatgaaacctatgttgcgcctggcgcatttgtcattagcgatctcttccccacttcgcaaagcggcgatcttgagatcacggtccatgaaagtgatggcagcgaacgcacgttcacccaaccctactcctcggtggcctttatgctacgggagaaacgactgaaattcagcgccagcgccggacggtataacagccctgacgccgagggcgacaccccgccgtttgttcaggcctccgccttttacggattgtcttcaagcctgacgctgtacggcggagcggagctttccggccactatcaggctctcgcgctgggattaggtaaagattttggccggtttggggcactgggtgtggacaccgttgcggcgaaagcacacctcagtgatgacaggctggccctcgggcagcaaatacgcgctcagtaccaaaaaaatctcgctgaaacgaacacgtcgctcaccctttcgaccagccattacacgacgcatgacttttacagtttcagtgaagcaaatgatgacagcgatccagaccagcacgtgcataaccggcgtaaccgcacacagttcagtttgacgcaggatctcggtgcgctgggcaatatcagcgcatccttttaccgtcaggattactggaacgcctcggcggtcgatcaaaccgtccatcttggctattacgctaactacaaaggggtgtcgttgagtgttgggtattatctcacccgctcaagcgctgatgatagcgacaacgaacgggcgataaaccttagcatcagcgtcccactcagccgctggctacccggcgcaacaaccagctacagcctcaacaataaccttgatggccatactacccggcaggtttcgctgtatggtacggcgctggcccacgatcgcctgaactataacctccagcagggcttcgacaaccaggccaaaaccgcgaacagcaaccttgcgctggcttatcacggcggttatggcagcgccagtctcgggtacagccacgatcgctatagcaaccgcgtgaactacggcgcggcaggcggcattgtggcaacacagtatggggtgacgttgagccaaagccttggggataccctggcgctgatccgcgctgacgaggcgtcggacgttcaggttgaaggggcgaccaatgttcacaccgactcccgaggttatgccgtgatgccaaccttatcggcgtatcacaaaaacaccatttcgctggataccgaaacgctggcagaaaatgtcgatctggaccagaacagcagaacgattgtgccgaccagcggcgcggtcgtcctggcgaattaccatacccacgtgggcatcagaacgctcatcacccttacggcacacgggcgcccgcttccatttggcgccagcgcgtatgtctcgaacgggacgtctgcgaaatcaagcgtcggcatcattggcgaagcaggacaggtctatctcagcggcgtgccgctacgcgggaccttgcatgccagctggcggcagaaaggccaggatatgcgctgtagcgccccattacgccttccggataccgctggccgcactccggtcacgcttctgaagcttcagtgccaataa

SEQ ID NO: 524349 - DNA, 1074 bp, Stenotrophomonas maltophilia
gtgaacaatatcaaccgtttaatcaatctcctgatgctcgcttttttgctgattcacgctacggcaagggcgtctcagacctgcccgccgatcatgggcgatgcggtcattaactttcaaaactactcgatcactgataacccctcgatccctccggggtcgatgctttcaggcgctatcctgggccaggaaaaccgctcgttttataactgtcctgagggaaccggcccggtaacgatgcgctttgtggccaataacgccttaaccgtagcgcccgtcagcggcgtggcgccgaacggtacgggcgccccggcctccgtttatgacgtgccagatattcccggcgtcgggtttgcggtgggcattcgcgaaaccacgcactgtgcagctgaacccgtgcattacatcgcctcgggggatgacagcgttgcgatttgcagcacaaacgatccctcgcaaatggcgacccagttcttcgtcgtgttttataaaaccgcgcaggagattgtctatgaacagccgaacagcgggcaaattcgcgcaggaacgctgattctggaggatactaacggcgcggtgatatctgaagctggcgtgacggtggaagtcgctgccgccgacctgaaagtgcataaatcgagctgttatatctcggataacaacatcaccgtcaatatgggacaaagtagcgtaagcgatctcaacaaaggaatggatggggataaacaccgcttcatcatccctctggtctgtgacgcatcccaaacggcagcggtgaagatcgggttctttggtccgactgaaaaagacgcgcagaatcacgatgtgctggcgctaagtcaacaggagagcgccgctaccggcgtggggatccgcattctgtatggcgataactacggtgccgccagaggtacaaccgttcctctcaacagcaccggtgtcgaaccttttgccaacgctgcccggcagaccgcgttttccctggattacgacgcacaatatgtgcgcaccgaaacccaggccaccgcggggctggcagacagcctggcgacatttagtctgatatacaactaa

SEQ ID NO: 524350 - DNA, 996 bp, Stenotrophomonas maltophilia
atggaattaacgcaacatcaggctgacgccttcgccagaatgccgttgacctatttacgtcaggaatacccgaaccacattatgcatctgctcaacgatgacggcgacgttctgccgcctcgcgagctgcacccgatcttttacggctgttttgactggcactctgcggtgcacggctactggctgctgctgcgctgcctgcgtctctggcccgaactgccgtgtcgggaagagatcatcactctcttcgaagaacacctgaccgacgagaaggtggcgaaggagttggcctattttaccgcgccgttccgcgcgtcgtttgagcgaccttatggctacggctggctgctggcgctggcccaggagctgaaacaatcgtcactgccgcaggcggagcgctggtaccagacgctgcaaccgttaacgcgggatattcgccagcggctggtggattacctcagcaagcttacctatccgatccgcgtcgggacgcactacaacacggcgtttgcgctcgctctggggctggattatgcccgggcggtgaacgatgacacgcttgagcgcgccatcctggacgcggcaacgcggttttacctcgcggacacgcattatcctgcgcattatgagccgggtggcgacgagtatatctccggagcgctgaccgaggccctgctgatgagtaaggtggtggaggatttcccggcctggttcgatgcgtttctgcctgaagtgggcgccatttctgcgctcatgaacccggctgaggtgagcgatcgcaccgacccgaaaatcgcgcatctggacggtctcaacctcagccgtgcctggtgtatgaagcacattgcccgcgccctaccggaaaatcatctcgcccggaagccattacgcgatgccgttgcgcgccatctctcggcaagcgtggagcatgttgtcggcagtcactacagcggcgggcactggctggcgagttttgcgctgctggcactggagtag

SEQ ID NO: 524351 - DNA, 987 bp, Stenotrophomonas maltophilia
atgatgacccttatcaccattaaccgcgtgtactacctgatcggctttgtcgtgatgctgctggttgtgatgacccttcgcgatcgcgctaacccgaaacgctataccaccgcgctgttctggtatctgtttggcgggatcttcctgtttggcgatctgatggtgcaggagctgggtaagtcgctggcgtatcgcattattggcggcgccgttatcgtgattgcgctactggccggtttcgggctggtcgggaaggggcattataaaatgtccaccgaggaggagcgggttacctcatcacaccggctgaaaaactggctattcttgcccgcgctgatgatcccggtggtgacggtcatcgggacgctgtttctgaaaggcgtgtcgattggcggtgtctatctgctcgaccagaagcagcttacgctggcggcgctgtgcgtggcctgtgtggcagctatcctcaccggctggtggctgacaaaaggtacgccgctgcatgcggttcgtcagtcgcgtcggctggtcgataccattggctgggcggtgatcctgccgcagatgctcgccatgctcggcggggtgtttgtggtggctaataccggcgaatcggtacaaaaggtggtcagcctgtttgtgaacccggacagccgcttcatgctggtggtcatttattgcgtggggatggcgctgtttaccatgattatgggcaacgccttcgctgccttcccggtgttaagcgccggtatcgctctgccattcctgattaacgtccatcacggtaacccggcaccattgctggctatcggcatgtacgcaggctattgcggcacgctgatgacaccgatggccgccaacttcaacatcgtgcccgccgcgctgctggagctaaaagacaaatatcaggttatcaagatccagatcccgaccgcgttaaccttgctggtggtgaacgtgttcttaatgtatttcctcgtgtttcgctaa

SEQ ID NO: 524352 - DNA, 723 bp, Stenotrophomonas maltophilia
atggacagttctacactgttgccacttatcgggattccggtggtggttattggttttgcactgcgtttcaacccgctgctggttgtcgtggtggcggggctggcaacgggcctgctggttggcatggatttcggtatgctgctggaaacctttggcgaaaagttcgtgaatagccgatcgctcgccactttcattctgatcctgccggtgattggcctgctggagtattacgggctgaaagagcgcgctcaggcctgggtcgcgaagatcgccagcgctacctcggcgcgtatcctgatgctctactttgttgcccgcgaagggacggctgcgctgggcctgatgtcgcttggcggccacgcacaaacggtgcgtcctctgctggcgccgatggccgaaggggcggccctgaatgaatacggcgaactgccgcagactatccgcgacaaaatcaaagcccatgccgccgcctgtgacaatatcgcggttttctttggggaagatatctttatcgcctttggcgcggtactgctgattgatgcgttcctgaaagagaacgggatcgaggggatcgaaccgctgcatatcggcctgtgggccattccgaccgctattgcggcactggtcatccatatgacgcgtctgctgcgcctcgacgccagcattcgtcgcgacgtgatggcctggagagcagagcagggtacgcaggagatcgcaccatga

SEQ ID NO: 524353 - DNA, 549 bp, Stenotrophomonas maltophilia
atgacgacaaagaaaacgaaaacagcgttaaaccacgacgatattgcggacgggcgtatcgtctcctcccgccatctcgtctcagagcgatgtgccgaactgtcggagctggaatatgcgctgatcatgaccagcaatgcgtttaacaaatggatggtgcgctgcatgaccgcagcaggtgaaccggatatgggcgctttcgacgtctcgcttctgcaccacgtaaaccaccgcaaccgcaagaaaaagctggccgacatctgctttgtgctgaacgtggaagatacccacgtggtgacgtatgcgctgaaaaagctggtaaaggcgggttacgtcaccagtgaaaaagcggggaaagaactctttttctcgacgacggaggaaggcaaagcgctgtgcatgaagtaccgggaggtacgggaagcctgcctgatcaacattcatgcggaaagcggcattccgggcgcgtcgattggcgagaccgcgcaattactccgcgcgatctcctccctgtatgataccgccgcacgcgcggcggcctcgctttaa

SEQ ID NO: 524354 - DNA, 2076 bp, Stenotrophomonas maltophilia
atgccaaaggatacaacgtttgaaattcgggccggtcatggccaacagttgggcgcaaattatgacggaaaaggggtgaacttcgccctgttttccgcccacgcggagcgggtggagctgtgtctgtttgatccttcgggaaaaacagaaatcgcccgtctggaactgccggaatatacccatgaggtctggcacggctatgtgccggacctgaaaccgggggcgctgtatggctaccgcgtttacggcccctacgatccggagaagggtcaccgcttcaaccccaataagctgcttattgacccctatgcccgtgaactggtaggtgaaattgagtggaacgatgcccacttcggctatgagctgggacacgacgagctggatctcagttttgacacgcgagacagcgcgccgtttacgcccaaatgtaaggtcatcgaccccaatgccgttgactggcaggactcacgcccgcccgatatcccgtggccgcataccgtggtctatgaaagccacgtaaaaggctttacccagcttaacccggctattccgcctgaactgcgcggtacgtttgaggggatggggcataaagcctcggtggagtacatcaaaagcctcggcattacctcggtcgagctgctaccggttcactggttccctgacgatcagcacctgctcgatcgcggcctgaaaaacttctggggctataactcgctcggtttctttgcgccagcgtcccgctattacggcccggcggggatccagggtttccgcgacatggtgcgtgcttatcatgacgcgggcatcgaggtgatcctcgacgtggtctataaccacacggcggagggcaacgagctgggaccaaccctgtcgtttaaggggattgataacttctgctattaccgcaccatgccggatcagcaccggtattacatcaacgacaccggcaccgggaacaccgttaacacctcgcacccgcgcgtgttgcagatggtcatggactccctgcgttactgggcggaatcgatgcagattgacggtttccgctttgacctcggaaccattctcggacgcgagccggagggattcgacccgcgcggcggcttctttgatgccgtgacccaggatccggtgctgtcgaagctgaagcttatcggtgaaccgtgggatatcggcccaggggggtatcaggtggggggcttcccgccaggctggggcgagtggaacgacaaataccgcgacacggtacgtgaatactggaagggagataacgtttctaacgattttgccgcccgtctgttagggtccggtgatttgtacgatcagcgaggacgtcgtccgtgggccagcgtcaattttatcaccgcgcatgacggctttacgctgaacgacctggtgtcctacaacgagaagcataacgccgataacggggaagataataacgacggacataacgataaccgatcgtataactacggtgaagaagggccgacggagaaccccgatatcatcgccacccgcgagcggcaaaagcgcaacttcctcaccacgctcttcttctcccacggcacgccgatgctgctggcaggtgatgagtttggccggacgcaaaagggcaataataacggctattgccaggacagcgagatctcctggataaactgggaaggactctctgaaaacgacgagaagctgcgcgactttacccgtcggttgattgctctgcgcgctgagcagccgctgctgcgccgtgcaaactggcgcgacgggcttgagatccgctggtttaacgccggtggcggaccgcagcagtctgagcagtgggacgagggttccacccttggtcttgccatcagccgtccggatcttgagcaggaagagggcatctggcacgacgtgctgatgctgtttaacccgtttgaaggcacggtgccattccagatcccgcagtttggcgaagggggctgggtgctggagctttcgacggcggatgatgcccccacaggggaaatcatcacggaatccgtcgattatgaactggccgggcggagcataacgcttttccgccgtccttaa

SEQ ID NO: 524355 - DNA, 2469 bp, Stenotrophomonas maltophilia
atgatcccttcctctacttaccgaattcagtttcgcaacggcatgaccttcgatcgcgtggtagacctgattccgtatatgaaagacctcggaattagccatctttacgcgtcgcctgttttcaccgcaaccacggattccacccacggctatgacgtgaccgaccccaacgaaatcgacccggcgattggcgggcgggaagggtttgaccgcatggcggcagcattaaagcatgcgggaatgggcctgattctggatatcgttcctaaccatatgtcgacctcgctggaaaaccgctggtggcgcgatgttatcgagcatggtcggcagagccgctatgcggcatattttgatatcgactggtcccgaccgctgacgttgccgtttcttggcgacacctttgaagccgagctggagcggggggctatcaccctgaaacgtgacagtgtcactgacagcgcggcgttggtttactatgataccgcctatccgcttaatcccggcacgtatgccgaaggcaagagcatcgctgagatccacgaggcgcaaagctggcggctgatgtcctggcgggaagcgccgaaacagctttcatggcggcgcttttttgaaatcaccgggctggtcggcgtgcgggtagaggatgaggcggtattcgcagacacgcaccgcctcatccttgagcttgtccacgccggggttgtcgacggcctgcgcattgaccatgtggacgggcttgccgatccgctgggctatttgcagcgactacgtgcggcgaccggaccggattgctacatcacggtagagaagatcctcgccaaaggggaacagcttcctccggagtggcccatctcaggtactacgggctatgagtttatcgcctccctggcggaagtgctggtggatgataccaacctctcgcggctggagacgctctacgacgagacactgggtacgaccgttgacaggcaggcggaacttcgcaacgccaaaggcctgatgaccgatcgtaattttgaaggtgaatttaccacgctgctcaaaatagccagcgagctggccgggcataacggtgccgaagtggagcatgaggatatccgccatgccttgcgcgagctgcttatcgcgtttccggtgtatcgcacctacggcaccgctgaggggctgacgccaccggatgtggcgctgctcagccgcgtggtcgccagcgtcaacacctctgaacccgctctgagccttatcgtgcgtattcttaccggcgatctgccggcgcatgaccacgcactggcctcgcttttccgcacccgttttcagcagctgaccgggccgctgatggcgaaatcggtagaggatacgctgttcttccgccataacctggagctggccctgaacgaagtcggcgccgacccgacgccgcgcgcgttttcactttcccgttttcatcaggagatgcgcattcgacttacccgtcagcccgatgcgctgctgggaacttccacccacgacaccaaacgcggcgaggatgcacgagctcgtctgtatacgctgacggaagcgccagatctgtggggagaaaatctggcgcgctggcggcagatgaaccagacgcaggtccgattcctcaacgatggcaccgcgccgaacgccgccgacacctggatgatcttccaggcgctggcgggcgtctggccagcaaccctgtcgcctgaggatcgtgatggccttaagtcactggaagagcgtttcctcggctttatcgagaaagccctgcgcgaggccaagcagcgtaccgactggatcgacagcaacgaaggttacgagagcgtggtcctggactacgtgcgccatctgctttccccggataacaccctgttcctgcgtgatttcagtgccgcactccagccgtttattcgggctgggttaatgaacagcctgagccagacggtgatcaaactgactgcgcctggcgtaccggacatctaccagggcagcgaggggcttaacttcagcctcgtcgacccggataaccgccgcgaaccggatttcgccgcactgtcggaaaacctcagcgtagcggatggcaccgtttttaacgatgcgcaacgctggcgagacggcagcgtgaagcagtacgtcaccgccacgctgttacggcttcggccacattaccccgcgcttttccgctacggcgactggctgccgctgaaggtaaccggcgagcgggaggagaatctgatcgtttatgcccgcatcaaagatgacgaggcgctgatcgtcgccgtgccgcgcctggtgtttgacgtcaccgataatgcgatgctgtgggccaatactaccgtggccataccccaggcgctggccgggaagcactaccgggatctgtttaccggtgagcgtcgccttctgccagagacgctggatttaacgtctgaaaagggatgtttgttggttctgcttacctgcgaataa

SEQ ID NO: 524356 - DNA, 1794 bp, Stenotrophomonas maltophilia
  misc_feature (1022)..(1031): n is a, c, g, or t
atggaattcagaacatgtcgcaggcactggggtgctgagtttatttccgatgacgttgtacgttttcgcgtctgggcagaagggcagaaagatctcacgttgcgtttaacagataccgacattccgatggcggcggtgggcgacggctggtttcaggttgacgtgcccggcgtcagacacggtacgccgtatcagtttgttttacaggatggaatggcggtgccggatccggcctcgcgcgcgcaacaggctgacgtcaacggcccgtcggtggtaatcgaaccgcgtcacaacctgcccgcacagcgggaatggcaagggcggccatgggaagagacggtgatctacgagatgcatatcggcaccttcaccggggaaggaaccttcagggcggccatcgataaattgccttatctggccgaactaggtattacgcaactggaagtgatgcccgtgtcccagttcgggggcgcgcgcggatgggggtatgatggcgtactgctgtatgccccgcactcagcttatggcacaccggatgattttcatgccttcatcgatgccgcccacgcgctcgggctttccgtggtgctggatattgtactcaaccactttggcccggaagggaactacctgccgttgctctcgccggcgtttttccatcaggatcgtatgaccccgtggggcaacggtatagcctatgaggttgaagccgtccggcaatacatcgctgaggcgccgttattctggctctcggagtatcatcttgacggtctgcgcttcgacgccatcgaccagatccatgacgacgctgagacccatattcttcccgagatagcgcaacggatccgcgacgcctttccggatcggcatatccatctgaccaccgaagacagtcgcaacgtgattttcctgcatccgcgcgatgagcatggtcagacgccgcttttcaccgccgaatggaatgatgattttcacaacgccgcgcatgtcttcgcgaccggggaatcacacgcctattatcnnnnnnnnnnttttgcctttgagccggagaaaaagctggcgcgggcgctggcagagggctttgtctaccagggggaaatctcgcttcagaccgggaaatcgcgcggggtagagtgtcgcgagcaaccaccgcagttttttgtcgattttattcagaatcacgaccaggtcggcaaccgtgcccagggggagaggcttatctctctggctggggcggagaaaacgcgcgtgctattcgcggcgctgctcctgtcgccacatatcccgctgctgtttatgggtgaggagtatggcgaaacgcatccgttcctctttttcaccgacttccacggcgacctggcgaaagccgtgcgggaggggcgcgcgaaagagtttaccggccatgccgggcacgatgaaaccgtaccggatcccaatgacgtaaatacctttatgcggtcgaagcttgactggaacaaggcagacacggaggaaggcagggcgtggctgcacgttacgcgcgaactgattgcgctgcgtcaacgctttatcgtcccgttactgaaacagcggggcgccgtggagggtaacgtcctgcaaacggcgctcggcatggttgccgtgagctggcgttttccgtccggtacgctgtcgctggcgctgaatatcggcaaaaagcccctcgccttagcggacctgcccggaaaaacgatctttagctggccggaggcagtcgaaaacctgccgccgaacagcattgttgttcgctttgctgatggagaagcagcgctatga

SEQ ID NO: 524357 - DNA, 528 bp, Stenotrophomonas maltophilia
atgcatattcgaaaaggattaagcaccgacctcgcccgtcttgaatgttgtgatttttcttttacggtcgatgagattgccagagaaccttttctcaatggtgatttgcatatcgaggcgctaaccgatccttatcataaaacctatgaactggatctccagacgctggaaaatcattgcgttaatcccgattcaatatttcttatcgccgaaacggatgacggtgaaatcgccggttttattaccgcgtcctgcaactggaataaatttatttcggtggattacattgccgtggagcgttcaaaacgccgaacgggcgcggcgcacaagctgatgtctgccacccacgtttgggcgcgaagcctcaatgcgcccggcttacggctggagacgcagaacgttaatgtttctgcctgccttttctatcgtcactatgggtttattctgggcggttacgatcgttacctttacaacgccctgccggaaaaagatgaggtcgcccttttctggtattacatgctggcttga

SEQ ID NO: 524358 - DNA, 885 bp, Stenotrophomonas maltophilia
atgtctacaggaaataatcacacgctgcattaccctcgtccaccgtttgcagaacaaccgcaaagggctcccgggctggcatcggaaatgaagccaataccggatcatggtgaaacaagttatatcgggtcaggaaaactggcaggaaaaaaagcgctgattaccggcggtgattccggcattggtcgcgcggtagccatcgcctatgcccgtgaaggtgcagatgtcgctattggctatctgccggaagaggagtccgatgcagcatcggtcattgcgctgatccaggccgaaggccgtaaagcggtcgccattcccggcgacattcgcgtggagtccttctgtgacacgctggtggaaaaagccgttgccgaactgggcggcctggatatcctggtgaataacgccggacgccagcagtactgtgaatctatcgacgatctcaccacggcagattttgacgcgacgtttaagaccaacgtctatgcccccttctggatcaccaaagctgcgctgcgccatttgcaggaaggtgccgtgatcatcaacaccacttccgttcaggcgtttaaaccgagcgcgatcctggtggactatgcgcagaccaaagcctgtaacgtggcctttaccaagtctctggcccagcagcttgggccgcgtggcattcgggtgaatgccgtcgcgccaggtccatactggacgcctcttcagtccagcggcggccagccgcagtccaaagttcagaagttcggggaagatacgcccctggggagaccgggtcagccggttgaaatcgcaccgctgtatgtgctgtttgcctccgattcctgctcatacgcttccgggcaagtgtggtgctctgatggcggtaccggcgtgctgtaa

SEQ ID NO: 524359 - DNA, 978 bp, Stenotrophomonas maltophilia
atgtttactgtgaaaaaacttgcgatatcaaccctgttgaccggttcagttttattctttccagcgatccacgcggtggccagcgttccgcagcatgtggtgaaacagcaggctggcggctacagcgttcaggttggcgacaggattatcaccgcctttacggacggcagcgtgccgcaggatcttcacgccttactgcgccggacgacggcggaaaataccgatgagttactggccaaaaacttccaggccaatccggtggaagcatcgattaacgcgttttatatcgccttgcccgggcacaaaatcctggtggataccggttccggtcagctctttggccccggcaaaggcgggcggctgattgaaagcctggcgacccagggcatcaaacccgaagatattaccgatgttctaatcacccatgcgcactccgatcacgccggtggtctggtcaaagacggtcagcgcgtgtttacccacgcgcaggtctatgtcggcaaaccggatatcgatttcttctttaacgacgcgaaccagaaaaagtctggctatgaccagaactacttcgatgtcgcgcacaagacattaaagccttatctggatgccggaaaagtgaatactttctcaggcaccgaacagcttctgccgggcatcagcggtacggttcacccgggccacaccccaggttccgcgttttacacgctggagagcaaaggtgaaaaaattacctttgtcggcgacatcatccacgtcgccgcagttcagttcccgcagcccaacgtgacgattgcttacgatgaggatcaggacggcgccgcccgggtgcgcaacgtagctttcgctgagtttgtgaaaaacaaagatctgattgcggcgccacatctgcctttccccgggatcggctatgtgacgaaaggtgagcgggaaggctacgcgtgggtcccggtgacctataccaaccgtgacgcaaaataa

SEQ ID NO: 524360 - DNA, 909 bp, Stenotrophomonas maltophilia
atgtccccctccgatatggatatggacctgatcctgacgctggatgcgttactcagggaccagaatatcacccatgcggccgcgcggctgggcatcagccagccagcaatgtctgcccgcctggcacgcctgcgcgtgttgtttggtgagccgctgtttgtcccttccccacacggacgtggggtgttaccgacgccgcgcgccgaagcgttaaggccgcaggtcgcgacggttttgcagggcatagcggcgatgcttgaacccaccacgttcaacgcgcagaacagcaaccgcacctttgttattgccctgcacgaaaacccggcgctaatgctgggggctgagttgcagaatcagattagcagtgcggcaccaggtatccgcctgcgttttgcgctcccggaaacccagctgctgtcagcgcagatggaaaatggcgatgtggatacttatgttggcgttaatgcgggggcgcacgatgcatgggtcagacgcaaactgtttgacgatgaatatgccacagcccagcggaaaggccatccgcgcggtacggggccggtggatctggaaagctattgtagtctttcacacctggtggtttcatccgagggcgacccgttcgcgggctttgtcgatcagcatctggcggggcttggccaccagcgtaacgtggtgatgtcgacgcaaagctatgcgatggcgcctgcgattgttgccggtaccgatttactctgcaccctacccaggcgcatgttgctacgctttacgcaaacgcttgatatttttccgccgccgctggatctcccgccgatcgtcattggtatgtactggcatccgaaaaacagtcaggatccggctaaccgctggctacgtgaacagcttcttcaggccgccggacgtcaggtatga

SEQ ID NO: 524361 - DNA, 885 bp, Stenotrophomonas maltophilia
atgcagtttcgactgatgcgcaattttatcgtggtggcggaagagcttcacatgcatcgtgcggcggagcgccttaacatggcgcaaccggcactaagccagcaaatcaaaacgcttgaagatcgtctgggggtagtgctctttagccgggcgaatcgtcgcctgacgctgacgccagccggtgaggcgtttctcagtaaagccagagtggcgatttttatgaccgatcaggcgattctggatgccagacagacggccagaggggaacagggcgtgctgaatctcggatgcgtttcaagtgcgatattcgacagtaagctgcccgacgcgctgcggcttttacatgagaaatggccagccatcagcctttccatgatgacgggaaacgtgcaaaccctttataccggcgtgcaaagcaaccagctggatgtggccattattcgtgccccgttaccgctgctgcctgacgatcttcaaagccgtcctttcacaacggaaaaagccgtgctggccttacctcgtcaacacagtctggcgggctccgccgcgctgacgcttgcgtcggtgaaagaggagaagtggatcgccctgcgcgacccggaggggatggggctggagcaatatttctatgatgcctgccacagcgctggcatacagcctgacgttgtgcaaaatgccaccgatgtccccacggtgataagccttgtctcggcagggtttggtatcgccatgctgccagcttcagcgaaggcgatatgcgtacaaaacgtcgtctttgtagatattcttgaccgactccgggagagcgagctgacgctggtttgccaccggattattcgctctgaggtgctgaaaaaattgatgagtatcctcgatcatacctga

SEQ ID NO: 524362 - DNA, 1482 bp, Stenotrophomonas maltophilia
atggaaaaccacatcaacgatctcagaagtgctatcgaactgcttaaacgccatgaaggtcaataccttgaaaccagccatccggtcgatcctgacgcggagctggcgggtgtgtaccggcacattggtgctggcggcacggtaaaacgtccgacgcgcatcggcccggccatgatgtttaacgctattaaggggtatcccgactcccgtattctggtcggtatgcacgccagccgcgagcgggcggcgctcctgttgggctgcgagccctctgaactggcaaaacatgtcggccaggcggtgaaaaacccgattgctcccgttgtcgtcccggcggcccaggcgccgtgtcaggagcaggtgttttatgccgacgatccggacttcgatctgcgtaaattgcttccggcaccgaccaacacgccgatagatgccggtccgttcttctgtctggggctggtgctggcaagcgatccggaagacgcctcgctgaccgatgtcactattcaccgtctttgcgttcaagagcgcgatgagctctccatgttccttgccgcgggccgccatattgaagtgttccgtaagaaagccgaagaggcgggcaaacccttgccggtcacgatcaatatgggtctcgatcccgctatctatattggcgcctgtttcgaagcccctaccacgcccttcggctacaacgagctgggtgtcgccggtgcgttacgtcaggctcccgtcgagctggtgcagggtgtggccgtaaatgaaaaagcgattgcgcgtgcggaaattattatcgaaggcgaactgctgccgggcgtgcgcgtagaagaagatcagcatacccacaccgggcacgcgatgccggaatttcccggctactgcggggaggctaacccctccttgccggtaatcaaagtgaaggccgtcacgatgcgtcatcaggcgatcctgcaaaccctggtaggaccgggcgaagagcacaccacgctggccggtttgccaacggaggccagcatccggaatgcggtggaagaagccatccccggtttcctgcaaaacgtctatgcgcataccgctggcgggggcaaattccttggggtattgcaggttaaaaaacggcagccttctgacgaagggcgtcagggtcaggcggccctcatcgcgttagccacctattccgagcttaagaacattattctcgtcgacgaagacgtggatattttcgacagcgacgacattttgtgggcgatgacgacccgtatgcagggcgatgtcagtatcacccatctgccggggatccgcggtcaccagctcgatccgtctcaggcgccggactacagtccctcaattcgtggcaacgggatcacctgcaaaacgattttcgactgtacggtgccctgggcgctgaagtcccgctttgagcgtgcgccctttatggaggtagacccgacgccgtgggcacctgaactgtttaaaaaatag

SEQ ID NO: 524363 - DNA, 288 bp, Stenotrophomonas maltophilia
atgacagcacatatttccaacgatcctttgcatggcgtaacgcttgaaatgcaggttaacgcgctggttgcgcgatatggctggaatgaactgggcaaccgaatcaaaatcaactgttttcgcaaggacccgagtgttaaatcgagtctgaagttcctgcgccggaccccatgggcgcgggcggaagttgaagccctctacctcgactcccttcacgatgacggtaacgaggaacaggacgaaccggcgtttaatccctggacggatggccggacacccaggagctaa

SEQ ID NO: 524364 - DNA, 1290 bp, Stenotrophomonas maltophilia
atgatgcgacacgtaaaacggactggcgcgctgcttggctgcgcgcttttactggtaagttgcacttccaaaccacccaaatcactcgttaccccgctgccgcaggcgaaacctgtacagcagactaacgaacccatgcgcgggatctggctggcgaccgtctcccgtctcgactggccccccgtgtcatcggtgaatggccgcagcgcggaccagcgtatcgcccagcaacagaaggcgctgacggacaagctcgataagctgaaaaagcttgggatcaacaccgtcttctttcaggtaaaaccggacagtacggcgctgtgggcctctgaaatactgccgtggtcagataccctgaccgggactatgggggaagaccccggttacgatccgctccagtttatgctggatgaagcgcacaagcgcgggatgaaggttcacgcctggttcaacccttaccgcgtctccaccaacacgaagccctcgaccatcgccgcgcttaaccgtacctcgtcgcttcatccctccagcgtctatgtccagcatccggagtggatccgcacctcgggggatcgttttgttctcgacccgggcattcccgaggtgcgggactggataacccaggtggtgatggaagtggtgaatcgctaccctgtcgacggcgttcagttcgatgactatttttacaccgagacgccgggctcaaccctgaacgatgcctggaccttcaggcgctacggcgagggatttgcggcgaaagctgactggcgtcggcacaatacgcagcagctgattgtgcaggtatcaagggcgatcaagcaggcaaagcctgaggttgaatttggcgtcagcccagcgggtgtatggcgcaaccgctccttcgacccggcaggatcggacacgcgcggtgccgcagcctacgatgaatcctacgctgacacgcgtaagtgggtacagcagggtttactggattacattgcgccgcagatctactggcccttcgcccgcgacgcggcacgatacgatgtgctgacaaaatggtgggctgacgtggtgaaaccgacccatacccgcctgtatatcgggatcgcattctacaaagtgggcgcgccttccagaaacgaaccggactggacggtgaacggcggcgtaccggagctgaaaaaacagctcgacctcaacgattcactgccagacgtaaaaggcaccatcctgttccgtgaagactatcttaaccagccgcagacgcaggaagccgtaaattacctccgggggcgctggggtagttga

SEQ ID NO: 524365 - DNA, 777 bp, Stenotrophomonas maltophilia
atgcttcaactgttagcaaagaaaaagatgctgttactctctgctctgctgttttcagggctggtcagggcagaggagtcgcttccggatgtggtgaagcacttcagtgagcagcaggatatcaaaatcattaagaaaattgatgcccccggcggcgcgccagcgtggctggggcagtatcaggacatgggcgtgacgctctttctgacccctgacggaaagcacgtggtgtctggctatctgtatgatgagaagggaaccaacctcagcgaggcctttttccagaaagagatctacgccccgatgggccgcgagatgtggaaaaagctcaatgcggcgcatccgctgaaagagggcgcggagagcgccccgcgcaaagtctttgtttttgccgacccgttctgcccgtactgcaagcagttctgggctgaagcgcagccgtgggtgaaggccggcaaggtccagctcaacacgctgctggttgcgtttcttaacccgaacagcgggcgtaacgcctctgcgatcctgaatgccaaagatccggtgtcggcctggaaagagtacgagctgtccggcggtaaaaagcttcctaaacctgaaggggcggcttcacgggaaaccgttgagatcctgcaaaatcaccagacgcttatggacggtctcggcgcaaatgccacaccagctatttattacctgaatgagcaaaacgaactgcagcaggtcgtgggcatgccagacgcaaaacagcttgaggcgatgttcgggccgaagccgtaa

SEQ ID NO: 524366 - DNA, 558 bp, Stenotrophomonas maltophilia
atgaaagccggtgaggcgggggaatcattactgatctcggcactcaatgcctgccgcgcacggctaaaagccttcattcgcggacggactgcggttcgtgatgatgtcgatgatattcttcaggaagtgacctggcagttgatgaaagtggaacaaccggtggagaacgtcgccgcctggctgtttcgcgccgcgcggaatgagatgatcgaccgggcgcgaaaaaagcatgaggtttcactgccggggtacctgacggcagatgacgaggactttccggagcaggagattgcagaaacgttattcggcgtaccgcaaacgccggaggaggagtatctcaacatgctgctgtgggaagagttggggcaagccctgtcggaactgccgccaccacagcgcgaggtgtttgaaaaaacggaatttgagggatacaccatgaaggcgctggcggaggaaacgggcgacagcgtgcaggcgttattatcccgcaaacacaaagccgtgcgatttttgcgtaatcgcctcaaggatatttatgaagcgttgacagggcaataa

SEQ ID NO: 524367 - DNA, 414 bp, Stenotrophomonas maltophilia
atgagaaatttcgatatgcacggaaaaggtcacgggcgtggtttgggccgccatcgtatgtacaagggcatcgtgataggcgcagtcctgttcgcggtgcttggcctgctggtcatgtccctgtggaacgcgttgctcccggccatcctgggggttaaagccattggcttctggcaggcgctggggatcctgctgctgagccgcattcttttcggtgggctgggttttcgtccaggcatgttcggtgcacaccgccgtatgcacgcacaatggatgaatatgacccccgaacaacgggaggccttcattcagcagcgtcgggcagggtctgggcgtcatggtcattgccggtggcacgatgaccgggatgagaagcgagatgataacgctgcgaaagcgccggaagccgagtga

SEQ ID NO: 524368 - DNA, 1551 bp, Stenotrophomonas maltophilia
atgtcgttgaaaaaatcatccctgattatcctgttttctctgcttttcttctttgtggccagcaccatcaccagcgttgggctcatcattaaaagtaatacttcgctggataatgtgaacaaagaaattcaggttgtcctgtccattattgatcccattaaccatagccgaaccctgcgcgtcagggttatggagtatgtaaaaatggtggaagcgggggacgccaccgactcgtctgcgaaactggcctcggttaaagaggcgctgaccaaagccgatagtgcattttcggcgtttatggcctcgccgcgtttgcaggacgaagccccgcttgtcactgcctaccagcaggcgtggcaaaactaccgtaaccagggactggcaccgctgattgccgctgccgccgctcacgatgtgtcgcggttcaacgctcttattcccgtggtgtctcaactcgatcgccaatatgaaattgtgctcgatcaggttctctccgttcaccagaagtacgccaaaacgctgaacgaggatgcgagccataattttgtgtcgggtctggttattatcgcctgcattgcggtgctgttcgtagtggtgatcttcgtcgtcagcctgctgatgaaacgcgtggtctttgcgccagtgaacctggcgcgcgagcactgtcgacagattgcggccgggaagctggacgtaccggtaccgaccaagcgtgattccgggaatgaaatcgatcacctgatgtcctcgatggagcagatgcgccaggcgctgctctccaccatttctcaggtgcgcgatgccagccacaccgtaacgcatgcggcgcaggaaattgcttccggcaatatcgacctggcctcccgtaccgagcaacaggcttctgccctgacccagacggccgccagcatggaagagctgagcgcgacggtggcgaataacaccgataacgtgttccaggccggtaagctggtgcaggatgccgtgaaaaatgcccataccggtgaagcggtaacccgtgaagtcatcgaaacgatgaatactatcgcgtccaactcgaagcgtattgaggacatcaccagtgtcatcaacagtattgctttccagactaatattctggcgctgaacgcggccgttgaagcggcgcgtgccggtacgcaggggcgaggatttgccgtggtggcaagtgaagtgcgcaccctggcccagaaaagcgcggtggcggcgaaggatatcgaaagccttatcgcccagtctgtttccagcgtgaaaaacggtgcggaactggtgaatcgttcgggagaggtgattgattctattatcagctctgtgaataaagtgcatacgctgatggaacagatttcggttgcctcagaagagcagagccgtggaattggtcaggttgggcaggccgtaacggagatggacggtgtgacccagcagaacgcggcgctggtgcagcaatccgccgcagccgcggcctcgctggaggagcaggcgcagcagctgtcgcagagtatttcgagttttcgtctgccggcaattgcgtga

SEQ ID NO: 524369 - DNA, 1017 bp, Stenotrophomonas maltophilia
gtgagaaaaacaaaacgcgtcaccattaaagatatcgcggagctggcgggggtatcaaaagccaccgccagtctggttctgaacggccgcagcaaagagcttcgggtggcggaggagacacgcgagcgtgtgctggcgattgccaaagaacatcattatcagcccagtattcacgcccgttcgctgcgggacaaccgcagccacaccattggtctggtggtgccggaaatcaccaactacgggtttgccgttttttctcatgagctggagaccctctgccgcgaggcgggtgttcagctgctgatctcctgtagcgatgaaaatccgggccaggagacggtggtggtcaataacatggtggcccgccaggtggacgggctgattgtcgcctccagcatgctcaacgacgcggattatcaaaagctgagcgagcagttgcccgttgtgctctttgaccgtcatatgaacgacagttctctgccgctggtcctcaccgattcaattaccccaaccgccacgctggtggccgacattgcgcgccagcatccggatgagttctacttcctcggcggccagccgcggctttccccgacgcgtgaccgtctggaagggtttaagcaggggctgcgtgacgctggcgtcgagctacgtccggagtggattattcatggtaattaccatccgagttccggctacgaaatgtttgccgaactttgcgcgcgcctgggccgcccgccaaaagccctttttaccgccgcctgcggtctgctggaaggggtgttgcgctatatggggcaacataatctgctgcaaagcgatatgcgtctggccagctttgacgatcactatctctatgattctctgaccattcctgtcgataccgttcgtcaggataaccgccagctcgcctggcactgttttgatctgattggcaaactgattgaaggggaaacgccggagccaatccagcgtaaactggatgccacactgcaacggcgatacaaggcccgggagtga

SEQ ID NO: 524370 - DNA, 1407 bp, Stenotrophomonas maltophilia
atgaccttaccttcccgctggcctgccgtgttgcaggccgttatgcaaggccagccgcgtgcgcaagcggacagccactatccgcagtggcatcccgcaccggtgacagggctgatgaacgatccgaacggctttatctggtttgccggacgttaccatctgttttatcagtggaacccgctgggctgcgatcatcgctacaagtgctgggggcactggagctcagcagatctggtgcactggcagcacgagccaatggcgctgatgcctgacgaagagtatgaccgcaatggctgttactccggcagcgccgtggataacaacagcgtgctgaccctgtgctataccggcaacgttaagtttgacgatggcggccgcaccgcctggcagtgtctggcggtgcaaaatgacgacggcacgtttgccaaactgggaccggtgttgcccctgccggacgggtataccgggcacgtccgcgacccgaaagtgtggcgccatgacgggcagtggtacatggtgctcggggcgcaggatcagcataagcgcggcaaggtgctgctgtttacgtcagccgatttgcacacctgggcgtcctgcggcgaaatcgccggtcacggcgtcaatggactcacggacgcgggctatatgtgggagtgcccggatctgtttgcgcttgatggcacacacgtcttgatctgctgcccacaggggctggcgcgcgaaccgcatcgctatctcaacacctatccggccgtctggatgagtggggcatttgattatcaaacgcctgcatttgcgcacgacgaattgcatgagcttgatgccggtttcgaattttacgcgccgcaaaccacggtggcagaagagggccgccgcatcctcatcggctggatgggcgtgccggacggcgaagagatgctccagcctacacgggtgcacggctggatccaccagatgacctgtccgcgcgagctgcgctaccgcgacggtaagctctggcaaacgccggtccgtgagctggaaacgctgcgcgaggatgaacatcactggcagggacgcgccagcgatgccccggtgctggagggaacgcgtcttgagttcgaactgagcgcctcgcgcgttaatgtggattttgccggcgcgttgcggctgattatggatgatgcggggatccgtctggaacgcgccagcctggaaaccggagagacgttgacccgctactggcagggctctgttcatcatttacgcgtgctgtgtgaccgttccagcgtcgaaattttcatcaatcacggtgaaggcgtcatgagcagccgctattttcctgaccatccggcccaggttcgcttcgaaggtgcgtccgacatcacattacgctactggtcgctgcgcagctgcatgatagaatag

SEQ ID NO: 524371 - DNA, 393 bp, Stenotrophomonas maltophilia
gtgaacttcctgctgccgatctgggcgatggcgaacgtggcgcagggcggggcatgtctggcggtgtggttcaaaacccgtgatgccaaaatcaaagccattaccttaccgtcggcgttttccgcgatgctgggcatcaccgaagcggcaatttttggcatcaacctgcgtttcgtgaaaccgtttatcgcggcgctgatcggtggtgcggcgggcggtgcctgggtggtgtcggtgcatgtctacatgaccgccgttggcctgacggcgcttcccggtatggcgatcgttcaggccagctcgctgctcaactatattatcggcatggtgattgcctttggcgtggcgttcaccgtctctctgctgctgaaatataaaacggactctgaataa

SEQ ID NO: 524372 - DNA, 642 bp, Stenotrophomonas maltophilia
gtggaagccggacgctacgccccaggcgttggtcagcgccggatgagtcaggatgccgccgagcgttgcgcccagatacgggttgccgccaaactcccgcgctgcggtgaagccaatcaggatcggcagaataataaacgccgccgagctgcacatatccagcatgatatagagcgcgttatccggattaacccagccgtaggttttaaccatcccgagcaggcccatcagcagacccgaggccacgatcgccggaataatcggcacgaagatgttggagagcagacgcgcgatgcgctgaaacgggttcagcttgcgggctgcaatatccgccgcttccgatttactggactcgctaatccctgccacctgaataaacgcggtgtaaaccttattcaccacccctgtgccgaagatcacctgcatctgcccggcatttcgaaaacagcctttcacgccttcaaccttgccgatagcctgctggtcggcaagcgcatcatcgaccagcaccagacgaaggcgcgtggcgcaatgtgccgcgctggcaatgttctctttgccaccgagcagcggaatcagctcgcgcgcaatatgattaaaatccatagatacctcttcctgacctctttttatgatgtttga

SEQ ID NO: 524373 - DNA, 1491 bp, Stenotrophomonas maltophilia
atgtataaaaaacgcagacttgccgtgatgataggcatgctggccgggagtacctctgtttttgcccagacggatatgacacgtatcgaagcgcgcctggcggcgctggagcagcgtttgcaggaggcggaaacccgcgcgcaggttgctgaaaagcgcgccacggcagcggaacagaaaacacagcagctggtggctgcgcagcaggaagcgcagacctccacacaggcggtggcgcaacgtactacggtgctggaagaaaaagccgaccggacaggcggttttgaatttcacggttacgcccgttcaggcctgctgatgaacgacgcggcctccagcagcaaaagcggcccttatctgacgcccgccggggaaacgggcggggccattgggcgtctggggaacgaagcggatacctacgttgagctgaatgttgagcacaaacagacgctggagaatggcgcgacgacgcgctttaaggcgatgctggccgacggtcagaaaacctataacgactggtcggcagacagcagcgacctgaacattcgtcaggcctttgccgagctgggcaatttgccggacgttaccggtgcgctgaaaggcagcaccttctgggcgggtaagcgttttgaccgcgacaacttcgacattcactggctggattccgacgtggtatttctcgccgggaccggcggcggcgtctacgacgtgaagtggaacgatacgctgcgcagtaacttctccctttatggccgtaatttcggcagcgaagaggagatcgacaacaacgtccagaactacatcttaagcatgaaccacttcgccgggccggtgcagttgatggtcagcggcttacgggcaaaagataatgacgaccgtaaggacagcaacggcgatccgattaaaaccgatgcggcgaataacggggtgcatgcgttggtgggtctgcataacgagagcttctacggcctgcgggaaggttccgccaaaacggcgctgctttacggccacggtctgggggccgaggtgaaaagcattggtgcagacggcgcattgctgtcagaagccgatacctggcgttttgcaagttacggtgtcacgccgcggggcggtggctggcacattgcgcccgccgtactcgcgcaaagcagtaaggaccgctacgtgaagggcgacagctatgagtgggtcacgctcaatacgcgtctgatcaaagaggtgacccagaatttcgccctcgcgttcgagggcagctatcagtacatggatttaaacccggaaggctacaaggatcgcaatgcggttaacggtagcttctacaagctgacctttgccccgacgttaaaggcgggcaagattggcgatttcttcacctggatggactggagcagcaagctggataactacgccagcgatgacgcctttggcagtagcggcttcaacgcgggcggggaatggaactttggggtgcagatggaaacctggttttaa

SEQ ID NO: 524374 - DNA, 897 bp, Stenotrophomonas maltophilia
atggagacgatctgggtacttggcgatgcagtggtggatctgttgcccgacggagagggcaaactgctgcaatgtccgggcggcgcaccggccaacgtcgcggttgggattgcgcgtctgggcggcagaagcgcctttataggcctggtgggcgacgaccccttcgggcgctttatgcaaaaaacgcttgcggatgagcaggttaatacagaatggctgagacgggatccgcggcatcgcacctccacggtggtggtggatctcgatgacgacggggaacgttcatttacctttatggttcgcccgagtgctgatctgttcctcgacgccgccgatctcccgccattccgcgccggggagtggctgcacgtctgctctatcgcgcttagtgccgaacccagccgttccgcgacgtttcaggcgatgtccgctatcagactggcggggggattcgtcagctttgaccccaatatccgcgccgatctctggcacgatgaagtcgagctgcgtcagtgtcttgagcgggcattagcctgtgcagatgtggtgaaaatctcggtggaagaactggcgttcttaaccggaaatgcgcaggtccatgaggggctggcggcgctgatgcgcacctgtccggccaggctggtgctggtgacgcagggaaaagagggcgtgaccgcctggcagggaggcgcgttgacgcactatcctgcatcacccgtggaatgcattgataccaccggcgcgggggatgctttcgtcgccgggctgctgttcggtctggctcgtgatggccaggcccgtctctcagaggtcatcacgctggcgcagcgctgtggggcgctggcgacaaccgcaaaaggggcaatgaccgcgctgccttatcatcacgaactgtaa

SEQ ID NO: 524375 - DNA, 1212 bp, Stenotrophomonas maltophilia
gtgctgacaactctcatttatcgaagccagctgagcttaacctgcacctccgcagcgttaagcgcgctggttgaacaggccaggatccgtaatacggagcagggcatctcaggcattcttctctcccgtggacgtgacgttctgcaaattctcgaaggcacggaacagagcgtcgtcgcgctttttaacaccatccgtgcggatgaccggcataccggcgtggtggagctgatgcgcgattacggcccgcgcacacgtttcgaagacgtgggaatgctgctgtttgacctggatgttcagaccccgaaagcggttctggcgtcagttatgcattacagcaagctggaaagctatctgacttctgaggatcgggtcttcaaatttattcagacctttatcaccggtaaaaccgctatcccacccgcttcggactatgagcctgataaatggacgctttcgcgagagcgcgcgccgtttggtaaagggttaggtctgctggcgggacagccctgccagtttgcgctgcaacccattgtcgagccgtccgaaggcaaaatcagttctctcgaagcgcttatacgcggaaacgacggcggcagcccggagcatttcttccatagtctcgatcgtgaacagatttacgaagtcgacctgcaaaccaaagcctggacctttgcgctggcgcaaaagctcggcatcggcagccacaaactggcggtgaacctgctgccaatgtcgctggttaacgtgccgggcgcggtagagttcctggtaacgcagatcaaaaagcacaatctacagccagagcaggtgatcattgaagtcactgagaacgagatgatctctggcttcaaccagtttaacagcgccattaaacagctgcgcgcggaaggagttgggctggcgatagatgattttggttccggctatgctggtctttcactgctcacgcggttccagccggataagctcaaaatcgacagagagatcgtcagcgatatccatctgagcgggcccaagcaggcgattgtgaagtcgataatcagctgctgcaccgatctggagattacgctggtcgcagaaggcattgagaagatagaagagtggtgctggcttgaatccgccggtattcgccgcttccagggctttttgttcgcccgcccgcagctcaatggcgtgggtgatatccactggccccaacgggtaggttaa

SEQ ID NO: 524376 - DNA, 1476 bp, Stenotrophomonas maltophilia
atggcgaatttgccctggcgggtcagcgtgcgcctgatggctctcgcaaaaaaaatagcgatggtcatcgggatcatcgtgctcgttctgctggcggtgcgggtttatctttcgcagcaggggccggctctgcatcactggcatacctggcgggctgacgaaatgtccgtgcaggagatggataacgcgaccttcgcagcctatgtcgcgcgggaaaacgccatcttcaccgctcttgatgctgaggtgacggcgaaagtcacccccgcagagcgcacgccgctgaaccgctattaccgtcagagcctggtgtggccaggacactttactccggatgcaaaccggtcgtttgtgctgatgcctgccggaaagccgcgctgggcggtagtgttgttgcacggtctgacggattcgccctacagcgtcaggcgtctggctgtgaattatcaaaagcacggctttgtggccgtagtgcctcgtttgcccggacatggcacggcgccgggcgcgttgacagacgttgactgggaggcgtggctggcagctacgcgccttgcggttcgtgaagcaacacgcctgacggggaacgatcttcccctgcacctggtgggctattccaacggcggggcgctggcgatgaaatacgccctcgacgcccttgatgcgcctgaactgcgtaaacctcagcagatcgttttgctctcaccgatgattggcgtcacggcgtttgcgcgctttgccggattcgccgggctaccggctatgttaccggcgtttgccaaagccgcgtggctcaacatttctccggaatataatccttataaatacaattcgttcccggtgaatgcggcacgtcagtcctggctgcttacccgggcgctgcatgagcagataaaccgcgatgttcatgatcacaaactaacgcagcttccgccggtactggcgtttcagtcggtcatggattcaacggtcagtacccgcgccgtagtcagcgggctgtttgaccagcttccggcaaatggcagcgaactggtggtatttgacatcaatcaggccgggagtttccgtccactgttcaggccatcatcctggacggcggtggctgacctgctgcccgaggcgaaaagacgttacagtgtcacaatcgtgaccaatgccagccctgacaggtttgatatggtggcaaagacaacgcctgcgggcagcacccgggaaacggtgacgccgctgtcggtctcgtatccgcaggaggtttattccctgtcgcatattgccattccgttcccgcctgaagacgatctgtatggccgccatcctgaggtgaaaaaccgctatggaatcagtctcgggacgatagccctgtggggagaaacctcagttctgagcgtcggcaaagatgcgctgatgcgcgtgacgtcgaatccgttctacgactatatgcagacgcggatcgacagccgtatcggggagaattaa

SEQ ID NO: 524377 - DNA, 855 bp, Stenotrophomonas maltophilia
atgacgaccaaacctgaggtgttgagccgtatcgaagcgacctttagccagctcaccccgagcgaaaagcgggtggcaagctggatgctggcgcacgccgggcagatcccttttgaaacggctgagagcgtggcgctggccacggccaccagcgggatcaccgtcggacgctttctgcgcaagctgggctatcgcaaccttgatgacgccaaaaaaagcctgcgcgatccccaccagccctggggcattaacgagcgtctcgactcctggaagcagcaacagccgctgtcggatcgccttcagcactccctgtcgctggaggtggacgccattgcccatgtctaccagctggcgcaaagcgaaacgttcaggcaggtggtccagcaacttacccatgccgacgccgtcttcgtgctggggatccagtccacgcgcgggatcgccaatgcgttcttcagccatctggagtatctgcgcccgcgggtaagctattccgaagggctctctggtagctgggtggagtcgcttaactccggctttgctaacccgtatatcgtgctgaccgatacccgcgcctactccgccattgcccgccagtactgccgcgtggcgagcgaaaaaggcctggcgatggcgctgatcaccgatatctggtgcccgtgggcgcgggattacccgattgatttactccaggtgaagaccgataccggccatttctgggactcgctggcgccggtgagctgtctgttcaacctgctgctgtcgggcgttgtggaggcgctgggggaagcgctgccggaacgtctggcaatcaaccgacaactacaacaagaatttggtcaatttgaacgctaa

SEQ ID NO: 524378 - DNA, 534 bp, Stenotrophomonas maltophilia
atgcctgaagagagtcaactgattgatgtggcgaaaacttttcccacgctgcatatcgatctgaaatacgcgaccgccgataacattaccggccgcccgatctaccagcacgccgcgtgcctgctgcacacggatgccgccaccgcgctggcgaaatcgatcagtatcgccgcgctggccggtctgaagctggtggtctacgacgcctaccgcccccagcaggcacaggcgcaactctgggatgcctgccccaatccggaatacgtggtggatgtcgcgattggctcgaaccacagccggggcactgccattgacgtcacgctgatggatgaacacgacaacgtgctggatatgggcgccgggtttgacgaaatgcacgaccgttctcatgcctggcacccttccgttccgcccgaggcgcagcgaaatcgtctgctcctgaacgccgttatgtacggcggcggttttgggcatcagcagcgagtggtggcatttcgagctgccgaacgccgccagctatccgctgttagatga

SEQ ID NO: 524379 - DNA, 1263 bp, Stenotrophomonas maltophilia
  misc_feature (1091)..(1100): n is a, c, g, or t
atgaaaacaacgctgcttactaccctgattgccgctacgctcgccctgagcacccttcccgctctggcggcggtgccaaaagatatgctggtgatagggaaagctgccgatccgcaaacgctggatccggcggtcactatcgataacaacgactggacggtgacctacccctcgtaccagcgtctggtgaaatacaagcctggcaccacggaggtggaaggtgatctgtcgacgggctggaaggcgtcagacgaccagaaagtgtggacgttcaccctggcagataatgcaaaattctccgacggcacgccggtgaccgccgaagcggtcaagctgtcgtttgaacgtctgcttaaaatcaaccagggaccttccgaagcgttcccgaaagatttgaaagtggacgtggtggatgagcatacggtgaaattcaccctcagccagccgtttgccccgttcctctacacgctggccaatgacggcgcgtcgatcgtcaacccggcggtgctgaaggccaatgccgccgacgacgcacgcggtttcctggcgcaaaacaccgcgggttccggaccgtttatgctgaaaagctggcggaaaggtcaacagctggtgatggtgcccaacccacactggccaggtgaaaagccgcactttaagcgcgtctcggtgaagattatcggtgaaagcgcctcgcgtcgcctgcaactttcccgtggcgatctggatatcgccgacgccctgccggtggatcagcttgctgctctgaagcaggaaggcaaagtggccgtggcggaatacccgtccctgcgggtgacctacctctatctgaacaacagtaagcctccgatgaatcaggtggatttgcgccgcgcggtctcctgggcgaccgattaccaggggatggtgaaaggcattctcagcgggaacggcaagcagatgcgcggcccgatcccggagggcatgtggggcttcgatgcgaacgccatgcagtacagctttgacgaggccaaagccaaagcggcgctggagaaagtcaaagataaacctgccagcctgacgttcctctattccgataacgacccgaactgggnnnnnnnnnncctatcgccctctccacgcaggcgagcctgggcaagctggggattaacgtcaagctcgagaaactggcgaacgccaccatgcgcgaccgcgtcggcaaaggtgattatgacattgcgattggtaactggagcccggacttcgctgacccgtacatgttcatga

SEQ ID NO: 524380 - DNA, 282 bp, Stenotrophomonas maltophilia
atgaactactggttcgaatcggacaaaaaagggctgccggggaaccgctcattctatgagaacaaagaggtcgatgcgctgttgcaggcggcactgaaaaccaccgatcaggcggaacgcaccaaagattaccagcaggcgcagaaagtggtgattgacgaggcggcttacgtttatctgttccagaagaactaccagctggcgatgaacaaagaggtcaaaggcttcacctttaatccgatgcttgagcaggtctttaacatcgccaccatgagtaagtaa

SEQ ID NO: 524381 - DNA, 1023 bp, Stenotrophomonas maltophilia
atgacgttctggagcattgtgcgccagcgctgctgggggttaatcctggtggtggccggtgtctgtattattacttttattatttcacacctgatccccggcgatccggcccgcctgctggccggtgatcgcgccagcgatgaaatcgtgcagggcatccgccagcagctggggctggatcaaccactctatattcagtttggccgctacgttgaggcgctggcacatggcgatctgggcacgtctattcgcaccggtcgccccgttgcggaagatttgaaagcttttttccccgccacgctggagcttgccttttgctccctgctgctggcgctggtgattggcgtgccgctgggcattttatcggcggtgtaccgtaaccgctggctggatcacctggtgcgactgatggcgatgacgggcatctcgacgcctgccttctggctgggactgggagttatcgttctgttctacggtcaactgcaaattctgcccggcggcggcaggctggacgactggctcgatccgcccgcccacgttaccggtttttatctgctggacgctctgctggaaggcaacggcgaggtgtttttcaacgccctgcagcacctgattttaccctccctgaccctggcctttgtgcatcttggtattgtggcgcgtcaggtacgttccgcgatgcttgagcaactgagcgaggattatattcgtaccgcccgcgcgagcgggttgccgggctggtacatcgtcctgcgctacgccttacccaacgccatgatcccctccattaccgtgctcgggctggcgctgggcgatctgctgtacggggccgtccttaccgaaaccgtgtttgcctggccgggaatgggagcctgggtggtgacctccattcaggcgctggatttccctgccgtcatgggcttcgcggtcgtggtatcgctggcctatgtcttcgttaatctggtggtggatctgctgtatctgtggatcgacccgcgaatcgggcgcggaggtgccgaatga

SEQ ID NO: 524382 - DNA, 897 bp, Stenotrophomonas maltophilia
atgatgttaactcaggaaacgcccgtccctgtcagcaccgctaaacagcgcatcaactgggcaaagctgttctggatgttacgcaaaagcccgctcacgctgatcggcggggtcattatgatcgtgatgctgctgatgatggtggtctcgccgtggatagtcccgcacgatccgaacgcgctggatctgaccgcgcgcttacaggcaccgtcagcccagcactggtttggcaccgatgaggtgggccgggatctgttcagccgcgtgctggtgggcagccagcagtccatcacagcggggctggcggtggtggtgattgcgggcggcatcggttcgctgctcggctgtttgtccggcgtacttggcgggcgcggcgacgccatcattatgcgcatcatggacattatgctctccatcccctcgctggtgctgacgatggccctggccgccgcgctcggcccaagcctgtttaacgcgatgctggcgattgcgattgtacgcattccgttttacgtgcggctggcacgcgggcaaacgctggtggtgcgccagttcacctacgtgctggccgcccgcacctttggcgcatcgcgctggcacctgatcagctggcatatcctgcgtaacgccctgccgccgctgatcgtacaagcgtcgctggatatcggcagcgccattctgatggccgccacgctgggctttattggattaggcgcgcagcagccgaccgccgaatggggggcaatggtggccgtggggcgtaactacgtgcttgaccagtggtggtactgcgcgtttccgggggcggcaattctgatcacggcggttggctttaatctgtttggcgatggtcttcgcgacctgctggatcccaaatcaggagggaagcagtcatga

SEQ ID NO: 524383 - DNA, 987 bp, Stenotrophomonas maltophilia
atgagtgattccgtattatcgattgaagatttgcacctgagcttccccatttttcgcggtgacatccacgcgcttaaccacgtctcgctggagattggccggggtgaaattgtcggcgtggtgggcgaatccggctcgggaaaatcggtcaccgcgatgctggcgatgcgcctgctgccggaaggcagttaccatgttcaccatggccgggtcacgctgctcggggaagatgtgctgaacgcgtcggaaaaacagcttcgtcagtggcgcggcgccagggtggcgatgatttttcaggagccgatgacggcgcttaaccccacgcgccggattggcaggcagatggtggaggtgatccgccagcatcagtcgctttcccgccgcgacgcgcagcagaaggcgatctccctgctgggcgagatgcaaatcccggatgcggcgcaggtaatggatcgctatccgtttgagctttccggcggtatgcgccagcgggtcatgatcgcccttgccttctcctgcgagccggagctgatcatcgctgatgaacccactaccgcgctggatgtgaccgtccagcttcaggtgctgcgtctgctgaaacataaagcgcgcgccagcggaacgtcggtgctgtttatcagtcacgatatggcggtggtgtcgcagctttgtgaccggatgtacgttatgtacgcgggcagcgtgatcgaaagcggcagcacgcagaccttgatccaccatcctgtgcacccctattcgattggcctgctgcggtgtgccccggaaaatggtgaaccgcgcgagatcctaccggccattcccggcacggtacctaacctcagccacctcccgcgcggatgtgcttttcgcgaacgctgttttgctgccggggcgaaatgcagcgaaacgccgcgcttaatttccacgggcgcagaaggccagcaggctgcctgctggtacccacaacaggagagacgccatgtctga

SEQ ID NO: 524384 - DNA, 927 bp, Stenotrophomonas maltophilia
atgtctgaggtactgctggaactggatagcgtgcatgtgaattttcctgcgcgcaaaaacttgctggggcgcgtgacggaacaggtacacgcccttaacggcatggatctccggatccatcgcggcgaaacgctgggcgttgtgggggaatccggctgtggaaagagcacgctggcgcagctgctgatgggcatgctcaaaccgagtaccggtgcctgtcagcgcgcgaatgcggcgggtggtatgcagatggtatttcaggacccgctctcgtccctcgatccgcgtttacccgtctggcgcaccatcaccgagccggtgtggatacagcaacgtcgcagcgaacgggagcgtcgtcagttggctgaaacgctggcgcagcaggttgggattcgagcggaatatcttgaccgcctgccgcatgcgttttcgggcggacagcgccagcgcatcgctatcgcccgggcgctctcttcggatccggacatcatcgtgctggatgaacccaccagcgcgctggatatttccgtccaggcacagatcctcaatttgctggttgccctgcaacagcagcgaaatctgacctacgtgcttatctcgcacaacgtctcggtggtccggcacatgagcgaccgggtggcggtaatgtatctggggcaaatcgtggaactgggtccggcgaaccaggtgctgggtcagccgcgccatccttatacgcagctgctacttgactccgttccccggaccggagaaccgctggatgaggatcttgcgttgcgaaaaaccgatcttccgggtaatcgccacctgcccgttgggtgctatttccgcgaccgctgttcgctggcgacgcagggatgtgaacagccgcaacagctccagccctcttccgcaagccgaagcgtacgctgctggcgtaaccgttaa

SEQ ID NO: 524385 - DNA, 429 bp, Stenotrophomonas maltophilia
atgacgattcataagcacggttcagcacactggtctggcgacatcaaacgcggcaaagggacggtatcgaccgaaagtggcgtccttaaccagcaaccttacggctttaacacccgcttcgagggcgagaaagggactaacccggaagagctgattggcgcagcgcacgcggcatgtttctctatggccctgtcgctaatgctgggcgaagcgggttatactgccgattccatcgataccacggcggatgtctcgctggataaaaccgacagcggttttgccatcagcaaagtcgcgctgcaaagcaaggtgacggtaccgggtatcgatccgcagcagttcgacggcattatccagaaagccaaggccggttgcccggtctcgcagctgttgaaagcggaaatcacgctggattacaaactgaactga

SEQ ID NO: 524386 - DNA, 888 bp, Stenotrophomonas maltophilia
atggatcgcgttattgccgcccaggtgtacaaccgcatctgtgagctggggagtttaagcgcggcggcgcgggcgctggggatctcccgtccgatggtgagccgttatctggagcagatggagaagtgggctggggcgcggctggttaaccgctccacccgcaagctgacgctgacggcagcgggggagaaggtcctgcaaaagacgcgcacgctatcgcaaatttctcaggaaattgaagatcagtcagtgaaggatttaccctcaggcacgcttcgtgtcgcctgcgcgcattttaccgcgatgcagattatcgctccggtgctgcccgatctgttgcagcgttaccctcaactgcgcattgagctggatgttaacaaccatccggtgagcctggtgggcgagcgaattgacgtggcgatccgcattactgataaccccgaaccgggtatgatcgctcgccggttgggagagtgtcggtccgtgctttgcgcctcgccgcactaccttgcaagccggggcgttccagaggagctggaagacttagcccggcacaactgcctgcattacagcttttttgccggtcagtcgtggcgttttttaacgccggcaggggagccggtcacgacggcggtcagcggcaatctcagcgccagcatctcatctctgctgatggaggcggcgataaatcactgtggtattgccatgctgcccgagcgcgaggccgacgcggcgctacggcagggaagcctggtgccggtgctcagcgcctatacgccaaaaccgatcggcatttttggtatttatcagtcgcgagactatcagcctgcggcgcagcgtgtgttcctcgacgcgctggcaaaccaccttgccacgcgatcggactag

SEQ ID NO: 524387 - DNA, 852 bp, Stenotrophomonas maltophilia
atgacaatcgcccgccttgctttgctgacaacccttttcactccggccgtctttgccgcgccgttgaccgttgatacgtataacccgcaggaaaaaggcatttttgccgtttcttccacgctggtatctggcccgaaagaggcggtactgtttgacgcccagttcagcgtgaaagatggcgaagcgctggtagaaaaaattcgccacagcggtaaaacgctgaacaaaatcgtgatcacttccggcgatccggatttctatttcggcctgcaaccgctgatgaaagccttccctaatgccaaagttgtcgccacgcaacaggtggtggaccatatcagggccacaaaagacgcgaagctcgccttctgggggccacagatgaaagatggcgcgccgacgcagctctacgtgccgcaagtgcttgcctcgaccacctttatgattgacggtgagagagtaagcattgaagagcctgaaagctatgcggcgtacgtctggatcccatccgccaaaaccatcctcggcggcacgggcgtctcatggggcattcacgtctggacggcggatacccaaacgccggaaagccgtaaacagtggcagcagacgctggatagcatggctgcccttaagcccgaacgcgttattccgggccactaccttgggacaccgccagcgggtaccggcgctatcgactttacccgtcgctatctacagcagtttgaaaaggccctcaggacgcataaagcgtctaccgacgtcatcatcgcgatgaaaaaacagtggccgaaccttgcggaagaaagttcgctggaactgagtgccaaagtgaataccggcgaaatgaagtggtaa

SEQ ID NO: 524388 - DNA, 522 bp, Stenotrophomonas maltophilia
atgacatcgtcagtaaggggtattgaccatatcggtattacggtgcccgacattgaaaaagccaccctattttttgaacgcgctttcggcgcacaggttttatatcattctgtcgatgcagaaaccgataatatcgatcagcccgcccagcaacacaccttaaaattatttcccggcactaaaattcatgccattcgcatgcttgttatgccgcacggacccggcatagaacttttcgaaatgcatggccctgaacagggaatgcccgctcgcgccagcgactttggacttcagcattttgctgtttatgttgatgattttgatagtgccatcgcggctttcaccgccgccggcggcgagatgttcaccgcaccgaagccgcttagctttccggatgagcaaggtgaaggtaatgctttctgctatggtcaaaccccctggggcagcattgtggaattgatctcctggccgacgcccatgccttatgaaaaaaccacgaatttacgccgctggaaaccctga

SEQ ID NO: 524389 - DNA, 216 bp, Stenotrophomonas maltophilia
atgtttacttattacccggcacataccacagcagcacaaccggaacttgttaacgcgatcgcacaaggtcttcacgccgagcacggtgttgttactgaagatgacattttgatggaactgaccaagtgggtggaagccacggacaatgacatcctcagtgacatctaccagcaaaccatcaactatgtggttagtgggcgaaacgcacctctgtaa

SEQ ID NO: 524390 - DNA, 138 bp, Stenotrophomonas maltophilia
atgaaatcgaaccgtcaggcacgccatattctgggactgaactacaagctttctaaccagcgtaaagtggttattgaggagggtagcgaaacgcaagttacccacgccaccggcaggaaacgcccttccggcaagtaa

SEQ ID NO: 524391 - DNA, 1590 bp, Stenotrophomonas maltophilia
  misc_feature (1558)..(1567): n is a, c, g, or t
atggacaacaaactgaaaaaacatcgttccctttatattccttacgccggtccggttttactggagttcccccttctgaacaaaggcagcgcctttagcatggaagagcgcagcagctttaacctgctgggcctgctgcctgaagtggttgaaaccattgaagaacaggcagaacgtgcctggatccagtatcagggctttaaaaccgaaatcgataaacacatctacctgcgtaatattcaggacaccaacgaaaccctcttctaccgcctcgtgcagaaccatcttgaagagatgatgcccgtcatttacacccccaccgtcggcgcggcgtgtgaacgcttctcagagatctaccgtcgttcccgcggtgtgttcatctcttatcagaaccgtcacaacatggatgacattctgcaaaacgtgcctaaccacaacatcaaggtgatcgtggtgaccgatggcgaacgtattctgggcctcggtgaccagggcattggcgggatggggatccccatcggtaagctctcgctgtataccgcctgcggcgggatcagcccggcctacaccctgccggtggtacttgacgtggggaccaataaccagcaactgttgaacgatccgctgtacatgggctggcgtcacccgcgcattaccgacgacgagtactatcagtttgtggatgatttcatccaggccgtgaagcaccgctggcctgacgtgctgttgcagttcgaagacttcgcacagaaaaacgccatgccgctgctgaaccgctaccgcgatgagatctgctcgttcaacgatgacattcagggcactgcggcagtgaccgtcggtacgctgattgctgcgagccgtgcggcgggcagccagctcagctatcagaaaattgtcttcctgggtgcaggctccgcgggctgcggcatcgccgagcaaattattgcccagacccagcgcgaaggcttaagcgaagagctggcccgctcccgcgtctttatggtggaccgttttggcctgctgaccgacggcatgccaaacctgctcccgttccagaccaaactggtgcagaagcgcgaaaacctgaaaaactgggatacggataacgaagtgctctcgcttcttgacgtggtgcgcaacgtgaagccggacattctgatcggcgtgtccgggcagaccggcctcttcacggaggagattattcgcgagatgcacaagcactgcgaacgccctatcgtgatgccgctatctaacccgacttcacgcgtggaggcaacgccgcaggacatcatcgcatggaccgaaggtaaggcactggtcgcaaccggcagtccgtttgatcctgtggtgtggaaggacaaactctaccccatcgcgcagtgcaataactcctatatcttcccgggtattggtctgggagttatcgcctccggcgcgtcccgcatcaccgacgaaatgctgatgtccgcgagcgaaacgctggcaggtcactctccgctggtgaataacggtgaaggcctggtactgccggagctgaaagacattcacaaagtgtccnnnnnnnnnngcagcagcaaggcgtcgcggtga

SEQ ID NO: 524392 - DNA, 123 bp, Stenotrophomonas maltophilia
atggcaatcccagcatatctatggctgaaagatgacggcggcgcagatatcaaaggcgcggttgatgtgcaatatcgcgagggcagtattgaagtattagggaaggtgcgaacaagttcctga

SEQ ID NO: 524393 - DNA, 315 bp, Stenotrophomonas maltophilia
gtgatccagatctacacttacggcacaggcaaaaaactcgcctcaggcatttctgcattaattaagtatgagaacagaattatgaaaaaaatcaaaaccgctacagcagcgatggtgctttccgcactttcatttggcgtatttgctgctgataatatgacgcaacctgccagtgacgttaacagcccagtcgggatcgctaaagcctctgatgttgaagcaggctccaacattgcccctggctcccagtctaccggccagtcaatgaatgatgcatttgatgtacacaagctggtggcgggtgagtggtcctga

SEQ ID NO: 524394 - DNA, 759 bp, Stenotrophomonas maltophilia
atgaagcttttgaagacagtacccgcagcactgatgctggcgggtggcgtatttgcgtcactgaatgcaaccgccgatgataccgtttttactgtcatggacgatccctccactgccaaaaaaccctttgaaggtaacgtgaatgccgggtatctggcgcaatccggtaacacgaaaagctcctccatgaccgcagacagcaccctgacctggtacggcaacaccacggcctggtcgctgtggggcaatgccagcaacacgtctgctaacgatgaacgctcctctgagaaatacgcggtaggtgggcgtagccgttacaacatgacagattatgactacctgtttgggcaggcgagttggcttactgaccgctacaacggctatcgccagcgcgatgtcatgactgcgggttatggtcgtcagttcctgaatggaccagtgcacagcctccgttttgaattcggtccgggtgtccgttacgacgagtacaccaacggcgaagatgaaacccagccgctgggttatgcatcgggcacctacgcatggcaaatgactgacaacgcgaaattcacccagggtgtgtcggtgtttggtgctgaagatacaacgctgaactctgaaagtgcgttgaacgtggctatcaacgaacactttggactcaaggtggcgtacaacgtaacctggaactcatcaccgcctgattccgcgccggaacataccgatcgccgaaccacgatttctttaggttataaaatgtaa

SEQ ID NO: 524395 - DNA, 933 bp, Stenotrophomonas maltophilia
atggcttcgatttacacgctgacgctctccccttccctcgactctgcgaccatgacgccgcaaatctatccggaaggtaagctgcgctgtagcgcgccggtgtttgagccgggcggcggcggcattaacgtggcgcgcgcaattacccatctcggcggaaaagcaaccgccatcttccccgctggcggcgccacgggtgagcatctggttgcgttgctggcagatgaacaggttgccgtagataccgttgacgccagagactggacccggcaaaacctgcatgtccatgttgaatccagcggcgagcaatatcgttttgtgatgccaggggcgaagttgagcgatgatgagtttcgtcaactggaagagaaagtgctgaccattgaaagcggctcattgctggtgatcagcggtagcctgccgccgggcgtcaaaacagaaaagctgacggcactggttcaggcggtgctccagcgcggcatccgctgcattgtcgatagctcaggcgatgccctgaaggcggcgttagagcccggacaacttgaacttgtcaaacctaaccagaaagagctcagtgcgcttgtcaatcgcgagctcaaccagcctgatgacgtgcgtactgccgcggaagagctggtacgcacgggcaaagcgcatcgcgttgtagtctctctcggtcctcagggtgcgctggccgtcgacaagacgggctgcgtgcaggttgttccaccgccgatgaaaagtcagagtaccgtgggtgccggtgacagtatggttggcgcgatggtgctgaagctggcgcagggcgcttcgcttctggagatggcacgctatggcgtcgcggcagggagcgctgccaccatcaatcagggaacccgtctgtgttcgcttgcggatacccagaaaattgtcgattacctggcgagaagctga

SEQ ID NO: 524396 - DNA, 243 bp, Stenotrophomonas maltophilia
  misc_feature (208)..(217): n is a, c, g, or t
atgagcagtggtgatatcacccgctacgtcgtaaccgtcaatattcatgaagcatcgctgaccgaactgaatgaactcaacaacgctttcacgcgggcgaattttctgctcacgctgacggacgatgagggcaatattcacgatctcggctcgctggcctttggcctgataagcccgctgagtcaggaggaggtgaaggcgctggccnnnnnnnnnnggccagtggcctggtggaaagcgtga

SEQ ID NO: 524397 - DNA, 861 bp, Stenotrophomonas maltophilia
atgtggcaggctatcagtcatcttttaagtgagcagctgggtgaaggtgaaattgaactgcgtaacgaactgccaggcggagagatccatgccgcatggcatttacgttacgccgggcgcgatctcttcgtgaaatgtgatgagcgcgaattgctccccatttttacggccgaagccgatcagcttgagttgttatcgcgcagtaaaacagtcaacgttccacaggttttagccgttggcagcgatcgtgactacagctttctggtgatgaactatcttccggcgcgccctctggatgcgcacaatgcctttattctcggccaacagatcgcccgtttgcaccagtggagcgatcaacctcagtttgggctcgatttcgataacgacctctctaccaccccacagccaaacgcgtggcaacgccgctggtcgacttttttcgccgagcagcgcataggctggcagctggagctggccgctgaaaagggactagcgttcggcaacatcgacgcgattgttgaacacattcagcagcgtctggcttcgcatcagcctcaggcttcccttctgcacggtgatttatggtcgaacaactgcgcgcttgggcctgatggtccctatatatttgacccggcctgctactggggcgacagagaatgtgacctggcgatgctgccgttgcaccctgaacagccgccgcaaatttatgatggctatcagtctgtctcgccgttacctgcgggtttccttgaacgtcagccggtttatcagctgtacaccttgctaaaccgggcgattttgtttggcgggagtcatctggttaatgcccagcgggcgctggaccgtatcctggcggcatag

SEQ ID NO: 524398 - DNA, 537 bp, Stenotrophomonas maltophilia
atgacgtatcaacaagctggacgcatcgcagtcttaaaacgtattgctggttgggttattttcattcccgccctgatttcaacgctgatctccgtacttaaatttatgtacgatcacagcgaaaaacagccgggcattaatgccgtcatgctcgattttgcccacgtcatgattgagatgatgcggtttaacaccccattcctgaacgtcttctggttcaactcgcccaccccggattttcaccaccagctgaatgtcgggttctggataatctatgccttgatctttatcgcgatggcgttgcaggcctccggcgcacgcatgagccgccagacccgctttttacgcgaaggggtagaagatcagctgatacttgagaaggcgaaaggccctgacgggatgagccgcgagcagatcgaatcgcgcattgtcgttccgcgtcataccatttttgtgcagtttttcccgctctatatcctgccggttattatcattgtggccgggtatttcttctttacgctgctcggcttcctgtaa

SEQ ID NO: 524399 - DNA, 672 bp, Stenotrophomonas maltophilia
atgtcgacaccgcgccagatacttgccgctatttttgacatggatggattgttgattgattccgaacccctgtgggatcgggctgaactggacgtgatggccagcctcggcgtcgatatcagtcgtcgtaatgagctttccgataccctggggctgcgcatcgatatggtggttgacctttggtatgcccaccagccatgggttggcccggatcgcgacgaagttacggcgcgcattatcaaccgtgctatctcccttgtagaagagaataagcctctgttaccgggcgtacgcgacgctatcgccctgtgcaaggcgcaagggctgaaagtggggcttgcctctgcctcacctctgcatatgctggaaaaagtgctgacgatgttcgggctgcgcgacagcttcgacgcgctggcctcggccgaaaagcttccttacagcaagccacatccgcaggtgtatatggactgcgccgcgaaactggggctggatccgcttacctgtgtggcgctggaagattcggttaacggcatggtggcgtccaaagccgcacgtatgcgctccatcgttgtgccggctgaagaaggccgacacgatccccgctttgccctcgcggatgtcaggctgacgtctcttgaagaattgactgcccgccatctgcgcggagagtaa

SEQ ID NO: 524400 - DNA, 762 bp, Stenotrophomonas maltophilia
atgatactggatgcttttactctggcaggaaaagtggcgatggtgaccgggtgcgataccggtctggggcaaggcatggccattgccctcgcccaggcaggatgcgatatcgtgggggtaaaccgcaaggttcctgacgaaacggcagcgcgcgtcacggcgctgggacggcgctttatcgcaattcgcgccgatctcggcaagcatgagagtattcagagcgtcgtggataccgccgtcacagagatgggccgcatcgatattctggttaacaatgccggcaccattcgtcggtgcgatgcgctggaatttagcgagaaggactgggacgaggttatcgatctcaatctgaaatcggtctttttcctctctcaggcagtagcgaaacagtttatcgtgcagggtcagggcggcaagatcattaacattgcctccatgctctccttccagggcggcattcgggtgccgtcctatacggcttcgaaaagcggcgtcctcgggctcacccgcctgctggcaaacgaatgggcgccgctaggtattaacgtgaacgctatcgcgccgggttatatggcgacaaataacacccaacaacttcgcgatgatgagcagcgcagccaggcgatcctcgaccgtattccggcgggccgctggggacttccggaggatttacagggtccggtggtgtttctggcctcggcggcgtcggattacgttaacggccatacccttgccgtagacggtggctggctggcgcgctaa

SEQ ID NO: 524401 - DNA, 591 bp, Stenotrophomonas maltophilia
atgacggcggaaggccacctgcttttttcacttgcctgtgcagtgtttgctaaaaacgctgaactgacccctgtgctggcccagggggactggtggcatattgtcccttctgccgtgctgacctgcctgctgccggacatcgatcatccaaaatcattccttggtcagcggctgaagtggatttcaaaacccatcgccagagcctttggtcatcgcgggtttacccacagcctgctggccgtatttggcctgcttacactcttctatttgaaggttcccgagagttggatagtcccggcggatgccattcagggcatggtgctcggctacttaagccatatcctcgccgatatgctgacgccagcgggcgttccgctgctctggccctgccgctggcgtttccgcctgccaatcctcgtgccgcaaaaaggcaaccagctggagcgcgttctgtgcatggcgctgtttgcctatgccgtctggatgccgcagacattgcccgaaaatggtgcagtgcgctggtcatcgcagatgatcaactcgctgcaatttcagttcaatcgttttattaattaccagattgagcattaa

SEQ ID NO: 524402 - DNA, 1392 bp, Stenotrophomonas maltophilia
atgaattttccactcatcgcgaacattgttgtgttcgtcgtattgctattgcttctcgcccaggctcgccacaaacagtggagcctggcgaaaaaggtactggttggtctggtcatgggcgtggtgtttggcctggccttacacgctatttacggctccgacagcccggtactgaaagattccattcagtggttcaacattgtcggtaacggctatgtacagctgctgcaaatgatcgttatgccgctggtattcgcctcaattctgagcgccgtagcccgcctgcataatgcttctcaactgggtaaaatcagtttcctgaccattggcaccctgctcttcaccacgctgattgcggcgctggtgggtgtgctggttaccaatctgtttggcctgactgctgaaggtctggtgcagggtagcgctgaaaccgcgcgtctgacggcgattgagaccaactacgtgggtaaagtggccgatctgaccgttccgcagatggtgctctccttcattccgaaaaacccgtttgctgacctgaccggtgcaagcccaacctccattatcagcgtagtgatcttcgctgcgttcctgggcgtggctgcgctgaagctgctgaaggacgatgcgccgaaaggcgagcgggttctgactgccatcgataccctgcaaagctgggtaatgaagctggtgcgtctggtcatgcagctgacgccgtacggtgtcctggcgctgatgaccaaagtcgtggcaggttctaacctgcaagacatcatcaagcttggcagctttgtgattgcctcgtacctcggtctgggcatcatgtttgttgtgcacggcatcctgctggcggtgaacggcgttggcccgctgaaatatttccgcaaagtctggccggtgctgaccttcgccttcaccagccgttccagcgcggcatcgattccgctgaacgtggaagcacagacacgtcgtctgggcgtacccgagtcaatcgccagcttctcggcctcctttggcgccaccatcgggcagaacggctgtgcgggtctctacccggcgatgctggccgtgatggttgccccaaccgtaggtattaacccgctggatccggtctggattgcgacgctggtcggtatcgtgaccattagctccgccggtgttgcgggcgtgggcggcggcgcgaccttcgctgcgctgatcgttctgcctgcgctggggctgccggtaacgctggttgccctgctgatctctgttgaaccactgatcgatatgggtcgtaccgcgttgaacgtgagtggttcaatgaccgccggtaccctgaccagccagtggctgaagcagaccgacaaaacgattctcgacagtgaagatgatgccgaactggcacatcgttaa

SEQ ID NO: 524403 - DNA, 240 bp, Stenotrophomonas maltophilia
atgaaacctcttcgtcaacaaaaccgccaggttattagctatgtaccccgcgttgagcccgcgccgccagaccatgccctgaaggtggatggttttcgcgatgtctggatgctgcggggtaaatacgttgccttcgtgctgattggcgagcacttccgtcgctcccctgcgtttacggtgccggaatcggcgcagcgatgggcaatgcagacccgccaggatgaagaggttgaagaataa

SEQ ID NO: 524404 - DNA, 2250 bp, Stenotrophomonas maltophilia
atgtcgaacaatgataaaccacatcagtcacccattcatgggactgaagaatctcaaccgggaatggactcacttgccccagccgacggctcacacaaaccatcaccgggtccttccgcaccgggtgaacagcctaccgccccgggcagcatgaaagccccggaaacggaaaacgaaaagctgaaatcgctcgatcctcaccgcaagggcggtgaaggccatgcgctgaccacgaaccagggcgttcgcattgccgatgatcagaactccctgcgcgccggaacgcgcggcccgacgctgctggaagatttcatcctgcgcgaaaaaatcacccatttcgaccatgagcgtatccctgagcgtatcgtccacgctcgcggctccgcggcgcacggctatttccagccgtacaagagcctgaaggagatcaccaaagcagatttcctttccgatccgaacaaaatcacaccggtgtttgtgcgtttctctaccgtacagggcggcgcgggttcggccgacacggtgcgtgatatccgcggcttcgccaccaaattctataccgaagagggcattttcgacctcgtcgggaataacaccccggttttcttcatacaggacgcgcataagttccctgactttgtccatgcggtaaaaccagaaccacactgggccataccgcagggacaaagtgcgcatgacacattctgggactacgtctccctgcaaccggaaacccttcacaacgtgatgtgggcgatgtctgaccgggggatcccgcgcagctatcgcaccatggaaggctttggtattcataccttccgtctgattaacgctgaaggtaaagcgacgtttgtgcgtttccactggaaaccggtcgcggggaaagcgtccctggtgtgggatgaagcgcagaagctgactggacgcgatccggacttccaccgtcgcgaactgtgggaatccattgaagccggtgatttcccggaatacgagctggggttacagctgatcccggaagaagacgagttcaaattcgacttcgacctgctcgacccgaccaagcttattcctgaagagttggtgccggttcagctggtgggtaaaatggtgcttaaccgcaacccggataacttcttcgcggaaaatgagcaggcagcgttccacccgggccatattgtgccggggctggacttcaccaacgatccgctgctgcagggtcgtctgttctcttacaccgatacgcagatcagccgtcttggtggacctaacttccatgagctcccaatcaaccgtccgacctgtccgtaccataacttccagcgtgacgggatgcatcgccaggatatcgataccaacccggcgaactacgagccgaactccattaacgataactggccgcgtgaaaccccgccggggcctaaacgtggcggattcgagtcgtatcaggagcgcgtggacggaacaaaaattcgcgagcgcagcccgtcattcggcgaatattacgctcagcctcgcctgttctggaacagccagaccccgatcgaacagcagcacattatcggcggcttcagcttcgagctgagcaaagtggtgcgtacctacattcgcgggcgcgtggtcgaccatctggcgcatattgatatccagcttgctcagggcgtggcgaataatctcggcattacgctgactgacgagcaatgccatgctgcaccgcctaaagacgtgaacgggctgaagaaggatccgtccctgagcctgtacgcggtacctggcgggacgatcaaaggccgcgtagtggctatcctgctgaacgataaaccgcgcgccagcgacgtgctggggatcatgagggcgctcaagactcagggcgtacacgccaaactgctttactcacgcatgggtgaagtgacggccgatgatggctccgtcctgccgattgccgcgacctttgccggggcaccgtccctgacggttgatgcggtgattataccgtgcggcgacgttgagagtttgctcggtaacggtgatgccgcctattatctgctggaagcctataagcacctgaagccaatcgccctcgcaggcgatgcgcggaagtttaaatcgctgctgaaggtaccggatcaaggggaagaaggcattgtcgaaggtgataacattgacgatgcgtttatgacccggctgtttgacctgctcgccgcgcaccgcgtgtggtcgcgcagcagcaagattgaccagataccggcgtaa

SEQ ID NO: 524405 - DNA, 750 bp, Stenotrophomonas maltophilia
atggaaaacctgctgatcgtcaatgccgatgatttcggcctgtcaaaagggcagaactacggcattatcgaagcctgtcgccggggcgtcgtgacctctacaacagcgctcatcaacggtgaggcggtggaacatgcggcgcagttatgccgtgagctgcccgaactgggcgtgggcatgcactttgtgctgacgcttgggttgcccctttcaccgatgccggggctgacgcgcgacgggcaactgggtaaatggatttgggaaatggcggagcaggacgctttgtcgcttgatgagattgcccgcgagctggactgccagtttaaccgctttgtggatgtgtttggccgcgagcccacccatatcgacagtcatcatcatgtgcatatgatcccggcgattttcccgcttgtggcagaatttgcccaacgtaaaggcgtggcgatgcgcgtggatcgggaggtgcgcggactgccggacgttgcggtgacgtcaacggaggggttcagcagcgcattttatggcgacgatatcgacgaagcgctgttcctgaaggtgctggatgcctccgccgcaaaaggggagcgctcgcttgaggtaatggcgcatccggcgtttgtcgataacatcgtacgtaagagcgcctactgctggccgcgtctggcggaactggacgtgctaacgtcggcgtcgttgaagtatgcgattgccgagcgtgggtatcgtctggggacgttcagggatttgtga

SEQ ID NO: 524406 - DNA, 1356 bp, Stenotrophomonas maltophilia
atgcaaaagaaattaaaagtcgtaaccattggtggcggcagcagctataccccggaattacttgaaggtttcctgaaacgttatcatgaattaccggtcagcgaattatggctggtggatgttgaagaaggtcaggagaagctaaatattatttttgaactgtgcaaacgcatggttgaaaaagcaggcgtgcctttaaccgtgcataaaacgctggatcgccgcctggcgctgaaagatgctgacttcgtgaccacccagctgcgcgtcggccagctgaaggcgcgtgagctggacgagcgtattccgctgagccacggttatctgggccaggaaaccaacggggcaggtggcctgtttaaaggtctgcgtacgattccggtcatttttgacatcattaaagacgtggaagagatctgcccgaacgcgtgggtgattaattttaccaacccggccgggatggtcaccgaggcagtctatcgtcacaccggtttcaaacgctttatcggcgtctgcaatattccgatcggcatgaagatgttcatccgcgatgtgctggcgctaaccgataacgatgaattgtccattgacctgttcggcctgaaccacatggtctttatcaaagatgtgattgtgaacgggcaatcgcgctttgcggaactgcttgatggcgttgcctctggtcgcctgaccgcggcctcggtgaaaaacatcttcgatctgccgttcagcgaagggctgatccgctccctgaatctgctgccgtgctcgtatctgctttactacttcaagcagaaagagatgctggcgattgaaatgggcgaatactacaaaggtggcgcacgcgctcaggttgtacagaaagtagagaagcagctttttgatttgtataaagatccgaacctgaacgtcaaaccgaaagagcttgagcagcgcggtggggcatactattcagatgctgcgtgtgaagtaatcaacgccatttacaatgacaagcaggccgagcactatgtgaacgttccgcatcatgggcacatcgacaatatcccggcagactgggccgtggagatgacctgcatccttgggcgcgagggtgcaaaaccgcatccccgcattacccacttcgacgataaggtgatgggcctgattcataccatcaaaggctttgaagtggcggcgagcaatgcggccctgagcggcgagctgaatgacgtgctgctggcgctgaacctgagcccgctggtgcattctgaccgtgacgctgaaaaactcgcgagtgagatgatcctggcgcatgagaaatggctgccaaactttgctgcaacggttgagaaactgaaactcacacaccgttaa

SEQ ID NO: 524407 - DNA, 819 bp, Stenotrophomonas maltophilia
atggaaatcaaaaccgcacatgagcagcagctgtttaatggcaagaattttcacgtggtgatttacaacaaaacggagagcgccagcggtctgcaccagcatgactactacgagttcacgattgttctgaccggccgctactatcaggagatcaacggtaagcgcgtcctgcttgagcgtggcgatttcgtcttcctgccgatggggtcctatcaccagagcttttatgagtttggtgcgacgcgcattcttaacgtaggggtgagcaggcgtttcttcgagaagcactatctgccgctggttccgttctgctttgtggcgtcacaggtctatcgcgttaaaaatgagtttatgacctggattgaaacggttatcgcctcgctgaatttccgcgacaatgaatttgatgaatttattgaaaccgtgacgttctacgtcatgaaccgtcttcgccatcaccgtgaagaacagcaggtggtggatgatattcctcagtggctgcgcagtaccgtggagctgatgcacgataaaggacagttcagcgataacgccctggaaaacatggtggcgctgtcgggtaaatcgcaggaatatttaacgcgcgccacgcagcgctattaccgtaaaacgcctgttcaaattattaatgaaatccgcatcaattttgccaaaaaacagctggaaattactaactactctgtcaccgatatcgcttacgaatcgggttacagcagccccagcctgtttattaaaacctttaagaaaatgacttcattcacaccgaacagttaccgcaaaaatttaacggtaattaattaa

SEQ ID NO: 524408 - DNA, 348 bp, Stenotrophomonas maltophilia
atgttagatttagagagtatcgttgccgaagaaaccgcagtgaacgatttggaagaggtggtgatggggctcatcatcaattccgggcaggcgcgaagcctggcgtatgcggcgcttaagcaggctaagcagggcgattttgttgccgcgaaaaccatgatggagcagtcccgtacggcgttaaacgaagcgcatctggtgcagacgaaactcatcgaaagcgaccagggcgaaggaaagatgaaagtgagtctggtgctggtacatgcgcaggatcacctgatgacctccatgctggcgcgcgagatggtagcggagctcatcgagcttcacgagaagatgcagtaa

SEQ ID NO: 524409 - DNA, 1359 bp, Stenotrophomonas maltophilia
atgagtaaagtcatcgcttcacttgaaaaggtactccttccttttgctgttaaaataggaaagcagcctcacgttaatgccattaagaacggctttattaaattaatgccgttgacattagccggggcaatgttcgttttaattaacaacgtttttctcagctttggagaaggttcctttttttattcattaggaattaggttagatgcttccactattgaaacccttaatggtttaaaagccattggcggcaacgtatacaacggtacgttgggtattatgtcgctaatggcgcctttctttattggaatggccctggcggaagagcgtaaggtggatccgctggcggcgggcttactgtccattgccgcgtttatgaccgtcacgccgtacagcgtgggcgacgcttacgccgtgggcgccaactggctgggtggagcaaacatcatttccggtattattatcggactggtggtggccgaaatgttcacctttattattcgccgcaactgggttatccgcttgccggatagcgttccggcctccgtttctcgttcattttccgcgttgataccgggcttcattattctctccatcatggggattattgcctgggcgctctctcactgggggactaacttccaccagatcattatggactctatctcaacgccgctggcgtcgatgggtagcgtggtcggttgggcgtatgtcatctttacctccctgctgtggttcttcggcgtgcatggttcactggcactggcggcgctggacagcggtattatgaccccgtgggcactggaaaacgtcgcactttaccagcagtacggctccgtcgatgcggcgctggcggccggtaaaaccttccatgtgtgggcgaagccgatgcttgactcctatatcttcttgggcggtaccggggcgacgctgggtctgatcatcgcggtctttattgtctctcgccgcgccgaccatcgtcaggttgcgaagctggccctgccgtcaggcatcttccagattaacgagccgatcctgtttggtctgccaattatcatgaacccggtgatgttcattccattcatcctggttcagccgctgctggccgcgattacgctgacggcatactacctgggcattatcccgccggtgaccaacattgcgccgtggacgatgccagctggtctgggcgcgttcttcaacaccaacggtagcgtggccgccttcctgctggcgatattcaacctcgggattgcaaccctgctctacatgccgttcgtggcgattgcgaacaaggctgcaacggttatcgatgaagaagagagcgaggaggatatcgccctcgcactgaaattctaa

SEQ ID NO: 524410 - DNA, 318 bp, Stenotrophomonas maltophilia
atggaaaagaaacatatctacttgttctgctctgcgggcatgtccacttcgctgctggtttcaaaaatgcgcgcgcaggccgaaaaatatgaagtccctgtggtgattgaggcgtttccggaaacgctggcgggcgaaaagggccagacagcagatgtaattttactcgggccgcaaatcgcttatatgctgccagaaattcaacgtttgctccctaataagccggtcgaagtgatcgattccgttttatacggcaagattgatggtttaggtgtattaaaagctgctgttgcggcgattaaaaaagctgctaattaa

SEQ ID NO: 524411 - DNA, 345 bp, Stenotrophomonas maltophilia
atgaacaagaacgtagcaggaattttaagcgcagcggcggtactgactatgctggctgggtgtacagcttacgatcgcaccacagatcagttcacacagccagtggtaaaagacgtcaaaaaaggcatgacgcgctcccaggttgcagccattgccggtaaaccttcttcagaagtcactatgatccacgcgcgtggcacctgccagacctatattctgggtcaacgtaatggtaaggcagaaacctactttgtcgccctggatgataccggtcacgtgatcaattcgggttaccaaacctgcgctgaatatgacaccgatccacaggcacctaaggcgcagtaa

SEQ ID NO: 524412 - DNA, 597 bp, Stenotrophomonas maltophilia
  misc_feature (478)..(487): n is a, c, g, or t
atggctctgcaacaagaaattattcaggcgctgggcgcgaaacctgcgattaatgccaatgaagagatccgtcgtagcgttgattttttgaaagcttacctgtccgcacaccctttcctgaagacgctggtactgggtatcagcggcggtcaggactccactctggccggtaaacttagccagatggccatcaccgagctgcgtgacgagaccggtgacaccgcactgcaatttattgccgtacgtctgccgtatggcgtgcaggccgacgagcaggactgtcaggatgcgatcgcctttattcagccggaccgtgttcttaccgtaaacatcaaaggttcggtactggcaagcgagcaggccttgcgtgaagccggtattgaactgagcgattttgttcgtggcaacgagaaagcccgtgagcgcatgaaagcgcagtacagtatcgcagggatgaccaaaggggtcgtcgtcggcnnnnnnnnnngtcgtcggcaccgaccacgccgcggaagccatcaccggtttctttaccaaatacggcgatggcggcacggacatcaaccccctcttccgcctgaacaagcgtcagggtaa

SEQ ID NO: 524413 - DNA, 234 bp, Stenotrophomonas maltophilia
ttgggctgcccggagcacctgtataagaaggcgccaacggcagacctggaagacgatcgcccttccctgccggatgaagccgcgctgggtgtgacctatgacaacatcgatgattatctggaaggcaaaacgctcgacgaaggtaccgcaaaaattattgaaggctggtatctgaaaaccgagcacaaacgccgtccacccattacggtgtttgatgatttctggaaaaagtaa

SEQ ID NO: 524414 - DNA, 906 bp, Stenotrophomonas maltophilia
atgcctgaacagtatatggagcagtatgtgagcaggcgtcaatccgccccgcgtcttgagtttgaagcggcggctatctacgaatatcccgagcatcttcgcccctggcttgaggcgctgcctaaacagcctggcgtctatttcttccacggcgacagcgacaccatgccgctctatatcggcaaaagcgtaaatatccgcagtcgggtgatgtcgcacctgcgtacgccggacgaagcgtcgatgctcagacagtcccggcggatcacctggatcgagacggcaggtgaactgggcgcgcttctgctcgaagcccggctcatcaaggaacagcagccgctgtttaacaaacgcctgcgccgcaaccgccagctgtgttccttgcaggttaacgcgggaaaaccgcaggtcgtttatgcccgggaagtggatttttcgcatgaaccgaatctttacggtctgtttgccaacaaacgtgccgcactgcaaactctgcaatcccttgctgatgaattacagctttgttacggcctgttaggactggaagcgactacccgcggtcgcgcctgtttccgctccgcgttgaaacgctgcgccggggcgtgctgtggaaaagagagcgttgaagaacatcatgcccggtttatggctggcctggcctcaatcagcgtcaactgctggccgtgggaaggcgcggtggcgttgaaagagacccgcgatgcgatgacgcactatcacgtcatccgcaactggctctggcttggcgcggttgaaagtctggatgacgctgccgccctgctgcgcacacctgccgggttcgatcaggatggctacaaaattctctgtaagccgctgttaaccggtaaatatgagatagtcatgctcaatgacccggcagccaggtaa

SEQ ID NO: 524415 - DNA, 558 bp, Stenotrophomonas maltophilia
atggaattctttgatatccgtaaaatacccgtcagtctctggcgtaacggcgcgggcgagacgcgtgagatttgctgtttccctcccgcgacgcgggatttttcctggcgggccagcatcgcctccatcgccagtaacggcgaattctccgcgtttccgggcgttgaccgggtgattacgctgctggaaggcggcgaggtgacgctggatgcggggagggcgttttgccataccctgaaacaccatcagccttacggctttgcgggcgatttgacggtgaaagccgtgctcacggaggggcagatgtcgatggatttcaatgtcatgacccgacgggagcactgccaggcaaaggtgcgagttgctacccgaacgttcactaccttcgcatcacgcggtggcgtggcgttcgtattaagcggcgcctggcaactgggcgataaattactaaccgccgatcagggcgccagctggcaagagggcagccataccctccgtctactggaaacgaaggggtcgctgctgttcagtgaaattacctggctgccgggtcattga

SEQ ID NO: 524416 - DNA, 495 bp, Stenotrophomonas maltophilia
atgcgtaaattaactgcactgtttgttgcctctaccctggctctgggcgctaccagcatggcgttcgccgccgataccgcgaccactaccgccgcgccggcagaaggcaaaatgatgatgcatcataaaggcaagccgggtatgcatcatgagatgatgatgtttaaagatctgaacctgaccgatgcgcagaagcagcagatccgcgacatcaggaaaagtcagcgtgaccagatgaaacgtcctccgctggaagagcgccgcgcgatgcatgacatcattgctagcgacagcttcgacaaagcaaaagcagaagcgcagatcgacaaaatggccgagcagcataaagcgcgcatgctggcccacatggaaacccagaacaagatttacaacattctgacgccggaacagaaaaagcaatttaatgccaattttgagaagcgtctgacagaacgtgcagcgccggaaggtaaaatgcctgcaccagccgaataa

SEQ ID NO: 524417 - DNA, 966 bp, Stenotrophomonas maltophilia
atggaaaactttctggcgctgacgctggctgaagagacaccggagcggcacgagggggaaggcccctcgttccactggcgatggctggggccgggcgtgcttgaactgatgccgacggggcaatataacctgtcgctgctgctttctaccggcattcacgggaatgaaaccgcgcccgtggagattgtcgatctgttgctgcgcgcgctgtatcgcgcagagatcacgctgcactgccgtctgctggtggtactgggaaatccgcctgcgctggcgcaaaacaaacggtatctcgtgagcgacatcaaccgaatgtttggtggccgctgggcgcaatttccacagagtgatgaaacgacacgtgcgcaatggctggagaaggtggtcacggcgttttttgccggggcgggggagacgcgctggcacctcgatctgcataccgccatccgcgcctcgtaccacgtacgttttggcgtgttaccgcagcgccatcagccgtgggatgaggcgtttctgacctggcttggcgacgcgggactggaagcgctggttttccaccagacgccgggcggcacgtttacccacttcacctgcgagaatttcggcgcgctgtcctgcacgctggagctgggaaaagcgctgccgttcgggcaaaacgacctgacgcgttttgcccctacgcatcaggcgcttcgggcgttgctcgcaggggtcgcgccggaacccacccgggaaccagtcgtgcgctatcgggtcgtacagcagatcacgcgtcaaagtgaagctttccagcttcatatggcgccccatacgctgaacttcacgccgtttcgccagggcgtcctgctggcggaagatggtgagacgcgctatgcggtgcagaaccccacggaatatgttttatttcctaacccgtcagtcgcgtttggtttacgagccgggttgatgctggaaaaaatgccctga

SEQ ID NO: 524418 - DNA, 1326 bp, Stenotrophomonas maltophilia
atgaaagcgcgtgaggttaactttgacggactggtggggctgacgcaccactatgccgggctgtcgttcggcaatgaagcttcgacgaagcaccgtttccaggtctcgaacccgaagctggcggccaagcaggggctattgaaaatgaaggcgctgtccgatgccggtttcccgcaggcggtgatcccgccgcaggagcggccgaacgtggccgtgctgcgccagctgggcttcagcggtacggatgaacaggtggttgaaaaagccggtacgcagtccccacagctgctttccgcggccagttcagcctcttcaatgtgggtagcgaatgccgccaccgtcgcgccgtcggcggatacgctggacggcaaagtgcatctgaccgtcgctaacctgaacaacaaattccaccgcgccagcgaagcggagaccaccgggcgcgtgctgcgcgccatttttaatcatgatgcgcattttgaggtgcattcggcgctgccgcaggtcgcgatgtttggcgacgaaggggcggcaaaccacaaccgtctgggtggcgattacggcgatccaggcttgcagctgtttatctatggacgggaagagggcggccacgccgcgccggttcgttatccggcgagacaaaccttagccgcaagccaggcggttgcacggctgaaccaggttaatcctactcaggtgatttttgcccagcaaaatccgcaggtgatcgaccagggcgtgtttcataacgacgtgattgccgtttccaaccgtcaggtgctgttctgccacgagcaggcgtttgcccatcaggaaaagttgctggccacgctgcgcgaacgcgtgccgggatttatgccgattcaggtgcccacgcaggcggtaagcgtgcaggatgcggtcgaaacgtatctgttcaacagccagctgctgagccgggatgacggcagcatgatgctggtgctgccgcaggagttccgcaaccatcagggcgtctggcgctatctcagcgaactggtgcaggcggataacccgattgatgaactgcgcgtgtttgatctgcgggaaagtatggccaacggcgggggaccggcgtgcctgcgactgcgcgtggtgttaacgccggaggaaatgcaggccgtgaatccggcggtgatgatgaacgacacgctgttcaataccctcaatgactgggtggaccgctactatcgtgaccgtctggttcaggccgatctggttgatccgcagctgctgcgcgaaggccgcgaggcgctggatgcattatcaaccatcctgcaactgggatcggtttatccgttccagcgctaa

SEQ ID NO: 524419 - DNA, 1488 bp, Stenotrophomonas maltophilia
atgactctatggattaacggtgactgggtaacgggcgaaggtgatgcgcggacaaaaactaacccggtcggccaggaggtgctctggtcggggagcgacgccagcgccgggcaggttgagcaggcctgccaggctgcacgccgcgcgtttccggcatgggcgaaacggccattctccgagcgccaggcgctggttgagaaatttgctgcgctgctggaggccaataaagcagagctgacccgcatcattgcctgcgaaaccagcaagccgcgctgggaggcaacaaccgaagtgacggcgatgatcaataaaatcggtatatcggtgaaggcgtaccacgcccgcaccggtgagcagcataccgggatgccggacggcgccgccacgttgcgccaccgtccgcacggggtgttggcggtgtttggcccgtacaacttccccgggcatctgccgaacgggcatattgtgcctgcgctgctggcgggaaataccgtcatcttcaagccgagtgagttaacccccttaaccggagaagcggtggtaaaactctgggagcaggcggggctgccgccgggcgtgctgaatctggtgcagggcgggcgtgaaaccggtcaggcgctgagtgcgctgagcgacattgacggtctgctgtttaccggcagtgccggaacgggttatcagctgcatcgtcagctggcggggcagccggaaaaaattctggcgctggagatgggtggcaacaacccgctgattgtggaagatccggatgatatcgatgctgcggtccacctgaccattcagtcggcattcattaccgccggacagcgctgcacctgcgcccgccgcctgctggttaaacgcggcgcgcagggggatgcgtttcttaagcgtctggtggaggtgagcgggcgtctggttcccgcgaaatgggataccgagccgcagccgtttatcggcgggctgatctccgggcaggcggcgctgaacgtgctgaaagcgtggcaggagcacgtggcgcgcgaggcgaaaaccctgctggagccgaagctggttcagccgggcacatcgctgctgacgccggggattattgagatgagtgcgacgagcaacgtgccggatgaagaggtctttggcccgctgctgtgcgtctggcgctatgacgattttgcatcggcgatcgagatggccaacaacacccgctacggcctgtcgagcggcctgatatccccgcatcgcgagaaattcgaccagctgctgctggaagcgcgcgccgggatcgtgaactggaacaaaccgctgaccggcgcggcgagcaccgcgccgtttggtggcgtaggggcatcgggcaaccatcgcgccagcgcctggtatgccgccgattactgcgcgtggccaatggcaagcctggaaaccccggcgctgacgctgccggagacgctgaatccggggctggattttacagagggtgacgcccatgaaagcgcgtga

SEQ ID NO: 524420 - DNA, 1035 bp, Stenotrophomonas maltophilia
atgatggtcatccgtcccgttgcgcacggcgatctcgccgggcttatgcagcttgccggtaagacagggggcgggctgacctcgctgcctgccgatgaaaaaacgctgtcggcgcgcattgagcgcgccctgcaaacctggcaggggacgttgccaaaaagcgaacagggctatgtgttcgtgctggaagagaccgacacgggaaccgtggcggggatttgcgccatcgaggtggccgtcgggctcaacgatccgtggtacaactaccgcgtcggcacgatggtccacgcctcgaaagagctgaacgtctacaacgcgctgccgacgctttttctctgtaatgaccataccggcgccagcgaactctgcaccctgtttctcgatccggactggcgcaaagagggtaacggttatctgctctccaaatcgcgcttcatgtttatggccgcctttcgcgaccgcttcaacgaaaaagtggtcgcggagatgcgcggcgtaattgatgagacgggctactcgccgttctgggagagcctgggcgaacgcttcttctccatggaattcagccgggcggattacctgtgcggtaccggtcagaaggcgtttatcgccgagttaatgccgaagcatcctatttatacccatttcttaacgccggaagcgcaggcggtgatcggcgaagttcacccgcaaaccgctccggcccgtgcagtgctggagaaagagggatttcgctaccgtaattacgtcgacatctttgacggcggcccaacgctggaatgcgatattgaccgcgtacgcgccatccgaaaaagccgcctggttgaggtttcagaaggccagcccgcgccgggcgagtggccagcctgcctggtctcgaacgagaattacgccaacttccgcgccatgctggtgcaaaccaacccaacatgcgagcgtctggtactgacggctgcgcaactggatgccctgaaatgtaacgctggcgacacggttcgcctggtgcggctctgccctgaggagaaaacagcatga

SEQ ID NO: 524421 - DNA, 1221 bp, Stenotrophomonas maltophilia
atgtctctgtcagttacgcgtgaaaattttgatgaatggatgatgccggtatacgctccggcggcttttattccggtacgtggggaaggctctcgcctgtgggatcagcagggcaaagagtatatcgactttgcgggtgggattgcggtgaatgcgctggggcatgcaaacccggcgctgcggcaggcgctgaatgatcaggcggcgaaattctggcataccggcaacggttataccaacgaaccggcgttgcgtctggcgaagaagctgatcgacgccactttcgcagaaaaagtctttttctgtaactccggcgcggaagcgaacgaagcggcgctgaagctggcgcgcaaatatgcgcacgataaattcggcgcgcataagagcggcatcgtagcctttaaaaatgctttccatggccgcacgctatttaccgtcagtgcgggcggtcagccctcatattctcaggattttgcgccgctgccgccggatatccgtcatgcggcgtataacgatttacactctgccagcgagctgattgacgacaccacctgtgcggtgattgtcgagcccatgcagggggaaggcggcgtcatgcccgcccagaaagcgttcctgcaagggctgcgcgagctgtgcgatcggcataacgcggtcctgatttttgacgaagtccagaccggcgtgggccgcacgggtgagttgtacgcctacatgcactatggcgtgaccccggatgtgctctcaacagccaaagcgctcggcggcggtttcccggtgggggcgatgctgaccaccgaaaaattcgccagcgtgatgaccgtgggcactcatggcaccacatacggcggcaacccgctggcaaccgctgtcgccggacaggtgctggatatcatcaacactcctgaggtgcttaggggtgtgaagcagcgtcaccagtggtttgttgagcgtcttaccgccatcaataaccagaccggcatgttcaaagagatccgcggtctggggctgttgataggttgtgagcttgcccctgagtttgctggcaaagcgaagctgatttcacaggaagcggcaaagcagggcgtgatggtgttgattgccggcgctaacgtggtgcggtttgcccctgcgctgatcgtcagtgaggaagaggtcagaaccgggttagatcgttttgcgctggcctgcgaacaggtgaagtccggggtgtcatcatga

SEQ ID NO: 524422 - DNA, 807 bp, Stenotrophomonas maltophilia
atgaaatttgtctcttttaatatcaacggcctgcgtgcccgccctcaccagctcgaagcgattgttgagcaacatcagccagatgtgatcggcttgcaggagacaaaagttcacgacgatatgttcccgctcgaagaggtagcgaagctgggctataacgttttttaccacggtcagaaaggccactacggcgttgcgctgctgaccaaagatacgccggtgtcggtgcgtcgtggcttcccgggtgacggtgaagaagcacagcgtcgtctcatcatggctgagctgccttccccgctgggtaatatcactgtgattaatggttacttcccgcagggtgaaagccgcgaccacccgaccaaattcccggccaaagccaaattttatcaggatctgcaaaactaccttacgaccgaactcaacaaagataatccggtgctgatcatgggggatgtgaatatcagcccgactgatctggacattggcattggcgaagacagccgcaagcgctggctgcgcaccgggaaatgttccttcctgccggaagagcgcgagtggatgcagcgcttgcttgactgggggctggtggataccttccgcaccgctaacccggagacgcaggatcgcttctcgtggtttgactaccgctctaaaggcttcgatgacaaccggggcctgcgtattgatctgctgctggcgagcgcccccctggccgaacgctgcatcgaaaccggtatcgactatgatattcgcagcatggaaaaaccgtccgaccatgcgccggtatgggcaacgttcaagctgtaa

SEQ ID NO: 524423 - DNA, 606 bp, Stenotrophomonas maltophilia
atgctctccctcgacacgctaaaaatacaccagcaaacgttgctcgatcgtgtggagcaggcgccccttcagagcgcgctgatctattttgcggtttacgttctggtctctgcgctgtcgatacccggggctgtgcttctgacgctgctcggcggggcgattttcaacctgtgggaggcgacgctgttggtgtcattggcctcgacgctcggcgccacgcttgccatgctcgtcagccgttatctgctgcgtgactgggtgcaacggcgctttgccgcacagatgaacacgatcgatgcggggatggttcgcgatggcgcgcgctacctttttgccctgcgcctgatgccgttgtttccgttctttctggtcaatttgctgatggggctaacccgtatccaggtgcgtcactactggtgggtcagccagcttgcgatgctacctgccaccgtcatttatctgaacgccggacgcgagctgggaaaactcaccacgctgcgcgatattctgtcgccgggactgctgttcgcctttacactattagggttattaccgctggtcactcgctggctgttttcccgttacatcccttcgattaaaaagtga

SEQ ID NO: 524424 - DNA, 900 bp, Stenotrophomonas maltophilia
  misc_feature (804)..(813): n is a, c, g, or t
atgcgccgggtgcgtttttgcgcgtttctgacgagtctgctgctggcaacctctgccttcgccgcagaaagctggcaatccattcagcaacaggccaccgggcagaccgtctggtttaacgcctggggcggtgacgaggccgttaaccgctacctcgactgggtgagcggcgagatgaaaacgcactacgccattagcctgaagatcgttcatctggccgatgccgccgatgcggtgaagcggatccagacggaacaggccgcaggacgcagcagtaacgggtcggtggatctactctgggtaaacggggaaaacttccgcacgctgaaggaggcaaacctgctgctcaccggctgggcgcaaaccctgcccaactggcgttacgtcgatacccgtaaaccggtcacggaagattttgccatcccgaccgatggggcggaatccccatggggcggcgcgcagttaaccttcatcgcccgtaaagcgagtatgccgacgcctccggcagatccccacgcgctgctggcttacgctcagcagcaccctggcaaggtgagctatccgcgaccgccggattttaccggcacggcgtttcttgaacagcttctgctggcattgaccgcccatccggaggcgttaaaaaacgcgccggacggcacctttgcagagatcaccgcgccgctgtgggactatcttgatacgctgcatcccctgctgtggcgcgaagggaacgattttccgccatcgcctgcgcgcatggatacgctgctggccagcggcagcctgaacctgtcgctcaccttnnnnnnnnnncctttaaccccgctcatgcgatgcaaaaggtggcgagcggtgaactgcctgccgacagctacagtttcggctttctcaaaggcatga

SEQ ID NO: 524425 - DNA, 288 bp, Stenotrophomonas maltophilia
atgatcggcaacgtccattttgtcgctatcccggcaaatgccagtgcgagcgcaggggcgaaagtggtggcaaatttcctgctgtcaccgcaggcgcagatccgcaaagccgatcctgccgtctggggtgacccgagcgtgctggatggtgccaaactacctgcgaaagcggcaaaacagcttcatgcctttaccccttcaggcacgcctgatgtgcttcccgaaccgcacgccgcctgggttaacgccctggagcaggaatggcttcgccgctacggaacccgctaa

SEQ ID NO: 524426 - DNA, 1530 bp, Stenotrophomonas maltophilia
atggcttcgccgctacggaacccgctaagcgggctggtatgggcggcaatggcggtcatctatctgccactgcttcccgccagcggcatgctgctggccccggcgttttctctcaataactgggcggcgctgtttgccgacccgcagctgccgcaggcgctggccgctacgctggtgtcaaccctcatcgcgacgctgggttcactgtttatcgccctgagcctgcttgcgcttctttggccgggtgatggctggcagcgcctgagcacccgtctgccgtggctgttggccgtgccgcacgtcgccttcgccaccagcgcgctgctgttgtttgcggaaggcggtcagttttaccggatctgtacagtctgttcgccgcagcttgaccgctacggtatcgggcttggcctgacgcttgcggtcaaagagagcgcgttcgttctgtgggcaatctacgccgcgctgcctgaaaagcgcctcgcacagcagaaaattgtcctccataccttcggctacggacgaatgcaggcgcttaactggctcgtcctcccggctatcgcccccgcgctgggcgccgtgatgctggcggtgctcgcctggtcgctttccgtggtggatgtggcgatcgtgctcgggccgggcaacccacctacgctggcggtgctggcctggcagtggctcacccagggcgatgcgcagcagcagacaaaaggaacgttgctgtgtctggtgttgctcctgctgctggccgcacttgccgcggtgggatacggcctctggacggcttggcggcgcgcccagcctgacgtctcgggggtacgtcgcgcttcgcataccgcgttgcccgcacggacgctgggcgggttactgccgttgtgcggcgtgctctgtgcgctggttctgctgatgctggcacgccgggacgacatcggccccgtcagcgacagcctttcactgggactgctgtccagcctgacagcgctggccatcctcatgctctggcttgagtggggaccccagcgtggcgcggtgtggatctggctgccgcttgccctcccggcgctgcccctcgtgtccgggcagtatgccgtggcgctgtggctgggcatcgacggccagtacgctgcggtgctctggagccatatgctctgggttctcccgtggatgctcctggtgctgcaaccggcctggcgcaggctcgatccccggcttatcctcaccgccagaacgctgggctggcgacaggcgaaaattttctggttagtgaaatgtcccctgatggttcgtccggccctgctggcctttgcgaccggcttttccgtgagcatggcccagtacatgcccaccctctggctgggagcgggtcgttttactactctgacgacggaggcggtcgccctcagcagcggcggcagcgttccgatcctcgccagccgggcgctgggtctgttgctgttgaccagcagcgtatttgcccttgccgcgctgctcgcccggttcgtgggccgtcacagacaaggattacgttaa

SEQ ID NO: 524427 - DNA, 621 bp, Stenotrophomonas maltophilia
atgctgaacgtgaaaaatctcaccattgcgcctctgttacgtgaggttaacttccgcgtcccggcaggggagattctcacgctgatgggaccctccgggagcgggaaatcgactctgtttgcctggatggtgggggcgctatccactgattttaaggcgcacggcgagctgtggctgaacgatcgacgctgcgatctgctccccgtggaaacgcgcgggatcggcattctgtttcaggacgccctgctgtttgacgccttcagcgtggggcaaaacctgatgctggcgttgccggcgcacattgccggacgcgcgcggcgcgacgcggtagagcaggctcttgaatctgccgggctggcaaaccactatgtcagcgatccggcgaccctttccggcggcgagcgcgcccgggtcagcctgctgcgcgcccttctcgcccagccgcaggcattgctgctcgacgaaccgttcagccgactggataaaacgctccgcgcctcattccgggcgtgggtattcgaaaccactcgccagcgcaagatcccgatggtgctggtcacgcatgatgaggaagatatcccgccaggcggagaggtgattgagatttctcgctggcaataa

SEQ ID NO: 524428 - DNA, 1308 bp, Stenotrophomonas maltophilia
atgaaacgtgtttctcaactgaccgcgctggctctgatctgcggcctcgcctcactctcctccatggcggctgatatgccccactccctcacgctggaccagctccaggcgcaaaacggcgcggtaattgatacgcgcatcagtgcgttctataacggctggccgcaggcgctgcgcggaacgtccgggcatgaacccgccgcgcttaatctctctgcaggctggcttggggcaatgagcgatgaacagctcagcggctgggcaaaacagcatcggattacgcccgacatgccggttgcgctctatggcaacgatgatgacaaccagaccgtcaaaacgcggctggaaaaagcgggttttacccacgtttccatcctgagcgatgccctgcaacaatccgaccgtttgcaacgtctggcacattttgaacagctggtttatccgcagtggatccacctgttgcagcagggcaaacccgttaccgccgcaccagccggagagtggaaggtgatcgaggctggctggggtgcgccgaagctttatctcctgagccacattcccggcgcgggctacatcgacaccattgaagtggaaagcgaaccgctgtggaataaggtcgctgacgaaaagttgaaagcgatgttggcgaagcacgggatccgtcacgataccaccgtcattctgtacggtcgcgacgtatatgccgccgcgcgcgtggcgcagatcatgctctacgcgggcgtgaaggatgtgcgaattctggacggcggctggaaggcatggtcagacgccagcctgcccgttgagcgcggaacgcctgagaacgtgaagccagcccctgattttggcgcgccgatcccaggccagccccggctgatggtggatatggaacaggcccggggaatgctgcaccgtcaggacgcctcactggtgagcattcgttcctggccagagtttatcggtgaaaccagcggctacagttatatcaagccaaaaggtgacattgccggtgcgcgctggggccatgcgggtagcgacgcgacccacatggaagatttccacaatccggatggcaccatgcgcagcgccgatgatattgccgccatgtggaagacgtggaatatcctgccggagcagcacgttgcgttctactgtggtaccggctggcgcgcgtctgaagccttcatgtacgcccgcgccatgggctggcaaaacgttgccgtctacgacggcggctggtacgaatggagcagccatccgcagaacccggtctccaccggcgcgcgcggcccggagagtacacgctag

SEQ ID NO: 524429 - DNA, 618 bp, Stenotrophomonas maltophilia
atgctggataaacatctgcatccacggctgaagcccgggttaaatcagctggccgccgcgctggataaaccgtttattacgcctgatgggttaacgctcgccgggtttgcgattggcgtactggcgttaccgtttctggcgctgggctggtatctgccagcgctggtcgccattgtgctgaaccggctgctggatggtctggacggtgcgctggcgcgtcgccgtggcctgacggacgcgggaggatttcttgatatcgccctcgacttcctgttttacgcgctggtaccgtttggcttcgcgctggccgctccggctgacaatgcgatcgccgccgcctggctgctgttcgcgtttatggggacgggcagcagtttcctggcctttgccgcgctggcggggaagcataatatcgtcaaccccggctacgcgcacaagtcgctttattacattggaggattaacggaaggaacggagaccatcgcgctgtttgtgctgtgctgcctgtttccggcacacttcacgctgttcgcctgggcgtttggcgcgttgtgctggctgaccaccacaacgcgcatctggagcggttacgtgacgctgaagtcactcccccgctag

SEQ ID NO: 524430 - DNA, 573 bp, Stenotrophomonas maltophilia
gtgaaagagacagccgcctgggttgcgcccatggaaacccttcccgtcagcctcaagcccattgctgccatgcagaaaaaacacttcggcgcggtgctgaaccccacgcgctggtgggggcgtatgccgcgtcttttctggctggtagcgctatttgtcggctatctggagcggcgcaaggcgcgtttgacgccggttctgcgttcgttactaatgacgcgggtctcgcagatctgccactgcgcattttgtattgatgccaacagcctgcgtctggccgagcggagcggggcgctggataaagtgcaggccgtcaacgactggcaaaattccaccctgttcagcgaagaggagcgcgcggcgctggcctatgcggaagcggtcaccgccacgccgcctcaggtggatgaaaatatcaaaaaccagctgaagcgccactttagcgaagagactatcaccgaaatgacggctctgattgcctttcagaacctttccgcccgctttaacgccgcgctggatatcccggctcagggcctgtgtgccacgtttaaaggtaaaccgcatgctggataa

SEQ ID NO: 524431 - DNA, 417 bp, Stenotrophomonas maltophilia
atgctgaaaacactcgatgttgttgcggccatcctcgaaaaagagggcaagatcttgctggcgcagcgtcccgaacatgccgatcagccaggaatgtgggaatttgcgggcggaaaggttgaagccgctgagacccagcaggaagcgctgatccgcgaactacgcgaagagctcggcattgaagccgtgcccgcgcggtatgtggcaagccaccagcgggaagtgtcgcagcggctgatccacctccacgcctggcacgtgccggaatttagcggcgagctgaaggcgcactaccactcggcgctggtgtggtgcacgccagaagacgcgttcacgtatgatttagccccggcggatataccgcttctggaagcgtttattcttttacgcgacgccagaccagcgggtttgtactga

SEQ ID NO: 524432 - DNA, 273 bp, Stenotrophomonas maltophilia
atgaaccgtttcgcaatggccgcgttatgtttgatggtgtccgccggggcacaggctgatcgcattcgcccggatgtcgaagttaacgtgccgccagaggtttttagcgctggcggacagcgtgcgcagccgtgtaatcagtgctgtatctatcaggatcaaaactattccgaaggcgcagtggtcagggcggatggcgtgctgttgcagtgccagcgtgatgagcgcaccctcagtacaaacccgctggtctggcgtcgcgtaaaagaataa

SEQ ID NO: 524433 - DNA, 1344 bp, Stenotrophomonas maltophilia
atggatcagacacgctctctggaaagctttcttgcccatgttcagcagcgcgacccgcaccaaagcgagtttgcccaggccgttcgtgaagtcatgaccaccctgtggcccttccttgaggaaaatccgcgctaccgccagatggcgctgcttgaacgtctggtggagccagagcgcgtcatccagttccgcgtggcgtgggtggacgatcgcaatcaggtacaggtcaaccgcgcgtggcgcgtgcagtttaactccgccattgggccgtttaagggcgggatgcgcttccatccctcggtgaacctgtcgattctgaaattcctcggcttcgagcagacctttaaaaatgcgctcactaccctgccgatgggcggcggtaaaggcgggagtgatttcgatccgaaaggcaagagcgaaggcgaagtgatgcgcttctgccaggcgctggtcactgagctctatcgccaccttgggccggacaccgacgttcctgccggggatatcggcgtgggtggtcgtgaagtgggctttatggccgggatgatgaaaaagctctccaacaacagcgcctgcgtctttaccggcaaaggtctgtcgtttggcggcagcctgattcgtccggaagcgacgggttacggtctggtctatttcactgaagcgatgcttaagcgtcacgggctgagcttcgaggggatgcgcgtggcggtctccggctccggcaacgtggcgcagtacgctatcgagaaagcgatggcgtttggcgcgcgcgtagtgaccgcctccgactccagcggcaccgtggtggatgaagctggcttcacggcagaaaaactggcgcgtctgtgcgaaatcaaagccagccgtgacggccgcgtggcggattatgcccgagagtttagcctgacctatctggaaggtaaacagccgtggggtgtgccggtggatatcgccctgccgtgcgcgacgcaaaacgagctggacgtggatgccgcccggacgctgattagcaatggcgtgaaggcggtagcggaaggggcaaatatgcccaccaccattgaagcgaccgatctgttcctggacgcgggcgtactctttgcgccaggcaaggcggcgaacgcgggcggggtggcaacatccggtctggaaatggcacaaaacgccgcgagaatgggctggaaggcggagaaagtggatgcccgtctgcaccacattatgcttgatattcaccatgcctgcgtggagtacggcggtgaggcttcacagaccaactacgtgcgcggcgccaacatcgccgggttcgtgaaggtggccgatgcgatgatcgggcagggtgtgatttag

SEQ ID NO: 524434 - DNA, 1923 bp, Stenotrophomonas maltophilia
atgcggttgtttattgccgaaaagccgagtctggcgcgagccatcgccgacgtgctgcccaagccgcatcgcaaaggtgatggctttatcgaatgcggtaacgggcaggtggtcacctggtgtatcggtcacctgcttgaacaggcgcagccggatgtctacgacaaccgctacgcccgctggaacctcaacgatctgccgatcgtgccggaaaagtggcgtctgcaaccgcgtccttccgtcaccaaacagctcaacgtcattaagcgtttcctgcatgaggcgacggaagtggtccacgcgggtgacccggacagggaagggcaactgcttgtcgacgaagtgctcgactacctggagttggcaccggaaaagcgccagcaggtgcagcgctgtttaattaacgacctcaacccgcaggcggtggagcgcgcgatttcgcgcctgcgcgccaacagcgaatttattcccctgtgtgtctccgcgctggcgcgtgcgcgtgccgactggctgtacgggatcaacatgacccgcgcctacaccatcctgggacgcaatgcgggctatcagggcgtactctctgttgggcgtgttcaaaccccggtgctggggctggtggtgcgtcgcgacgaagagatcgaaaatttcgtcgccaaagacttcttcgaagtcaaagcgcatatcgtcacgccgaaagacgaacgctttaccgccgtctggcagccgagcgatgcctgtgagtcatatcaggacgaagagggacggctgctgcatcgtccgctggcggagcacgtggttaaccgcattaccggccagcccgcgatcgttaccagctataacgacaaacgggaatcagagcccgcaccgctgccgttctccctttcggcgttgcagatcgaggccgcgaaaaagtttggcctgagcgcgcagaacgtgctcgatatctgccagaagctctatgaaacccacaagctgatcacctatccgcgttcggacagccgctatctgccggaggagcacttcgccggacgccactcggtgatgaatgccattggtgtccatgcgccggatctgttgccgcagccggcggtaaacccggatacccataaccgctgctgggacgataaaaaagtcgatgcccaccacgcgataatcccgacggcgcgcaccagcaacgtcaacctgaacgacaacgaagcaaaggtctataacctgatcgcgcgtcagtatctgatgcagttctgcccggacgcggttttccgcaagtgcgttattgagctggaaattgccaaaggcaaatttatcgccaaagcgcgtttcctcgcggaagcgggctggcgcacgctgctcggcaacaaagagcgtgacgaagagaacgacggcacgccgctgccggtcgtagccaaaggcgatgaactgctgtgcgaaaaaggcgaagtggttgaacgtcagacccagccgccgcgccacttcaccgatgcgacgctgctttcggccatgaccgggatcgcccgttttgtgcaggataaagatctgaagaagatcctccgcgccaccgacggtctgggtacggaagcaacccgcgcggggattatcgagttgctgtttaagcgtggttttctcgagaaaaaagggcgctatattcattcgacagagccgggccgggcactgattcactccttgccagagctggccgccagaccggacatgaccgcgcactgggagtcggtgctgacgcagatcagcgaaaagcagtgccgttaccaggactttatgcagccgttggtggggacgctttatcagctgattgatcaggcgcgcagtacgccagtgaagcgattccgggggatggttgccccgggtggcggggcgaagaaaccgttcaaaaagaaaaaaagcgcagccaaaaataccaccgcttaa

SEQ ID NO: 524435 - DNA, 1044 bp, Stenotrophomonas maltophilia
atgagcgagcaaactattcgtttaacgcaatacagccacggagccggttgcggttgtaaaatttccccgaaagtgctggagaccatcctgcacagtgaacaggcgaagtttgtcgacccgaacctgcttgtcggtaacgaaacgcgtgacgatgcagcggtttatgacttaggtaacggcaccagcattatcagcaccactgacttctttatgccgattgtcgacaacccgttcgacttcggacgcattgcggccaccaacgccatcagcgatatcttcgcgatgggcggtaagccgattatggcgatcgccattctgggctggccgattaacaccctcccgccggagattgcccgcgatgtcatcgaaggcggacgctttgcctgccagcaggcgggtattgccctggccggtggtcactctatcgatgcgccggagccgatcttcggcctggccgtcaccggcgtggtgccgaccgaacgcgtgaagcgcaacagcaccgcgcaggcgggctgcaagctgttcctcaccaagccgctgggcattggcgtactgacaaccgccgagaaaaaatccctgctgaagcccgagcatattggtctggcaacggaagtgatgtgccagatgaaccttgccggtgcggcattcgccagtatcgacggcgtgaaggccatgaccgacgtgaccggctttggtctgctgggacacctctctgaagtctgtcagggcgcgggcgtgcaggcgcaggtctggtatcaggatgtgccgaagctgccgggcgtggaagagtacattgctcagggcgccgttccgggcgggacgcagcgcaacttcgccagctacggccatttaatgggcgaaatgccggaagcgtggcgcaatctgctgtgcgatccgcaaacctccggcggcctgctgctggcggtgacgccggaagcagaagctgacgttcaggcaacggcggccgagtttggcatcaccctgacggccattggcgagctggtgaccgcccgcggtggccgcccgatgattgagatccgttaa

SEQ ID NO: 524436 - DNA, 552 bp, Stenotrophomonas maltophilia
atggacgcacttgaactgcttgttaaccgtcgtagcgcttcccgcctggccgacccggcccccgtcggcgaacagctggaaaacattctgcgtgccggaatgcgtgcgccggaccatggcacattgcagccgtggcacttctttattattgaaggcgaagggcgcgaccgcttcagccagctgctggagcagggggcggttgccgcaggccaggatgagaaggggattgataaagcccgcaacgcgccgttccgtgcgccgatgatcatcgcggtagtcgctaaatgccaggccgaccataaagtgccggtctgggagcaggagatgtctgccggttgcgcggtaatggcaatgcagatggccgccgtcgcgcagggctttaacggcatctggcgtaccgggccgctgaccgggagcgccgccgtgcgggaaggcttctcctgcggtgaacacgataaaattgtcggcttcctctatctcggcaccccgcagcttaaagcctccagcaccattagcgtgccggacaccacgcctttcgtcagccgtttttaa

SEQ ID NO: 524437 - DNA, 1857 bp, Stenotrophomonas maltophilia
atgcgaaccctttggcgaatctttgccggtttctttaaatggacgtggcgactgctcaacttcgtccgcaacctggtgatgaatatcttcttcatcttcctggtcctggtatgcgcaggtatctggatgcatctcagcagcgccagccaggcgcagaattcgacgcgcggcgcactgctcctcgatatcaccggtgtgattgttgataagccatcgaccagcaaccgtctgggcgtgattggccgccagctgttcggcgcgacttcagaccgcctgcaggaaaactccctgtttgatatcgtcgacacgatccgtcaggccaaagacgatcgcaacattaccggtatcgtgctggatctgaaagattttgccggagccgatcagccttcgatgcagtacatcgggaaagcgctgcgggaattccgcgacaacggtaaaccggtcattgccgtcggcgacagctacacccaggggcaatattatctggcgagctttgctaacaaaatctggctctctccgcagggcacggtcgatctgcatggcttcgccacaaatggtctgtactacaaatcgctgctcgacaagctgaaggtcactacccacgtcttccgcgtcgggacctataaatctgccgtggagccgtttatccgtgatgatatgtcccctgccgcccgtgaagcggacagccgctggattggcgagctgtggcagaactatctcggcaccattgccgctaaccgtcaaatgaccgctgagcaggtcttcccgggcgcgcgcggtgtgctggagggcctgcgcaaagtggacggcgatacagcgaaatacgcgcttgataacaaactggtcgatcggctgggttccagcgctgaaatcgaaaaagcgctgaccaaacagttcggctggagtaaagaggacaagaactacagcgccatcagcatgtatgactacgccgcgaaaaagccggatgacagcggtgacagcatcgccgtggtgtttgctaacggggccattatggacggtgaagaaacgccggggaacgtcggcggggacaccaccgcgtcgcagatccgcgatgcgcgtctggatccgaaagtgaaggcgattgtcctgcgggtgaacagccctggcggcagcgtcagcgcctccgaggtgatccgtgctgagctggccgccgcgcgtgccgcgggcaagccggtcgtggtctcgatggggggcatggcggcttcaggggggtactggatctcgacgccagccaactacattgtggctaacccaagcacgctgaccggctcgattggcatcttcggcgtgatcaacaccgtagagaacagcctggattatctcggcgttcataccgacggcgtttccacctcgccgctggcggatgtgtccgtgactaaatctctgccgcctgaggtgtccgagatgatgcagctcagcattgagagtggctataagcgcttcatcacgctggtggcggattcccgtaaaaagacgccagaccagattgaccagatcgcgcagggccacgtctggaccggccaggatgcgaagagcaacggtctggtagacagcctgggtgacttcgacgatgccgtgaagaaagcggcggaactggcgaagctcaagcagtggcacgttgactattatcaggacgaaccgacgttcttcgatatggtcatggacagcatgtccggctccgtccgcgccatgctgccggaagcgcttcaggcgtatctgccggcgccggtggcgacggcggctaaagccatgaaagcggagagcgataagctcgcgactttcaacgatccgcaaagccgttacgcgttttgcctgacctgtgcgaacgtgcgttaa

SEQ ID NO: 524438 - DNA, 1017 bp, Stenotrophomonas maltophilia
atgcagaagaaatcaatatatgtcgcctataccggcggtaccatcggtatgcagcgctcagaaaatggctatatcccggtttctggccacttgcagcgccagctggcgctgatgcctgaattccaccgtccggaaatgccggactttaccatccacgaatatgagccgctgatggactcctccgacatgacgccggaagactggcagcatattgcggacgatattaaagcccattacgaccagtacgacggcttcgtgatactgcacggcaccgacaccatggcgttcaccgcctcggcgctctccttcatgctggagaacctgggcaagcccgtcatcgtgaccggttcgcagatcccgctggcggaactgcgttcagacgggcagatcaacctgcttaactccctgtacgtggccgctaattacccgatcaacgaggtaacgctgttcttcaacaaccgactgtaccgcgggaaccgtaccactaaagcgcacgctgacggctttgacgcgtttgcctcacctaacctgcaaccgctgctggaagcggggatccatatccgtcgtctgggcacgccgcccgcgccaaatactgcaggcgagctgatcgttcacccgatcaccccgcagccgattggcgtggtgacgatttatccgggtatttccgccgacgtggtgcgcaacttcctgcgccagccggtgaaggcgctgatcctgcgctcctatggtgtgggtaacgccccgcagaacggtgagttcctgaaagagcttcaggaggcgagcgatcgcgggattgtggtggtgaacctcactcagtgtatgtccggtaaggtcaatatgggcggctacgccaccggcaacgccctggcgcacgctggcgtgatcagtggtttcgatatgaccgttgaggcaacgctgactaaacttcactatttactgagtcaggatctggatattgattccattcgccgcgccatgatgcaaaacctgcgcggtgaactgacgccggacgaataa

SEQ ID NO: 524439 - DNA, 642 bp, Stenotrophomonas maltophilia
atgaagcaacgcgccctgttactggtcgatttgcaaaatgatttctgtgcgggcggtgcgctggccgtcgcggaaggcgacagcaccgtagacgtcgcgaattcgctgattgagtggtgtaaggctcgtgatgaagcggtggtggcgagtcaggactggcatccggcaaaccacggcagctttgccagccagcacaacgttgagccttacagccagggcgaactggacggactggcgcaaaccttctggcccgatcactgcgtgcagcagacggaaggcgctgagctgcatccgctgctgaaccagaaagccatcgacgcggtgttccacaaaggtgaaaatccaaccatcgacagctacagcgcattcttcgataacggtcaccgccagaagacggcgcttgacgcatggttacgccatcatgagatcaccgagctgattgtgctgggcctggcgacggattactgcgtgaagttcaccgtgctggatgcgctccagttgggctataccgtgaatgtcattaccgacggctgtcgcggggtgaatattcagccgcatgacagcgcccaggcgtttatggatatggccgcagaaggcgcaacactgtatacgctggctgactggatggagacgcaggcgtaa

SEQ ID NO: 524440 - DNA, 1254 bp, Stenotrophomonas maltophilia
atgaaacgtttgcccttgctggcagcattacccttgctttgcgcgtcactggcttccgccgcgcccatgatgtccgtgggctacttcaatggcggtggcgatgttaccgccggaccgggtggcgatatcaataaactcgatgtccgtcagatcacacacctcaactactcgtttggtctggtctataacaacgagaaagacgaaaccaaccctgcactgaaagatccggcaaaactgcatcaaatctggttatcacccaaggtggcatccgacctggcgttacttcctcagcttcgtaaacaaaacccgaatttaaaagtgctgctttccgttggcggctggggcgcacgtggtttttctggcgcagcggctaccaaagagagccgcgcggtgtttattcgctccgcacagcagatcgtcagtcaatacggcctggacgggatcgatctcgactgggagttcccggtcaacggcgcgtggggactggtcgagagcaccccagccgacagggataatttcaccgcgctgttaaaagagatgcgtgacgcgtttggtaagaaaaaactggtcacgattgcggtgggcgcaaatgcagaaagtccgaaaagctgggtggatgtgaaggccattgcccccctgctcgattacatcaacctgatgacctacgacatggcgtacgggacgcagtattttaacgcgaatctgtatgactccagcgcctggccaacggtggctgccgcagacaaatacagcgttgattttgtggtgaataactatctggccgccggccttaagccgcagcaaatgaacctcggaatcggtttttacggtcgtgtaccgaagcgcgccgttgaaccgggtatcgactggagtaaaccggacgcgcaaaacaatcctgtcacccagccctacttcgggccgcaggaactgggcctgttcaaatcgcttggctatgacctgaccaaagatacctacgtgaaatacaacgatatcgtccgcaaactgctaaacgatccgcagaaacgctttaccgagcactgggacgaacaggcgaaggtgccgtggctgtcggtaaaatccgccgacgggaaggcgctgtttgcgatctcctatgagaacccgcgttccgtggcgattaaagcagattacatcaaggagaaaggtctcgccggggcgatgttctgggagtatggcgcggatgacaacaaccagttagcgaagcagctggcggagtcgcttgggatcccgcactaa

SEQ ID NO: 524441 - DNA, 1146 bp, Stenotrophomonas maltophilia
atgaaaatcgtaatcgcgccagactcttataaagaaagcctgtctgccactgaggtggcgcaggcgatagaaaaaggatttcgggaaattttccccgacgctcattacgtgtctgttcccgttgctgacggcggagaaggtacggttgaagcgatgatcgccgcgacgcagggcacctggcagcaggctgtcgtcaccggcccgttaggggaaaaggtgaaggccagctgggggatctcgggcgacggtaccaccgcgtttatcgagatggccgccgccagcggcctggtacttgttcctcccgcgcagcgtaacccgctggtcacgacgtcgcgcgggacgggggagctgatcctccgcgcgctggataaaggcgcgcgcaacatcattatcggtatcggcgggagcgcaaccaacgatgggggcgcgggtatgatgcaggcgctgggcgcgaggtttacggatgcgaacgggacggagatcggctacggcggcggcagcctgatggcgctgaaccgtattgatatttctgatcttgatccgcgtcttcaggggtgcgcaatccgcgtcgcctgtgacgtgacgaatccgctggtcggtgaaagcggcgcgtcgcgtatctttggcccgcaaaaaggcgccacggaggagatgatcctcgaactcgacgccagtcttagccactacgccaacgtgatcaaaaaatcgctgcgcattgacgtcaacccggttccgggggcaggagcggcgggcggcatgggcgcggcgctgatggccttcctgggcgctgagctgaaaagcggcattgagattgtcactcaggcgctcaatcttgaagaacatattcacgactgcacgtgggtgctgacgggagaagggcgcatcgacagccagagcattaatggcaaagtgcctgtcggcgtggcgagcgtcgccaaaaaataccataagccagtgatagggattgccggaagtctgacgcaggatgtgggtgtggtgcatcagtacggcatcgacgcggtgttcagcgtattgacccgcatcggttcactggaagaggcgttccagggagcgtacgacaacatttaccgcgcctcgcgcaatatcgcggccacattgcaggtaggcatgcgtagccaggggtga

SEQ ID NO: 524442 - DNA, 891 bp, Stenotrophomonas maltophilia
atgacgctgaaagtgggttttattggcctgggtatcatgggcaaaccaatgagcaaaaacctcatcaaagcaggttactcactggtggttttagatcgtaattcagacgcggtggcagaagtgattgcggctggcgcagaaacggcgacaactgcaaaagcgatcgccgagcagtgcgatgtcattatcaccatgctgccaaactccccgcacgtgaaagaggtggcgctgggtgagaacggcattatcgacggcgcgaagccgggtctggtggtgatcgacatgagttctatcgcgccgctggcgagccgcgaaatcagtgaggcgctgaaagcgaaaggcgtggagatgctggatgcgccggtcagcggcggcgaaccgaaagccatcgacggtactctgtcggtgatggtggggggcgataaagccgtgttcgacaaatactacgacctgatgaaagccatggctggctccgtggtgcataccggtgaaattggcgcaggcaacgtcaccaagctggcaaaccaggtgattgtggcgttgaacatcgcggccatgtccgaagcactgacgctggccaccaaagcgggcgttaatccggatctggtctatcaggccattcgcggtggtcttgcgggcagcaccgtgctggatgccaaggcaccgatggtgatggatcgtaacttcaagccgggcttccgcatcgatctgcacattaaagatctggcgaatgcgctggatacctcccacggcgtgggcgcgcagttgccgctgactgccgccgtcatggagatgatgcaggcgctgcgtgcggacggtctgggcaccgccgatcacagcgcgttagcgtgctattacgaaaagctggcgaaggttgaaattgctcgctaa

SEQ ID NO: 524443 - DNA, 771 bp, Stenotrophomonas maltophilia
atgagtaacgacatcttcccgaataaatttaaagcggcccttgcggcgcatcagattcagattggctgctggtctgcgctggccaaccccatcagcaccgaagtgctgggcctggccggattcgactggctggtgctggacggcgaacatgcgccaaacgatatcaacacgtttattccgcagctgatggcgctgaaaggcagccacagcgcgccggtggtgcgtgtacctaccaacgagccggtgatcatcaagcgtctgctggatatcggcttctacaacttcctgatcccgtttgttgaaacggaagaagaagcggtgctggccgtagctgccacccgctatccgccggaagggatccgcggcgtgtctgtctcgcaccgcgccaacatgtttggcaccgtgccggactatttcgcccagtccaacaagaacatcaccattctggttcagatcgagagccagcagggggtcgataacgtcgacgccattgccgcgaccgtaggtgtcgacggtattttcgtcggcccgagcgatctggcggccgcctttggtcatctgggcaacgccagccacccggacgtgcagcgggcaatccagcacatttttgcccgtgccaaagcgcacggtaaaccgtgcggcattctggcgccggtggaagccgatgcccgccgctacctggagtggggcgcaacgtttgtcgccgtcggcagcgacctcggcgtattccgcgccgccacgcagaaattagcagacgcttttaaaaaataa

SEQ ID NO: 524444 - DNA, 1572 bp, Stenotrophomonas maltophilia
atggccgatattgaaattcgacaggcgtcgccgacggcgttctatataaaagtgcacgataccgataacgtggcgattattgtcaacgacaatggcttaaaagcgggtacccgctttccggacgggctggagctgattgagcacattccgcaggggcacaaagtcgcactggtcgatatcccggcgcagggcgaaatcgtgcgctacggcgaagtcatcggctatgcggtgcgcgctatcccgcagggtagctggattgaggagtcgctggttgaactgcccaccgccccgccgctggagacgttgccgctggctacccgcgtccctgagccgttacctccgctggagggttataccttcgaaggttaccgcaacgcggatggcagtgtgggaaccaaaaacctgcttggcatcaccaccagcgtgcattgcgtggcgggtgtcgtggattacgtggtgaaaattattgagcgcgatctgctgccgaaataccccaacgttgacggcgtggtggggcttaaccacctgtacggctgcggcgtggcgatcaacgcgcccgcagcggtcgtgccgatccgcacgatccacaatatcgcccttaacccgaactttggcggcgaggtgatggtgattggcctcggctgtgaaaaattgcagccagaacgcctgttgcagggtactgaggatgtgaaagccattccggttgacgaggccagtattgtgcgtcttcaggatgaacaccatgtcggcttcagatcgatggtcgacgacattttacaggtggcagagcgccatctggagaagctgaacaaacgccagcgtgaaacctgcccggcctctgaactggtggttgggacacagtgtggcggcagcgatgcgttttccggcgtcaccgctaacccggcggtaggttatgcctccgatctgttcgtgcgctgcggcgccacggtgatgttctccgaagtcaccgaagtgcgtgatgctatccacctgctcacgccgcgcgccgttaacgaagaggtgggcaaacgcctgctggaggagatggcctggtacgataactatctcgacatgggcaaaaccgaccgcagcgccaacccgtccccgggtaacaagaaaggcggcctggcgaacgtggtggaaaaggccctcgggtcgattgccaaatccggccagagcgcgattgtggaagtgctctcacctggccagcgaccaaccaaacgcggtctgatctacgcggcaacgcctgccagtgatttcgtgtgcggcacccagcaggtagcatccggcattacggtacaggtctttaccaccggacgcggcacgccgtacggcctgatggcggtaccggtgatcaaaatggcgacccgcaccgagctggcaaaccgctggtatgacttaatggatatcaacgcgggcaccatcgccaccggggaagagagtattgaagaggtgggctggaagctgttccacttcattctggatgtggcaagcgggcggaagaaaaccttctccgatcaatggggattgcataactcgctggcggtgtttaacccggcaccggtgacatga

SEQ ID NO: 524445 - DNA, 804 bp, Stenotrophomonas maltophilia
atgagcagcaccgattcatccgcagagaagcgcatcaccggcaccagtgaaaggcgagagcagatcattcagcggttgcgggcgcagggaagcgtgcaagttaacgatctttctcttttatacggcgtgtcgacggtgacgatccgtaacgatctggcctttctggaaaagcaggggattgccgttcgcgcttacggcggcgcgctgatttgtgaaggtaatgcccccggcgtggagccgtccgttgaggacaaaagttcccttaatacggctgtgaagcgcagcatcgcgcaggcggcggctgaactggtgaagccgggtcatcgcattattctggactccggcaccacaacctttgaaattgcccgcatgctgcgccagcataccgatgtcattgccatgaccaacgggatgaacgtggcaaacgcgctgctggaagcggagggagtggagctgctgatgaccggcgggcacttgcgccgtcagtcgcagtccttctatggtgaccaggcggagcagtccttacagaattaccattttgacctgctgttcctgggcgtcgatgccatcgatctcgatcggggggtgagtacgcacaacgaggatgaagcccgtctgaaccggaaaatgtgcgaggtggcggagcgtattatcgttgtcactgattccagcaagtttaaccgttcaagcctgcataaaatcattgatactcagcggatcgacatgattatcgttgatgaaggtattccggcggaaagcctggaagggttacgcaaaagcgggatcgatgtggtgctggtctaa

SEQ ID NO: 524446 - DNA, 1296 bp, Stenotrophomonas maltophilia
gtgaaacatctgacagaaatggtggaacaacataaacgggggaatacaaacgggatttacgccgtctgttccgcacatccattggtacttgaagctgcaattcgttacgcccattcacaacagacgcctctgctgattgaagccacctcaaaccaggtggatcaatttggcggctataccggtatgacgcccgccgatttttatgggtttgtctgcaatctggcgggatccctcggtttccccacctcacagctgatccttggcggcgatcatttaggtcctaaccgctggcaaaacctgccagctttgcaggcgatggcgaacgccgacgatctgatcagaagctacgtggcggccggatttaaaaaaattcacctcgattgcagcatgtcctgcgaagacgatccggttcctttaaccgatgcaatcgttgccgggcgtgccgctcggctggctaaaattgccgaaaccacctgtatcgagcaatttggcgtagcggatctggtctacgttatcggcacggaagttccggttcccggtggggcacacgaaacgctgaccgagcttgaggtcaccacaccagaggcggcacgtgccacgcttgaggcacaccgccacgcattcgagaaggaagggttaagcgacatctggccgcgcattattggcctggtggttcagcctggcgttgagttcgaccatgcgcatgtttgtgactatcaaccgcataaagccgtcgcactgagcaagatggttgaagcctacgacacgctcgtatttgaagcacactctaccgattaccagacgccgcaggcgctgcgccagttggtgaaagatcacttcgccattctgaaagtcggccctgcgctaaccttcgcgctgcgcgaagcgctgttctcactggctgcaattgaagaagagcttttgccggcaaaagcctgctcaggactgcgtcacgtcctggaaaacgtgatgctcgatcgcccggaatactggcaaagccactatcacggcgacggcaatgcccgtcgcctggcccgcggttacagctattccgaccgcgtgcgctattactggccagacagccagattgacgaggcttttgagcgactggtacgcaacctggcggatgaaccgatcccgctgccgctgatcagccagtatctgccgttgcagtacagcaaagttcgcgagggtgctctcaggtccataccacgggagctcattctcgaccacattcaggacatactccagcagtaccataccgcctgcgaaggcgtaacgactcaacacgcataa

SEQ ID NO: 524447 - DNA, 474 bp, Stenotrophomonas maltophilia
atgccaaacattgtcttatgccgcattgatgaacgcctgatccacggtcaggtgggcgtacagtgggtggggtttgcgggggcgaacctggtgctggtggcaaatgacgaggttgcagacgatccggttcagcaaaacctgatggagatggtgcttgcggaaggcatcgccgtgcgtttctggtccctgcaaaaagtgatcgacaacattcatcgcgccgccgatcggcagaaaattctgctggtctgtaaaacaccggctgattttttaacgctggtcgagggcggcgtgcctatcacccgtatcaacgtcggaaatatgcattatgccagtggcaaacagcaaattgccaaaacggtatctgtagacgcgaacgatatcgccgcgtttaacggcctgaaggcggccggagtggaatgcttcgttcagggcgttccaacagagactgctttggatctctttaaactgctctga

SEQ ID NO: 524448 - DNA, 780 bp, Stenotrophomonas maltophilia
atggaaatcagtctgttgcaggctttcgcgctggggcttctcgcctttatcgcgggcctggatatgtttaacggcttaacacacatgcaccgtccggtggtgctcgggccactggttggcctgattctgggcgatctgcacaccggaattctgaccggcggtacgttagaactggtctggatgggtctcgcgccgctggcgggcgcgcagccgccaaacgtgattatcggcaccatcgttggcaccacatttgccattaccacaggcgtgaaaccggatgtcgcagttggagtcgccgtgccgtttgccgtggcggttcagatggggatcactttcctcttctcggtgatgtccggcgtgatgtcccgctgcgatcgcatggcggctaacgcagacacccgtggtattgaacgggtcaactatctggcactgctggcgctcggcgtcttctacttcctgtgtgcgtttctgcccatctacttcggggctgaacacgcgaaaaccgccattgatgtcctgccggaacgtctgatcgacggtctgggcgtcgcgggcggtatcatgccagctatcggcttcgccgtgctgctgaagatcatgatgaaaaacgtctacatcccttacttcattatcggctttgtcgccgcggcctggctgaaactgccggtgctggcgattgccgcggctgcgctggcgatggcgctgatcgacctgctgcgcaaatcgcctgaaccgacggcgcctgcggcccagaaagaggaatttgaagatggcatctaa

SEQ ID NO: 524449 - DNA, 879 bp, Stenotrophomonas maltophilia
atggcatctaatccaaccaccctgccgggcgtgtctgaaagtgaagagacgctgctgaccggcgtgaatgaaaacgtctacgaagaccagagtattggcgctgagctaacgaaaaaggatattaaccgtgtcgcctggcgttccatgctgctacaggcctcgttcaactacgagcgaatgcaggcctccggctggctgtatgggctactgcccgcgctgaaaaagatccacaccaataagcgggacctggcgcgcgccatgaaaggccatatgggcttctttaacacccacccgttcctggtgaccttcgtcatcggcattattctggcaatggagcgttccaagcaggatgtgaacagcatccagagcactaaaattgccgtcggtgcaccgctcggtggcattggtgacgccatgttctggctaaccctgctgcctatttgcggggggattggcgccagcctggcgctacagggatccattcttggcgccgtggtctttatcgtgctgtttaacgtggtgcatctcggcctgcgttttggtctggcgcactatgcctaccggatgggtgtcgccgcgatcccgctgatcaaggccaacaccaaaaaggttggtcatgctgcgtccattgtcgggatgacggtgattggtgcactggtggcaacctatgtgcgcctgaataccacactcgagattaaagccggggatgcggtcgtcaaactgcaaaccgacgtgatcgacaaactgatgcccgcctttctgccgctggtctacaccctgaccatgttctggctggtacgccgtggctggagcccgctgcgcctgattggtatcaccgtggtgctgggcgttgtcggtaaattctgtcacttcctgtaa

SEQ ID NO: 524450 - DNA, 435 bp, Stenotrophomonas maltophilia
atgttaggcattattttgacgggtcatggcggttttgccagcgggctggaacaggcgatgaagcaaatcctcggcgaacagccgcagtttatcgccatcgattttccggaaagctccaccactgcgcggctgaccgcgcagcttaagcaggcagtgaatgatttggatgcagaacacgatatcgtgtttctcaccgatcttctcggcggtacgccgtttcgtgtggcctctaccctcgcgatgcaacaccccggcagcgaagtgatcaccggcaccaatctccagcttttgctggagatggttctggagcgcgacgggttaagcagtgaagcatttcgtttgcaggcgctggagtgcggccatcgcggcctgaccagcctggtggatgagcttgcacgctgtcgcgaggaagcgcccgccgaggaagggatatga

SEQ ID NO: 524451 - DNA, 1134 bp, Stenotrophomonas maltophilia
atgagccagctgctgcgcgcgcgtcgtctgcttaccgggcagggctggctggatgaccatcagctgcgcatggataggggcgtcatcaccgccatcgagccgattccggcaggggttaacacccgcgaggcagacctgctttgcccggcatacattgatatccacgtccacggcggcgcgggtgtggatgtgatggatgatgcccccgacgtgctggaccggttagccatgcataaagcgcgtgaaggcgtgggggcgtttctgcctaccaccgtcaccgctccgctggaggcgatccatagcgcgttacggcgcattgcccgacgctgtcatgtcggtggccccggtgcgcaggtcctgggcagctatctggaaggcccgtactttacgccgcagaacaaaggggcacatccgcaagaactgtttcgcgaactggatctcgcggaacttgatgatctgattgcggtttcgcagaacacgctgcgggtagtggcgcttgctccggaaaaagcggaagccctgaaggcgatccatcacctcaagcaaaaagggatacgcgtcatgctgggccacagcgccgctacatacgcgcaaaccctggccgcatttgatgcaggcgcagccgggctggtgcactgctacaacggcatgacggggttacaccaccgggagcccggcatggttggcgctggccttacggacccacgcgcgtggctggagcttattgccgacgggcatcacgttcatcctggagccatgcggctgtgttgttgctgcgcgaaggatcgtacggtgctgattaccgatgccatgcaggcggcgggtatgcctgatggacgctatacgttgtgtggtggaaatgtcgagatgcagggcggcgttgtccgcacggcctcaggcgggctggcgggcagcacgctcgcgctggatgccgccgtgcgaaatatggtggagcatacgggggtcgccccagagcaagctatccatatggcttcactgcatcccgcccgtctgctcggtatggatcacctgctgggatcgttagcgcctggcaaacgcgccaatattattgcgctggatgcgggtttacacctccggcagatttggatccagggtcaggctctttccctgtag

SEQ ID NO: 524452 - DNA, 1146 bp, Stenotrophomonas maltophilia
atgccacaaaccactaccgccaccaccggcacctggaccgaaaaagagatccgccagcagccagccagctggcttcgctcgctcaacaatattgataatctgcgcgcgtcgatcgacagttttctgacgccactgttgcgcaagcccgatctgcggatcgttctgaccggcgcgggtacgtccgcttttatcggcgacatcattgcgccatggcttgccagccacacggggaaaaacatcaccgcgatacctacgaccgatctggtcaccaacccgatggattatttcagccctacgcacccgctgcttctggtctctttcgcccgttctggcaatagcccggagagcgtcgccgccgttgagctggcgaatcagttcgtaccggagtgctaccacctgtcgatcacctgtaatgaagcgggcagcctgtaccagaatgccgtcgacagcgataacgcctgcgctctgctcatgccagccgaaacgcacgatcgcgggttcgcgatgacaagcagcatcaccaccatgatggcgagctgcctggcggtattcgcaccggaaacgatcaacagcaaaacgttccggaacgtgtccgatcgctgtcaggcgatcctcacttcgcttggcgatttcagccccggcgtctttggtaacgaaccgtggaaacgcattgtttatctgggcagcggtggattacagggcgccgcacgggagtctgcgctgaaagtgctggagctgaccgccggcaagctggcggcattctacgattcgccaacgggtttccgtcacgggcctaagtcactggtggacaacgaaacgctggtcgtcgtgtttgtctccagccatccgtacacgcgtcagtacgatctggatctgctcgccgagctacgtcgcgatcgtcaggctatgcgggtagtagcgattgcagccgaaacggatccggtcattgaagctggcccgcatatcctgctgccgccttctcgttcatttaacgatatggagcaggcgttctgcttcctgatgtacgcccaggtcttcgcactgacccagtctctgcacgttggcaatacgccagatacgccatccgccagcggtacggttaaccgtgtggtccagggcgtcgttattcatccgtggcaggcttaa

SEQ ID NO: 524453 - DNA, 873 bp, Stenotrophomonas maltophilia
atgagtattatttccaccaaatatcttttgcaggacgcacaggcaaagggctatgccgttccggcctttaacattcataacgccgagacgatccaggcgatcctcgaagtctgtagcgaaatgcgatccccggtgatcctcgcgggtacgccggggacgtttaaacatattgcgctggaagagatctacgccttgtgcagcgcatattcccttacttatgacatgccgctggcgctacacctcgatcaccacgaatcgctggatgacattcgccgcaaagtccatgccggcgtacgtagcgcaatgatcgacggtagccattaccccttcgaacaaaacgtcaagctggtgaaatcggtcgtcgatttctgtcacctcaacgactgtagcgtcgaggccgaactgggccgactgggtggagtggaagatgacatgagcgtcgacgccgaaagcgcgttcctgacagacccgcaggaagcaaaacgctttgtcgaactgacaggcgtggacagcctcgccgttgccatcggaaccgcgcacggcctctataccaaacgcccaaaaatcgacttccagcggctggccgagatccgcgaggtagtgacagtgccgctggtactgcacggtgcgagcgatgttccggatgaggatgtgcgccgcaccattgagctgggcgtctgcaaagttaacgtcgcaacagagctgaaaatcgccttctctgacgcagtcaaagcctggtttgccgagaacccacagggcaacgatccgcgcttctacatgcgcgtcggcatggatgccatgaaagaggtggtcagaagcaaaatcaccgtttgcggctcggcgaaccggctgctgcttccggctgaagcctga

SEQ ID NO: 524454 - DNA, 1572 bp, Stenotrophomonas maltophilia
atgacacaggaaaagtcgtttaaatcgaaagcgtgggagtttttccagagcctgggaaagacgtttatgttcccggtttcgctattggcctttatggggttgttgttaggtatcggtagttctgtcaccagcccttccaccatcaaaagttttccctttctgggcggcgagttaacgcagctcacctttggttttatcgccatggtcggtggctttgcttttacctatctgccgctgatgtttgccatggcgatcccaatgggccttgccagacgtaataaagcggtgggcgcttttgccggattcgttggctacatgctgatgaacatgagcatcaactactacctgaccgccacccaccagcttgcggatgccgccaccatgagacaggtgggacaatccatcgtgcttggcattcaaacgctggagatgggcgtgctcggcggtattgtggtaggggtgatcacctacttcctgcacgaacgcttccaggacacggtgctgcacgacgcatttgccttctttagcggcattcgttttgtaccgattgttaccgccctcaccctgtcgctggtcggcctggtcatccccctgctgtgggaatatgtggcaatgggcattgccgggattggtcatatcatccagagcaccagcgtctttgggccgttcctgtatggcgtgggcgtgctgctactcaaaccttttggcctgcatcacatcctgctggcgatggtgcgcttcaccccggcgggcggcattgagatggttaacggccaggaagtggccggtgcgctgaacattttctacgccgagctgaaagcgggcctgccgtttagcccgcacgttacagcatttttatcgcaagggtttatgccgacctttatcttcggcctgcctgccgtggcttacgctatctaccgcaccgcgcgcccggaaaaccgtccggtgattaaagggctgctgctttcaggcgtgctggtttcagttgtcacgggtatttcagagccgattgagttcctgttcctgtttattgcccctgtgctttacgcgtttcatatcgttatgtctggcctggcgctgatggtgatggcgctgctcggcgtcaccatcggcaacactgacggcggtattctggatctgctgatcttcggcgtcatgcaggggatgtcgaccaaatggtatctgctgttcccggtgggtattgcctggtttgctatctacttcttcgtcttccgctggtacatcctcaagcacgatataaaaacgccaggccgtgaggttgacgcgcagggtgcgctccaggcggtggaagccaatacccgggcacgtggaaaatcaaaatacgatcatgggcttattcttcgcgcgcttggcggtaaagagaatattgagtcgctcgacaactgcattacccgcttacgtctggtggtgaaagatatggggcttatcgaccagcaggcgctgaaggccgctggcgccttgtcagtcgtggtgcttgatgcccacagcgttcaggtgatcatcggcccacaggtgcagagcgtcaaatccggcattgaagccttaatttaa

SEQ ID NO: 524455 - DNA, 1173 bp, Stenotrophomonas maltophilia
gtgtttgatttcgacagaatcattgagcgtaaaagcgataaatgccgtaaatgggatcatgcgtttgtgtgttcgcgtttcggtgatgtcccggagggatttatcccgctgtggatagcagacatggatttcacctcgccacccgccgtgattgaaggcttccagcgcatcgtggagcatggcaccttcggttacacctggtgcttcgacgaattctacgatgcggtcatcgccttccagcgcacccgtcatcaggttgaggtgcataagtcatggatcaccctgacctacggcaccgtttctacgctgcactatacggttcaggcgttctgcaatcccggcgactgcgtgatgatgaacaccccggtgtatgacccgtttgcgatggcgacacagcgacagggcgtgcgggtgcttgcaaatccgctgagcgtgaaggaaaaccgctatcagctggattttaatctgattgaagttcagctcaaaactcaccgtccaaaactgtggttcttctgctcgccgcataacccctcgggccgcatctggcgcgcggatgagatacgccaggtgtccgatctctgtaagcgctacggcacgattctggtggttgatgaggttcacgccgagcacattctggacggtacattcgtcagctgtctgacttcgggctgtgccgcccaggacaacctgattgtgctgacctcccccaataaagccttcaaccttggcgggctaaaaacatcctactcaatgattccagacgattcgctgcgccagcgtttccgccagcagttggagaagaactccattacctcgccgaatatcttcggcgtgtgggggattattctggcctatcagcaaggtctgccatggctcgacgcgctgaatggttatctgcgcggcaatgcccgctaccttgcggatgccatccagacccacttccctgcatggaagatgatgaacccggagtcgtcgtatctcgcctggatagacgtcagtgcggacgatcgcagtgcgacggcgctaacccaacatttcgccaaacaggctggcgtggtcatcgaagatggcagccactacgtacaaaacggcgaaaactacctgcgtattaacttcggcacccagcgctactggctggaacagtccatcaaccgaatgctgaagcattactga

SEQ ID NO: 524456 - DNA, 1890 bp, Stenotrophomonas maltophilia
atgaaaacaaggctcactctctcgctgctggctctctgtgtttctcatggcgcggcggcagcaaactacgcgctcagtaacaacaatattgccctttcgtttgatgatgcaaatgcaacggtagtagtaacggacagcaaagctaaccatccgctcacgccccaggagttgttctttctgacgctgccggatgaaacaaaaatccacaccgctgatttcaaaatcaagcacgtcgaaaagcaggacaacgcgatagtcatcgactttacgcatccggattttaacgtaacggtgaaactgaacttggtgaagggaaaatacgccagcatcggctacaccatcgccgccgtcgggcagccgcgggacgtagcgaaaatgaccttcttcccgacgaagaagcagtctcaggcaccttacgttgacggggcgattaacagctcgccaatcgtggccgactcgttcttcatcctgccagacaaaccgattgtgaatacttacgcttatgaagccaccacgaacctcaacgtggcgctgaaaacgccaattctggctgagacaccggtcagttttaccacctggttcggcactttcccggaaactaatcagctgcggcgaagcgtaaaccagtttatcgatgccgtgcgcccgcggccttataagccttatctgcactacaacagctggatggacattggcttctttactccttactccgagcaggatgtcattgggcggatggacgaatggaataaagaatttattgccggacgcggggtggcgctggacgcgttcctgctggacgatggctgggacgatcgcaccggacgctggctgtttggcccggcattcagcaacggttttggcaaagtcagggaaaaagccgatagcctgcatagctcggttgggctgtggctttcaccgtggggcggttacaacaagccgcgcgatattcgcgtctcgcatgcaaaagagtatggtttcgaaaccgtagacggcaagctggcgctgtcggggccgaactactttaaaaactttaacgatcagatcattaagctgatcaaaaacgagcacattacctcgttcaaactcgacggaatgggtaacgccaattcgcatatcaagggcagcccatttgcatcggattttgacgcgtccattgccctgctgcacaacatgcgcagcgcaaacccgaacctgtttatcaacctgaccaccgggaccgacgcgagcccgtcctggctgttctatgctgattcaatctggcgtcagggcgatgatatcaacctgtacggtcccggcacgccagtgcagcagtggatgacctaccgggatgccgaaacttatcgctccatcgtacgcaaaggcccgctgttcccgctgaactccctgatgtaccacgggatcgtcagtgcagagaacgcttactatggactggagaaagtacaaacggacggtgattttgccgatcaggtctggagctacttcgcgaccggaactcaacttcaggagctgtacatcacgccgtccatgcttaacaaggcgaagtgggacaccctggcacaggcggcgaagtggtcgcgtgagaatgccagcgtgctggtggatacgcactggattggcggtgacccaacttcgcttgaggtttacggctgggcctcatggagtaaagacaaagcgatttttggtttacgcaacccgtcggataagccgcaacgttactacctggatttaaccaaagattttgagatcccggcaggagagcgctcgcagtttaccctgaaagccgtgtacggcagtaattcgaccgtaccagaggaatataaaaacgctgtggtgattacgctgcaaccgctggaaacgctggtgtttgaggcgattccgggaaaatag

SEQ ID NO: 524457 - DNA, 864 bp, Stenotrophomonas maltophilia
atgaaacaacacgaaacggcagataattctcaaggccagctttatattgtacctactcctatcgggaatttgtctgatattacccaacgtgcactcactgtattgcaagctgttgatttaattgctgctgaagacacccgtcataccggtttactgctgcagcactttgccattaacgcccgtttgtttgccctgcacgatcacaatgagcaacaaaaagccgaaacgctggtggcgaagttgaaagaagggcagaacatcgcgctggtctccgatgcgggtacgccgcttatcaacgatccgggctaccatctggtgcgcacctgccgtgaagcagggatccgcgttgtgccgctgccggggccgtgtgctgctattgccgcattaagtgcggcgggcctgccgtccgatcgtttctgctacgaaggtttcctgcctgctaaatccaaaggccgtcgcgacgtgttaaaggatctggaagcagagccgcgtaccctgattttttacgaatcaacccaccgcctgctggaaagcctggaggatatggttaccgtctggggcgaatcccgctacgtggtgctggcgcgcgagctgaccaaaacctgggaaaccattcacggcgcgccggttggcgaactgctggcgtgggtgaaagaggatgagaaccgccgcaagggcgaaatggtgctgattgtcgaagggcataaagcgcaggaagacgccctgcctgccgatgcgctgcgtacgctgaccctgctacaggctgaactgcccctgaaaaaagcggcggcgctggcggcggagatccacggcgtgaagaaaaatgcgctgtataaatatgcgctggagcagcagggggagtaa

SEQ ID NO: 524458 - DNA, 2139 bp, Stenotrophomonas maltophilia
atggtaccgttaacgtttcttcgaaaaaaagccgcgcacagcgtgcccctcctgctggcagccctgatctttaccggctgcggcacccaggcacctgaccagagcactgctcatatgcagggatccgctcaggctgattctggcttttatctgcaacaaatgtcgcagagttcaaatgataccaggatcaactggcaattactcgccattcgtgcactgctgaaggaaggaaaaacccagcaggccgccgagctgttcagccagctgccgcaggatcttaacgacgatcagcaccatgagcagacgctgctgtcggcagaactgaaggtcgcgcagaaagatttcgacggcgcgaagaagatcctcggcactatcgaactgagcgcgctggataagaatcagcaggcccgtttctggcaggccggtatcaccgctgagcagggtcgcccctccctgacgcttctccgcgcgctgattgcccaggagcctctgcttgcgggtgcggacaagcagaaaaatattgacgcaacctggcaggcactcgcctccatgacccaggatcaggccagagcgctggtgatcaacgccgatgaaaatgtcctgcaaggctggctggatctgcaacagatgtggttcaacaaccgcagcgatccgaacatgctgaaagccggcattaccgactggcaaaagcgctacccgcaaaacccgggagcaaaaatgctgccaacgcagctggtgaacgtgcaaaactttaagcccgcctccaccagcaaaatcgccctgctgctgccgttaaacggccaggcagcggtgtttggccgcgccattcagcaaagttttgaagccgcgaaaaacggcactaccgccgtcaccggcagcgccgttccggcgcaggcagcacaggcggcgaatgtgaatgacgtcgtcagtccgtcagccgccgaaaccagcgacctgaccaccgcgcaaacccctgcccagggcaccatgcagaatccggttaccgccccaacgacgcaacccgctacctcagcgcctgcggcaacacaggccccggctgaaactccggcgcccgcgacggcagaacaacctcagccgcaaaccgcgcagccggaacagcagccagcagcccagccgcaggctgtggccaccaccagcgctaaccctggtgcagagttgaaaatctacgacaccagcgcccagccgcttgaccaggtgctggcgcaggttcagcaggacggggccagcatcgttgtcggcccgctgttgaaaaacaacgtggaagcgctgatgaagagcaacaccacgctgaacgtgctggcgcttaaccagcctgagcaggttcagaaccgcgccaatatctgttacttcgccctctctccggaggatgaagcccgcgatgcggcccgtcatatccacgagcagggcaaacaggcgccgctgctgctgatcccacgcagcacgctgggcgaccgcgttgccaacgcctttgcgcaagagtggcagacccttggcggtggcgtggtgttgcagcagaaatttggctcagcttccgaactgagagcgggcgtgaacggcggggcaggtattgccctcaacggtagcccggtatccgccagcctgccgcagcagcagagcgtcaccatcggcggtctgacgatcccagcccctcctaccgacgcgcaaatcagcggcggcggtaaagtggattcggcatacatcgtcgctacgccggaagagatcgcctttatcaaaccaatgatcgccatgcgtaacggcagccagagcggcgcaacgctctacgccagctcccgcagcgcacagggtaccgcaggcccggatttccgtctggaaatggaaggactgcaatacagcgagatccctatgctggcaggcagcaacccgcagttgatgcagcaggcgctgggcgcggtgcgcaatgattattccctggcgcgtctgtacgcgatgggcgtcgatgcctgggcgctggcaaaccactttacccagatgcgccaggtaccgggctttgagcttaacgggaataccggcgatctgaccgccgatcaggattgtgtgattaacaggaagttatcatggctcaaataccagcaggggcagatcgtcccggccagttaa

SEQ ID NO: 524459 - DNA, 396 bp, Stenotrophomonas maltophilia
atggctcaaataccagcaggggcagatcgtcccggccagttaagccgcaaagagaccggcgacgcgtgggagctaaaagcgcgccgctggcttgaaggcaaaggactgcgctttgtcgccgccaacgttcgcgggcgcggcggcgagattgacctgattatgaaagacggtcaaaccatcgtgtttgttgaagtacgctaccgacagtcgtcccgttttggcggtgctgccgccagcgtgacgctcgccaaacaacaaaaattattacagactgcccacttgtggcttgcccgccataatgggagttttgatactgtggattgccgtttcgatgtggtagccttcaccggaaatgcgatcgactggcttaaaaacgcgtttggcgaagacgcataa

SEQ ID NO: 524460 - DNA, 591 bp, Stenotrophomonas maltophilia
gtgctcgaacgaataaaagtgtgcttcacagaaagcattcaaacgcagattgccgcagcggaagcccttccggacgcgatctcgcgtgcagcgatgacgctggttcagtcgctgctcaacggcaacaaaatcctctgttgtggcaatggcacgtccgccgccaacgcacagcattttgctgccagcatgatcaatcgcttcgaaaccgagcgaccgagtttacctgccattgcactaaacaccgataacgtggtcttaactgcgattgccaacgatcgtctgcatgacgaaatttacgccaagcaggtgcgcgccttaggccatgccggagacgtgctgctggcgatctccacgcgcggtaacagccgggatatcgttaaggcggttgaagcggcagtaacccgggacatgacgattgtcgccctgaccggttacgacggcggtgagctggctggcctgctggggccgcaggatgtggagatccgcattccttcgcaccgtagcgcccgcatccaggagatgcatatgctcacggtgaactgcttatgcgatctgatcgataacacgcttttccctcaccaggatgattaa

SEQ ID NO: 524461 - DNA, 576 bp, Stenotrophomonas maltophilia
atgaaggttttatcggcccttgcagtcgtgatgtctgcattactgcttcagggatgcatcgctgccgctgtagtcggtaccgcagcggtcggcaccaaagcagcgaccgatccgcgtaccgttgggacgcaggtggatgacggtacgcttgagctgcgcgtaaacagtgcgctgtcgaaagacgaacagatcaagaaggaagcacgcattaacgtgacggcttatcagggtaaagttctgctggcaggccaggcgccaacccctgaactcgcctcgcgggccaaacagatcgcgatgggcgtagaaggtacggcggaagtgtttaacgagatccgccagggccagccgattggtctcggcaccgcgtcatctgatacctggatcaccaccaaagtgcgttcccagctgctgggtaccgaccaggtgaaatcctcaaacgtgaaagtaaccacggagaacggcgaagtgttcctgctgggcctggtgacagaacgtgaagggaaagcggcggcggatatcgccagccgggtgagcggcgtgaagcacgtcaccaccgcctttacttatatcaagtaa

SEQ ID NO: 524462 - DNA, 1038 bp, Stenotrophomonas maltophilia
atgactggtcagtcttcatctcaggcggcaacacctgttcagtggtggaagcccgcactcttctttctcgtggtcatcattggcctctggtatgtgaaatggcagccgtactacggtaaagccttcaccgccgccgacacccacagcatcggtaaatcgattctcgcgcaggccgattccagcccgcttcgcgcggcgtgggattacgcaatggtctattttcttgccgtctggaaagcggcggtattgggcgtattgctgggctcgctgattcaggtacttatcccgcgtaactggctgataaaaaccctgggacaaccgcgcttgcagggcacgctgctgggaacgattttctccctgccgggcatgatgtgctcctgctgcgctgcaccggtggcggcgggtatgcgccgacagcgcgtgtcgatgggcggtgcgcttgccttctggatgggtaaccccctgctgaacccggcaacgctggtgtttatgggcttcgttctcggctggcatttcgcgtttatccgtctggcggctggcctgctgacggtggtgcttgtcgctacgctagtgcagcacctggtgaaagacaacgaggccgggcctgcctccgttgagctggacctcagcgatccgcagggcagtttcttagctcgctggggcaaagcgctgtggcagcttttctggagcacaatcccggtctatatcctggccgtactggtgctcggggcggcgcgcgtctggctgttcccgcatgcggatggcgctatcgacaacacgctgatgtgggtgattgcgatggcggtggccggttgcctgtttgtgatcccaaccgcggcggagatcccgattattcagaccatgatgatggctggcatgggtaccgcaccggcgctggcgctgctcatcacgctgccggcggtgagcctgccgtcgctgatcatgctgcgtaagtcattcccggcgaaagcgctgtggctgacggcggggctggtggcgttgagcggagtgattgtggggagtatggcgctggtgtga

SEQ ID NO: 524463 - DNA, 645 bp, Stenotrophomonas maltophilia
atgagtcaggtactgattaccggcgcaaccgggctggtgggtggacatttgctgcggctgttgatccaggatcggcatatcaactatatcgccgccccgacgcgtcgcccgctgttggatatcaccggcgtctataacccgcacgatccccagcttaccgacgcgctggcgcaggtgcaggatcccattgatatcgccttttgctgccttggcaccacccgacgggaagcgggcagtaaggaagcctttgtccatgcagattacacgctggtggtagataccgccctgacggccaagaagctgggtgctaagcatttcctggtggtcagcgcgcacggcgcgaacgcaggctcgccgtttttttacaaccaggtgaagggcaaaatggaagaggcgttaatcgcgcagcaatgggagcgcctgaccatcgtgcggccttccatgctgatgggccaccgcgacgaacggcgttttaacgagtcttttttcgctccgctgtttcgcatcctgccaggtaactggaagtccatcgaggcgcgggatgtcgcgcaggcgatgctgaaagaggcactggctccgtcgcaagagggggttaatattatcccttcggcaaaactgcgtgaaatcgcgcagggcgaggcgtaa

SEQ ID NO: 524464 - DNA, 315 bp, Stenotrophomonas maltophilia
  misc_feature (258)..(267): n is a, c, g, or t
atgggtaaaaaaatcgcagtcttgattaccgacgagtttgaagattcagaatttacgtcgccagcagaggcattccgcaaggcgggccacgaggtggtcaccatcgaaaaagaagcgggtaaaaccgtgaagggccacaagggagaagccagcgtgaccattgacgaatccattgataacgtcagcccgtcggatttcgacgccctgctgttaccgggcggccattcaccggattccctgcgcggggacgagcgtttnnnnnnnnnnaccggattccctgcgcgggggcgagcgtttcgtcacctttacccgtga

SEQ ID NO: 524465 - DNA, 222 bp, Stenotrophomonas maltophilia
gtgtttgccatttgccacggcccgcagctgctgatcagcgccgaggtggtacgcgggcgtaagctcaccgcggtgaaaccgatcgttattgatctgaaaaacgccggtgccgagttctacgatcaggaagtggtgaacgataacgatcagctgatcaccagccgtacgccggacgatcttccagcgtttaaccgcgaagcgctacgcctgctcggtgcgtaa

SEQ ID NO: 524466 - DNA, 435 bp, Stenotrophomonas maltophilia
atggaaacactggccgccattaaccgctggctggcaaagcagcatgttgtgacctggtgcgtctgtaaagacgaggagatgtggtgcgcaaatgccttttattactacgatcccgagcgcgtggccttttacgtgatgagcgaagacaaaacgcggcatgcgcagatgacgggccaacaggcaaaagtggcgggcacggtaaatggtcagcctaaaaccgttgcgctgatccgcggggtccagttcaaaggcgaaattcgtcgcctggaaggtgaggaaagcgacgcccagcgtaaacgctatacgcgccgcttcccggtggccgcagcgctaaaagccccggtgtgggaaatccgcctcgatgagctgaaatttaccgacaacaccctgggctttggcaagaagctgcactggttacgcaccgagcaggcgtag

SEQ ID NO: 524467 - DNA, 330 bp, Stenotrophomonas maltophilia
atgctatggtgcgttcaccttaacatactgaatctgtttaccgtgtgctggtttctctatcttgtccgaacccctgataacgcactctacaccgggatcactaccgatgtggcacggcgttttttacaacatcaaacgggaaaaggggcgaaagcactgcgggggaaaggtgaacttcagctggcgttttcagccgccgtgggcgacagatccctggcgctcaggctggaataccgcatcaagcagctgacgaagcgccagaaagagcgtctcgtcaacggggacggctctttcgaggcgctacgcgaaagcctgcttaaaaacgattga

SEQ ID NO: 524468 - DNA, 504 bp, Stenotrophomonas maltophilia
atgctgattcgagtcgaaattgggattgatgcgccgggtatcgatgcgttgttacgccgctcttttgcaggcgacgccgaagctcaactggttcacgatcttcgcgaagatggcctgattacgctgggcctggttgccaccgacgatgaggggcaggtggtcggctacgtggcgttcagtccggtgattgtgcagggcgaagagttacagtgggtcggcatggcgccgctggcggtggatgaaaactaccgtggacagggcctggcacgccagctggtctatgaagggctggattccctgaatgaattcggctatgccgctgtcgtcgttctgggcgatccggcgttctacgagcgtttaggctttgagccagcgtccagatacgatctgcgctgccactggccaggcacggaaacatctttcctggtacatcctctggcggacgattcgctcgatggggttaccggtctggtggagtaccacgatcatttcaatcgtttttaa

SEQ ID NO: 524469 - DNA, 525 bp, Stenotrophomonas maltophilia
gtgctggataaactgcgttcacgtctcgtacaatttggcccatcaatgctgagcgtgccggtaaaactggcgccgttcgcgcttaaacgccaggtgctggaacaggtactgagctggcagttccgccaggcgctacaggacggtgagcttgagtttctggaaggccgctggttaaagattgaagtacgcgatatcgggttgcgctggtttacttccgtagagaacgatcggcttatcgtccgtgaaaccgccgaggcggatgtcagctttagcgcggatgccagcgatctgctgatgatcgccgcgcgcaaacaggatccggacacccttttcttccagcgtcgtctggtgattgaaggcgacacggagctcggtctgtacgtcaaaaatttaatggatgccattgagctggagcagatgccgaacgcactgcgtatgatgttgatgcaaatggcagatttcgttgaggccgggctaaaaaccccgccggacagtaaacacacttcagtaggtgaaccatgctga

SEQ ID NO: 524470 - DNA, 996 bp, Stenotrophomonas maltophilia
atggagctgctctgccctgccggaaaccttccggcgcttaaggcggccatcgaaaatggggccgatgcggtctatatcgggctgaaagatgataccaatgcccgccattttgcgggtcttaactttacggagaaaaagcttcaggaagccgttaacttcgttcaccagcaccggcgcaaactgcacatcgccatcaatacctttgcccatcctgatggctacgcccgctggcagcgcgccgtggatatggcggcccagctgggcgccgatgcgttgatcctggccgacctcgctatgcttgagtatgcggcagaacgttatccgcatattgagcgccacgtctctgttcaggcatcggccaccaatgaagaggccgtgcgtttttatcatcgacactttgacgtggctcgcgtggtgctgccgcgcgtgctctctattcatcaggttaagcaactggcgcgcgtcacgccagtgccgctggaggtttttgccttcggcagcctgtgcatcatggccgaaggccgctgctatctttcttcctatcttaccggggaatcgccaaataccgtcggtgcctgctcgcctgcccgcttcgttcgctggcagcaaacgccgcagggactggagtcgcgcctgaatgatgtgttaatcgaccgctatcaggacggtgaaaacgcgggctacccgacgctgtgcaaaggccgctatctggtggacggcgagcgctaccacgcgctggaggagcccaccagcctcaacacgctggagctgctgccggaactgctggccgccaacattgcctcggtgaaaatcgaaggccgccagcgtagcccggcctacgtgagccaggtggcgaaggtgtggcgtcaggccatcgaccgctgcatggcggacccgcaaaactacgccccgcaggcggcctggatggagacgctcggcgcgatgtccgaaggcacgcaaaccacgctcggcgcgtatcaccgtaaatggcagtga

SEQ ID NO: 524471 - DNA, 879 bp, Stenotrophomonas maltophilia
atgaaatattcattagggccggtgctttactactggccaaaagagacgctggaagttttttaccagcaggcggctaacagcagcgccgatgtgatttacctcggcgaagcggtgtgcagcaagcgccgcgccaccaaagtgggcgactggctggatatggcgaaaagcctggccggcagcggcaagcaggtggtgctctcgacgctggcgctggtgcaggcgtcctctgaactgggcgagctgaagcgctacgtcgaaaacggtgagttcctgctggaggcgagcgacctgggcgtggtgaacatgtgcgccgagcgtaagctgccgtttgtcgccggacatgcgctgaactgctataacgcggtgaccttgcgcctgctgctcaaacaggggatgacacgctggtgcatgccggttgagctctcccgcgactggctggtcaacctgctaaatcagtgtgacgagctgggcattcgcaatcagtttgaagtcgaagtgctgagctacggccatctgccgctggcctactctgcccgctgcttcaccgcgcgttccgaagatcgcccgaaagacgagtgtgaaacctgctgcattaagtacccgaacggacgcagcatgctgtcacaggagaatcagcaggtgtttgtcctcaacggcattcagactatgagcggttacgtctataacctcggcaacgagctggcgtcaatgcatgggctggtggatatggtgcgtctttcgccgctcgataccggcgtgttcaccatgctggacgccttccgtgccaacgaaaacggcgcctcgccgctgccgctgacggcaaacagcgactgcaacggttactggaaacgtctcgccgggctggaattgcaggggtaa

SEQ ID NO: 524472 - DNA, 1008 bp, Stenotrophomonas maltophilia
atgactgacaaaaccattccgttttcggtgctggatctggcaccgattccacaaggctcctcggcaagagaagccttttcgcactctctggatctggctcagcttgccgaaaaacgtggctatcaccgctactggctggcggagcatcataatatggtgggcatcgccagcgccgccacctcagtactgattggctatctggcggcgaataccactactttgcaccttggctccggtggcgtgatgctgccgaaccatgccccgctggtgattgccgagcagttcgggacgctgaataccctttatccgggccgtattgatctagggcttggccgcgcgccgggcagcgaccagccgaccatgcgcgccctgcgtcgccatatgagcggcgatatcgataacttcccgcgcgatgtggccgagctggtggactggtttgacgcgcgggatccgaacccgcacgtgcgtcctgtgccggggtacggggaaaagatcccggtatggctgttaggctcaagtctgtacagcgcacagcttgccgctcagctggggctgccgttcgcgttcgcttcccacttcgcaccggatatgctgcatcaggctctgcatctctaccgcacaaacttcaagccttccgagcgtcttgagaagccgtatgcgatggtgtgcatcaatatcattgccgccgacagcaaccgcgacgcggaattcctgtttacctccatgcagcaggcgtttgtgaagctgcgtcgcggcgagacgggccagttgccgccaccggtagaaaatatgcatcagctgtggtcggcctccgagcagtatggcgtgcagcaggccctgagcatgtcgctggtgggtgataaggcgaaggtgcgtcacggtctggaggcagtgctacgagaaacgcaggcggatgaaattatggtcaacggccagattttcgatcatcaggcgcgtttgcattcatttgatctggcgatgcaggtgaaagaggagttggtggggtag

SEQ ID NO: 524473 - DNA, 792 bp, Stenotrophomonas maltophilia
atgacggcgatcgtgctgggcgccaaggtcatcaccttcttcctgaccttcggcagcctgctggggcacgtcacgccggccacgctgtttaacgttgcggaagtgaacacctcctacacgccatacctgcttatgacgttgccattctgtctggcgtcgttcggctaccacggcaacgtaccgagcctgatgaagtactacggcaaggatccgcgcaccatcgtgaaatgcctgatttacggcacgctgctggcgctggggctgtatttgatctggctgctggggacgatgggtaacatcccgcgtccggaatttatcggcattgcgcagaagggcggtaacattgatgtgctggtacaggcgctgagtggcgtgctgaacagtcgcagtctggatctgcttctggtggtcttctctaactttgcggtggcgagctcatttctcggcgtgacgctgggcctgtttgactacctggcagatctgtttggttttgatgactctgcgatggggcgcttcaaaacggcgctgttaaccttcctgccgccgattgtgggcggcctgctgtggccgaacggtttcctgtacgccatcggctatgcaggactggcggctaccatctgggcggcgattgtaccggcgctgctggcgcgtaaatcacgtaagcgcttcggcagcccgaaattccgcgtctggggcggaaaaccgatgattgcgctgatcctggtatttggtatcggcaacgcggtggtgcacatgttgtcgagttttaatctgttgcctgtgtatcagtaa

SEQ ID NO: 524474 - DNA, 465 bp, Stenotrophomonas maltophilia
  misc_feature (444)..(453): n is a, c, g, or t
atggcaacactaaccaccacccaaacgtcaccttcgctgcttggcggcgtggtgatcatcggcggaaccattattggtgccgggatgttctccctgccagtggttatgtccggtgcgtggttcttctggtcgctggcggcgctggttttcacctggttctgcatgctccattccgggctgatgatccttgaagcaaacctgaactaccgcattggctccagcttcgacaccatcacccgagatctgctgggcaaaggctggaacctggtgaacgggttgtccatcgcgtttgtactctatatcctgacctacgcgtacatttcagcgagcgggtcgattctgcatcacaccttctccgagatgtcgctgaacgttccggcgcgtctggcgggtctctgcttcgcgctgggcgtggcgtttatcgtctggatgagtaccaaagcnnnnnnnnnntcagccgcatga

SEQ ID NO: 524475 - DNA, 1896 bp, Stenotrophomonas maltophilia
atggctgaattcgaaaccacttttgcagatctgggcctgaaggctcctatccttgaagcccttaacgatctgggttacgaaaaaccatctccgatccaggctgagtgtatcccacacctgctttctggtcgtgacgtgctgggcatggcccagaccggtagcggtaaaaccgcagcattctcgctgccgctgctgaacaacattgatccggacctgcgtgcgccgcagatcctcgtcctggctccaacccgtgaactggctgttcaggttgctgaagcaatgacggaattctctaaacatatgcgcggcgtaaacgtggtagccctgtacggcggccagcgttatgacgtgcagttacgcgccctgcgccagggcccacagattgttgtcggtacgccgggccgtctgctggatcacctgaagcgcggtaccctggacctctctaagctgagcggcctagtactggatgaagcagatgaaatgctgcgtatgggcttcatcgaagacgttgaaaccatcatggcgcagatcccggaaggtcatcagaccgctctgttctctgcaaccatgccagaagcgatccgtcgcattacccgccgcttcatgaaagagccgcaggaagtgcgtattcagtctagcgtgaccactcgcccggacatcagccagagctactggtctgtatacggcatgcgcaaaaacgaagcgctggtccgtttcctggaagcggaagattttgatgcggcgattatcttcgtacgtaccaaaaacgcgaccctggaagttgctgaagcgctggagcgtagcggctacaacagcgcagcgctgaacggcgacatgaaccaggcgctgcgtgagcagactctggagcgtctgaaagacggtcgtctggatatcctgattgcaaccgacgtggcagcacgtggtctggacgttgagcgtatcagcctggttgtaaactacgatatcccaatggactccgagtcttacgttcaccgtatcggccgtaccggtcgtgcgggtcgtgcgggccgtgcgctgctgttcgttgagaaccgcgagcgtcgtctgctgcgtaacattgaacgcaccatgaagctgaccattccagaagctgagctgccaaacgcagaactgctgggcaaacgccgtctggaaaaattcgccgcgaaagtacagcagcagctggaaagcagcgatctggatcagtaccgtgcgctgctgtcccagatccagcctgtcgctgaaggcgaagagctggacatggaaacactggccgcagcactgctgaaaatggcgcagggcgaacgtagcctgatcgtgccacctgatgcaccgatgcgtcctaagcgtgagttccgtgaccgtgacgatcgtttcgaacgtcgtggcgaccgtaacgaccgtggtccacgcggtgaccgtccagagcgtggtggtgaagaccgtccacgtcgcgagcgtcgtgacgctggcgaaatggaactgtatcgcattgaagtgggccgtgatgatggtgttgaagttcgtcacatcgttggcgcgatcgctaatgaaggcgacatcagcagccgttacatcggtaacatcaagctgttcggttcacactcaacgatcgagctgccaaaaggcatgccgggcgaagtactgcagcactttactcgcacccgcattctgaacaagccaatgaacatgcaactgatgggtgatgcacagcctcgctctgaccgcggtggcgaacgccgtggcggtggtcgcagcttcggtggcgagcgtcgtgaaggcggtcgtagcgaaggtcgcactggcgaacctcgtcgtttctccggcgagcgccgtgaaaatcgtggcccacgccgcgaagaaggcaccagccgtcgtcgtttcggtgacgcgtaa

SEQ ID NO: 524476 - DNA, 885 bp, Stenotrophomonas maltophilia
atgaagccttttttgcgctggtgtttcgttgcgacagctttaacgctggcaggatgcagcaactctgcctggcgtaagagcgaagtcctcgcagtgccattgcaaccgactttgcagcaggaagtgattctggcacgcatggaacaaatacttgccagtcgggctttaaccgatgacgaacgcgcacagcttttatatgagcgcggagtgttgtatgatagtctcggtctgagggcattagcgcgaaatgatttttcacaagcgctggcaattcgacctgatatgcctgaagtattcaattacttaggcatttatttaacgcaggcaggcaattttgatgctgcctatgaagcgtttgattctgtacttgagcttgatccaacttacaactacgcgcacttgaatcgcggtatcgcattgtattacggcggtcgtgataagttagcgcaagatgatctgctggtgttttatcaagacgatcctaatgatcctttccgcagcctgtggctttacatcgttgagcagaagctcgatgagaagcaggccaaagaagcactgaaacagcgcttcgagaaatcggacaaggaacagtggggatggaacattgtcgagttctacctgggcaacattagcgaagcaacgctgatggaacgcctcaaggcggacgcaacggataacacctcgctcgctgagcatctcagtgaaaccaacttctatttaggtaagtactacctaagtctgggggatatggacagcgctacggcactgttcaaattagcggttgctaacaacgtacataacttcgttgagcaccgttatgcattgttggaattatcgctcttgggccaggagcaagacgacctggcagaatcggaccagcaatag

SEQ ID NO: 524477 - DNA, 2139 bp, Stenotrophomonas maltophilia
ttgctgaatccgatcgttcgtaaattccagtatggtcagcataccgtcacgctggaaaccggcatgatggctcgtcaggctactgctgccgtaatggtaagcatggatgacactgctgtattcgttaccgtagttggccagaaaaaagctaaaccaggtcaggacttcttcccactgaccgtgaactaccaggagcgtacctacgctgccggtaaaatcccgggtggcttcttccgtcgtgaaggccgtccaagcgaaggcgaaaccctgatcgcgcgtctgattgaccgcccggttcgtccgctgttcccggaaggtttcgtcaatgaagtgcaggttatcgcaaccgttgtttccgttaacccacaggttaacccggacatcgtagcgatgatcggtgcgtctgctgccctgtcactgtctggtatcccattcaatggcccaatcggtgccgcgcgcgtcggttacatcaacgaccagtacgtgctgaacccaactcaggaagagctgaaagagagtaagctggacctggttgttgccggtactgaagcagcagttctgatggttgaatctgaagcagaactgctgagtgaagaccagatgctgggcgcagtggtcttcggccacgaccagcagcagattgttatccagaacatcaacgacctggtgaaagaagctggtaaaccacgttgggactggcagccagaagcggtaaacgacgcgctgaacgcacgcgtagctgcactggcagaatctcgtctgagcgatgcatatcgcattacagacaaacaggagcgttatgctcaggttgacgtgatcaaagatgaaaccatcgcaaccctgatcgcggaagacgaaacgctggacgctaacgagctgagcgaaatcctgcacgctatcgagaaaaacgttgttcgtagtcgcgtactggcaggcgagccgcgtattgatggccgtgaaaaggacatgatccgtggtctggatgtgcgtactggcgtgctgccacgtactcacggttccgcgctgttcacccgtggtgaaacccaggcgctggttaccgctaccctgggtactgcacgtgacgcacagaacatcgatgaactgatgggcgagcgcactgacagcttcctgttccactacaacttccctccgtactctgtgggcgagaccggtatggttggctcaccgaagcgtcgtgaaattggtcacggtcgtctggcgaagcgcggcgtgctggcagtaatgccagaagcagacaaattcccgtacaccgtacgtgtcgtgtctgaaatcactgaatccaacggttcttcttccatggcttccgtgtgtggtgcctctctggcgctgatggatgcaggcgtgccgatcaaagccgccgttgcgggtatcgcaatgggtctggtgaaagaaggcgacaacttcgttgttctgtctgacattctgggtgacgaagatcacctgggtgatatggacttcaaagtggcgggttcccgcgacggtatctctgccctgcagatggatatcaaaattgaaggtatcaccaaagagatcatgcaggttgctctgaaccaggctaaaggtgcgcgtctgcacattctgggcgtgatggaacaggctatcaacgcaccacgcggtgatatctctgaattcgctccgcgtattcacaccatcaagatcaatccagacaagatcaaagatgttatcggtaagggcggttctgttatccgtgcactgaccgaagaaacgggcaccaccatcgaaatcgaagatgacggtactgtgaaaatcgcagcaaccgacggtgagaaagcgaaatatgctatccgccgtatcgaagagattacagcagaaatcgaagtgggccgtatctacaatggtaaagtgacccgtatcgttgactttggtgcattcgttgccatcggtggcggtaaagaaggtctggtacatatctctcagatcgctgacaagcgcgttgagaaagtgaccgattacctgcaaatgggtcaggaagtaccggtgaaagttctggaagttgaccgccagggccgtatccgtctgagcattaaagaagcaaccgagcagtctcagcctgctgcggcgccggaagctccggctgctgaacagcaaggcgagtaa

SEQ ID NO: 524478 - DNA, 270 bp, Stenotrophomonas maltophilia
atgtctctaagcgttgaagctaaagctaaaatcgtttctgagtttggtcgtggtactaacgacagcggttctaccgaagttcaggttgcactgctgactgcacagattaaccacctgcagggtcactttgcagagcacaaaaaagatcaccacagccgtcgtggtctgctgcgtatggtttctcagcgtcgtaaactgctcgactacctgaagcgtaaagatgttgcacgctacaccgcgctgatcgagcgtctgggtctgcgtcgctaa

SEQ ID NO: 524479 - DNA, 951 bp, Stenotrophomonas maltophilia
atgagtcgtcctcgtcgtcgcggtcgtgacgtgcatggcgtgctgttgctggataaaccacagggcgcatccagcaacgacgtgctgcaaaaagtaaagcgtatttataacgccaatcgcgcggggcacaccggcgcgctggatccgctggcaaccgggatgctcccgatctgcctgggtgaagcgacaaagttttcccagtatctgctggattccgataagcgctaccgcgtgattgccaaactgggccagcgcacggacacttccgatgcggatggtcaggtcgttgaagagcgtccggtaaccttcagcgcagagcaacttgatgcggcgctggagagcttccggggcgacacaatgcaggtgccgtcgatgtattcggcgttgaaatatcagggcaagaagctttacgaatatgcgcgtcagggcattgacgttccgcgtgaagcccgtccgattaccgtgtatgagctgttgttcattcgccacgaaggtgatgagctggagctggaagtgcactgctcgaaagggacctacatccgcaccatcattgacgacctcggtgaaaagctgggctgcggcgcgcatgtgatttatctgcgtcgtctggcggtcagcaagtatccggtcgaacgtatggtaacgcttgagcatctgcacgccctggctgaacaggcgcaagcgcagggaattgcgccggcagatctgctggatccgctgctgatgccaatggacagtccggcagcagatttcccggttgttaatcttcctttaacatcgtccgtttattttaagaacggaaacccggtccgcacaacgggggcgccgcttgagggcctggtccgtgtgacggaaggggaggaaggcaagtttatcgggatgggcgaaatggacggtgaagggcgcgttgccccgcgtcgtctggtcgtcgaatacccggtcgaagcgtga

SEQ ID NO: 524480 - DNA, 405 bp, Stenotrophomonas maltophilia
atggcgaaagaatttggtcgcccacagcgcgtcgcgcaggagatgcagaaagagatcgctctcattctgcaacgtgaaatcaaagatccacgcgtggggatgatgaccaccgtgtctggcgtggaaatgtcccgcgacctggcgtacgccaaagtgtttgtgacattcctgaatgaccaggatgaagacgccgtgaagaacggcattaaagcgctgcaggaagcctctggtttcatccgctctctgcttggcaaagcgatgcgtctgcgtattgtgccggagctgaccttcttctacgacaactcgctggttgagggtatgcgtatgtccaacctggtgaccagcgtggtgaaacatgacgatgagcgtcgtgttaacccggcggacgacagcaaggaggactga

SEQ ID NO: 524481 - DNA, 2688 bp, Stenotrophomonas maltophilia
atgactgatgtaactgtaaaatcgctggctgctgagattcagacctccgtggaccgcctggtacagcaatttgctgatgcagggatcccgaaggccgctgatgactcggtgaccgcgcaagaaaaacaaaccttgttagcgcacctgaaccgtgaacacggctctacgcctgacaagttaacgctgcagcgcaaaacgcgtagcacgttgaacatccctggtaccggtggcaaaagcaaatcggtacaaattgaagtccgcaagacgcgcacctttgtaaaacgtgatccgcaagaggcagaacgccttgctgcggaagagcaggcacagcgtgaagcggaagaacaagctcagcgtgaggcagaagccactgccaaacgcgaagcagaattaaaagctgaacgtgaggccgcagaaaaagcgaaacgcgacgccggtgaaaaagcgaagcgtgacgctgcggaaaaagacaaagtgagcaatcaacagaccgacgaaatgaccaaaactgcccaggctgaaaaagcccgccgtgaaaatgaagctgccgagctgaagcgtaaagcggaagaagaagcccgccgcaagcttgaagaagaagctcgccgcgtcgccgaagaagcgcgtcgcatggcagaagaaaacgagaagaacggtgtgaataccgctgaaccaactgaagacaacagcgattatcacgtaaccacttctcagcatgcgcgccaggcagaagacgataacgaccgtgaagttgaaggtggtcgtggccgtactcgcagtacaaaagcggcgcgtcctgcgaaaaaaggtaacaagcacgctgaatctaaagctgaccgtgaagaagcacgtgcagcggttcgcggtggtaaaggcggtaagcgtaaaggttccgctctgcagcagggcttccagaagccagctcaggccgttaaccgtgacgttgtgatcggcgaaaccatcaccgttggcgaactggctaacaagatggcggtgaaaggctctcaggtcatcaaagcgatgatgaagctgggcgcaatggccaccatcaaccaggtcatcgaccaggaaaccgcacagctggttgccgaggagatgggccacaaagttatcctgcgtcgtgaaaacgagctggaagaagcagtaatgagcgaccgtgatacgggcgcagcggctgaaccgcgcgcaccggttgtgaccatcatgggtcacgttgaccacggtaaaacctctctgcttgactacattcgttctactaaggttgcctccggcgaagcgggtggtattacccagcatatcggtgcttaccacgtagaaaccgaaaacggcatgatcaccttcctggataccccaggccacgcagcgtttacctcaatgcgtgctcgtggtgctcaggcaacggatatcgttgttctggttgttgctgccgatgatggcgtgatgccacagaccattgaagctatccagcacgcgaaagcggcgcaggtgcctttggttgttgcagtcaacaaaatcgataagccagaagccgatatggatcgcgttaagaacgaactgtcacagtacggcgttatgccggaagagtggggcggtgaagcgcagttcatccctgtatctgcaaaagcaggtaccggtatcgacgacctgctgaacgctatcctgcttcaggctgaagttctggagctgaaagcggttcgtaaaggtatggcgagcggcgcggtaatcgaatccttcctggataaaggtcgtggtccggttgcaaccgttctggttcgcgaaggtactctgcacaagggcgacatcgttctgtgtggtttcgaatacggtcgcgttcgtgcgatgcgtaacgaactgggtcaggaagtgctggaagcgggtccgtccatcccagtggaaatcctcggcctgtccggtgttccggctgccggtgacgaagtaaccgtggtacgtgacgagaagaaagcacgtgaagtggcgctgtatcgtcagggtaaattccgtgaggtgaaactggctcgccagcagaaatctaaactcgagaacatgttcgccaacatgactgaaggcgaagttcacgaagtgaacatcgttctgaaagcggacgtacagggttctgtggaagcgatctccgactccttgctgaaactgtctaccgacgaagtgaaagtgaagatcatcggttctggcgtaggtggtatcaccgaaaccgacgcaaccttggcagccgcgtccaacgctatcctggttggcttcaacgttcgtgctgacgcatctgcgcgtaaagttatcgatgctgaaagcctggatctgcgttactactccgtcatctataacctgattgacgaagtgaaagcagcgatgagcggcatgctgtctcctgagctgaaacagcagatcatcggtctggctgaagtacgtgacgtgttcaaatcaccgaaattcggtgcgatcgcgggctgtatggttaccgaagggaccattaagcgtcacaacccaatccgcgtactgcgcgacaacgtggttatctacgaaggtgagctggaatccctgcgccgcttcaaagatgacgttaacgaagttcgtaacggcatggaatgtggtatcggtgttaagaactacaacgacgttcgcgttggcgatatgatcgaagtgttcgagatcatcgaaattcagcgtaccatcgcgtaa

SEQ ID NO: 524482 - DNA, 1503 bp, Stenotrophomonas maltophilia
atgaacaaagaaattttggctgttgttgaagccgtctccaacgagaaatcactgccgcgtgagaagattttcgaagcgctggaaagtgcactggctacagcaaccaagaaaaaatacgaacaagagatcgatgttcgcgtagaaatcgatcgtaaaagcggtgacttcgatacattccgtcgttgggtaatcgttgaagaagtgacccaaccgaccaaagagatcacgctggaagcggcacgttttgaagacgaaagtctgaacgtgggtgactacgttgaagatcagattgaatctgtcaccttcgaccgtatcaccacccagaccgcgaagcaggttatcgtgcagaaagttcgcgaagccgagcgcgcgctggttgtcgatcagttccgcgatcaggaaggcgaaatcatcactggcgtggtgaagaaagtgaaccgcgataacatctctctggagatcaaatccgaagggctgccgggtaacgctgaagccgttatcctgcgtgaagacatgctgccgcgtgaaaacttccgcccaggcgaccgtattcgtggtgtgctgtatgccgtacgtcctgaagcacgcggtgcacagctgttcgtgacgcgttctaaaccagaaatgctggttgaactgttccgtatcgaagtgccggaaatcggcgaagaagttatcgaaatcaaagcggcggcccgcgatccgggctcccgtgcgaaaattgcggtgaaaaccaacgacaagcgtatcgacccggtcggtgcttgcgtcggtatgcgtggcgcacgtgttcaggcggtttctaccgaactgggcggcgagcgtattgatatcgttctgtgggacgacaatccggcgcagttcgtgatcaacgcaatggcaccggctgatgtggcgtctatcgttgttgacgaagacaaacacaccatggatatcgctgtagaagcgggcaacctggcgcaggcgattggccgtaacggtcagaacgtacgtctggcgtcacagctgagcggctgggaactcaacgtgatgaccgttgatgaccttcaggccaagcatcaggctgaagcccacgcggcgatcgataccttcaccaaatacctggacattgacgaagacttcgccactgtgctggttgaagaaggtttctctacgctggaagaactggcctacgtgccaatgaaagagctgctggaaattgacggtctggatgaaccaaccgttgaagccctgcgtgaacgcgctaaaaacgcactgaccaccctggcgctggctcaggaagaaagccttggcgataagaagccggctgatgacctgctgaatctggaaggtcttgatcgtgcgattgcgttcaagctggctgcccgtggtgtttgtacgctggaagatctcgctgagcaaggcgttgatgacctggctgatatcgaaggtttaaccgacgagaaagccggcgaactcatcatggccgcacgtaatatttgctggttcggcgacgaagcgtaa

SEQ ID NO: 524483 - DNA, 423 bp, Stenotrophomonas maltophilia
atgattactgcaccggtcgaagcactgggctacgaactggtcggcatcgaattcgttcgcggccgcacatcgacgctgcgcatctatattgatagtgaagatggcatcaatgttgatgattgtgctgatgtcagccaccaggtgagtgcggttcttgatgttgaagatccgattaccgttgcgtacaacctggaagtttcctcacctggcctcgatcgtccgatgttcacggccgagcactatgtgcgctttaccggtgaagaagtggctctcgttctgcgtatggccgtacagaaccgccgtaaatggcagggaattatcaaagccgttgatggtgaaatgatcacggtgacagtcgaaggcaaagatgaagtgttcgcgctgagtaatatccagaaggcgaacctggttccccacttttaa

SEQ ID NO: 524484 - DNA, 183 bp, Stenotrophomonas maltophilia
atgccgtcgtttaagctcatccataagccactgatagcaaccatgaatatcgctgacaacccagacatgacgccagtgttctccctctattttctgatacataacgcctcctgtaagaagtatagctgccacagaaaatgtcatgcgctggcgttggatatcgcgaatccaaacaaaccataa

SEQ ID NO: 524485 - DNA, 981 bp, Stenotrophomonas maltophilia
gtgtcaaacatacacctgcaaaacgatgttttttatccgcatcgtacaaatattatttctgaactggtgagagggaaacgcgttcccggcccaatctggcacaaacgtgattaccggttaaagttccttctgcgctcgcttttattctggtcctccacccatcgcatgctggaggcgctatccgggcgcgatgatttcgacaggctgatcacctctcaaattaccttgccgagcaaaactcaccgccagtatctgatgcgtggcctgaactcaaacgaccgggccgatgctatcgtcagccactatcagtggattgatagtctgaaaaataccgccctcgcccacgcgctgaccaatccgcaagaggtgccggttgtccggttcgaggcaaaaaacggcgaaatctataccgtccacgcctcgtccgcaggtaaggctgaacgtgaaggcgaaagcacgctttggctgcatgacaatgacaacacgctgcttgccagcctgacgttctgtgtcgcacgcagtaacggccgtatggtgctggtgatcggcggcctccagggtccccgtcgtcatgtttcacgggaggtgattaagcaggctacccgtgcctgccatgggcttttaccgaaacgcgtgctgatggaggtgatcttccagcttgcctcacgctcgaacatcagcgcgatttttgccgtcagcgatgaaggccatgttttccgcgccctgcgctaccgtctgagcaaagggcgtcattttcacgccagctacgacgagttctgggaaggcctgaacggaaagaaactctcccccttctgctggcagttgccgctccagatggagcgtaaagcactggaggagattgccagcaaaaaacgcgccgaataccgtcgccgctttgcgttacttgatgatattgcggcttccgtacatgcgcgcattgatcccgcagtcgtctcaggcaaaatacaaacaaaaatttaa

SEQ ID NO: 524486 - DNA, 339 bp, Stenotrophomonas maltophilia
atgaaaaagacactgctttctcttttacttctcacctgtgccagcagtgcgctggccgcgccgcaggtcatcaccgtcagccggtttgaagtgggtaaggacaactgggcatttaatcgtgaagaggtcatgctcacctgccgtcccggtaacgcgctgtatgtcatcaatcccagtacgctcgtgcagtatccgttaaatgacgtagcggagcagcaggttgccagcgggaaaagtaacggacagcctgtcagcgtgatccaggtggatgacccggcaaaccccgggcagaagaagagtctggcaccgtttattgagcgcgctaaaaagctctgctag

SEQ ID NO: 524487 - DNA, 870 bp, Stenotrophomonas maltophilia
atgctggccctgagctacgtagcgtttcgctttatccattttgttgcgctgatactactgttcggcaacgcgctatacagtgtctggtttgcaccgtcttcgttgcagcgcctcatgacgcagcgtttccagcgccagcagaatatcgcggccttaatcagcctgatggctgctctgctgatgttcggcctgcaaagtgggttaatgggcaatggctggggtgatgtcattcgcccggcggtctggcgcagcgtgctgggcacgcagtttggtggcgtctggctgtggcaaatggtgctggccgctgtgaccgcgggcgctgcatggcttaccccgcaaaagggctcacggctattactgctcgcgatggggcaactggtgctgctggcgggcgtgggacatgccgcgatgaacggtggcgcgccgggtgcgttgcatcgtctgaaccatgcgcttcacctgctctgcgccgccacctgggtgggcggtttactgccgctgctgttctgtatgcggctggcgaaaggccgctggcagccagccgctatctttaccatgatgcgcttctcccgcgtggggcattatgccgtggcgggcgtgctgctgaccgggataatcaatacgctctttattgtgggcatagacgtgccgtgggaagcgccttatgtacggctgttgttgtttaaatgtgcgctggtcatcatgatggtggcaattgcgctggcgaatcggtattttcttgtgccacgctttcgccctgatgccgggcgggaacaacagatttttatcaggatgacacaggcagaagtggtgctgggcgcgctggtactggcggccgtcagcctgttcgcgacctgggaacccttctga

SEQ ID NO: 524488 - DNA, 372 bp, Stenotrophomonas maltophilia
atgcactttaccccttcccgcgtcgcgtgtgcgctggtgtttctgctctcttcggcaatcgcgccatcagctctggcccatgcgcaccttaagcaacaatccccgcaggaaaataccgtcgcgacggcacccgatgtcattaccctgaatttctcggaaggcattgaacctgccttcagcggcgtcgtggtgacggacgcgcagcagcacaaaatccagaccggcgcggtgaagcgtgacgagaaggataacgcaaagctgattgttcctcttgagaaaccgttgacgaccggcacctatacggtggactggcatgtggtctccgtggacggccacaaaaccaagggcagctatcactttagcgtgaaatag

SEQ ID NO: 524489 - DNA, 231 bp, Stenotrophomonas maltophilia
atgaacgttaacctggccgcccttcctcaggacgagatggacaaagtgaatgtcgatctcgccgccgcgggggtcgcattcaaagagcgttacaacatgcccgtcgtggctgaagtggtagagcgtgaacaacccgcgcatctgcgcgactggttccgcgaacgtcttattgcgcatcgcctcgcctccgttaatctctcgcgcctgccgtacgaacctaaagttaaataa

SEQ ID NO: 524490 - DNA, 408 bp, Stenotrophomonas maltophilia
gtgattgccggtattactctccagcaacagaaaggactcgcgcttttcacccctaacctgtcgaccatccggcgctatccgcagggtaacggtgcgggtgttaatcctggcaataaacggttaaccatcgttgataatcaggctgacgccccggaactagacccagaggcaacgctgttcaccagcagcctggcggtgggtgagcaacgctggcggcaatccatcagttcgttacaacgcttcgcgcataagtacgccatcgcggtattaatggcgaacgcgcgcagcggtagcgccttatgggatgaaaaaggtcagctgatcgtgcgtgccgataagggagagttgctgttaaccggttctttgggccgacagggttggcaaggggatatcattccattaggctag

SEQ ID NO: 524491 - DNA, 663 bp, Stenotrophomonas maltophilia
atgctgcgcgttatcgataccgaaacctgcgatttgcagggtggaattgtggaagtcgcctctgtcgacgtggttgacggaaagatagtcaatccaatgagccacctggtgcgcccggaccgtcccatcagtgcgcaggcgatggcaattcatcgcattacggaatcgatggtggcggataagccgtggattgaagagatcatccctctttaccacggtagccagtggtatgtcgcccataacgccagctttgaccgccgcgtgctgccggagatgcccggtgaatggatttgcaccatgaagctggcgcgccgtctgtggccggggatcaaatacagcaatatggcgctgtataagtcgcgcaaactaagcgtgcggacgccggaagggctgcatcatcaccgcgccctctatgactgctacatcaccgcagcgctcctgattgatatcatgaatacttccggctggacgccggacgatatggcgaccattaccggccgccccgccctactgaccaccttcacgttcggtaaatatcgtggaaaaccggtatcggaagtggcggacaacgatccgggctatctgcgctggctgtacaacaacctcgacagaatgagcccggaactgcgcctgacgctgaagcattatttaggcgaagcctga

SEQ ID NO: 524492 - DNA, 2076 bp, Stenotrophomonas maltophilia
atgcctccaaaagcccgacgtactccttatgcgatcaccacgcatggcgatacgcgtatcgataactactactggctgcgggacgattctcgttcccggccagaggtgctcgactatctgcacgaggaaaacgactatggccgccaggtcatggccagccagcaggcgcttcaggatcagctcctgaacgaaatggtgcagcgtatcccccagcgtgatgtctctgccccgtggtgcaaaaacggttatcgctatcgccatatttatgagccgggaaacgaatatcccatctaccagcgccagtctgtgctgagcgccgagtgggacgaatgggagatcctgctggatgctaacaaacgtgctgcccacagtgagttttatacgctgggcggcatgtccatttcccccgataacgccattatggcgctggctgaggattacctctcccgccgccagtacggtttgcgtttccgcaatcttgaaacgggaaactggtatcccgaaatgctggataatgtctcccccgatttcgtctggggtaacgattcagaaacggtctactacgttaaaaagcatgcctcaacgctgctgccttatcaggtctggcgtcatacggtggggaccgattccgccgacgatgagcttgtgtatgaagaaaaagacgagacgttctacgtcagcctgcataaaacctcgtctcgccactacgtgattatcttccttgccagcgccaccacctctgaggtgctgctgctggatgccgaactgccggatgcccagccgccgtgcttcctgccgcgccgtaaagatcatgagtacagtctggatcacttccagcacagcttttacctgcgttcgaaccgcgagggcaaaaactttggcctttataaaaccaaagtgcgcgatgaacggaagtgggaagtgttaattcctgcgcgcgatcaggtgatgctggaggggttcaccctgtttaccgactggctggtggtggaagagcgtcagcgcggactgaccagtatccgccaaatcaaccgcaaaacccgcgaagtggtgggcattgcgttcgatgacccggcttacgtgacgtggatcggctttaacccggaaccggaatcgtcccgcctgcggtacggctattcgtcaatgactaccccggacacgttgtttgagctggatatggacaccgggcagcgtcaggtgattaaacaggcggaggtccggggatttgagtcggaaaattatcgcagtgaacacctgtgggtgaccgcgcgcgacggcgttgaagtccccgtgtctctcgtctaccacaaggatcacttcaacaaaggtaaaaaccccatcctcgtctacggttacggctcctacggatccagcatggacgccgatttcagcagcagcaggctgagcctgctcgaccgcggttttgtttatgcgattgcccatattcgcggcggcggcgagctgggtcagcactggtatgaagacggaaaatttctcaaaaagaaaaataccttcaatgactaccttgatgtctgcgatgcgctgatcgcgcagggttatggcgatccgcaactctgctttggcatggggggcagcgccggaggcatgttaatgggagccgtggtaaaccagcggcctgaactgtttaaaggcgttatcgctcaggtgccgtttgtggacgtggtgacgaccatgctggacgaaaccattccgctgaccaccggggagtttgaggagtgggggaacccgcaggatgaaacctattaccgctacatgaaagagtacagcccgtacgataacgtcgaggcgaaagcctatccgcatatgctggtgaccaccggcctgcacgattcccaggtgcagtactgggagcccgcgaaatgggtggcgaagctgcgtgagctaaaaactgacgataatctgctgctgctgtgtaccgatatggactcggggcacggagggaaatcagggcgatttaaatcctatgaaggggtggcgctggagtacgcctttttgattggcctggcgcaggatacgctgccaggccgcgcgggaactcaggcttcgcctaaataa

SEQ ID NO: 524493 - DNA, 651 bp, Stenotrophomonas maltophilia
atgtcaggctggatgaatcaactgcaatccctgttgggacaaaaaggctcgtcgtccggcgagcagggtctgagcaagctgcttgtgccgggtgcgctcggcgggctggccggtttgctggttgctaataaatcatcgcggaaactgcttaccaaatacggtaccggcgcgctgctggcgggcggaggggctattgcaggctccgtcttatggaacaaatacaaagacaaggtgcgcaacgcgcatcaggatgaaccgcagtacgggaagcaggtttcgccgttagatttacgcaccgagcgtctgatcctcgccctggtctttgcagccaagagcgacgggcatattgatgccagtgaacgtgccgcgattgaacagcagatgcgggaagcgggcgttgaggagcagggcagggcgctggtggcgcaggccatcgaacaacccctcgatccgcagcggctggcgcaaagtgtgaaaaacgaagaagaggcgctggaactctattttctgagctgtgccgccatcgatatcgatcactttatggagcgcagctacctgaacgccctgggtgatgcgctgaagatcccacaggacgttcgtgagggaattgagcaggatattcagcagcagaagcagaccctcgcgggctag

SEQ ID NO: 524494 - DNA, 1179 bp, Stenotrophomonas maltophilia
atgactcgtttaggaaccgctctgcgtcctgccgcgacgcgcgtcatgctgttgggatcgggtgaactgggtaaagaagtggccattgaatgccagcgtttgggtgtggaagtgattgcggtggaccgttacgcgaatgcgcccgccatgcacgtcgcgcatcgctcgcacgtcatcgatatgcttgacggtaatgccctgcgggcgttaattgccgacgaaaaaccggatttcgtggtacctgaaattgaggccattgccactgagatgttggttgcccttgaacaggaaggccagcgcgtggtgccctgtgccacagcggcaaaactgaccatgaaccgggaaggcattcgtcgcctggcggcagaagaattacagctcccgacctccagctaccgttttgccggggataaagctgcgtttctccaggccgtagaggagattggctacccgtgcatcattaagccggtaatgagctcctctggcaaagggcagagctttatccgcgacagcagcacgctggacaaggcctgggactatgcccagcagggcggccgtgccggtgccgggcgcgtcatcgtagaaggcgtggtgaagtttgattttgaaattaccctgctcaccgtcagcgccgtggacggtgtttatttctgcgacccgattggtcatcgccaggaagacggcgattatcgcgaatcctggcagccgcagcgaatgagcgcgctggcgctggcacgcgcgcaggagatcgcccgcaaaacggtgctggcgctgggcggctacggcctgttcggcgtggagttatttgtttgcggcgacgaggtgatcttcagtgaagtctcccctcgcccgcacgataccgggatggtcaccctgatttcgcaggatctctctgagttcgcgctgcacgtacgtgctttcctcggcctgccggttggcggcatccgtcagtacggcccggcagcctcggcggtgatcctgccgcaactgaccagccagaatgtcacctttgataacgtcgaaggtgcggtaggcgcaggcttgcaggttcggctgttcggcaaaccggagatcgacggagcccgtcgtctgggcgtggcattagcgaccggggaaaacgtggacgaagccgtcgcgagagcgaaaaaagcggccactgcggtgaaagtggcagggtaa

SEQ ID NO: 524495 - DNA, 1335 bp, Stenotrophomonas maltophilia
atgattgttttcctctatgtgatagctgtcgcaatgggcctcgcgatccgggctctcacctggcctgaacaggaacacgttacggctctcttttttgtgccttcagttattctgcccatctgtgttgtgtcgttgctagtttttacaagtttcatatttcatgacgccaacattcattatgctgaaacccgaaaattcatagcaaaagagcaggagattaatttaaaggcgtatgcgcgaaaaaatatcgctatcgcagcatggtctgcaatcacccccctggagcaacccgcgctgaatatgttgaaactggaaggcgaatttccgctggcaccgaaaacgccggttaatattcagctggaagatcgcttcgaccagaccaggaatgaacagatgttttaccgcttactggatccgatggcagaaaaattgaaggactataactaccgtatttttgaaaccgttgtctgggttcacggagggagtggatcctgcattgatgaactgaggcgcactctggagcggttgggtattgaaacggccagcacgtgtaaaattgagtacagcacagaatgtcctgactacgcgatcgttagccaatggatgaacttatctgattacagagttgaaaaccggttgattgttatcgttgatttacatgaagaaagcggcgaatcaaagagcatggaaaatgcatgtgcattcctgctgaccagtcattatgtccgggaggagggcgaaaaaccggtatatttatatcagcctatgtctgatgtgaccgatgtagaggacaaaatggcggtcttccttgagacgggttcggtacttacgccgaaaaatctctggtataccgggctgtcccgtatcgaaaaatatccattaatgcaggcactggacaaaaaagcgctcacggtggaacggctggatattgatgcctctctgggcgcaaagagtgccgggtatcggtggctggctctggcatttgcggcggatgcggtaaaatatgcccagggggagcaactggtagcatattcagacaaaaacaaattttgtattactgcgctttcctccatgaagacagctatcccaaaaaaacttacctggtgtaactggagtaatcccctttatcctgcggggatggcggctttattctgcgtgttatccctcattgcctatcgtatcagtttcctggcgcaaaacgatccgccagcaatctgggaactgattgcgagcataatcattcccttcgttatttttataggcctcggtagttttgttttcatctcgaaaacgaatgaagcctacgaggacatggaatacgaatggaaacgatag

SEQ ID NO: 524496 - DNA, 459 bp, Stenotrophomonas maltophilia
  misc_feature (374)..(383): n is a, c, g, or t
gtgaaaacggaaaccgtcgttatttttggggattctgcgcgtcgttacaacttcagcgacaaacagatgccttatgtccgacattcaggcatgaccagttataacgaatacatcaccgatctggaggagcagcacggcctgatcccaaaaaatgtgttggttcgtacctataactaccgtgacccgcaatcgccgcagacggataagaccattaaaacgagcgatattcccgaaggtgtaacgacaggccaacactatcactatgccgatcactatcttgctgcgggggattttcacggtgaagaggcggaaaccgccgcattttacgcccgtctgcgttatgaacgcctgttgaacggacagagtgttctggnnnnnnnnnngtgttctgggggcgacaaccagcgatcccgagcttcagccaggcattatgttttatcctgcagggcctgtacctga

SEQ ID NO: 524497 - DNA, 597 bp, Stenotrophomonas maltophilia
  misc_feature (574)..(583): n is a, c, g, or t
atgtcaggggaatctgaggtggctcaacggtgggacacgttaaacagatatttattgtatttcccgcgtagcaaaaatgttatttctgatgttcattcttttacaggaaaagagatattaagcgagccttatcgctataccattcgctttaccagtccggatcaaaacattgccattaatgctgttcttaatcaaagggctgagtttattctgcgtgcacccaatctggaagcctcatggcatgggcaaacctcctggctgccggttcgccagattaatggcacgatcacccaattttcccggctgatgtcttcaggtgacgaagcactgtatgaatgcgtgctggagcatgagctggcgctgctggatcaaaattaccgttctgcggtttacatgaacatgacagtcccggagctcgttacaaagctgatgaaggacagtggtcactttgacggctacaacattgattttgagcaactgagccacagctatccacgacgggaaatgatcattcagtggaaagaaaccgatttgcggttcatccgtcggctgctggcagagatagggatctggnnnnnnnnnntggttccgttttga

SEQ ID NO: 524498 - DNA, 642 bp, Stenotrophomonas maltophilia
atgaaaaactggaaaacaagtgcagaagcaatcctgactactggccctgtcgtgccggttattgtggtaaacaaactggagcacgctgtcccaatggcgaaggcgctggttgcgggtggcgttcgtgttctggaagtgaccctgcgtactgcctgtgcgatggatgcgattcgcgctatcgccaaagaagtgccggaagcgatcatcggtgctggtacggttctgaatgcgcagcagctggcggaagtgaccgaagcgggcgcacagtttgccatcagcccgggcctgaccgagccgctgctgaaagccgcaaccgaaggttctattccgctgatcccgggtatcagcaccgtttctgaactgatgctgggtatggactacggcctgaaagagtttaaattcttccctgctgaagcgaacggcggcaccaaagcgttgcaggcgattgcaggcccattctcccaggtgcgtttctgcccaacgggcggcatctctccggccaactaccgcgactacctggcgctgaaaagcgtgctatgcatcggtggctcctggctggttccggcggatgcgctggaagcaggcgactgggatcgcattactaaactggctcgcgaagcggtagaaggcgcgaaacagtaa

SEQ ID NO: 524499 - DNA, 1812 bp, Stenotrophomonas maltophilia
atgaatccgacattgttacgcgtaacacaacgcatcgttgaacgctcgaaagagacccgtgctgcctaccttgcccgcatcgaacaggcgaagagtgaaacggtccatcgctcacagctggcctgcgggaatctggcccacggctttgccgcctgccagcctggtgataaagacgcgctgaaaagcatgctgcgtaacaatatcgccatcattacctcctataacgacatgctttcagcccaccagccgtatgaggtttacccgtctatcatccgcaatgcgctgcacagcgtgaacgcggtgggccaggttgcaggcggcgtgccggccatgtgtgatggcgtgactcagggacaggacggtatggagctgtctctgttgagccgcgaagtgatcgccatgtcggcggcagtgggcctctctcacaatatgtttgatggcgcgctctacctgggcgtatgcgacaaaatcgtcccggggctggtgatggccgcgctgtcgtttggccatctgccagcgatttttgtgccgtcaggcccgatggcaagcggtctgccaaacaaggaaaaagtccgtatccgccagctgtatgccgaaggaaaagcggaccgtcaggcgctgctggaagcggaagccgcgtcctatcacgcgccgggcacctgtacgttctacggtacggctaacaccaaccagatggtggtggagtttatggggatgcagctgccgggctcgtcgttcatccagccggatgcgccactgcgtaaagcgctgaccgaagccgcagcccgtcaggtgacgcgtctgaccggtaacggcaacgagtggatgccaatgggcaaaatggtggatgaaaaagtcatcgtcaacgggattgtcgccctgctggcgaccggcggttcaaccaaccataccatgcaccttgtcgcgatggcgcgcgcggcgggcattctgatcaactgggatgacttctccgagatctcctccgtgataccgctgatggcgcgtctgtacccgaacggtccggcggacattaaccacttccaggccgcgggcggcgtgccggtgctgatgcgcgagctgctgaaaggcggcctgctgcatgaggatgtcaacacggtggcgggctttggcctgcatcgttatacccttgagccgtggctgaacaacggtgagctggactggcgcgagggggcgagcaactcgctcgatcctcaggttatcgcgaccttcgaacagccgttctctcctcacggcggcaccaaagtgctgagcggtaaccttgggcgtgccgtaatgaaaacttctgccgtgccggaagagaatcaggttatcgaagccccggcggtggtgtttgaaagccagcacgacgttttacctgccttcgacgcgggtctgcttgataaagactgcgtagtcgtggtgcgtcatcagggaccaaaagcgaacgggatgccagaattacataaacttatgccgccgcttggtgtattattggaccgccgtttcaaaattgcgctggtgaccgatggacgcctctcgggggcatccggtaaagtgccttcagcgattcatgtcaccccggaagcctacgacggcggcctgctggcgaaagtccatgatggagacatgatccgcgttaacggtcagacaggcgagttaaccctgctggtggacgaagcagagctggcggcgcgtcagccacatattcctgacctgagcgcatcccgcgtgggtaccggacgcgaaatgtttggtgcgttgcgtgagaaactctccggtgcggagcagggcgcaacctgtattacgttttaa

SEQ ID NO: 524500 - DNA, 1476 bp, Stenotrophomonas maltophilia
atggcggtaacgcaaacagcccaggcatgtgacctggtcattttcggcgcgaaaggcgatcttgcacgccgaaaattgctgccttccctgtatcagctcgaaaaagcgggccagatccatcccgatacccgaatccttggggtagggcgcgccgactgggataaggaggcttataccaaagtcgtgcgcgaggcgctcgaaaccttcatgaaagagaaaatcgatgaaagcctttgggataagctgagcgggcgtctcgatttctgcaatctggacgtcaacgatgtaagcgcctttacccgtctgggtgaaatgctggaccaggaaaatcgcgtcaccattaactatttcgccatgccgccaagcaccttcggcgccatctgcaaaggcctgggcgaagcgaagctgaacgccaaaccggcgcgcgtggtgatggagaagccgctgggtacgtcgcttgcaacctcgcgtgaaatcaacgaccaggtgggcgagttctttgaggagtgtcaggtttaccgtattgaccactatcttggtaaagagacggttctgaacctgctggcgctgcgttttgccaactccctgtttgtgaacaactgggacaaccgcactatcgaccacgtggaaattaccgtggcggaagaggtgggcatcgaaggccgctggggctacttcgaccaggccggccagatgcgtgacatgattcagaaccacctgctgcaaattctgtgcatgattgccatgtctccaccgtcagatctgacggccgacagcattcgtgacgccaaagtgaaagtgctgaaatcactgcgccgtattgaccgctccaacgtgcgtgagaaaaccgtgcgcggccagtacaccgcaggttttgcccaggggaaaaaagtccctggctatctggaagaagagggcgcgaacaagtccagcaacaccgaaacgtttgtggcgatccgcgtggatatcgacgactggcgctgggccggcgtgccgttctacctgcgtaccgggaaacgtctgccggcaaaatgctccgaagtggtggtctacttcaaaaatccggaactgaacctgttcaaagaatcctggcaggaactgccgcagaacaaactgactattcgtctgcaaccggatgagggtgtggatattcagatcctgaacaaagtgccgggtcttgatcacaaacacaacctgcaaaccaccaaactcgacctgagttactctgaaactttcaaccagacgcatctggccgatgcttacgagcgtctgctgctggaaaccatgcgtggtatccaggcgctgttcgtccgccgcgatgaagtggaagaggcgtggaagtgggtggactcaatcaccgaagcgtgggcagccgaccaggacgcgccaaaaccgtatcaggcgggaacatggggacctgtcgcctccgttgcgatgatcacccgtgatggccgctcctggaacgagtttgaataa

SEQ ID NO: 524501 - DNA, 888 bp, Stenotrophomonas maltophilia
atgagcgtcttgttaacaatgaacatgctggaaaaaatccagtttcaactggaacaccttagcaaatccgagcgcaaagtggccgaagttattctcgccgcgcccgctcaggcgattcattcaagcatcgccgctctggcacaggaatcaggcgtcagcgaaccgacggtcaatcgattctgtcgtagtctggacacccgcggctttcctgattttaaactgcatctggcacaaagtctggcaaacggtaccccgtatgttaatcgcaatgtagatgaagacgacagcgttgatgcttacaccgcaaaaatatttgaatcggcaatggccacgctcgaccatgttcgccagtctctggacatgagttcagtgaatcgcgcggtcgatcttctcacgcaggccaaacggatcgccttctttggccttggctcgtccgccgccgtggcgcatgacgccatgaataagttctttcgctttaacgtgccggtgatttactccgatgacattgtgctgcaacgcatgagctgtatgaattgtagcgaagatgatgtcgtggtactcatctcccatacgggccgcaccaagagccaggtggagctggcgcaactcgcgcgtgacaacgatgcgatggtcatcgccctgacgacggcaggtacgccgctggcccgggaagcaacgctcgccattaccctggacgtaccggaagacaccgacatgtacatgccgatggtctcccgcctggcgcagctgacggtcatcgacgtgctggcgaccggttttaccttacgccggggcgcaaaattccgggataacttgaagcgggtcaaggaagccctgaaagaatcgcgttttgataaagaattgcttataaagagcgatgttccctaa

SEQ ID NO: 524502 - DNA, 1443 bp, Stenotrophomonas maltophilia
atgtccagaaggcttcgcagaaccaagatcgtcaccaccctaggcccggccaccgaccgcgataataacctcgagaagattatcgccgcgggtgccaacgtggtgcgcatgaacttctctcacggtacgccagaagaccataaattacgtgccgacaaagtgcgtgaaatcgcagctaaactgggccgccatgttgctatcctcggtgacctgcaaggtccaaaaatccgcgtatcgacctttaaagagggcaaagtcttcctcaacatcggcgataaatttctgctggatgccaacctgagcaaaggcgaaggcgataaggaaaaagtgggtatcgactacaaaggtctgcctgctgacgttgtgcctggcgacatcctgctgctggacgacggacgcgtacagctgaaagtgctggaagttcagggtatgaaggtgttcaccgaagtgaccgtcggcggcccgctctccaacaacaaaggcatcaacaaactcggcggtggcctgtctgccgaagcactgaccgataaagacaaagcggatatcgtgaccgcagcgcagatcggcgtggattatctggccgtctccttcccccgctgcggcgaagatctgaactatgctcgccgcctggcgcgtgatgcaggctgcgatgcgaaaattgttgcgaaagtggaacgcgctgaagcggtctgcgatcaggacgcgatggacgacgtgatcctggcgtctgacgtggtgatggttgcccgtggtgatctgggcgtggaaattggcgaccctgaactggtcggtatccagaaagcgctgatccgtcgcgcgcgtcagctgaaccgcgcggtgatcaccgccacccagatgatggaatccatgatcaccaacccaatgccaacccgtgcggaagtcatggacgtggcgaacgccgtgctggatggtactgacgcggtgatgctgtcagcagaaaccgctgcgggtcagtatccggcggaaaccgtggccgccatggcgcgcgtctgcctgggagcggagaagatcccaagcattaacgtctccaagcaccgcctggatatccagttcgacaatgtggaagaagcgattgcgatgtccgcgatgtacgcagccaaccacctgaaaggggtcacggcgatcatcaccatgaccgaatctggccgtaccgcgctaatgacgtctcgcatcagctccggtctgccgatcttcgccatgtcccgacatgagcgtacgctgaacctgacggcgctgtatcgcggcgtgacgccagtctacttcgacagcaccaatgacggtgtggccgccgcgcacgatgccgtgaatctgctgcgcgacaaaggttatttggtatccggtgatatcgttatcgtgacgcagggtgacgtgatgagcaccatcggctcaaccaataccacccgcgtactgaccgtagagtaa

SEQ ID NO: 524503 - DNA, 972 bp, Stenotrophomonas maltophilia
atggaaaccaaaaaaaacaatattgagtacattcccgagtttgaaaaatcctttcgccacccgcgtaactggggcgcctggcttggcgtatacgcgtttgctggcatggcgttgctacctgcttccctccgcgatccggtgctcggcaatgtggggcgcctggcagggcgcttaggtaaaagcgcacgccgccgggcgcaaataaaccttctgtactgcttcccggataaaaccgacgtcgaacgcgaagcaatcattgatgatatgtataccaccgcgccacaggccatggcgatgatggcggaactggcgctgaaagggccggaaaagatcgtcgaccgcgttgactggaaagggctggaaatcatcgacgagatgcgtcgcaataatgaaaaagtgattttcctggtgccgcacggttggggggtcgacattccggcaatgttaatggcatcgcagggccagaaaatggcggcgatgttccataatcagggaaacaaaatctacgatttcgtctggaataccgtgcgccgtcgctttggcggacgcctgcacgcccgtaacgatggcattaagcctttcattcagtccgtacgtcagggctattggggctactatctgcccgatcaggatcacggtcctgagcacagcgagtttgtcgatttcttcgcgacctataaagctacgctacccgcgattggtcgcctgatgaaagtctgccgcgcccgcgtgatcccgctgttcccggtttatgacggtaaaacgcatcgcctgagcattgaggtacgtccgccgatggacgatctgctgaccgcggacgatcgcaccattgcacgccgcatgaatgaagaggtggaagtgctggtggggccacataaggagcaatatacgtggatcctgaagttgctcaaaacgcgtaaacctggcgaaacagagccgtacaagcgtaaagagcttttcccgaagaaatag

SEQ ID NO: 524504 - DNA, 1320 bp, Stenotrophomonas maltophilia
gtgcaacagatagcccgctctgtcgccctggcatttaacaatctgcctcgaccccaccgcgttatgctggggtcgcttacagttctcacgttagcggtcgccgtctggcggccctatgtttaccacccgagttctgcccctattattaaaaccatcgaactggagaagagcgagatccgctctctgctgcctgaggccagcgagcctatcgatcaggccgcacaggaagatgaagctattccccaggatgagctggatgacaagatccagaatgaaaccggcattcatgaatatgttgtttctactggcgatacgctgagcagcgtcctgaaccagtacggtatcgacatgggcaacattagccagcttgccgcatccgataaagagctgcgtaacctgaaaattggtcagcagctttcctggaccttaacgcccgacggcgatctgcaacgtctgacctgggagatgtcccgtcgcgaaacccgcacctacgatcgcaccgcaaacggtttcaaaatgaccagtgaaatgcagcagggcgactgggttaacagcgtgatgaaagggaccgtcggcggcagctttgtttccagtgcccgcgatgctggcctgaccagcgctgaaatcagctcggtgatcaaagccatgcagtggcagatggatttccgcaaactgaaaaaaggcgatcagttctctgtcctgatgtcccgcgaaatgctggacggtaagcgcgagcagagccagcttgtgggtgttcgtctgcgttcagacggcaaagactactacgccattcgcgcggaagacggtaagttctatgaccgcagcggtacgggcctggcaaaaggcttcctgcgtttcccaacggcgaaacagttccgtgtctcctccaactttaacccgcgtcgtctgaacccggtaacgggtcgcgtagcgccgcaccgtggcgttgacttcgccatgccgcagggcacgccagtgctggcggtaggggatggtgaagtggtcatggcgaaacgcagtggtgctgctggctactacgtggctattcgtcacggtcgtacatacaccacccgctacatgcacctgcgtaaactgctggtcaaaccgggccagaaggtgaaacgtggcgatcgcatcgcgctgtccggtaacacaggccgttcgacggggccgcacctgcactacgaagtgtggatcaaccagcaggcggttaacccgctgacggcgaaactgccgcgcaccgaagggctgaccgggaaagatcgcaaagattacctggcgcaggtgaaagaggtgatgccacagctgcgcttcgactaa

SEQ ID NO: 524505 - DNA, 960 bp, Stenotrophomonas maltophilia
atgattagtcgcattatgttacagaaaaatacgcttcttttcgcagctttatccgctgctctttgggggacaacagcacaagatgttaacgctgccgttgtcgcttcgcttaaaccacttggctttatcgccgctgccatcgccgacggtgtgacggacacagaggttcttctgcctgacggggcctccgagcatgattattctctgcgtccgtctgatgtaaaacgcttacagaacgcggacttagtcgtctggattggtcctgagatggaagcgttcatgcagaaatccgctaaacaggtccctgcggagaaacaggtgacgattggtgagctgtccgctgtgaaaccgttgctgatgaaaggggctgaggacgagggcgacgaacacgaccacgaccatgctcatggcgaaaaaggtgacgaccatcaccatcacggtgaatacaacatgcatctctggctctccccagagatagcgcggcttacagcggttgcaatccacgacaaattagtggaacttatgccgcaaagtcgaatcaaactcgacgccaacctgaaggattttgaggctcaattagccgcaaccgacaaacaggtaggtaacgagctcgcaccgcttaaaggaaaagggtacttcgtttttcatgatgcctacgggtattacgagaaacattacggtctgaccccattggggcattttaccgtcaaccctgaaattcagcctggtgcgcagcgtttacatgaaatcagaacacagttggttgagcaaaaagcgacatgcgtttttgctgagccacagttcaggccagcggtcgtagaagccgtggccaggggaacatccgtgcgcatgggaacccttgacccgctaggtacgaacatccagttgagcaaagcgagctattcgcagttcctcagccaactggcgaatcagtatgcgagctgcctgaaaggagattaa

SEQ ID NO: 524506 - DNA, 756 bp, Stenotrophomonas maltophilia
atgacgactttagtttctcttgaaaatgtttcggtctcgttcggccagcgccgcgtcctttctgacgtgtcgctgaatctgaagcccggcaaaatactcacgctgctcggccctaacggtgcaggcaaatcgacgctggtgcgcgtcgtattaggcctggtagtccctgacgcaggtgttatcgtccgcgaggacaaattgcgtatcggctatgtgccgcaaaaattacatcttgatgccaccctgcccctgacggtgagccgcttcctgcgtctccgtcccggtacgcgtaaagcggatatcctaccggcgctaaaacgcgttcaggcgggacatcttgttgaggcgcctttgcaaaagctgtcgggcggtgaaacccagcgcgtattgcttgcccgcgccctgctcagcagccctcagctgctggtcctggacgagccgacgcagggtgtcgacgtcaacggtcaggttgcgctgtacgatcttatcgaccagctccgtcgggagcttaactgcgcggtgctgatggtctcccatgatctgcatctggtaatggccaaaaccgacgaagtgctgtgcctgaaccatcacatctgttgttccggcacgccggaagtggtgtcaatgcatcccgaatttatctccatgtttggccatcgtggcgccgaacagctgggcatttatcgccataatcacaatcaccgccatgatttacagggacgaattgtcctgcgtcggggaaatggacactcatga

SEQ ID NO: 524507 - DNA, 786 bp, Stenotrophomonas maltophilia
atgattgaactgttattgcccggctggctggccgggattatgcttgcctgcgccgcgggtccactcggctcgtttgtcgtctggcgcagaatgtcctatttcggcgatacgctggcccatgcgtcattgctgggtgtcgcgtttggtttgttgctggacgtgaaccctttttatgcggtgattgtcgtcacgctgctgctggccgccggtctggtctggctggaaaaacgccctcacctggccattgataccctgctcggcattatggcgcacagcgccctgtcgctgggcctggtggtggtgagcctgatgtccaacatccgcgtggacctgatggcctatctgttcggcgatctgctggccgtcacgcccgaagatctgatttcgattgccattggcgtggtggtggtgctcgggatcctgctgtggcagtggcggaatttactggcaatgaccgtcagccccgatctggcctttgtcgacggcgtgaagcttcagcgcgtgaagctgctcttgatgctggtgacggcgttaaccatcggggtggcgatgaaatttgttggcgcgctgatcatcacgtcgctgttgataatccctgccgccacggcgcgtcgttttgcgcgtacgccggagcaaatggccggtatcgcggtgattatcggaatgatcgcggtgacgggcggcttaaccttctcggcgttctatgacacgccagcggggccgtcggtggtattgtgcgcggcggtgttgtttattttcagtatgatgaaaaaaaccgcgcagtag

SEQ ID NO: 524508 - DNA, 1011 bp, Stenotrophomonas maltophilia
atgattgaagcagaccgcctggtatcggcaggcaccattcagccagatgacgtggtggatcgcgcgatccgtccaaaactgctggatgagtacattggccagccgcaggttcgttctcagatggagatttttatccaggcggcaaagctgcgcggcgatgcgctcgatcacctgctgatttttggtccgccggggctaggtaaaaccactctggcgaatatcgtcgccaacgaaatgggcgttaacctgcgtaccacctccggcccggtgctggagaaagcaggggacctggcggcgatgctgaccaacctcgaaccgcatgacgtgctgtttatcgatgaaatccaccgcctgtcaccggtggtggaggaagtgctctatccggcgatggaggattaccagctggatatcatgatcggcgaaggcccggccgcgcgctcgatcaaaatcgatctgccaccgtttactctgattggtgccacgacgcgagccggctcgctgacctcaccgctacgtgaccgttttggtatcgtgcagcgtctggagttttatcaggtgcccgatcttcagcatattgtgggtcgcagcgcgcgctacatggggctggatatgagcgaagagggagcgtttgaagtggcgaaacgttcccgcggtacgccgcgtatcgccaaccgcctgctgcgtcgcgtgcgtgattttgccgaggtgaagcacgatggcaccatttcggctgacattgctgcgcaggcgctggatatgctgaacgttgatgccgaaggctttgactatatggaccgtaagctgctgctggcggtgctggataagttctttggcgggccggtggggctggataacctggcggcggcaattggcgaagagcgtgagactatcgaggatgtgctggagccgtatctgatccagcagggctttttacagcgtaccccgcgtggtcgtatggcgacggtgcgggcgtggaatcatttcggcattacgccgcccgcgatgccgtaa

SEQ ID NO: 524509 - DNA, 615 bp, Stenotrophomonas maltophilia
gtgataggcagactcagaggcatcatcattgaaaaacaacccccgttagtgctgctggaagtgggtggcgtgggctatgaagtccatatgccgatgacctgcttctacgagttgccggaggcgggcaaagaggcggttgtctttacccagtttgtggtgcgtgaagacgctcagctgctgtacggattcaataacaaacaggaacgcaccctgttccgcgaattaattaaaaccaacggcgtcgggcccaagctggcgctggcgattctgtccggtatgtcagcgccacagtttgtgaatgccgttgagcgcgaagatccggctgcgttaattaaacttccgggcatcggcaagaaaaccgccgagcgcctgattgtcgagatgaaggaccgctttaaaggtctgcatggcgatctgttcaccccggcggccgatctggtgctgacttcaccgggcgggccagcgacggatgatgatgccgagcaggaagcggttgccgcgctggtggcgctgggctataaacctcaggaggccagccgtatggtgagtaaagttgccaaaccggatgccagcagtgaaactctgattcgtgaagcgctgcgcgctgcattgtga

SEQ ID NO: 524510 - DNA, 522 bp, Stenotrophomonas maltophilia
atgtcgattatcctcgggattgaccccggctcacgcgtcaccgggtatggcgttatccgtcaggtgggacgccagctaacctacctcggcagcggatgtattcgtaccaaagtggacgatctgccgtcgcgcctgaagctcatttatgcgggcgtgtcggagatcatcacccagtttcagccggactttttcgccatcgagcagatctttatggcgaagaacgctgactcggcgttaaagctcgggcaggcgcgcggcgtggcgatagttgccgccgtgaaccaggacctgccagtgtttgaatacgcagcccgtcaggttaagcagacggtggtgggcataggtagcgcggagaaaagccaggtgcagcacatggtgcgtaccctgctgaagctcccggcgaacccgcaggccgacgccgccgatgcgctggccattgcgattacccactgccacgtcagccagaacgcgatgcaaatgagtgagtcgcggctcaatctggcgcgaggcagattacgataa

SEQ ID NO: 524511 - DNA, 741 bp, Stenotrophomonas maltophilia
atggcaggtcatagtaagtgggccaacaccaaacaccgtaaagcggcacaggatgccaaacgcggtaaaatctttaccaaaatcattcgtgagctggtaacagcggcgcgtctgggtggcggcgatccggcctctaacccacgtctgcgcgcggcggtggataaagccctgtccaacaacatgacgcgagacaccctgaaccgtgcaatcgcacgtggcgtgggcggtgatgaagacgcgaacatggaaaccatcatttatgaaggttacggtcctggcggtacggcggtgatggtagagtgcctgtccgacaaccgtaaccgtaccgttgcggaagtgcgccacgcgttcaccaaaaccggtggtaacctgggcactgacggttctgttgcttacctgttcagcaaaaaaggcgtcatctccttcgagaaaggcgacgaagatgcgatcatggaagcggcgctggaagccggtgcggaagacgtagtgacctacgacgacggcgctatcgatgtctacaccgcatgggaagagatgggtgccgtgcgcgatgcgctggaagcggcaggtctgaaagcggataacgctgaagtgtccatgatcccttccacaaaagcggacatggatgcagaaaccgcaccgaaactgctgcgtctgatcgacatgctcgaagactgcgacgacgtgcaggaagtgtatcacaacggtgaaatctctgatgaggttgcagcgactctctga

SEQ ID NO: 524512 - DNA, 444 bp, Stenotrophomonas maltophilia
atggcatataagcgtcccgtttcggttctggtggtcatttatgcagaagactcgaagcgggtgctgatgttgcagcggcgcgacgatcctgatttctggcagtcggttaccggcagtctggaagagggagagtccgcgccgcaggccgccgcgcgtgaagtaaaggaagaggtcgccattgacgttgctcgcgagcaactgaccctgaaggactgtcagcgcacggtggagtttgaaatttttagccatttacgtcatcgctatgcaccgggaattgagcgcaatacggaatcgtggttctgccttgcgcttccccatgagcgggagatcgtgttcacggaacacctgacctaccgctgggtggatgcggcggatgccgccgcactgaccaagtcatggagcaaccggcaggcgatagaagaatttgtaattaacgctgcctga

SEQ ID NO: 524513 - DNA, 1773 bp, Stenotrophomonas maltophilia
atgcgtacagaatattgcgggcagctgcgtcagtcccacgtcgggcagcaggtcaccctgtgtggttgggtcaatcgtcgtcgcgatcttggtagccttatctttattgatatgcgtgaccgcgaaggtatcgttcaggtgttcttcgatccggatcgcgctgatgcgttgaagctggcctctgagctgcgtaatgagttctgcattcaggtgacgggcaccgtgcgtgcgcgtgacgagaaaaacatcaacgccgatatggcgaccggtgctatcgaagtgctggcgtccgatctggtgattatcaatcgcgcagaagcgttgccgctggactccaaccacgtcaacaccgaagaagcgcgtcttaaataccgctacctggatctgcgtcgcccggagatggctcagcgcctgaaaacccgtgcgaaaatcaccagcctggtgcgtcgctttatggatgaccacggtttcctcgatatcgaaaccccgatgctgaccaaagccacgccggaaggcgcgcgcgactacctggttccatcccgcgtccataagggcaaattctacgcgctgccacagtcaccacagctgttcaagcagttgctgatgatgtccggcttcgaccgctactatcagatcgtgaaatgcttccgcgatgaagatctgcgtgcagaccgtcagccagaatttacccagatcgatgtggaaacctccttcatgaccgccgagcaggtgcgtgaggtgatggaagccctggtgcgtagcctgtggaacgacgtaaaaggcgttgagctgggcgatttcccaatcatgaccttcgcggaagccgagcgtcgctacggctccgacaaaccagacctgcgtaacccaatggagctggtggacgtggcagacctggtgaaagccgttgagttcgcggtctttgctggtccggctaacgatccgaaaggccgcgtggctgccctgcgcgtaccgggcggtgctgcgctgagccgtaagcagattgacgactacggcaacttcatcaagatctacggtgcgaaaggtctggcctatattaaagtaaccgagcgtgctaaaggtctggaaggcattaccagccctgttgcgaaattcctgaatgcggacatcgtggaagctattctggagcgcaccggcgcgcaggacggcgacatgatcttcttcggcgcagacaacaagaaagtcgttgcggatgcgatgggcgcgctgcgtctgaagctcggcaaagacctgaacctgaccgatgaaagcaaatgggcgccgctgtgggtgatcgacttcccgatgtttgaagacgacggtgaaggcggcctgaccgcgatgcaccacccgttcacctcgccaaaagacatgacggcggcggaactgaaggctgcaccggaagatgcggtagcgaatgcctacgatatggttatcaacggctacgaagtgggcggcggctccgtgcgtattcacagcggtgaaatgcagcagaccgtgttcggcattctgggcattaacgagcaggagcagcgcgagaagtttggcttcctgctggacgccctgaaatacggtacgcctccgcacgcgggtctggcctttggtcttgaccgtctgaccatgctgctgaccggcaccgacaacatccgtgatgttatcgccttcccgaaaaccaccgcagcggcgtgtctgatgactgaagcgccaagctttgccaacccggccgcgctggctgagctgggcattgaggtggtgaagaaggaagagaaaaactga

SEQ ID NO: 524514 - DNA, 567 bp, Stenotrophomonas maltophilia
atgttaacgcttgatgccaccaaaaccgcccttgtggtcattgatttacaggaagggatcctgccttttgccggtggtccacacaccgctgacgatgttgtaagccgtgctgcgcgtctggcggaaaaatgccgggccagcggtgcgcctgtcgtcatggtgcgcgtcggctggtccactgatttcgccgaagcgctaaagcagccagttgatgctcaggccccggcgcatgcgctgccggacaactggtggacatacccggtctcgctcggtaaacgcgacagcgatttagaagtcaccaaacgccagtggggcgcattctatggcactgacctggagctccagctgcgccgtcgcgggatagacactattattctgtgcgggatctccaccaacatcggtgtggaatccaccgcccgtaacgcctgggagctgggctttaacctggtgatagcggaagatgcgtgcagcgcagcctctgcggatcagcatcagggcagcatgacccatatcttcccgcgtattggtcgcgtgcgcagcacggatgagatcctcagcgcgctatga

SEQ ID NO: 524515 - DNA, 819 bp, Stenotrophomonas maltophilia
atgatgtacgtgggtttgccccagtggtcgcacccgaaatgggtgcgcctgggtattactggccttgaagagtatgcccgacactttaactgcgtggagggcaataccacgctgtacgctctgccacgcacggagatcgtcgagcgctggcgcgagcaaaccaccgacgatttccgcttttgcttcaaatttccggcaaccatctcccacaacgccgcgctgcgaaactgcgatgatttaacctacgagtttttcacccggatgtcgcccctggcaaaccgtgttggccagtactggctccagcttcccgccacgttcggcccgcgcgatctacaagccctctggcagtttctcgacgccctgccccacgatttcacgtacggtgtggaggtgaggcatccagatttctttaccaaaggcgacgcggagaaagcgctgaatcgcggcctgcatgaacgatcggtcaaccgcgtgatcctcgacagccgccccgtgcacagcgcaatcccgcacagcgaagccgttgttgatgcccagcgcaaaaaaccgaaagtaccggttcatgccattgttaccgcgcagaacccgatggtccggtttatcggcagcgataacatgcaacagaatgaggagatgttcgccgtctggctgcaaacgctcgcgaaatgggagcaaaccaccaccccgtacctgtttttacatacgccggatattgcccaggcacctgaactggtcgattctctctggcaggccttgcagcaggcggttccgtcggttggccccgcgccgtccatcccacaacaatcttctcttttctga

SEQ ID NO: 524516 - DNA, 396 bp, Stenotrophomonas maltophilia
atggtcagcgcgctgtatgcggtgttaggtgcattactgctgattaaattttcatttgatgttgtgcgcctgagaatgcagtaccgcgtctcctacggtgacgggggcttttctgagctgcaaagcgcaatccggatccacggcaacgcggtcgagtacattcccgtcgcgttaattttactgctgttaatggagatggatggcgctgaaacctggatggtgcacgtctgtgggctgctgctgattgcaggtcgtttgatgcattattatggttttcaccaccgcctgatccgctggcgtcgttccggcatgagcgcgacctggtgctcgcttttgctgatggtgctggctaacctttggtatatgccgtgggagttggttttctccttccattag

SEQ ID NO: 524517 - DNA, 744 bp, Stenotrophomonas maltophilia
atgtcagatcgcgacacgcttttttccgcgcctatcgccagcctgggcgactggacctttgatgaacgggtagccgaagtcttcccggatatgatccagcgctctgttcccggttattccaatatcatctccatgatcggcatgctggcggagcgtttcgttcaacccggcacgcaggtctatgacctgggctgttcgctgggagcggcaacgctgtccattcgtcgtaacgttcatcacgaaggctgcaagattgtggctgtcgataactcaccggccatggttgaacgctgccgtcgccacattgacgcatataaagcccctacgcctgtggaggtggtggaaggcgatatccgcgatatcgacatccagaacgcctcgatggtggtcctgaactttacccttcagttcctggtgccggacgatcgtcagcggttgctggataaaatttatcagggcctcaacccgggcggcgcgctggtgttgtctgagaaattcagctttgaagacgccagcgtgggcgaactgctgttcaacatgcaccatgatttcaagcgtgcaaacggctacagcgagctggagatcagccagaagcgcagcatgcttgaaaacgtcatgctgacggattccgttgaaacacacaaagcgcgcctgcgcaaagccggatttgaacacagcgaactgtggttccagtgctttaactttggttctctggtggcgctgaaagccggagacgcagcatga

SEQ ID NO: 524518 - DNA, 972 bp, Stenotrophomonas maltophilia
atgatcgagttcggtaatttctatcaactgattgccaaaaaccacctttcccactggctggaaaccctgcctgcgcaaattgccacctggcagcgcgatcagcagcatggtctgttgaagcagtggtccaacgccgtggagtttctgcctgaactgacgcctcatcgtctggatttactgcacagcgtgacggcggagagcgaagagccgctcccggccgggcagatcaaccgcatcgaaacgctgatgcgtaacctgatgccgtggcgcaaagggccgttctcgctgtacggcgtgaacatcaataccgaatggcgctcagactggaaatgggatcgcgttctgccgcatttatccgacctgaccgggcgcaccattctggacgtgggctgcggtagcggctatcacatgtggcgcatgatcggcgcaggcgcgcatctggccgtcggtatcgatccgatgcagctgttcctgtgccagtttgaagcggtgcgaaagctgctgggtaacgaccagcgcgcgcacctgctgccgctgggtatcgagcaactccctgctctgaaagcgtttgataccgtgttctcgatgggcgtgctgtaccaccgtcgttccccgctggagcatctctggcaactgaaagatcagctggtcagcggcggtgagctggtgctggaaacgctggtcatcgaaggggatgaacatgccgttctggtgccaggcgatcgctatgcgcagatgcgcaacgtttacttcatcccttccgcgctggcgctgaagaactggctggagaaatgtgggtttgtcgatgtacgcatcgccgatgtgtgcgtgacgtcggttgaggaacagcgtcgcaccgactggatgatcaccgaatcgctggagcagttcctcgacccggacgatcacagtaaaaccatcgaaggctatccggccccgatgcgtgcggtgttgattgcaacgaagccgtag

SEQ ID NO: 524519 - DNA, 744 bp, Stenotrophomonas maltophilia
atggcgctgctggaaatttgttgttacagcgtggagtgtgcagtcactgcgcaacggcagggggccgatcgcatcgagctttgcgcggcaccgaaagaagggggattaaccccgtcctttggcgtgctgaaatcagcccgtcaggccatcaccattccggtgcacccgattattcgcccgcgcggcggtgatttttgttatacggcgggtgagttcagtgccatgcttgaggatatcgccctcgtccgtgattccggttttccgggcctggtgatcggtgtgctggacgaagacggaaacatcgatctctcgcgtatgcgccaggtcatgcgcgcagcccagggaatggcggtcacttttcatcgtgcgttcgatatgtgtcaggatccgatacaagcctttgatacgctggcagaactgggcgtggcgcgcgttctgacgtcgggccagcagccctcggctgaaaaaggactgaaattaattacggaactaaaagcacattccggtgttccaataatcatggcgggcgcaggagtacgcgccagcaatctggaactgtttttaaacgcaggggtggaagagctacacagctcggcgggtaaatggataccttcacccatgcgttatcgcaatacagggttgtcaatgtcgacggatgctgaagcggatgagtactcgcgctacggtgtggatggagagtcggttgcggaaatgaaatcgctgattgaacgtcatcacgtgtag

SEQ ID NO: 524520 - DNA, 561 bp, Stenotrophomonas maltophilia
atggcgaactggcacaccattgacgaactgcatgatatttcagcagatttaccgcgcttcacccaggcgttcacagaacttgccacccgtctcgggctggatatcgcgccgcttgaggccgatcacatctctttgcgctgccaccagaatgccaccgcagaacgctggcggcgtggctttgaacagtgcggagaactgctgtcagagaatatcattaacggtcgcccgatttgcctgttcaaacttcacgcgccggttacggtggcgcactggcaattcaccgttgtggaactgccctggccaggagagaagcgttatccgcacgaaggctgggagcatatcgaaattgttctgcctggggagcccgagacgctgaacgcccgtgcgctggcgctgctttccgacgaggggttaagccagccgggtattttcgtcaaaaccagctcgccaaaaggtgagcgcgaacgcttaccgaaccctacgcttgccgtaacggacggcagcgtgacggtgaaattccatccctggactattgagcagatcgtcgccagcgaagcgtaa

SEQ ID NO: 524521 - DNA, 1734 bp, Stenotrophomonas maltophilia
gtgaatattcaggctcttctctcagaaaaagtcagtcaggcactgattgccgcaggtgcgcctgcggattgcgaaccacaggttcgtcagtcagcgaaagtacagtttggcgactatcaggctaatggcgtgatggcagtggctaaaaaactgggcatgccgccgcgacagctcgctgagcaggtactgacgcatctggatctcaccggcatcgccagcaaaaccgaaatcgccggtccgggctttatcaacattttccttgagcctgcgttcctggcaagccacgttgacgcggcgctgaaatctgaccgtctgggcgtggctcagccagaagcgcagaccgtggtggttgactactccgcgccaaacgtggcgaaggagatgcacgtcggtcacctgcgctccaccattatcggtgatgcggccgtgcgtaccctggagttcctcggtcacaaggtgatccgcgctaaccacgtaggcgactggggcacgcagttcggtatgctgatcgcatatctggaaaaacagcagcaggaaaacgcaggcgaaatggcgctggcagacctggaaggtttctaccgtgaagccaaaaaacactacgacgaagacgaagcctttgccgagcgcgcgcgcagctacgtggtgaaacttcaaggcggcgatccgtacttcctcgagatgtggcgcaagctggtggacatcaccatgtcccagaaccagcttacctataaccgtctgaacgtgaccctgacccgcgacgacgtaatgggtgaaagcctgtataacccgatgctgccgggcattgtggcggacctgaaagccaaaaacctggcggtggaaagcgaaggcgcaacggtagtattccttgatgagtataaaaacaaggaaggcgaaccgatgggcgtgatcgtccagaaaaaggatggcggctatctctacaccaccaccgatatcgcctgtgcgaaataccgttacgaaaccctgcatgcggaccgcgtgctgtattacatcgactcccgtcagcaccagcacctgatgcaggcgtggactatcgtgcgtaaagcgggttatgtacctgaatccgtgccgctggaacaccacatgttcggcatgatgctgggtaaagacggtaagccgttcaaaacccgtgcgggcggcaccgtgaagctctccgatctgctggatgaagcgctggagcgcgcccgtcgcctggtggccgagaagaacccggacatgcctgctgacgagctggagaaactggctaacgcggttgggatcggtgcggtaaaatacgcggatctctccaagaaccgtaccaccgactatatcttcgactgggacaacatgctggcgtttgaaggcaacacggcgccgtacatgcagtacgcttacacccgcgtactctccgtcttccgtaaagccagtattgacgaaagcgtgctggcgaacgccacggtgacccttaacgaagaccgtgaagcacagctggctgcccgcctgcttcagttcgaagagacgctctctgtggtcgcgcgcgacggtacgccgcacgttatgtgtgcttacctttacgatctggccggtctgttctctggcttctacgaacactgccctatcctgaccgccgagagcgaagcggtgcgtaacagccgcctgaagctggcgcagctgacggcgaagaccctgaaactgggtctggatactctgggtatcgaaaccatagaacgtatgtaa

SEQ ID NO: 524522 - DNA, 345 bp, Stenotrophomonas maltophilia
ttgtttattattcgcgcaaaagtgaatggtgggattcatccggggaaatgggtgttcggcaatacggcatgggtcccatggggaggaagagagcacttttgtaatgaatttgaagtttacgtgggcgctttaaaatgggtagacgttaaggataaacatttcccaccgaatatggttgaggcgggacatgaagccaatggcactaagctctacgttgcccgtgcaaaattcgataacggtctctttgtgggtaaagctggaagtcacctcagcagaggttgctgcatcggctataacggcagagagtatgaattagataccttccaggtactcgttcacgactga

SEQ ID NO: 524523 - DNA, 291 bp, Stenotrophomonas maltophilia; identical to SEQ ID NO: 118948

SEQ ID NO: 524524 - DNA, 1143 bp, Stenotrophomonas maltophilia
atgatgaaagtttggcctgtcaaacatagcccgttactgcgtcagcctgagcgctttatcgccagggatgaactgaaatcgctgattcaaaaggtgacgcataatctggtcaatatccacgacaaaacgggtgagtttttgctgcggctggacgacgggcgcgtgatcgacaccaaaggctgggccggatgggaatggacgcacggcgttggtttgtacggtatctggcagtattactgccagaccggtgacgcaggcatgcgcgagattatcgacagctggttttatgaccgtttcgcagaaggcgcaaccaccaaaaacgtgaataccatgtcgccgttcctgacgctggcgtatcgctacgaagagaccaaaaacccggcctggctgccgtggctggaaagctgggcggaatgggcgatgaatgagatgccgcgcaccgaacatggcggcatgcagcacatcacactggcggaagagaaccatcagcagatgtgggatgacacgctgatgatgacggtgctgccgctggcgaaaatcggcaagctgcttaataagccggagtacgtcgaggaggcgatctatcagttcctgctccacgtacagaacctgatggatcgtgagacggggctgtggttccacggctggaattacgacggcaatcacaactttgcccgggcccgctgggcgcgcggcaacagctggttgaccatcgtgatcccggatttcctcgaactggtggatctgccagaaaacaacgccgttcgtcgctatctggtgcaggtgctaaatgcgcagatcgccgcactggcaaaatgtcaggatgagagtggattgtggcatacgctgctggacgatcctgattcttatctggaggcgtcggccacggcagggtttgcctacggcattctgaaagccgtgcgcaagcggtatgtcggtgcagagtatgcagaggtggcggagaaagcgatccgcggtatcgtgcaaaacatctcgccggaaggggaactgctgcaaacgtccttcgggacggggatgggcagcgatctggcgttttaccgccagataccgctgacctcgatgccgtatggccaggcaatggcgattctgtgtctgacggaatatttacggaaatatttttaa

SEQ ID NO: 524525 - DNA, 1584 bp, Stenotrophomonas maltophilia
atgaaaacacgtaaaattggactcgcaaattatcttgcttacggttcaggggacttcctcggagcggggactaccgccctgacggccgcctggcttttgtatttttatacgaccttctgtggactcacaccgattgaagcaacctttatcttcgccgccgcaagggtgctggatgcggttgtcagtccgttaatgggctttttaaccgataattttggtaccacctggctgggtaagcgttttggccggcgtaagttcttcatcctgctcggtattccctgcgttttcagctactcgctgatgtgggtaggggacatgagtttctggtattacctgctgacgtatctgatctttgatattgtttacaccatgattctggtgccgtatgaaacgctggtgccggaaatgactgacgatttcaaacaaaaaaccaaattctccggggcgcgtatctccatggctcagatgtccgccattctggcctcctttctgccggggatcctgctcacgcatttcggcaaagacaacgcgatctccttcttctatgcaagcctggtcttctccgtactttgcgcgctgatgcttactttcgtctggttcttcacctgggagcgtccgcgggaagagtggtctgaagcagccctgcgcgctgaagaagagaagaaaaagctgaccctgggacagagcctgaaccgtctttttgtcgaattaagttcgacgctgcgtatcaagattttccgccagcatctgggcatgtatctcggcggctatattgcccaggatgtgttcaacgccgtattcacctattacgtggtgtttgtgctgatgcaggaagcatccatggcgtccaacctgctgggcacgatggccatcttccagttcctcgccgtgattggcatgatcccgctgtgcattcgtttcggacctgcgccgtcttaccgcatggtggtcgtgctgtttggcctggcctcgctctcttacgcggtgctttattacgcgggcctgagcgacgtttacgctctgttgctgctgatctctgcggttgccggtcttggccgcgggggtattaactacgtaccgtggaatacctacacctacattgctgatgtggacgaagtgatcaccggtcagcgtcgcgaagggatcttcgcgggcatcatgacgctgacccgtaaagcgtcccaggccggtgcggtgatgctggtggggatcgtgatgcagatgtctggctttgtcagcggtcaaaaagtgcagcctgcggaagtgagccacactatcctgatgatcctgagcgtcggcaccattctggtactgttctgcggcttcctggtctccctgcgcttcaaactcaatttgcagacccacagcaccctgcgtgaagagaccgcgaaaatgcgcgagtccggccatgcgatgccggaggcggcgaccccgcaggcccgcgccaccgtggagatgctggccggtatgccgtatgaatccctgtggggcaacaacaatatcggttacctgaatcgcaacaagccggcggccccttcactgaaggatcgtgcggtactgaattcgacatacaacagaggttaa

SEQ ID NO: 524526 - DNA, 393 bp, Stenotrophomonas maltophilia
atgcgtaagtggctgtggatcttatttttcccgctggcggtgcaggccgcaggcgagggggcatggcaggccagcagtatcggcttaacgctcaaccatcggggggagtcgatctcctcccgtccgctgtcagcctctgagaccatctccgggcagatgacgctggtggcctggaattacaccctgacgggacccacaccggccgggttgcgggtgcggctgtgctcgctgacccgctgcgcggaaatcgagggccaaagtggcatcacccaggccttcaacggggtgtctgctcaggaacctttacgttttatctgggaagtgccaggcggtggacgtctgatcccggcgctgaaggttcagcgcaacgaggtgctcgtcaactaccgctaa

SEQ ID NO: 524527 - DNA, 2079 bp, Stenotrophomonas maltophilia
atggctaatctggtggcaatgttgcgcctgcccggcaacctgaaatcgacgcaatggcagatccttgccggaccgattctgatcctgctaattctgtcgatgatggtgctgccgttaccggcatttatcctcgacctgcttttcaccttcaacattgcgttgtccatcatggtgctgctggtggcgatgttcacccagcgcacgctggagttcgccgcgtttccaacgatcctgctgttcaccacgctgctgcgcctcgcgctgaacgttgcctccacgcgtatcatcctgatggaagggcacaccggcgcggcggcggcgggcaaggtggtcgaagccttcggtcacttcctggtgggcggcaacttcgccatcggtatcgtggtgttcgtcattctggtgattatcaacttcatggttatcactaaaggggcggggcgtatcgcagaagtgggcgcgcgcttcgtgctcgacgggatgccgggcaagcagatggcaatcgacgccgacctgaatgccgggctgattgcggaagatgaagcaaaaaaacgccgtgccgaagtgacccaggaggcagatttctacggctccatggacggtgcgagtaagtttgtgcgcggtgacgccatcgcgggcattctgatcatggtgattaacgtcgtcggcggcctgctggtcggcgtgctgcaacacggcatggacatgggccacgcagcggaaagctatacgctgctgaccattggtgatggtctggtggcgcagatcccggcactggtgatctccaccgcggcgggggtgattgtgacccgcgtcagcaccgatcaggatgtaggcgagcagatggtggggcagttgttcagcaacccgcgcgttatgctgctctccgcggcggtactgggcctgcttggtatggtgccgggcatgccaaacctggtattcctgctgttcactgccgcgttgctgggccttgcctggtggatgcgtggccgcgaaacgcagcctaaggcagagccagcgccggtcaaaatgcctgagaacacccaggcggtggaagccacctggaacgacgttcagctcgaagattcgctggggatggaagtggggtaccgcctgatcccgatggtggatttccagcaggatggcgaactgcttggccgtatccgcagcattcgtaaaaaattcgcccaggacatgggcttcctgccgccggtggtgcatatccgggacaatatggatctcccgcccgcacgctaccgcatcctgatgaaaggggtggaaatcggcagcggtgatgcataccctggccgctggctggcgattaacccgggcacggccgcaggcacgttgccgggtgagcagacgaccgacccggcctttggtctggcggccatctggattgagagcgccctgaaagagcaggcgcagatccagggttacacggttgttgaggccagtaccgtggtcgcgacgcacctcaaccatttgattggccagttctccgcggaactgtttggacgtcaggaggcgcagcagctgcttgaccgcgtaacgcaggagatgccgaagctaaccgaagatttggtgccgggcgtgctgaccttaaccaccctgcacaaagtgctgcaaaatctgctcgatgagaaggtgccgatccgcgatatgcgcaccattctggaaacactggccgagcatgcgccgctccagagcgatccacatgagctgacggcggtggtgcgcgtggcgctcgggcgcgccataacccagcaatggttcccgggaaccggcgaagtgcaggtgattggcctggacacgccgctggaacgtctgctgcttcaggccctacagggcggtggcgggctggagccgggtctggcggacagattgctggcgcaaacccaggaggcgctggcgcgtcaggagatgctgggcgcgccgccggtgctgctggtgaatcatgcgctgcgtccgctgctgtcgcgcttcctgcgccggagcctgaaccagctggtggtgctgtcgaatatggagctgtccgataaccgcaatattcgcatgacggcgaccataggagggaaataa

SEQ ID NO: 524528 - DNA, 303 bp, Stenotrophomonas maltophilia
atgagcgcaccgaaagtggtggcgaaaggggccgggctgattgcgctgcgcattcgtgaaatcgcgacggaaaaccgcgtaccgatccttgaagcaccgccattagcccgtgcgctgtatcgccacgcggaaattggacaacagatcccgggccagctctacgccgctgtcgcagaggtgctggcctgggtgtggcaactgaaacgctggcgtttagcgggcggtcaacgacctgtaaaacctgagaaccttccggtgcctgaagcactggattttttgaacgagaaggacactgatggctaa

SEQ ID NO: 524529 - DNA, 1428 bp, Stenotrophomonas maltophilia
  misc_feature (1089)..(1132): n is a, c, g, or t
atgagccatgaaattagaacgcctctgaatgccattatcggtatgctggagcttggaacaaaaaaactccacgatggaatcatagacagtaccgcattcgacgtcgcctattcttcgtcaaacgtactacaggaacttattggtaatatccttgatatttccatgattgaatctgaaaaactggttattcattatacagaaatggagctcagaaaaaccattgaacagattatctccttattcaggcctggcgcgttcaacaacggtatcgagcttgtactcctatatccagcaaagctcgacgacatcattgtgacaacagatgagcttcggttcagacaggttgtcagcaatatcatcagtaatgccatcaaattcacgaatgaaggcgaagtgcgtgtcgcagtagaatgcgttaattctcaagtcacagacgtcgccctgctgcaaattgccataacggatacgggctgcggtatatcgcctgaagggcaacagacattattccgacctttttcccaggctgatattaacggctattctcatcagtcaggctccgggcttggactcctcatctctcgccggctttgtgaagctttgggtggaggcatacaacttcatagtcaaccgggcgtgggaaccagagtcgacattacgttaaaagtgggcgtaagccaacagaagagcaagcgtgctgcggcagaggttatagatatccagcgtcaaaacagctcagccaccgttcttgtcgttgatgatttttacccaaatctcatgctgttaaataagcagctgtcataccttggctacgtcgtgatcgaatgtagcgatcctcgtgacgcatatgctcagtggagaagcaccggtgccgaaattattatcactgactgtaatatgccgtatatctcaggaattgagctgacaaaattaatccgtaaggaaaacagcgatactgtaattatcggcctgacggctgatgcccgcgatgaacaaagaggagcctgtcttcaggccgggatgacggaatgcctctttaaacccgtttcgctcaaaaccctatccctcgcattaagcaaatttgccagcgcnnnnnnnnnnnnnnnnnnnnnnnnnnnnnnnnnnnnnnnnnnnnccgccacaaacgcatgcgcaaaagcggaagatcgggtcgaccagcatgtatttaactcctgcttagcgcatctcgacgtcaccatcagcgatttgcacgacgctatcagcgcggaagatttcttgcagatcgccgaacttgctcacctgatgaaaggcggtttttatcttctgaagaacgattcgctggctgacttatgtactgaactggaagaagccgcagacaggaaaaccatcagcttctgccttcagcttgcgctacgtcttgaagatgcggtaagcgatctctcgtcatga

SEQ ID NO: 524530 - DNA, 609 bp, Stenotrophomonas maltophilia
atgcaggaagtcatatggtccgaacaggtgatgctgacagggcgttcccgtatttctatcagcggagccaataatgtattttgttccgcgctggtggtgcttttcaggaatattatttcgccagacattattaccatgccagagatccaggtgcaggtctttgtcggaatgacgctgccacaggtgttcgtatggcggatgaaggaggatgcggcaatggaagggaagatccctcgtattgttttctgtactgactcttgcttccgaatgctgtcagggaccagcggatatgaacgaacactgttcattactccagataccagcatttatgcggtggctgaaataatcagacgctggattgccggttacgcctcgcacgcttcggacaacgttctgcctctgctcactcgatgtgataaccgaaccatgcaaatgctggaaaaagatatcccacttcctcttgaggccagacggctctttcgctcggtaaaaacgctttattgtcagcgcgctttactgtcggaccggatcgggacgcacagccgtcaggaattatatctaaaagcgcgtctgatactcagtcaaagccaaacattagcgcttggttag

SEQ ID NO: 524531 - DNA, 966 bp, Stenotrophomonas maltophilia
atgattagcggcgtgttgtatgccctgcttgcagggttgatgtgggggctgattttcgtcggcccgctgattgtgccggagtatccggcaatattgcagtcgaccggacgctatctggcgctggggcttattgccgtgccgctggcatggctggggcgtgcgcgtctgcgccagctgagtcgccaggactggctcaccgcgctgtggctgaccatgatgggtaatcttatctactacgtctgcctggcgagcgccattcagcgtaccggtgcgccggtgtcgaccatgattatcggcacgctgccggtggtcattccggttttcgcaaacctgctttatagccagcgagacgggaaactggcgtggtcaaaaatggtgcctgcgctggtatgcatcgccgtggggctggtgtgcgtgaatattgccgagctacgccacggcctcgaaaacttcagcttgtggcgttacggttctgggatctttctggcggttatttcggttgtctgctgggcctggtatgccctgcgcaacgcacgctggctgcgggaaaacccggataagcatccgatgatgtgggcgacggcgcaggcgctggtcacgcttcctgtctcgttgctgggctatgtgggtgcatgtatctggctgggtagccagcatccggatttcgccctgcccttcggaccgcgcccgtgggtattcgtcgggttaatggtcgccattgccgtgctctgttcgtgggttggcgcactgtgctggaacattgccagccagaagctgccgacggtgatactggggccgctgattgtctttgaaacgctggccgggctgctctataccttcctgatgcgccagagcgtgccgccgctgctaacggcctgcgggatcgcgctgctggtcgttggggtggtgattgcggtgagagcgaagccggaaaaaccgatggtcgttccggcgtcggaggggtga

SEQ ID NO: 524532 - DNA, 1647 bp, Stenotrophomonas maltophilia
atgtttaaacgtataaaagtcattactcttttgatttcggtgctgcttgtgctcggcatcatgcaactgatctccgccggcattttcattaatgcgctcaataacgacaaagagaacttcaccgtttctcagctttccagccagaacgtcgcggagtttaccgacgcctggatcagcctgaatcaggcgcgtgtcacccttaaccgcggcatgctgcgcctgcaaagcagcatggcgtcgcagattaacggcgggcagctgaacgagctggtcaataccgcgaaaaacctgctggctgatgcccagacacattacgataaatattacgcgctgccggaaacgccgggtatggacgagcacctggccgacaggctggaagagcactaccgcatctactccgccacgctgacgcaaatgaacgttctgctggggcagggcaatctggaagatatgttcaaacaaaatgccgaacagaagcagaccgcgatgcaaaaggtctatcgcgagtggcgggaggcgcaggccgcgctcaccgacaaaggcatcaaggacaatgaaagcgactacaaacgcattctgtggatcctctctgcggtgatgctgctggtgatcgcggtgattatttccagctggattgcgatgcgccgcgtgctgctgctgccgctggaagaggtgatcagccatatccgcgccattgcggcaggggatttaacccagccgattcaggctgagggtaaaaatgaaatggcgatcctggcgcgcaatgtccaagagatgcagactgcgctggccaacacggtgggcgtagtgcgtgaaggcgcagataccatctacaccggcgcgggtgaaatctcggcgggcagcaacgatctctcttcccgcacagagcagcaggccgcttctctggaagagacggcagccagcatggaacagctgaccgccaccgtgaagcaaaacgccgataacgcgcgtcaggcgtcgcgtctggcgctggacgcctcctccaccgcgaagaagggcggaaatgtggtagaaggcgtggtgcgcaccatggacgaaatcgccaccagttccagcaaaattgcgcaaattaccaacgtaatcgatggcattgccttccagaccaatattctggcgctgaacgcggcggtagaagcggcgcgtgcgggcgagcaggggcgtggcttcgcggttgtcgcgggtgaggtgcgtacccttgcccagcgcagcgctcaggcggcgaaagagatcaaagccctgatcgatgattccggcgagcgcgttaacgcgggctctcagctggtaaatgaagcgggcgcgacgatggcagagatcgttaatgcagttacgcgcgtgacggacatcatgggtgagattgcgtcggcctccgacgaacagagccgcggtatcgaccaggtgggccaggcggtggcggagatggatcgcgttacccagcagaacgcctcgctggtggaggagtctgcggcggcggcggcggcgctggaagatcaggccgcgcgcctgaacgacgcggtggcggtgtttaagatcacccgtaaccaggcggtgaaagccgcgccggtaaagacctatgcacctaaagcgcagcccgtagcggcgtctgaagcgaactgggaaacgttctga

SEQ ID NO: 524533 - DNA, 663 bp, Stenotrophomonas maltophilia
atggccttccgcgaccaacccttaggcgagctggcgctctccatccctcgcgcttcagcgctgttccgtaaatacgatatggattactgctgcggcggtaagcaaacgctggcgcgcgcagcgtcgcgtaaagagctggatgtagaagctatcgaagcggagctggctaagctggcagaacagcctgtcgacaaagactggcgcaccgcgccgctggctgaaatcatcgaccatatcattgtgcgttaccacgaccgtcaccgcgaacagctgccggagctgattttacaggccaccaaagttgagcgcgttcacgccgataaaccttccgtaccgcgcggcctggcgaaatacctgaccatgctgcacgaagaactatccagccacatgatgaaagaggagcagatcctcttcccgatgatcaaacagggcatgggcagccaggcaatggggccaatcagcgtgatggaaagcgaacatgatgacgccggagaactgctggaagtgatcaaacacaccacccacaatgtcacaccgccgccagaggcgtgcaccacctggaaagcgatgtacaacggcatcaacgagatgatcgacgatctgatggaacacatcagtcttgagaataacgttctgttcccgcgtgcattatcgggtaaataa

SEQ ID NO: 524534 - DNA, 1410 bp, Stenotrophomonas maltophilia
atggtagatcaggtcaaagtcgccgccgcagaagaggcgacgtctgaacagtcgctacggcgaaatctcacgaaccgtcacattcagcttattgccattggcggcgccatcggcacagggctatttatgggctcgggcaaaaccatcagtcttgcaggcccgtcgatcatcttcgtttatatgatcatcggttttatgctctttttcgtgatgcgtgcaatgggtgaattgctgctctcgaacctcgaatacaaatccttcagcgacttcgcgtcagacctgcttggcccgtgggcgggctattttaccggctggacctactggttctgctgggtggttaccggcatggcggatgttgtcgctattacggcctacgcccaattctggttccccggcctgtcggactgggtggcctcgctggcggtgattgtcctgctgctgagccttaacctcgcgaccgttaaaatgttcggtgagatggagttctggttcgcgatgatcaaaatcgtcgccatcatcgcgctgattgtcgtcgggctggtaatggtgctgacgcacttccagtcgccaactggcgttcaggcctcgtttgcccatctgtggaatgatggcggctggttcccgaaaggcatcagcggcttcttcgccggtttccagattgcggtgttcgcgtttgtcgggattgagctggtgggaaccacggcggcggaaactaaagatccggagaaatccctgccgcgcgcgatcaactccattccgctgcgtatcatcatgttctacgtgttcgcgctgatcatcattatgtccgtgacgccatggagctcggtagtgccaaccaagagcccgttcgtcgagctgttcgtgctggtggggctgcccgctgccgcgagcctgattaacttcgtggtgctgacctctgcggcctcttccgcgaacagcggcgtcttctccaccagccgtatgctgtttggtctggcgcaggagggcgttgccccgagcgcgttcgccaaactgtctaaacgtgcggtaccggcgaaagggctgaccttctcctgcatctgtctgctgggcggtgtggtgatgctctacgttaacccgagcgtaatcggcgcgttcaccatgatcaccacggtgtcggcgatcctgtttatgttcgtctggaccatcatcctctgctcatacctggtgtaccgcaaacagcgtccacatctgcatgagaagtcgatctacaagatgccactgggcaagctgatgtgctgggtatgcatggcgttcttcgtcttcgtgctggtgctactgacgctggaagaagatacccgtcaggcactgatcgtcacgccgctgtggtttatcgcgctggggctgggctggctgtttatcggtaagaaacggatggctggcatgcgttaa

SEQ ID NO: 524535 - DNA, 621 bp, Stenotrophomonas maltophilia
atgaccaccccgacttttgacactatcgaagcgcaggcaagctacggcatcggcttgcaggtaggacagcagctgagcgaatccggcctggaaggtctgttaccggaagcgctggtggcgggtatcgctgacgcgctggaaggcaagcagcccgctgtgccggttgacgttgtgcaccgtgcgctgcgtgaaatccacgaacgtgctgacactgtacgtcgcgcgcgtttcgaagagatggcggcagaaggcgtgaaatatctggaagagaaccgtgagcgtgaaggcgtgaacagcaccgagtccggcttgcagttccgcgtaatcaatcagggtgatggcgcaatcccggcgcgtaccgaccacgttcgcgtacactacaccggtaagctgatcgacggcaccgtgttcgacagctccgtcgcgcgtggcgaaccggctgaattcccggtcaacggcgtgattgcaggctggatcgaagccctgaccctaatgccagtaggttcaaaatgggaactgactatcccgcacaacctggcatacggcgagcgtggcgctggcgcgtccattccgccattcagcaccctggtgtttgaagtcgagctgctggaaatcctgtaa

SEQ ID NO: 524536 - DNA, 639 bp, Stenotrophomonas maltophilia
atgcccgggcgatttgaactgaaacctaccctggcgaaaatctggcatgcgccggataactttcgcatcatggacccgctgccgcctttgcaccgcagaggcattatcatcggcgcgttgctgatggtcatcggtttcctgcttccttccggcagtgacaacgttgataccgggccggtaagccgcaatgctgagctggatatccagtcgcaaagccagccgcagcctgattcacagccgatgcagacgcaactggtcacaccgtctaacgatccgggccaggttgcgccggttgagcctgaacctgttcaggaagatcaggagcaggccgccgccccttcagagccacaggcgcaacagcccaccggcattgagcagcagtggcgttcgtatcgcgtagagccagggaaaacccttgctcagctgttccgcgaccacagcctgccggcaacggatgtgtatgccatggcgcaagtcgagggggcaggcaagccgctcagcaacctgcaaaatggtcagatggtgcagatccgccagaatgccagtggggtggtgaccgggttaacgatcgataccggaaacgggcagcaggtactgtttacccgccagccggacggcagttttatcagagcacgttaa

SEQ ID NO: 524537 - DNA, 930 bp, Stenotrophomonas maltophilia
atggataccgctctgcccacgcccgtctttgcccgtcgaaatgtggcctatgcctgcgccacgctctgctgtctgctttggggaagctcatacccggccattaaaagcggctacgaactcttccagatcgcgaccgatgatattccgtccaaagtcgtctttgccggataccgttttctgtttgccggtgcgttgctgctgctctttgccctggcccagcgtaaaccgattggcaggctcacacccacgcagtttggtcagctcacgatcctcgggctgacccagaccaccatccagtacaccttcttttatatcggccttgcttacaccaccggggtgaacggctcgatcatgaatgccaccgggaccttcttcagcgtgctgctggcgcactttatctaccacaacgacaaactcagctataacaaaacgctgggctgtgttctgggctttaccggcgtgatgctggtgaacttccacggcgggttaagtgatttccagtttgtctggcaaggtgacggatttgtggtgctggcggcctttattctctctgcggccacgctttacgggaaacgcatttcccagaccgttgacccgacggtgatgacgggatggcagctggcgataggcggggcggcactggttgcgggaggctatgccacgggcggggcgctggaggtgcacagcatgaaggccgtcgccgtgctggggtatctgacgctgctctcatccgtggcgttcgccctgtggagcgcgctgctgaaagtgaaccgcgtgagtatgattgccccgttcaactttgtcatacctgtagcaggaacggtgctctccgccatattcctcggcgaagacattctggacatcaaatacgcgattgcgctggtgctggtctgctcagggatctggtgggtgaataaacgtcgtgcctga

SEQ ID NO: 524538 - DNA, 450 bp, Stenotrophomonas maltophilia; identical to SEQ ID NO: 119221

SEQ ID NO: 524539 - DNA, 228 bp, Stenotrophomonas maltophilia; identical to SEQ ID NO: 114176

SEQ ID NO: 524540 - DNA, 315 bp, Stenotrophomonas maltophilia
atgaccaaccgtctggtgttgtccggcaccgtgtgcaggaccccccttcgaaaggtcagcccatcaggaattccgcattgccagttcgtgcttgagcatcgttctgtgcaagaggaagccgggtttcaccggcaggcgtggtgccaaatgcccgttatcattagcggacacgaaaaccaggccattactcacagtttaacggtcggtagtgcagtaatcgttcaggggttcatctcttgccacaaggcaaagaacggcctgagcaaaatggttctgcatgccgagcagattgatttgatagatactggagactag

SEQ ID NO: 524541 - DNA, 396 bp, Stenotrophomonas maltophilia
atgcgtcattacgaaatcgtttttatggtccatcctgaccagagcgaacaggttccgggtatgatcgagcgttactctgctgccatcactggtgcagaaggcacgatccaccgtctggaagactggggccgccgtcagctggcttacccaatcaacaaactgcacaaagctcactacgttctgatgaacgttgaagcgccgcaggaagtgattgatgagctggaaactaccttccgcttcaacgatgccgttatccgcagcatggttatgcgtaccaaacacgcagtgaccgaagcatctccgatggttaaagcgaaagacgagcgccgtgagcgtcgcgatgatttcgcaaacgaaaccgcagatgattctgatgctggggattctgaagagtaa

SEQ ID NO: 524542 - DNA, 276 bp, Stenotrophomonas maltophilia
atgaaaagaatcgcattcgccattttggctgcgcttttgctcagtgcaaacgcgatggcagccatcaagatagacagccgacaggccagaaacatggatgatgtgcagagcttaggcgttatttacatcaatcataacttcgccactgaaagtgaagcagatcaggcgcttaatgaagaaaccgatgcgcagggcgcaaaatactatcacgtcatactaacacgtgagcccggcagcaacggcaatatgcgcgccagcgcagatatttaccagtaa

SEQ ID NO: 524543 - DNA, 687 bp, Stenotrophomonas maltophilia
atgcttaagctgaaacagcaggtctttgaggccaatatggatctcccgtgctatggactggtgacgtttacctggggcaacgtaagcgccatcgatcgcgatcgggggctggtggtgattaagccgagcggcgtggcctatgacgccatgaaagtggacgatatggtggtggttgacctggaaggacacgttgttgaaggcaaatggcgtccttcttcagatacggcaacccatctggcgctgtaccagcgttacccgtccctgggtggtgttgtgcatacccattccacgcacgccaccgcctgggcacaggccgggctggcgatccctgctttgggtacgacgcacgcggactacttcttcggcgatattccctgcacgcgggcgttaacgcaggctgaggtcgaaggcgagtacgaacttagcaccggcaaggtcattatcgaaacgctgggtgagacggaaccactgcatacgccgggtattgtggtgtaccagcatggtccattctcctggggtaaagatgcgcatgacgccgtgcataacgcggtggtgatggaagaggtggctcgaatggcgtggattgcgcgcggcattaacccacagcttcagggcattgatgattatctgatgaacaagcatttcatgcgtaagcacggcccgaatgcttattacgggcagaagtga

SEQ ID NO: 524544 - DNA, 861 bp, Stenotrophomonas maltophilia
atgttgtcaaaacaggtcccgcttggcatctatgaaaaggcactccctgcgggggagtgctggctggagcggttacagctggcgaagcagctgggtttcgattttgtcgaaatgtcggtggatgagacggacgagcgtctttctcgcctggactggcgccgcgaccagcgtctggcgctggtgagcgccattgccgaaaccggcgtgcgcgtgccatccatgtgcctgagcgctcaccgtcgttttccgcttggcagcgaagatgatgccgtacgcgccgaagggctggagatcatgcgtaaagccattcgctttgcacaggatgttggcatccgcgtgatccaactggcgggttacgatgtttactatcaggaagccaacgatgagacgcgccgtcgtttccgtgacggcctgaaagagagcgttgagatggcaagccgtgcgcaggtgacgctggcgatggagatcatggattatccattgatgaactccatcagcaaggcgctgggctacgcgcactatctgaacaatccgtggttccagctttatccggatatcggcaacctgtcggcatgggataacgacgtacagatggagcttcaggcgggcatcgggcatatcgtggcggtgcacgtaaaagatacccgtcccggcgtgtttaaaaacgtaccgttcggcaccggggtggtggatttcgaacggtgcttccagacgctcaaacagacaggttattgcggaccttacctgattgagatgtggagcgaaaccgcggacgacccggcggcagaagtggcgaaagcccgggactgggtgcgcgagcgcatggcgcgggcaggcttactggaggcggaacatgcttaa

SEQ ID NO: 524545 - DNA, 651 bp, Stenotrophomonas maltophilia
atgtcattaccaatgttgcaggtcgcgctggataaccagacgctgtctcacgcttacgaaaccacccgtctgattgcggaagaggtggacatcatcgaagtcggcaccattctgtgcgtgggcgaaggcgttcgtgcggttcgtgacctgaaggcgctctatccgcataaaatcgtgctggcggatgccaaaattgccgatgcgggcaaaattctctctcgcatgtgctttgaagccaacgccgactgggtcaccgtgatctgctgtgcagatatcaacactgcgaaaggcgcgctggacgtggcgaaagagttcaacggcgacgtgcagattgaactgaccggcttctggacctgggagcaggcacaggagtggcgcgaagcgggtatccagcaggtggtttatcaccgcagccgtgatgcgcaggccgcaggtgtggcgtggggcgaagccgatatcaacgcgatcaaacgcctggccgatatgggcttcaaagtgaccgtgaccggtggtctggcgctggaagatctgccgctgttcaagggtattccaatccacgtctttattgccggtcgtagcattcgcgatgcggaatctccggtggaagctgcgcgtcagtttaaacgctcaatcgctcagctttggggttaa

SEQ ID NO: 524546 - DNA, 468 bp, Stenotrophomonas maltophilia
atgaaactacgtgattcgctggctgagaataactccatccttttacaggccgaagccagtacctggcaggaagcggtgaagctgagcgtggacctgctggttaaggcggacgttgtcgagccgcgttattaccaggccatcctggatggcgtggcgcagcacggcccctattttgtgattgccccggggctggcaatgccgcatggccgcccggaagagggtgtcaagaaaaccggttttgcgctggtgacgctgaaaaccccgctggtgttcaaccacgaagataacgacccggtcgacattctgatcaccatggcagctgtcgatgccaacacccaccaggaggtgggcatcatgcagatcgttaacctgtttgatgacgaagctaattttgaccgtttacgtgcctgccgtaccgcgcaggacgtgctggatttaattgataacgccgctgcggcggccgtttaa

SEQ ID NO: 524547 - DNA, 306 bp, Stenotrophomonas maltophilia
atgaccgtacgtatcctggctgtgtgtggcaatgggcaaggaagctccatgatcatgaaaatgaaagtggaccagtttttaacccagtcaaacattgaccacacggtgaacagctgcgcagtgggtgaatacaaaagtgaactgaacggcgcggacatcatcatcgcttcaacgcacattgccggcgagattagcgtgtcgggcaacaaatacgtggtaggcgtgcgcaacatgctgtcgcctgcggattttgggccaaaactgctggaagtgatcaaagagcacttcccacaagacgtgaagtaa

SEQ ID NO: 524548 - DNA, 1401 bp, Stenotrophomonas maltophilia
atggagatcctctacaacgtctttaccgttttctttaatcaggtaatgaccaacgccccgctgttgctgggtatcgtgacgtgcctggggtacatcctgctgcgcaaaagcgtcagcgtgattatcaaaggcaccatcaaaaccatcattggttttatgctgttgcaggcggggtctggcattctgaccagcacgtttaagccggtcgttgccaaaatgtctgaggtatatggcattaacggcgccatctctgacacttacgcgtccatgatggccaccatcgatcgcatgggggatgcgtacagctgggttgggtatgcggtactgctcgcgctggcgctgaacatcatttacgtgctcctgcgccgcatcaccggtattcgcaccatcatgctcaccgggcacatcatgttccagcaggcggggctgattgccgtttctctctatatcttcggctacccaatgtggaccacggtcatctgcacggcagtgctggtctcgctttactggggcatcacctccaacatgatgtataagccaacgcaggacgttactgacggctgcggcttctccatcggtcaccaacagcagttcgcctcctggattgcgtacaaagttgcaccgtacctgggtaaaaaagaggagagtgttgaagacctcaaattgcctggctggttgaatatcttccacgacaacatcgtctccacggcgattgtgatgacccttttcttcggtgccatcctgctctcctttggcattgacgtggtgcaggtgatggcgggtaaaacccactggacggtctatatcctgcaaaccggtttctcctttgccgtggccattttcatcatcactcagggcgtgcgtatgttcgtcgccgagctgtcggaagcgttcaacggtatctctcagcgcctgatccctggcgcggtgctggcgattgactgtgcggctatctatagctttgcgccaaacgccgtcgtctggggctttatgtggggcaccatcggccagctgattgcggtcggcatcctggtgggctgtggctcctcaatcctgattattcctggctttatcccgatgttcttctccaacgccactatcggcgtgtttgctaaccacttcggcggatggcgcgccgcgctcaagatctgcctggtgatgggcatggttgaaatcttcgggtgcgtgtgggcggtcaagctcaccggcatgagcgcctggatgggcatggcggactggtcaattctggcaccgccgatgatgcagggctttgcgtccgtcgggctggtctttatggccgtcatcatcctgattgcactgacttatatgttcttcgctggccgttcgctgcgagctgaagaagatgcggaaaaacaaacagcagaagtttctgctcactaa

SEQ ID NO: 524549 - DNA, 1065 bp, Stenotrophomonas maltophilia
atgagtaaagtgaaaaccatcacccgtgaatcatggattttgagtacctttccggagtggggtagctggctgaacgaagagatcgagcaggaacaggttgctcctggcacatttgcgatgtggtggcttggatgcaccgggatctggctgaaatcagaaggcggcgccaacatttgtgttgatttctggtgcggcaccggcaaacagagccacggcaatccactgatgaaaaaaggccaccagatgcagcgtatggccggcgttgaaaagctccagccgaacctgcgcaccacgccttttgtgcttgatcctttcgccattcgccagatcgacgccgttctttctacccacgatcacaacgatcatatcgacgtgaacgtggcggcagcggtaatgcaaaactgcgcggacgacgtaccctttatcgggccgcagacctgcgtggatttgtggattggctggggcgtgccaaaagagcgctgcattgtgatgaagccgggcgacgtggtgaaaatcaaagacgttgaaattcacgcgctggatgcctttgatcgcaccgcgctgatcaccctgcctgccgaccagaaagccgcaggcgtactgccagacgggatggacgagcgcgcagtgaactacctgttcaaaacgcctggcggttccctgtatcacagcggtgactctcactactccaactactacgcgaagcacggtaacgagcaccagattgacgtggcgcttggctcttacggtgaaaacccgcgcgggattaccgacaaaatgaccagcgcggacatgctgcgcatggccgaagcgctgaacaccaaagtggtgatccccttccaccacgatatctggtcaaacttccaggccgatccgcaagagatccgcgtcctgtgggagatgaaaaaagaccgactcaagtatggtttcaagccgttcatctggcaggttggcggcaagttcacctggccgctggataaagacaatctcgagtaccactacccgcgtggttttgatgattgcttcaccattgagccagacctgccgttcaagtccttcctctga

SEQ ID NO: 524550 - DNA, 756 bp, Stenotrophomonas maltophilia
atgacggaagcgcaacggcatcaaattttactggaactcctggcgcaaacagggtttatcaccgtcgagaaagtgatcgaacgtttagggatctcccctgctaccgcgcggcgggacattaacaagctggatgaaagcggcaagctgaaaaaagtccgcaacggcgcagaggccatcagccagcagcgtccacgctggacgccgatgaatattcaccaggcgcagaatcacgatgaaaaggtgcggattgccagagcggcatcacagctggtgaatcccggggaaagcgtggtgattaactgcggctcgacagcgtttttactgggccgagagatgtgcggcaagccggtgcaaatcattaccaactatctgccgctggccaactatctcattgaccaggaacatgaaagcgtggtgatcatggggggccagtataacaagagccagtccataaccctgagcccgcaggacagtgaaaacagcctctacgccgggcactggatgtttaccagcggcaaaggcctgacggcggatggcctgtataaaaccgatatgctcaccgcaatggcagagcagaacatgctcaacgtggtgggtaaactggtggtgctggtcgacagcagcaaggtcggtgaacgcgccggcatgcttttcagccgcgccgagcaaatcagcatggtgatcaccggcaaaaacgccaaccccgagatcctcagcaagctcgaggatcagggtgtcacggtgctgcgcgtttaa

SEQ ID NO: 524551 - DNA, 723 bp, Stenotrophomonas maltophilia
atgattgaaattgaaactcgcctgcttagtgagcatgaaatcatccatgcttttccggctggtaaaggtgaacagccgctaccgacggtagttttctatcatggctttctctcctcaaagctggtctacagctattttgccgtcgcgctggcgcaggccggtttccgggtggtcatgcctgatgcgccgaatcatggggcacgctttacgggcgatgaacaggcgcggctggggctgttctggcaaacgctgcacggcaatctgaccgagttcgccgggctgcgtgacgcgcttttacaggccgggctggtggaggggaaacggctggcggtcgcaggcgcatcaatgggcggaatgacggcgctggggatcatggccaggcatccggaggtgacgcccgtggcttgcctgatgggatcgggctactttatgtcactggcaaagacgctgttcccgccgcaggcacctcaggagattgaagccctgttgtctgaatgggacgtcagccatgcgctttcgcagctggccgatcgtcccctgctgctgtggcatggggatgccgacgatgtcgtaccgcccggtgaaacgttccgtctgcaacaggcgctacagcgtgaagggctggacagcaatctgacctgcctgtggggtgccggtgtccggcaccgtattactccggctgcgctggaagccaccgtggagtttttccgtcagcacctttaa

SEQ ID NO: 524552 - DNA, 303 bp, Stenotrophomonas maltophilia
atgcgcaggcttaccgctttattgctggtctcactgctcagcggatgttccgtattgcagggtacgccagagccggcaccgccggttaccgatcatcctcaggagattcgtcgtaatcagacggaaggattacaacgcctgggaaccgtatccgcgatggttcgcggttcaccggatgatgcagaagacgcaattgaagcacaggccgttgccgcaaaagcagattattacgtcatcacgatgattgatgaaaccattattacgggacagtggtatgcacaaggcattttgtaccgtaagtga

SEQ ID NO: 524553 - DNA, 276 bp, Stenotrophomonas maltophilia
atgaaacgaacccttgctttaacgacgctattgctttcagcgggcctgctgagcaccacggcgcagtcggctgaatttgccagcgcggattgcgtcacgggcctgaatgagattggtcagatctccgtcaataatatcacggggagtccgcaagacgttgaacgtgtcgtcgccctgaaggccgatgaacagggcgcatcctggtatcgcatcgtccagatgcaggaagataaccatgttaatcactggcgcgtgcaggctattctttatgcataa

SEQ ID NO: 524554 - DNA, 1932 bp, Stenotrophomonas maltophilia
atgatcacctttttccgccgggcaggactgggcacgaagctatcgctgctaacaggtgtaagtgtcgctacgctttttttgctgttcactttcctgttgagccacaacgccagccagcagcttgaagatcttgcggttgaagacctgcgtaaccagtccaccggcatggtggatatggtagagatgttcaacaccagcctgagcgaagaggttgaaagctatacccgtctgttcaccacctttttgccacagccattaaacagcgacagcagccagagccggaccataaatgggcttaccgttcctttgctgaaaggcggcgaaacggagttgcatgaaaacaatacgctttctgatgacttcctgagccgaacgggagccatctcgacgctgtttgtccgcagcggtaacgattttgtccgcgtggcgacgtcgctgcgcaaagagaatggcgaccgcgccatcggaaccgttcttgataccaccagcccggcatttgccgccgtcactaaaggggaggtctatcgtggcctcgcgctgctgttcggcaagcgctatatcacgcagtaccagcctgttaagaatgcggaaggccaggttatcgggattatctttgtcggcgtggacatcacccattcgtggaacgtcatgcgcgagaaaatccttaaccgtcgtctgggcgagagcggtcacttctttgtactggatcgcagtagcggcaaaacgcgcggacagtatctgttccatgccagcgaagagggcaaactgcctaactgggacacggcgacacagcagcagcttctgagtgataaagccggcacgctggaacgcgtgagcgcggatggccgtacgctcaaagttgcctacacgccgctgccgggctggaactggaccatcgtgggtgaagtggataaagccgtactgctttcaagcgtcaccacactgcgcgatcgcttcctgatggcgggcgtggtgctatccgctctcttcgcgggcctgttcgttatcctcattcgccggatgctaacccgcccactgcgcgaggtgatcgcgcttgcccggcagtatgccgcaggcgatctgcgcgccagcctgccggttacccgccaggatgaagtcggccagctgattgacgccatcaacgggatcggggaaggcctgcaaaaaattgtgttgcaggtccgcgaggccgcaagcgagatccatctggggactaacgcgctggcttcagacaccggcgagatctctgaacagatcaacaagcaggccagcagcgttgaggagacctccgccagcatggagcaattagccgccaccgtgcagcaaaatgccgccaacatggagcaaacgcagcagctggtgggtgaaacctcgcgcgcggtgcatcagggtggagagacggtgacccacgcagtctccaccatggatgatattcgcgatgcatcgaaacgcattgaagacatcacccgcgtgattgagtccatcgctttccagaccaatatcctggcgctcaatgcggcggttgaagcggcgcgggcgggcgagcacgggaaaggtttcgcagtggtggcacaagaggtacgcgccctggccgcacgcagcgccaacgcggtaaaagagattgaacagctgattggggatacgctgaacaaggtgagcgaaggccatgcgctgtctgagcagacgcgtctggcgatggatgccatcattgttcatatcgataacatcagccagcttgtcactgagatcaaccacgcctcccgcgagcagtcggcgggaattggccaggtgaatctggcgatgacgcacatcggtgaggcatcgcacatcaatgccgatcgcatctcacgcagcgagcagacagcacagacgctgcgcgagaagggttcacatctcacccggctggtgagcctgttccagctgaaggcttaa

SEQ ID NO: 524555 - DNA, 1623 bp, Stenotrophomonas maltophilia
atgcactggcagacacataccgtttttaatcaacccgcaccgctatcgaacagcaacctttttctctctgattgcgccctgcgcgatgcggtagcgcgcgaaggggctgagtgggatgtggatcttcttgccagcatcggccagcagttgggtacggcagagtcgctggagctgggcagactggcgaacgttaatccgccggagctgctgcgttatgacgccacgggagcgaggctggatgacgtccgctttcatccggcatggcatcttctgatgcaggggctttgcgccaaccgggtgcacaacctggcgtgggaggaggaggcgcggaaaggatctttcgtcgccagggccgcgcgtttcgtacttcatgctcaggtagaggcgggaacgctttgcccggtgaccatgacctttgcggccacgccgctgttgcaacggtcgctgcccaaaccgtttcatgagtggttaacgccgctgatgagcgatcgctacgacccccatctcgcgccgggggcgcaaaagcgcggcctgctgatcggcatggggatgacggaaaagcagggcggttcggacgtactcagtaatactaccaaagcagagaaatgcagcgatggcagttaccggctggtggggcacaaatggtttttctccgtgccgcagagcgatgcgcatctggtgctggcgcaggcgaagggcgggttgtcctgcttttttgtcccgcgtttcttacccgacgggcaacgtaatgccgtgcgccttgagcgtctgaaggacaagctcggcaaccgctcaaatgccagcagtgaggctgaatttcttgatgcttccggctggctgctgggcgaagagggggaaggcgtccggcaaattctgaagatgggcgggctgacgcgctttgactgcgcgctgggcagtcacggactgatgcgccgtgcgctctcggtggcgctttatcatgcccatcagcggcagaccttcggcaaaaatctgatcgaccagccgttaatgcgcgacgtgctaagccgtatggcgctggtgctggagggacacacggcactgctgttccgactcgcccgggcgtgggacaaccgcaacgacccgcaggaagccgcatgggcgcggcttttcactccggcggcaaaatacagcgtctgcaaagcgggtataccgtttgtggcagaggcaatggaggtgctgggcggtgcaggctattgcgaagagagtgagcttccgcggttgtaccgtgaaatgcccgtcaacagcatctgggaaggctctggcaatattatgtgcctggatgtactgcgcgtgctggcgaagcagccgggcattctcgacctgctcgccgatgatttcgcgcaggtcaaaggtcaggacaggcacttcgatcgcagctggcgtcagctacagcagaagctgcggaaaccgcaggaagcgcagggcagggagatcgcgcagcagctctttttactcggggccggaagtcaaatgctgcggcacgcatcgccgcccgtggcgcaggcgtggtgccgcatgatgctggatacccggggcggcacgctgatgagcgagcaggtgcaaaacgacctgctgctgcgcgccacgggccgggtcggttaa

SEQ ID NO: 524556 - DNA, 1275 bp, Stenotrophomonas maltophilia
atgcaacaggatgcgcacaagcgtgcattaattgcaggctccatcggtaatttcatcgagtggtatgaatttgcggtctatggttttctggcaacggtgattgccagaaacttcttccagcttgagggggaagcggagctcaccagcctgatcctcacctgggcctcattcgccatcgctttcttcttccgcccgctgggtgcggtggtctttggccgcattggcgacaggattggccgtaaaccgacgctgattattgtgctggtattgatgacgctcgccaccgctgccatcggtattgtgccggtctacgccagtatcgggattgccgcgccgctgatcgttacactcctgcgtattctgcaaggactgttcgcgggcggtgagtatggcggcgcggtctcgttgatgacggagttcgccccgcgcggcaagcgcggtctttacggggcatggcagtccttcaccgtggcgctcgggctgttagcaggcgcaggcattgtcgcgttgctctctgcccttctctcccctgaagccttgcacgactggggctggcgcattccgttcttcctggcgttgccgatgggtgcggtcgcgctatggctgcgggtaagcatggaagagacaccgagctttgtgcagcaacgggaaaaaccggttgttactcaggccagcaccgccgccacgttcaaaaccattctgatgggcattggtcgcgtgatggtctggtctgcggcgggttatacctatctggtgattatgccgacctatctgcaatctgcgctgcacaccggttttaaccaggccctgctgattgcggtgatttctaacattgggtttgcgttcacgatcattccgtcgggcatgctgagcgacaggatcgggcggcggacggtgatgattatcgccaccgtgctcctgctgatcctcgccctgccgctgctgaaaattttgcaggcggagtccagcacgctggctgtcaaagcgattgtagtgctgattgcgggaggtctggttgggatgctggcagggccggggccggcaatgctgtctgagatgttcccgacgcgcgtgcgttataccgggctggggctggcctattctctgtcgaatgcgatcttctcgggctgtgcggggctgatcattaccgggctgattaaagagacgggcaatctggatattccggcgtactacgtgatggcaacggcggtggtgagtattttcgcgctgatgacgctgagaaaggatgaccatttgcggtcgttagaggagtga

SEQ ID NO: 524557 - DNA, 732 bp, Stenotrophomonas maltophilia
atgagtgaaatgatttacggcatccacgcggtgcaggccctgctggagcgcgcgccggagcgttttcaggaagtttttattctgaaagggcgtgaagacaaacgtctgatgccgctgatccacgcgctggaagcgcagggcgtcgtgatccagctggcgaaccgtcagtatctggatgagaaaagcgaaggtgctgtacaccagggcattatcgcgcgcgtgaagccgggccgtcagtatcaggagaacgatctgccggatctgatcgctgagctggataacccgttcttcctgatcctcgatggcgtaaccgacccgcacaacctgggcgcgtgcctgcgtagcgccgatgcagcaggcgtgcatgcggtgattgtgccaagagatcgttccgcgcagcttaacgctaccgctaaaaaagtggcctgcggcgcggcggaaaacgttccgctgatccgcgtgactaacctggcgcgcaccatgcgtctgttgcaggaagaaaatatctggatcgtcggcacggccggtgaagcggatcacaccctgtatcagagcaaaatgaccggccgtatggcgctggtgatgggggcagaaggtgaaggcatgcgtcgcctgacccgcgagcactgcgatgagctgatcagcatcccgatggcgggcagcgtatcgtccctgaacgtttctgttgcgacgggtatctgcctgtttgaagcggtgcgtcagcgcgggtag

SEQ ID NO: 524558 - DNA, 2442 bp, Stenotrophomonas maltophilia
atgtcacaagatcctttccaggaacgcgaagccgaaaaatacgcgaatcctatccccagccgcgagttcatcattgaacacttaacaaaacgcgaaaaacccgccaatcgtgaagaacttgccgttgaattaaacattgagggtgaagagcaaattgaagcccttcgccgccgcctgcgcgccatggagcgcgacggccagctggtctttactcgtcgccagtgctacgcgctgccagaacgcctcgatctgctgaaaggcaccgttattggtcatcgcgatggcttcggcttcctgcgcgtggaaggccgtaaagacgacctgtacctctcatccgaacagatgaagatgtgtattcacggcgaccagatcctggcgcagccgctgggtgcagatcgtaaaggccgccgcgaagcgcgcgtggtccgcgtgctggtgccgaaaaccagccagattgtaggccgttactttaccgatgcgggcgtaggctttgtggtgccggacgatagccgtctgagcttcgacattctcatcccgcctgaagaggtgatgggcgcacgcatgggctttgtggtagtggttgaacttacccagcgcccgacccgccgtaccaaagcggtaggtaaaatcgtcgaagtgctgggcgataacatgggcaccggcatggccgttgatatggcgctgcgcacccatgaaattccttacgtctggccgaaagcggttgaagaccagatcgaaaacctgcgtgaagaagtgccggaagagtccaaagcaggccgcgtggatctgcgcgatctgccgctggtcaccattgatggtgaagacgcccgtgacttcgatgatgccgtgtactgtgagaaaaaacgcggtggcggctggcgtctgtgggtggctatcgcggatgtgagttattacgtacgtccacacacgccgctggataacgaagcgcgcagccgcggtacgtcggtctacttcccgtcgcaggttgtaccgatgctgccagaagtgctctcgaacggcctgtgttccctcaacccgcaggtggaccgcctgtgtatggtctgcgaaatgaccatctccagcaagggacgtctgacgggctataagttctacgaagcggtgatgagttctcatgcgcgcctgacctataccaaggtctggcatatgttgcagggcgatcaggatcttcgcgaacagtacgcgccgctggtcaaacacatcgaagagctgcacaacctctacaaaacgctggatcaggcgcgcgaagagcgcggtgggatttcgtttgagagtgaagaagcgaaattcatctttaacgctgagcgtcgtatcgagcgaatcgagcagactcagcgtaacgatgcgcacaagctgattgaagagtgtatgatcctggcgaacatctcggcggcacgtttcgttgagaaagccaaagagcctgcgctattccgtattcacgataagccaaccacggaagccgtaacctcgttccgttccgtgctggccgaactcggcctggaactgcctggcggcaataagcctgagccacgcgattatgccgagttgctggaatccatcagcgatcgtcctgacgcggaaatgctgcaaaccatgctgctgcgttccatgaagcaggcgatttacgatccggaaaaccggggccactttggtctggcgttacagtcgtatgcgcactttacctcgccgattcgccgttatccggatctgtccctgcaccgtgcgatcaagtatctgctggcgcacgagcagggtcacaaaggcaatacgaccgaaaccggtgggtatcactactccatggaagagatgctgcaactgggccagcactgttccatgaccgagcgtcgtgcggatgaagcaacgcgcgacgtggcggactggctgaagtgtgactttatgctggatcaggtgggtaacgtctttaaaggtgtgattgccagcgtcaccggctttggcttcttcgtacgtctggatgagctgtttatcgacggtctggtgcacgtttccagccttgataacgattactaccgcttcgaccaggtcggacaacgtctgatcggtgaatccggcggtcagacctaccgtctgggcgatcgggtggaagtgaaggttgaagccgtgaatatggacgaccgtaaaatcgacttcagcctcatctccagcgaacgtgctccgcgtaacgtcgggaaaaccgagcgtgagaaagcgaaaaaaggcggcaacggtaaagcgggcggcaagcgacgtcaggcaggtaaaagagtaaactttgagccagacagcgccttccgtggcgagaagcagcagaagcccaaggcggcgaaaaaagacgctcgtaaagcgaaaaaaccgtcgaccaagacccaaaaaatagcggccgcaaccaaagcgaagcgcgcggcgaagaaacagcaggcggagtaa

SEQ ID NO: 524559 - DNA, 426 bp, Stenotrophomonas maltophilia
gtgcagttaacaagtttcaccgattacggcttacgcgcgctgatttacatggcgtcgttacccgatgggaagatgaccagcatctctgaagtcacagaggtgtacggtgtgtcccgtaatcatatggtcaaaataatcaatcaacttagtcgtgccggatacgttgctgccgtccgcgggaagaatggagggatccgtctcggtaaaccggcacagagtatccgtatcggcgatgtggtgcgtgaactggagccgctatctctggtgaactgtagcagcgcgttttgccacattacgcccgcttgccgcctgaaacaggcgctttcaaaggccgtgcaaagttttctcaaggaactggataactacacgctggccgatttggttgaagagaatcaaccgctttataaattattgctggtggaatga

SEQ ID NO: 524560 - DNA, 1341 bp, Stenotrophomonas maltophilia
atggtagaatccatttttaagcaaacggtgattttgaaaaaaatgggtaacaacgtcgtcgtactgggcacccaatggggtgacgaaggtaaagggaagattgtcgatcttctgactgaacgggctaaatatgttgtacgctaccagggcggtcacaacgcaggccatactctcgtaatcaacggtgaaaaaaccgtcctccatcttattccatcaggcattcttcgcgaaaacgtcaccagcatcatcggtaacggcgttgtgctgtctccagctgcgctgatgaaagagatgaaaggtctggaagaccgtggtatccctgttcgtgagcgtctgctgctctccgaagcctgcccgctgatcctggactatcatgtggcgctggacgtggcgcgtgaaaaagcgcgtggcgcgaaagcgatcggcactaccggtcgtggcatcggcccggcatacgaagataaagtggctcgtcgcggtctgcgcgtgggcgacctcttcgacaaagcgaccttcgctgaaaaactgaaagaagtgatggaatatcacaacttccagctggtgaatttctataaagccgaagccgttgactaccagaaagtgctggatgacgtcatggcgattgctgacattctgaccggcatggttgttgatgtgtccgatctgctggaccaggcgcgcaagcgtggcgatttcgtcatgtttgaaggtgcgcagggtaccctgctggacatcgaccacggtacctatccgtacgtaacgtcctctaacaccaccgcgggtggcgtggcaactggctccggcctgggcccacgttatgtggattacgttctgggcatcatcaaagcgtactccactcgcgtgggtgcaggtccattcccgaccgagctgtttgatgaaaccggcgagttcctctgcaagcagggtaacgagtttggcgcaaccaccggtcgtcgtcgtcgtaccggctggctggacgccgttgccgtgcgtcgtgctgtgcagatcaactccctgtctggcttctgcctgaccaagctggacgtactggacggcctgaaagaagtgaaaatctgcgtgggctatcgtctgccagatggtcgcgaagtgactaccactccgctggccgctgacgactgggaaggcattgagccaatctacgaaaccatgccgggctggtctgagaccaccttcggtgtgaaagaacgtagtggcctgccaaaagctgcgctggactacattaagcgtattgaagaactgaccgaagtgccgatcgatattatttctaccggcccggatcgtactgaaacgatgatcctgcgcgacccgttcgacgcataa

SEQ ID NO: 524561 - DNA, 198 bp, Stenotrophomonas maltophilia
atgaattcaacgatctggctcgcactggctttggttttggtgctggaaggcctcggcccgatgctctatccacgcgcatggcgacggatgatcgcgacaatgagccaacttccggacaatattttgcgtcgttttggtggtggacttgtggttgccggtatcgttatctactacatgttgaggaaaacgattggctga

SEQ ID NO: 524562 - DNA, 894 bp, Stenotrophomonas maltophilia
gtgcgtgacggcgacaagcgtccggtgatctacgagccgggtctgcacttcaaggtgcctttcattcagtcagtcaaaacgctcgacgcacgtatccagaccatggataaccaggccgaccgtttcgtgactaaagagaagaaagacctgatcgttgattcctacatcaaatggcgtatcagcgacttcagccgctacttcctggcaaccggcggtggtgatgtttctcaggcagaagtgctgctgaaacgtaagttctctgaccgtctgcgttctgaaattggtcgtctggatgtaaaagacatcgtgaccgactcccgtggtcgtctgaccctggaagtgcgtgatgcgttgaactcaggtacagcgggtaccgaagacgaagtggaaacaccggcagcggatgacgcgattgccaaagcggctgaacgcgttcaggctgaaaccaacggtaaagtaccggtgatcaacccgaacagtatggctgcactgggtatcgaagtggttgacgtgcgtatcaagcagatcaacctgccagcggaggtgtccgaggcgatctacaaccgtatgcgcgccgagcgtgaagcggtagcccgtcgtcaccgttcacagggtcaggaagaggccgagaaactgcgtgccgcagcggactacgaagtgaccaagacgctggcggaatctgagcgtcaaggccgtatcctgcgtggtgaaggcgatgccgaagccgcgaagctgtttgccgatgccttcagccaggatcccgacttctacgcctttatccgtagcctgcgtgcttacgagaatagcttccagagcaaccaggatgtgatggtactcagcccggacagcgatttcttccgttatatgaagacgccgactaacgcaacgcgataa

SEQ ID NO: 524563 - DNA, 1260 bp, Stenotrophomonas maltophilia
atggcgtggaatcagcccggtaataacggacaagaccgcgacccgtggggaagcagcaataatcaaggcggcaactctgggggaaatggcaacaaaggtggtcgcgagcaggggccgccggatctggatgatatcttccgcaaactgagcaaaaagcttggtggccttggcggaggaaaaggttctggctcgggtggcaactccactcagagtccgcgcccgcctatgggtggccgcgtagtaagcattgtggccgcggcggtagtcatcatctgggcagccagcgggttctacaccattaaagaagcagagcgcggcgtggtaacccgtttcggtaagttcagccatctggttgagccgggcctgaactggaaaccgaccttcattgataacgtgaccgcagtgaacgtggagtccgtccgtgaactggcggcgtctggcgtgatgttgacctctgacgaaaacgtggtgcgcgttgagatgaacgtccagtaccgcgtgaccgatcctgagcgttatctgtttagcgtgaccagcgcggatgacagcctgcgtcaggcgaccgacagcgccctgcgtggcgtgatcggtaaatacaccatggaccgtatcctgaccgaaggtcgtaccgttattcgtagcgatacccagcgcgagctggaagagaccatccgtccgtacaacatgggtatcaccctgctggacgtcaacttccaggctgcacgtccgccggaagaggtgaaagcggcgtttgacgatgcgattgccgcgcgtgaaaacgaacagcagtacatccgtgaagcggaagcgtataccaacgaagttcagccgcgtgcaaacggtcaggcgcagcgtattctggaagaagcgcgcgcgtataagacccagaccatcctggaagcacagggtgaagtggctcgcttcgcgaagatcctgccggaatataaagccgcgccggaaattacccgtgagcgtctctatatcgagaccatggaaaaagtgctgagccatacgcgtaaagtgctggttaacgacaacaaaggcggaaacctgatggtcctgccgctggatcagatgcttaaaggcggttctgcaccggcagcaaaagacaacagcggagccaacaacctgctgcgtctgccgccagcctcgtctggcagctccagcgcgaacacaacgccttcttcgaacgatggtgacattatggaccaacgccgtgctaacgcgcagcgtaacgactaccagcgtcagggggaataa

SEQ ID NO: 524564 - DNA, 1281 bp, Stenotrophomonas maltophilia
ttgtttgaccgttatgacgccggtgagcaggcggtgctggtacacatctatttttcgcaagacaaagatatggaagacctccaggagtttgaatctctggtctcttccaccggtgtcgaagcaatgcaggtgattaccggtagccgtaaagcgccgcacccgaagtactttgttggtgaaggtaaagcagttgaaattgcggatgccgtaaaagcaaccggcgcatcagtcgtgctgtttgatcatgcgctgtctccggctcaggaacgtaacctggaagctctctgcgaatgtcgtgttatcgatcgcacggggttgatcttagatatttttgctcagcgtgcgcgtacccacgagggtaagttgcaggttgagctggcgcagttgcgccatctggcgacgcgtctggtgcgtggctggacacaccttgaaagacaaaaaggcgggattggtttacgtggcccgggtgaaacccagctcgaaaccgaccgtcgtttgctgcgtggccgtataacccagatcctttctcgtctggagcgtgtcgagaaacagcgcgaacaggggcgtcgggcgcgaaccaaagccgacatcccaacggtgtcgctggtgggctataccaacgccggtaaatccaccctgtttaaccagataaccgaggcccaggtgtatgccgcagaccagctgtttgcgaccctggaccctacgctgcgccgtattgacgtcgcagacgtcggtgaaacggtactggcggataccgtagggtttatccgccatctgccgcacgatctggtggcggcgtttaaagcgacgttgcaggagacgcgtcaggcgaccctgctgctgcacgtgattgatgcggctgacgtacgcgtgcaggagaacatcgacgcggtgaatgtggtgctcgaagagattgacgcccacgaaattcccaccctgttggtgatgaacaagatcgatatgctggacgatttcgaaccgcgtatcgaccgagatgaagagaacaaaccaattcgggtctggctatctgctcaggccgggattggtgtgccactgcttttccaggctttgacagaacgtctttccggtgaggtagctcagcacacgctgcgactgccgccacaggaaggcaggctgcgtagccggttttatcagcttcaggcgatagaaaaagagtggatggaggatgacggcagcgtggggatgcaggtgcgtatgccgatcgttgactggcgtcgcctctgtaaacaagaacctgcgctggcggactatatcgtctga

SEQ ID NO: 524565 - DNA, 312 bp, Stenotrophomonas maltophilia
atggctaaggggcaatctttacaagatccgttcctgaacgcattgcgtcgggagcgtgttccagtttctatttatttggtgaatggtattaagctgcaaggtcagattgagtctttcgatcagttcgtgatcctgttgaaaaacacggtcagccagatggtctataagcacgcgatttctactgttgttccgtcccgtccggtatctcatcacagcaataacgctggcggcggcactggcagtaactaccatcatggcagcaacgcgcagggttcatctgctcctgcgcaggacagcgaagaaaccgaataa

SEQ ID NO: 524566 - DNA, 951 bp, Stenotrophomonas maltophilia
atgactgatgtaagtaaggcgagcctgccaaaggcgatttttttaatggggccaacggcctccggtaaaacggcgttagccattgagttacgtaaagttttgccagtagagttgattagcgttgattcagccctcatttaccgaggaatggacatcggcacggcgaagcccaacgcagacgaactgcgtgcggcaccgcaccgtttactggatattctcgacccggcacaggcttactccgcagcagattttcgccgcgacgccttagctgagatggccgagattaccgccgcgggacgcataccgctgttagttggcggcacgatgctctactttaaggcgctgctggaggggttatcgcctctgccatcggccgatccggaagtgagagcgaagattgagcggcaggcggcagagcaggggtgggacgttttgcacaggcaactggaagagattgacccggttgccgcagcgcggatccacccaaacgatccgcaaaggctttcccgggcactggaagtttttttcatttcgggtaaaactttaacggaactgacgcaaacgtcaggagacgctctgccgtatcaggtgcatcagttcgccatcgccccggcgagccgtgaactgctccatcaacgaattgagcagcgttttcatcagatgttggcttcagattttgaagcagaagtgcgggcgctttttgcccgtggagatttgcatacggacatgccttccattcgttgtgtgggataccgccagatgtggtcgtatcttgaaggcgagatttcatacgatgaaatggtttatcgaggtgtttgcgccacgagacagttagcgaagcgccagatcacctggttgcgtggttgggagggtgttcactggttagacagtgaaaaaccacaacaggcgttaaacgaagtgattgaggttattggtgatatcgctgactga

SEQ ID NO: 524567 - DNA, 1845 bp, Stenotrophomonas maltophilia
atgccgattcaggttctaccgccgcagctcgcgaaccaaatcgccgccggtgaggtggtggaacgccctgcatcggtggtgaaagagctggtggaaaacagcctcgatgcaggggcgacccgcattgatatcgatattgaacgcgggggcgcaaagcttatccgcattcgtgataacggctgtggcatcaaaaaggacgagttggcgctggcgctggcgcgtcatgccaccagtaaaattgcgtcacttgacgatctggaagcgattatcagcctgggttttcgcggcgaagcgctggccagtatcagctccgtttcccgcttaacgttgacctcccgcacggccgaccagcaggaagcctggcaggcctacgcggaagggcgcgatatggacgtcacggttaaaccagcggcgcacccggtaggcaccacgcttgaagtgctggatcttttctataacacgcccgcccggcgcaagtttatgcgaaccgagaagaccgaattcggacatatcgacgagatcatccgccgcatcgcgctggcacgctttgatgtcactcttaacctcagtcataacggtaaggtgatgcgtcagtaccgggcagtggcggaaggcgggcaaaaggagcgtcggctgggcgccatctgcggcacgccgttcctggaaaaagcgctggccattgagtggcagcatggcgatttggccctgcgcggctgggttgccgatccgaacgccagtagcgccgcgtttgctgagattcagtactgctacgtcaacggtcgaatgatgcgcgaccgtctgattaaccacgccattcgccaggcctgtgaagataagctcggcgccgatcaacagcccgcctttgtgctttatctggagatcgacccgcatcaggttgacgttaacgtgcaccccgccaagcacgaggtgcgtttccaccagtcgcgtctggtgcatgattttatctatcagggcgtcgttagcgttttgcagaagcaggctgagccaacgctgccgctggaaaacgacattcctgcaccgcgatcgctgccagaaaatcgcgtggcggccggacgtaaccatttcgctgaacccgcacccgcgcgcgaaccagtggctccgcgtttttcgtcagcgggaagcgcaccgcgcccgacgggcgccaactacccaaatgcccagccggggtatcaaaagcagcaaggggcgttataccgtaaattgctggacaccccagccgtggaacggaaagaacatattgaggtatcgccgtcttcccttgacggacatagccagagttttggccgggtattgacgattgtcgccccggacatggcactgcttgaacgcgaggggaaattgatgctgctggcgttgccggtagcggaacgctggcttaaacaggcgcaactgacgccaggggaaaacgccgcctgtgctcagccgttactgatcccggttcggttgaaaataaaccatgaagaaacaggggttttgcagcgtgcccaggcgcttcttgccgaaatggggattgaaatcgtactggacgcgcagcatgtgacaattcgcgcagtgcctttacccttacgccaacaaaatttacaaaacttgattcctgaactgataggctacctagcgcaacaaacgacgtttgatgccgccgataccgcgcagtggatcgcccgccatctggccagcgaacattcgccgtggagtatggcgcaggcgattaccgttctggcagaggtggaacgcctctgtccacaactagtgaaagcgccgccaggtggtttgttacaacctgttgatttaaaaacggcgatgaccgccctgaaacatgactga

SEQ ID NO: 524568 - DNA, 1341 bp, Stenotrophomonas maltophilia
atgattaatcgcgttaaaggttggattttggcagccacggttctgctgtgcgcgcaggccggtgcggccagcctctcggatattcaggtgtcgaatggcgatagccaggcccgcattaccttcagctttatgggcgatcctgaatatgctttctcacaaatcgacagccgcagcgtggcgctcgatattaaacagtccggggtgatccaggggctgccgctccagttcagcggcaacaatctggtgaaaagcatccgttcggggacgccgaaggatgcgcagtctctgcgtctggtggtcgatctcaccgaaaagggcaaaacgaaggcggttaagcagcaaaacggcgccagttatacggtggtttttaccattaatgctgatgttccgccgccgccaccgcctgcacctgtggtagcaaaacgcgtagaagcgccggtttataccccaaggccgtctgagccagcccgtaatccgtttaaatcacaaaatgaccgacttaccgccgtgaccagcagcaacacggtgacgcgtccggcggtcagcgcgcggcgaacgccggtcagtgtcgacaaagtgattatcgccatcgacgccggacacggcgggcaagatcctggcgcgattggcccgggcggcacgcgggagaaaaacgtcactatcgccattgcccgtaagctgcgtgcgcttctgaatgacgatccgatgtttaaaggggtcatgacccgcgacggagattactttatttcagtgatgggacgctcggatgtggcgcgtaagcaaaacgccaacttcctggtgtcgattcacgcggatgctgcgccgaaccgtaacgccaccggcgcgtcggtatgggtactgtcgaaccgtcgtgccaacagtgaaatggcgaactggcttgaagagcacgagaagcagtctgaactgttaggcggggcaggcgatgtgctggcaaacagccaggccgatccgtatctcagccaggcggtactggatttacagttcggtcattctcagcgcgtcgggtatgatgtcgccactaacgtactcaaccagttgcaaagcgtcggatcgctgcataagcgtcgtccggaacatgcgagcctcggtgtcctgcgttcgccggatattccgtcgattctggtagagacgggttttatcagtaatcacggtgaagagcgtttactgggaagcgacagctatcagcagcaaattgctgaagcgatttataacggtctgcgtaaatactttgacgcgcatccgcttcagtctgcgccgcagggcggggcagcccagacggcaagcgccgcgctgccgggtgagatgaccgcgactaattaa

SEQ ID NO: 524569 - DNA, 462 bp, Stenotrophomonas maltophilia
atgactaatcgagcgattcctttacctgatgaacaagccactttagatctcggcaagcgcgtggcgcaggcctgtcagggggcgaccgtcatttatctgtatggtgatttaggcgcgggtaaaacaaccttcagccgtggttttttgcaggcgttaggccataacgggaacgtaaaaagcccgacttatacgctagtagaaccgtacacgcttgaaaatatcatggtgtaccactttgatttatatcgtcttgcggatcctgaggagctggaatttatggggatccgcgattactttgccaacgacgccatttgcctggtggagtggccgcaacaaggtgcgggtgtgctgcctgacccggatgtcgaaattcacttggattatcaggcacaagggcgtgaggcgcgcatcagtgcggtttcctcatcaggctgttccttactggcgcgtttagccggttga

SEQ ID NO: 524570 - DNA, 1509 bp, Stenotrophomonas maltophilia
gtgaagaaaaaccccgcaagtataccacattccatctggcatgcggatgacctccgtcgggccgaaaaagaggccgcagacagcctcggcgttaccctttatgaactgatgcagcgcgcgggcgaggcggcgtttaacgtggcgcgcacggcttatccggatgcctcgcactacctgattctgtgcgggcacggcaataacggtggcgatggctatgtggtggctcgtcttgcggtggcggcggggctgcgcgttaccctgctggcgctggagagcgacaagccgctaccggaagaggctggcatggcgagagaggcctggctgaatgcggggggcattattcatgcgcctgatattatctggcccgaggatgtcgacgtgattgttgatggtctgctggggacggggctgatgcgcgcgactcgcgatgacgtcgccgcgctgattacccacgctaatgcgcaccccgccccggtggtggcgctggatattccctccggcctgatggcgcaaaccggcgcgacgccgggcgtgtcgattgaggctgcgcacaccgtgacctttatcgccctgaagccgggtttgcttaccggaaatgcgcgggatgtcgtggggacgttacatcacaacgcattggggctggaaaactggctggctggacaggatacccacatcacccgctttgatgcctccctgcttgctcagtggctgcctccgcgccgccccacatcccataagggtgatcatggccggctgctgattatcggtggcgatcatggcacggcaggtgcgattcgcatgacaggagaggccgcgttgcgcagcggtgccggattagtacgcgtgctgacccgcagcgaaaacattccgccgattattaccgcgcggccggagctgatggtccacgagcttgccccacaggcgattgaagagggtcttgagtgggcggacgtggtagtcattggtccgggcctgggtcagcaggagtggggtaaacgggccctgcaaaaggccgagaattttcgtaagccgatgctctgggatgccgacgcgcttaaccttctggcaataaacccggatacgcgtcacaatcgcattctgacgccacaccccggcgaagccgcacggctgcttaactgtagcgtggcagaaattgaaagcgatcgcttactttcagcccaacgtctggtaaaacgttacggaggtgttgtcgttttgaaaggggcggggaccgttattgccagcgatgatgcgatgggcatcgttgatgccggtaatgcaggcatggcgagcggcggcatgggtgatgtgctctctggcatcattggcgcattgctcggacagaaacttcccctttatgatgcagcctgtgctggctgcgtggcccacggtgcggcggctgacaggctggctgctcgttacggaacgcgcggtatgctggccaccgatcttttttgcacgctgcggcgtgttgttaacccggatgtgattgacgtagaaaatgactaa

SEQ ID NO: 524571 - DNA, 1140 bp, Stenotrophomonas maltophilia
atgtcacagcccctcgatctcaatgaattagcgcagaaaataaaacagtggggtgctgaactgggcttccagaaggtcggtattaccgataccgacctctctgccagcgagcctaagctacaggcatggctggataaacaataccacggcgagatggagtggatggcgcgccacggtatgatgcgtgcccgcccccacgagctgttgccgggtacgctgcgcgtcattagcgtacgcatgaactatctgcccgctaacgcggcctttgcgcgcacgctaaaaaatccttcgctgggttacgtcagccgatacgcgctgggacgtgattaccataaacttctgcgcaaccgtctaaaaaagctcggggaaaccattcagcagcactgtgtttcgctgaattttagaccctttgtcgattctgcgcctattcttgagcgcccgatcgccgaaaaagccgggcttggctggacaggtaagcactcacttatcttaagccgcgacgcgggctcattctttttcctgggtgaattgttgattgatttacccctgccggtagacggtccggtggaagaagggtgtggccgctgcgtggcctgtatgaccatctgcccaacgggcgctatcgttgaaccctataccgttgatgcgcgccgctgtatctcttatctcaccatcgagctggaaggtgctattccagaggaatttcgtccgcttattggcaaccgcatctacggctgtgatgactgccagctgatttgtccgtggaaccgctattcacagttgacggacgaagaagacttcagtccccgcaaggcgttacatgccccgcagctgatcgaactgttcgcctggagcgaagcctggttcctgaaggtgacggaaggttccgccatacgtcgtatcggccacctgcgctggctgcgtaatgtggccgttgcgctgggtaatgccccatgggatgaagccaatcttcaggcgctcgaaagccgcagaggtgagcacccacttcttgatgagcacatagaatgggcgattgcgcagcaaattgagaagcgaaatgccggcgtggttgaagtgcagttaccgaagaaacagcgcctggtcagggtgattgaaaaagggctgccacgggatgtgtga

SEQ ID NO: 524572 - DNA, 660 bp, Stenotrophomonas maltophilia
atggtgagtagaccattaatcgcacaggggtattcgctggctgaggaagtagccaacagtataagccatggcattggcctggtgtttgggattgtcggcttagtattgctgttggtgcaggcggtagataccaacgccagcgcgatggccattaccagctacagcctgtatggcgggagtatgatcctgcttttccttgcctcaacgctgtatcacgctattccgcatcaacgggcgaagatatggctcaagaaatttgaccactgcgcaatctatcttctcattgcaggcacttacacgccatttttgctggtggggctcaactcaccgctgtcgcgtggcctgatgattgtgatctggagcctggcgctgctggggatcctgttcaagctgaccatcgcgcaccggttcaaagtgttgtcgctggtcacctatctgacaatgggctggctgtcgctaattgtggtgtatcagttagccattaagctggcggtggggggcgtgacgcttctggcggtgggcggagtgatctactcgctgggcgtgattttctacgtctgcaagcgtatcccgtacaaccatgccatctggcacggctttgtgctgggcggcagcgtgtgccactttctggcaatttatctgtatgttggtcaggtgtag

SEQ ID NO: 524573 - DNA, 732 bp, Stenotrophomonas maltophilia
atgttcagccattccgccattgccagcctcaacaatctggaaatgatggtctacaactatgtcattaagaaccgtgacaaagtgatgtacatgaccatccgcgagctggcggatgcggcgggagtctctaccactactatcctgcgcttctgccgaaagctcaactgcgaaggctactcggaatttcgggtgcgctttaaactctatctggagcagaacgagccccagcaggcgaattttggtgccagtgaaattatcagcttctttaaaagcgtaaataacgaagagttcgatgcgttattagataaagccgtcgatattattttatcatctgaacgaattatttttgttggcgcaggcacgtccggatcgctggcaaaatatggcgcacgtttcttttcaaatatcgggaaattcagcaaccatatcgacgatccttatttcccggtcactaacgatatggctaaaaatgcactggccattgtactttccgtctccggagaaaccgaggaaatcctgcgcttcgccagccagttcagcctgcatcgctgcaaggtgctctctgtcaccagccacgaacattctcgtctcgcgaaactggcggactttaatctctcctggcatgtcccccaaacgcgcataggcggcgtttacgatataaccacccaaattcccgttatctatattctggaatcattaggccggaaactggcgaagaaattaacagaataa

SEQ ID NO: 524574 - DNA, 1434 bp, Stenotrophomonas maltophilia
atgaaaaaactcactttaccgaaagattttttatggggcggcgcggtggcggcgcaccaggttgaaggcggctggaacaaaggcggcaaagggccaagcatctgcgacgtgctcaccggcggcgcacacggcgttccgcgtgaaatcacgcaggaagtgattgaaggcaaatattacccgaaccacgaagccgtcgacttttacggccattacaaagaagacatcaagctgtttgccgagatgggcttcaaatgtttccgtacctctatcgcctggacgcgcatcttcccgaaaggcgacgaaactcagccaaacgaagaggggctgaagttttacgacgacatgttcgatgaactgctgaagtacaacatcgagccggtgatcaccctctcccactttgaaatgccgctgcacctcgttcaggaatacggcggatggaccaaccgtaaagtagtcgatttctttgtacgcttctcggaagtggtatttgagcgctacaaaaataaggtcaaatactggatgaccttcaacgaaatcaacaaccagcgcaactggcgtgcgccgctgttcggctactgctgctctggcgtggtctataccgagcatgacaacccggaagagaccatgtaccaggtgctgcaccaccagttcgtggccagcgcgctggcggtgaaagccgcccgccgcattaacccggagatgaaagtcggctgcatgctggcgatggtggcgctctatccatactcctgcaagccagaagatgtgatgttcgctcaggaatccatgcgcgagcgctacgtctttaccgacgtacagctgcgcggctactacccgtcttacgtgctgaacgagtgggaacgccgtggcttctccatcaaaatggaagcaggcgacgagcagatcctgcgtgaaggcacctgcgattacttaggtttcagctattacatgaccaacgcggtcaaagcggaaggcggcaccggtgacgccatttccggcttcgagggcagcgtgccgaacccacacgtcaaggcgtccgactggggctggcagattgaccctgtgggcctgcgttattcgctgtgtgaactgtacgagcgctaccagaagccactgtttatcgtggaaaatggtttcggcgcctacgacaaggtggaagaggacggcagcatcaacgatgactaccgcatcgactacctgcgcgcccacgtggaagagatgatgaaggccgtgacgtacgacggcgtggatctgatgggctacactccgtggggctgcatcgactgcgtctccttcaccaccggccagtacagcaagcgctacggctttatctacgtcaacaagcacgacgacggcaccggtgacatgtcccgctcccgtaagaagagctttgagtggtataaaaccgtcattgccagcaacggcgaaacgctgtaa

SEQ ID NO: 524575 - DNA, 360 bp, Stenotrophomonas maltophilia
atgattaagcgacaacgcaacgctatcctgcttgtagccctggcctgcctggtggtactgatatgtaccgcccagcggatggccgggatgcacgcgcttgtcatgaacgtcaccgccacgagccagtctgttcagcaggggcaggagagtgccgacgcaccggtaaccccgtgtgagctaagcgccaagtcgctgatgtcggtcccgcctgttttgtttgaaggcgccctgattgccgtcaccctgctgcttgcgttgctggcagccagtccaccgcgccgcgaacggcagtggcctccccgcgttatctccccgccccggttaagggtgcatctgcgattatgcgtcttccgtgaatga

SEQ ID NO: 524576 - DNA, 2049 bp, Stenotrophomonas maltophilia
  misc_feature (550)..(559): n is a, c, g, or t
atgtttactgtattcaggcgactgctggtctgcctgctttggctatggctgcccctcagccaggctgccgacagcggctggctgcgcgccgccgataatcagcacgccagcgtcaggctgcgtgcgcaacctgaaagcactggcgaaacccgcctgctgctggacgtcaccctgcaaaaaggctggaaaacctactggcgctcgccgggtgaaggcggcgtcgcacccgcgattaaatggcatcagcccgtcgaggcgatctggcgctggcctgtgccgcagcgtttcgacgtcgcgggcatcaccacgcagggctatcacggcgatgtcagctttcccctcactctgcggggcgacgtcccgacgatcctgagcggcgtgctgacgctctccacctgtagcaacgtctgtattcttaccgactacccgttttcgctgaacatgaccgcatccgcaggcgccggttttgattacgatttcagtcgggccatgggcacccttccgctcagcggcgggttgacctcaacggttaacgccacctatgcccccnnnnnnnnnncctcaacgcttaacgccacctatgcccccggcaagctgaccgtaacggcgcagcgtgacgcaggctggcaggcgccgtcgctgtttatcgacggtatggatgatgttgatttcggcaaaccggccctcaccgtgcgcggtgattcgctggtcgccaccgtgcccgtgacggacagctggggcgaggccgcgcccaacctcagcggcaaaaccctgtcactggttctggccgatagcgggcaggcgcaggagtccagcctgagcattcagccggggaacgccgcgccgacgctcccgttaggctgggtcctgctgatggcgcttgctggcggtctgatccttaacgtcatgccctgcgtactgcccgtgctggccatgaagctgggcacgctgatgcaaaccgaacggcaggcgcggggtcaggtacgccgacagtttcttgcatcggtagccgggatcgtgatctcgttcctcgcactggcgctgatgatgacggtattacgtttaggcaatcaggcgctcggctgggggatccagttccagaacccgtggtttattgccgcgatggcgctggtaatggtgctcttcagcgccagcctgctggggttgtttgaaatccgtctcccttccggcgccagcaccttcctcgccacgcgcggcggcaacgggcttgcgggtcatttctggcaaggcgcgtttgccacgctgctggcgacaccctgcaccgcgccgttcctggggacggcggtctcggtcgcgctggcggcaccgcttcccctgctgtgggggatcttcctggcgatgggtatcggtatgagcctgccgtggctgctggtggcggcctggccggggctggccctgcggttgccgcgtccggggcgctggatgaacgttgtacgcatagtgctggggatgatgatgctcggctcatcgctgtggctgctgagcctgctgacggtgcatattggcagcctgcccgtcattacgctgggcgtgctactgatccttgcgctgctgctggtcaccgcctggcgctaccgctggcaaacggcactgcgcgccggggtattagctgtactggtggccggggtagtcgcgtttgtttccggctccggcggcgagggctcccgccgcgatcgtattcactggcagccgctcagcgagcaggccattgtccgcgcgctggcggagaacaaacgggtgttcgtcgacgtgaccgccgactggtgcgtgacctgtaaagccaataaatacaacgtactgctgcgcgacgacgtgcaggtcgcgctctccgccccggacgttgtcgccctgcgcggcgactggagccgcccctcagataccatcagccagtttttaaccacgcgcggcagcgccgccgtgccgtttaaccagatctacggaccgggattaccgcagggccacgtgctgcctgcgttgttaagccgcgaagcggtgctgagcaccctgtccgatgcaaaaggaaaataa

SEQ ID NO: 524577 - DNA, 603 bp, Stenotrophomonas maltophilia
atgagagcctttgttgccttacttctgctgtcgttatcaacgttcggtttcgccgcaccgtcagatgacgcttccaacgaccagctggcaaaactgctgtttaacgaccccaacagcccgcgaaccggcgcgacatcgccgaagctcaccatcgtctccttcacagactacaactgcccgtattgcaagcagttcgacccaatgctggagaaaatcgtgcacgataatcccgacgtgcagctcatcatcaaactgctgccgttcaaggggcaaagctcggtaaatgccgcgaaagcggcgctctcaacgtggcagcaggcgccggatcaattctgggcactacaccagcggctgatgatgaaaaagggctatcacgatgacgccagcatcgccgccgcgcaggtgaagaccgggacggacagcattaaaaccgatgataaaaccatggacagcgtaaagatgaacctgatcctggcgcaggtgctgaatattcagggcaccccggcgaccatcatcggtgaccagatggtggcgggcgcaatcccgtatgacgatctggaggggctggtcaaagaacagctggcaaacgcccgtggcaagtaa

SEQ ID NO: 524578 - DNA, 546 bp, Stenotrophomonas maltophilia
atgacgatctggaggggctggtcaaagaacagctggcaaacgcccgtggcaagtaagcttcctcgcctgctgcgcgagctggccgtgtggctgctgattggcgtagccgtgagcctggcggtggactatttccgccagcccgcgctgccgcagaatttctccgcgacggcactgcacaccctcgacggtcagcccgtcgatcttatcgccatgagtaaggagcgaccgctgctggtctacgtctgggcgacatggtgcggcgtctgccgctacaccacgccgtcggtggcggcgattgccgcggacgggggtaacgtgatgtcggttgcgctgcgctcgggcgataacgcgacgctcgaaacatggatgagaaagaagaaggcgatgatgcccacggtcaacgacgccagcggagaactggcgcatcagtgggacgttcaggtgacgccaacgcttgtggtgatctctcacggtgaagtgaagtcgatcaccaccggctggaccagcggctggggaatgcgcctgcggctgtggctggcgtcgtag

SEQ ID NO: 524579 - DNA, 744 bp, Stenotrophomonas maltophilia
atggcaattgcattggtcaccggcgccagccggggtattggtaaagccaccgcgctacagctggcaagcgaaggctacaccgttgcggtgaattttcatcacaacatcaaagccgcgacagaggttattaatcagatcgtggacgcgggcggtaaggcctttgccgtgcgcgcggatatcagcgatgaatcgcaggtgatggcgatgttcgacagcatcgatcgcgaaggtgagccgctcgccgcgctggtgaacaacgccgggattttgtttgaacaatcctccatcgaaaacctctccgctgaacgtattaaccgcgtgctgtccaccaacgtcactggctattttctctgctgccgtgaggcggtgaagcgcatgtcgcataaacacggcggcaagggcggcgcgattgtgaatgtctcctcggcggcctcacgactgggcgctccgggggagtatgtggattatgctgcctccaaaggggccgtggattccctgacaaccggcctcgcgctggaggtggcggcgcagggcattcgcgttaactgtgtgcggccaggcctgatttataccgatattcacgcctccggcggcgagccggggcgtgtggatcgggtgaagtcgatgttaccgatgcagcgtggcggtcagccggaggaggtcgcccaggccattacctggttgctgagcgacaaagcctcctatgtcaccggtagcttcctggagctggctggcgggaagtaa

SEQ ID NO: 524580 - DNA, 2874 bp, Stenotrophomonas maltophilia
atgacacagactttaagccagcttgaaaaccgtggcgccttcattgaacgtcacattgggccggatgctcagcaacagcaggagatgctgaagacagttggcgcggattcattaaacgcactgatcggccagatcgtgccaaaagacatccagcttgccacaccgccgcaggtaggcgagtccacgacggagttcgccgcgctggcggagctgaaggccatcgccggccttaacaagcgctataagtcttacatcggcatgggctacaccaacgtgcagttaccgccggtgatcctgcgtaacatgctggaaaacccgggctggtacaccgcttacaccccgtatcagccagaagtctcccagggccgtctggaagcgctgctgaacttccagcaggtgacgctggatctgaccggtatggatatcgcctctgcctcgctgctggatgaagccactgccgccgctgaagcgatggcgatggcgaagcgcgtgagcaagctgaaaaacgccaaccgctttttcgtcgcggcggacgtgcatccccagacgctggacgtggtgcgcacccgtgcggaaaccttcggctttgaggtgattgtcgacgacgctgacaaagtgctggatcaccaggacgtcttcggcgtgctgttacagcaggtgggcaccaccggggaagtgcatgattacagcgcgctgatcgccgagctcaaatcccgtaaggttattgttagcgtcgccgctgattttatggcgctggtgctgctgacggcgccaggtaaacagggcgcggatattgtcttcggctcagcgcaacgcttcggcgtgccgatgggctacggcggcccgcacgcggcgttctttggcgcgaaagatgaatttaaacgttccatgccaggccgtattatcggcgtatcgaaagatgccgccggtaacaccgcgctgcgcatggcgatgcagacccgcgagcagcatatccgccgcgagaaagcgaactccaacatctgtacctcgcaggtgctgctggctaacattgccagcttatacgcggtattccacggtccggctggcctgaaacgcattgccagccgcatccaccgtctggccgatatcctggcctgcggtctgcaacagaaaggtctcagactgcgtcatgagcactacttcgacaccctgtgcgtcgaggtggcagacaaagcggccgtgctggcgcgcgccgaggcagcacaaatcaacctgcgcagcgacattcacaatgcggtcggcattacgctggacgaaagcaccacccgtgacgatatcctgaccctgttcaacgtattgctgggtgacgcacagggtctggacgttgatacgctcgacaaagaggttgcgctcgacagccgctccattcaggaaagcatgctgcgcgacgacgcaatcctgactcacccggtgttcaaccgctatcacagcgaaaccgagatgatgcgttacatgcactctctggaacgtaaagatctggcgctgaaccaggcgatgatcccgctgggctcctgcaccatgaagctgaacgccgcggctgagatgatcccaatcacctggcctgaattctccgagctgcacccgttctgcccggctgagcaggcggaaggttatcacatgatgatcaaccagctctccgactggctggtgaagctgaccgggtacgacgcgctctgcatgcagccgaactccggtgcgcagggtgaatacgccggtctgctggcgatccgtcactatcacgaaagccgcaacgaaggccaccgcgatatctgtctgatcccaagctctgcccacggcaccaacccggcctctgcccagatggcagggatggaagtggtggtcgtggcgtgcgacaaaaacggcaacatcgatctggccgacctgcgcgccaaagcagagcaggcaggcgacaaactctcctgcatcatggtgacctacccgtccacccacggcgtgtacgaagaaacgatccgtgaagtgtgtgaagtggtgcatcagttcggcggccaggtttacctcgacggcgcgaacatgaacgcccaggtgggcattacctctccgggctttattggcgcggacgtgtcgcacctcaacctgcataaaacgttctgcattccgcacggcggcggcggcccgggcatgggcccaatcggcgtcaaagcgcacctggcaccgtttgtgccaggccatagcgtggtgcagattgaaggcatgctgacccgtcagggcgcggtctccgcggcaccgttcggcagcgcctctatcctgccaatcagctggatgtacatccgcatgatgggcgcggaagggctcaagcaggccagccaggtggcgatcctcaacgccaactacatcgcaacacgtctgaaagacgcctatccggtgctctacaccggccgcgatggtcgcgtggcgcacgaatgcatcctcgatattcgtcctctgaaagaagagacgggcatcagcgagctggatattgccaagcgcctgatcgactacggcttccacgcgccaaccatgtccttcccggttgcaggaacgctgatggttgagccgaccgagtctgaaagcaaggtggagctggatcgctttatcgacgcgatgctggcgatccgcagcgaaatcgaccgcgtgaaaggcggggaatggacgctggaagataacccgctggtcaacgcgccgcatacccagaacgaactggtggcaaagtggaaccacggttatacccgcgagctggctgtcttcccggcaggtgtggcaaacaaatattggccaaccgtgaaacgtcttgatgatgtttacggcgaccgtaacctgttctgctcctgcgtaccgatgagcgaataccagtaa

SEQ ID NO: 524581 - DNA, 390 bp, Stenotrophomonas maltophilia
atgagcaatgtgccagcagaactgaaatacagcaaagaacacgagtggctgcgcaaagaggcggacggcacttacaccgttgggatcaccgagcacgcgcaggaactgctgggcgacatggtgtttgttgacctgccggaagtgggcgcaaccgtgagcgcaggcgacgactgtgcggtggcggaatccgttaaagcggcctctgacatctacgctccggtgagcggtgaaattgttgccgtgaacgacgcgctgagcgactccccggagctggtgaacagcgagccttatgaaggcggctggatctttaagatcaaagccagcgacgaagcgcaggttgccgcgctgctggatgcgaccgcgtacgaagcactactggaagacgaataa

SEQ ID NO: 524582 - DNA, 1095 bp, Stenotrophomonas maltophilia
atggctcaacagactcctttgtacgaacagcacgtgttatgcggcgcccgcatggtggacttccacggctggatgatgccgctgcactacggctcgcagattgatgagcaccacgcggtgcgcaccgatgccggtatgttcgacgtgtctcatatgacgattgtcgacctgcgcggtagccgcacccgggagtttttgcgttatctgctggcaaacgacgtcgccaaactaaaaacgccgggcaaagcgctctataccggcatgctcaatgcctctggcggcgtgattgacgacctcatcgtctactacttcaccgaagatttcttccgcctcgttgtaaactccgccacccgcgaaaaagacctctcctggatttcccaacacgctgaaccttacgccatcgacatcaccgttcgtgacgatctgtcgctgattgcggtgcaggggccaaacgcccaggcgaaagccgcgtctctgttcagcgacgagcagcgcaaagcaaccgaaggcatgaagccgttcttcggcgtgcaggcgggggatctgtttatcgccaccaccggctacaccggtgaagcgggctacgaaattgcaatgccaaacgaaaaggccgccgatttctggcgtgcgctggtggaggcgggtgtgaagcctgcgggcctgggcgcgcgcgatacgctgcgtctggaagcggggatgaacctctacggtcaggagatggacgaaggcgtctcaccgctggcggccaacatgggctggaccatcgcgtgggaaccggctgaccgtgattttattggccgtgaagcgctggagatgcagcgcgagaagggcactgaacagctggttggcctggtgatgaaagaaaaaggcgttctgcgcggcgagctgccggtgcgcttcaccgatgccgatggcaatcatcgcgaaggcgtgatcaccagcggaacgttctccccgacgctcggctacagtattgcactggcacgcgtgccagcggggattggcgaaacggcggtggtgcagatccgcaaccgcgaaatgccggtcaacgtgaccaaaccgatttttgttcgcgccggtaagccggtcgcctaa

SEQ ID NO: 524583 - DNA, 1203 bp, Stenotrophomonas maltophilia
gtgcaaaatgttgatgtcgccattgtcggcggcggaatggtaggactggcgctggcctgtggtttacagggcagcggcctgcgcgtggcggtgcttgagcaaaatgcgccgcagcccatggcgcaggatgcaccgccggagctgcgcgtctcggcgatcaatgccgccagcgaaaagctactgacgcaccttggcgtctggtctgaaatcgtggcgctgcgtgccagctgttaccatggcatggaagtgtgggataaagacagcttcggccatatcgcgtttgacgatgaaagcatgggctacagccaccttgggcacatcgttgaaaacgcggtgatccaccacgcgctgtggcaaaaagcgcagcagtgcagcgacgtcacgctgatcgcaccggcgaaacttcagcaggtggcgtggggcgaaaacgacgcgtttatcactcttgaaagcggcgacatgctgaccgcgcggctggtagtgggtgccgacggcgccaattcctggctgcgtaacaaagcggatattccgctgaccttctgggattaccgtcatcacgccctggttgccacaatccgcaccgaagagccgcatggcggcgtggcgcgccagattttccacaatgatggcattctggccttcctgccgcttgccgatccgcatctttgctccatcgtctggtctttagagccggagaaagcgcagcagatgcaggaggcgacgccggacgcctttaatcaggcgctatgcgtggcgtttgataaccgtctgggcctgtgcacgcttgaaagcgaacgccaggcgtttccgttaaccggtcgctacgcgcgtcagtttgcggcgcaccgtctggcgttggtgggggatgcggcgcatacgattcatccgctggccgggcagggggtgaacctcggctttatggacgcggccgagctggttgaagagctgcgtcgtctgcatcgggaaggtaaagatattggtcagcatctgtatctgcgtcgctacgagcgcagccgcaaacacagtgcggcgatgatgctggcgggtatgcagggcttccgcgagctatttgccggagcgaacccggcgaaaaaactgctgcgcgatatcggcctcaaactggccgacacccttcccggcgtcaaaccgcagcttcttcgtcaggcaatgggccttaacgatcttcccgactggttacgttaa

SEQ ID NO: 524584 - DNA, 1179 bp, Stenotrophomonas maltophilia
atgagcgtaatcattgttggcggaggcatgaccggcgctactctggcgttggctatttcgcagttaacccagggccagcttccggtgcatctggttgaggcggtcgcgccgcaggcggccgatcatcccggtttcgacgcccgcgctatcgcgctggcgcagggaacctgtcagcagcttgcgcgtattgggatctggcaggcgatagcggattgcgcgacggcgatcggcaccgttcacgtcagcgatcgcgggcacgccgggtttgtgacgctggatgcccacgattaccggatcgaggcgctggggcaggttgtcgagctgcatgacgtagggctgcggctgttccgtctgttacaggacgcgcctggcgtcacgctgcactgtccggcgcgcgtcgccagctttagccgccgtgacgaagccgtcagcgtgacgctggacaacggcaccacgctggagggggaactgctggtggcggcggatggttcacgctccgcgatcgccacgcagtgcggcgtcgaattgcgctctgaaccctatgggcaggtggcggtcatcgctaacgtctctacggctggcgcgcataacggcagggcatttgagcgcttcacggagcacggcccgctggccatgctgccgatgtcgaacgggcgctgctcgctggtgtggtgccatgcgcaggaccgggccgatgaggttctctcctggtccgacgaacgttttagttccgagctgcaaaaagccttcggctggcggcttgggcgtatcacccaggccggaaaacgcgtggcctatccgctcgcgctgacgaccgcatcgcagactgtctcccatcgcgtcgccctggtcggcaacgccgcgcagacgctgcaccccatcgccgggcaaggctttaaccttggcctgcgcgacgtgatgagcctggctgaactactggcgcagacgtggagcgaacaacaggattgtggcgcatactcagtgctgagccattaccagaaacgacgtcaggcggacaaagcggcgaccattggcgttaccgacggtttagtccacctgtttgccaatcgctgggcaccgctggttgcgggtcgcaaccttgggctgatggcgatggaactgttcattccggcacgtgacgtgctggcgcagcggaccctgggttgggtcgcgcgttaa

SEQ ID NO: 524585 - DNA, 1320 bp, Stenotrophomonas maltophilia
atggttatctccagtcaagagtattctcgccgtcgtcaggcgctgctggcaaaaatgcagccgggaagcgctgccctgattttcgccgcgccggaagtgacgcgcagcgccgacagcgaatacccctatcgccagagcagcgatttctggtacttcaccgggtttaacgagccggaagcggtactggtgctgattaaaagcaatgacacccacaaccacagcgtgattttcaaccgcgtgcgcgatctgaccgcggaaatctggtttggccgccgcttaggtcaggaggcggcgccgggaaaactgggcgtggatcgcgcgctggcctacagcgaaatcaaccagcagctctatcaactgctcaacggcctggacgtgctgtaccacgcgcagggtgaatacgcgtatgcggatgagattgttttcactgcgctggataagctgcgtaaaggctcacgtcagaatttgtctgcacccgcaaccctgacagactggcgaccggtggtgcatgagatgcgcctgtttaagtctgaagaagagctgaatgtgatgcgccgcgcgggcgaaatcagcgccctggcgcatacccgtgccatggaaaagtgccgtcccggtatgttcgagtaccagcttgaaggcgaaattcaccatgaatttaaccgtcacggcgcgcgcttcccgtcctataacaccatcgtaggcggcggggaaaacggctgcattctgcactacaccgaaaacgaaagtgaactgcgcgacggcgatctggtgctgattgacgccggctgtgaatatcagggttacgcgggcgacatcacccgtaccttcccggtgaacggtaaattcaccccagcgcagcgtgaaatctatgacatcgtgcttgagtctctggagaccgcgctgacgctgttccgccctggcacctccattcaggaggttacgggcgaggtggtgcgcatcatgattaccgggctggtgaagcttggtattctgaaaggcgatgtggacacccttataaccgaaaacgcccatcgcccgtactttatgcacggcctgagccactggctggggctggatgtgcatgacgtgggggcatacggtccggaacgttcgcgcgtgctggagcctggcatggtgctgaccgttgagccggggctgtacatcgcgccggatgccgacgtgccggaacagtaccgcgggatcggcattcgtattgaagatgacatcgtcatcaccgaaaccggtaacgaaaacctgaccgcgaccgtggtgaaaaaagccgacgacatcgaggcgctgatggcggcggcacgcggatga

SEQ ID NO: 524586 - DNA, 585 bp, Stenotrophomonas maltophilia
atgcgtatgtctatacagaacgaaatgcctggttacaaggatttaaaccagttactgaaccagcagggagtcggtctaacccctgccgaaatgcacggtctgatcagcggcatactgtgcggcggaaacagcgacagctcatggcagccgctgatccacgacctcaccaacgaagggctggcgtttggccacgaactggcggaagcgctgcgtaaaatgcacgccgcaaccagcgattccctggaagacgatggctttctttttcagctttatctgcctgaaggcgacgatgtcagcgtcttcgatcgcgctgatgcgctcgcggggtgggtaaaccactatctgcttggcctgggcgtaacccagcctaaactggataaagtgaccggcgaagcgggtgaagcgatcgacgatctgcgtaacatcgcccagctcggctacgatgaagacgaagaccaggaagagctggagatgtctctcgaagagatcatcgagtacgtgcgcgtggcgtctctgctgtgccacgacaactttacgcgctcgcagccgaccgcgccggaagttcgcaagccaacattacactaa

SEQ ID NO: 524587 - DNA, 330 bp, Stenotrophomonas maltophilia
atgtctgcacaacccgtcgatctccagatttttggccgttcactgcgagtgaattgtccgcctgaacaaagggatgctttgaatcaggctgcggacgatttgaatcagcggttgcaagatctaaaagaacgcactagagtcacaaatactgagcagctggttttcatcgccgcgttgaacatcagctatgaactgactcaggaaaaagcgaagacccgcgattacgcggcaagcatggagcagcgcattaaaatgctccagcagaccattgaacaggcattgcttgatcaaggtcgcagtcctgaaagaccgggaccaaagtttgaataa

SEQ ID NO: 524588 - DNA, 597 bp, Stenotrophomonas maltophilia
atgactcaattccctgaagtttctgcttcacgccaggatatccgtcagctcattcgccagcgtcgtcgtgccttaagcgccgaacaacaggcacagtttgcccagcaggccgccgcccgtatgatggcctatccgcctgtggtgatggcaaacaccgtcgccttgtttctttcgtttgatggtgagctggatacccaaccacttatcgaccagctctggcgcgccgggaaaagagtttatctgccggtgctgcatccctttagccggggcaatctgctgtttctgcactaccatccgcacagcgagctggtggtgaatcgtctgaaaatcaccgaacccaaactcgacgtgcgcgatgtgctgccgctatctgaactggatgtgctgattacgccgctggtggcgtttgacgagcagggacagcgattaggtatgggcggtggtttttacgacagaacgctacaaaactggcagcagtacgggttgcagccggtgggctatgcgcatgattgccagggcgtggaggcattacccgtggagaaatgggatgtgccgttgccggcggtggtgacgcccagtaaaacctggacctggtag

SEQ ID NO: 524589 - DNA, 1233 bp, Stenotrophomonas maltophilia
atggcaaaggtatcactggagaaagacaagattaaattcctgctggttgaaggcgtgcaccagaaagcgctcgatagccttcgcgctgcaggttacaccaacatcgaatttcacaaaggcgcgctggatactgaagagctgaaagcgtccatccgtgatgcccatttcattggcctgcgatcccgtacccaactgactgaagacgttattgctgcggcggaaaagctggtggcgattggctgtttctgtatcggtaccaatcaggttgatctgaatgccgccgcaaaacgcggtatcccggtttttaacgccccgttctccaacacccgttccgtggcggagctggtgattggcgagctgctgctactccttcgcggtattccggaagctaacgccaaagcgcaccgcggcgtgtggaataagctggccgcgggctcctacgaagcgcgtggtaaaaaactcgggattattggttacggccacatcggtacgcagcttggtattctggcggaatcccttggcatgcacgtgtttttctacgatatcgaaaacaaactgccgctgggtaacgcgacgcaggtgcagcatctttctgacctgctgaacatgagcgacgtggtcagcctgcacgtgccggaaaatgcgtccaccaaaaacatgatgggagcggaagagctggcgctgatgaagccgggctcgctgctgatcaacgccgcgcgcggtacagtggtcgatattcctgccctgtgcgatgcgctgaagcgtaagcatctggcgggtgcggcgattgacgtgttcccgacggaaccggccaccaacagcgatccgttcacctctccactgtgcgagttcgacaacgtgatcctgacgccgcacatcggcggttctactcaggaagcgcaggagaatatcggcctggaagtggcgggcaagctgagcaaatattccgacaacggttcaacgctctctgcggtgaacttcccggaagtgtctctgccgctacacggcgggcgtcgtctgctgcacattcacgaaaaccgtccgggcgtgctgactgctatcaaccagatctttgccgaacagggcgtcaacattgccgcgcagtatctgcaaacgaacgcgcagatgggttatgtggtgattgatattgaagcggatgaagacattgccgagaaagcattgcagagcatgaaggccattccggggacgattcgcgcgcgtctgctgtactga

SEQ ID NO: 524590 - DNA, 660 bp, Stenotrophomonas maltophilia
atgacgcaggatgaactgaaaaaagcagtaggatgggcggctctccagtacgtacagccgggtaccattgtcggtgttggtacgggatcgacggcggcgcactttatcgatgcgctgggcacgatgaaggggcaaatcgagggcgcggtttcgagctccgatgcttccacggaaaagctgaaaagcctcggcatcactgttttcgacctcaacgaagtggaccgtctgggcatttacgttgatggcgcggatgaaatcaacggccacatgcagatgatcaaaggcggtggcgcggcgctgacccgcgaaaaaatcattgcctccgtggcggataagttcatctgcatcgcggacgcctccaagcaggtcgacattctggggagtttcccgctgccggtcgaagtgatcccgatggcgcgcagtgccgtggcacgtcaactggtgaagctgggtggtcgtccggaataccgtcagggtgtggtgaccgacaacggcaacgtgatcctcgacgttcacggccttgagatcctcgatgccattgcgctggaaaatgcgatcaacggcattccgggcgtcgttaccgtagggttatttgccaaccgtggcgcggacgtggcgctgatcggcacggctgacggtgtaaaaaccatcgtaaaatga

SEQ ID NO: 524591 - DNA, 894 bp, Stenotrophomonas maltophilia
atgaaacgtccggactacagaacactacaggcacttgatgcagttattcgtgaacgcggttttgagcgcgcggcgcaaaagctgtgcatcacccagtccgccgtatcacagcgtatcaaacagcttgaaaacatgttcgggcagccgctgctggtgcgtaccgtaccgccgcgtccaacggagcaaggacaaaagctcctcgccctgctacgtcaggttgaactgctggaagatgagtggctgggcgatgaacagaccggctccacgccgctgctgctgtcgctggcggtgaacgccgacagtctggcaacctggctgctgccggcccttgcgccggtgctggccgactcccctatccgcctgaatctccaggttgaagatgaaacccgcacccaggaacgtctgcgtcgcggcgaagtggttggtgccgtcagtattcagcctcaggcgctgccaagctgtctggtggatcagttgggcgcgctggattacctcttcgtcggttcaaaagcctttgccgagcgctatttcccgaacggtgtgacccgcgccgcgctgctgaaagcgcctgccgtcgcgttcgaccatctggacgatatgcatcaggccttcctgcagcaaaacttcgatctgccgccgggcagcgtgccgtgtcatatcgttaactcgtccgaagccttcgtgcagcttgcacgtcagggaaccacctgctgcatgatcccgcatctgcagattgagaaagagttgaaaagcggtgagctgattgatttaactccggggctgtatcagcgccggatgttgtactggcaccgttttgcgccggaaagccgcatgatgcgcaacgtcaccgacgcgctgctggcgtttgggcataaggtgttaagacaggattga

SEQ ID NO: 524592 - DNA, 723 bp, Stenotrophomonas maltophilia
gtgaagtttaaggtgatggccctggcggcattagtaagtttaggtgcggtgtcggtgcaggcgaatgaactgccaaatggcccgcacattgtcacttcaggtacggcaagcgtggatgcggtaccggatgttgcaaccctggcaattgaagtgaacgtggcggcgaaagatgctgcttccgccaagaaacaggcagacgatcgtgttgcgcaatacctctctttcctggaacagaacggtgtcgcgaaaaaagacatcagctctgcgaacctgcgtactcaaccggattacgattaccagaacggcaaaagcatcctgaaaggctatcgcgccgtgcgtactgtagaagtgaccgtgcgccagcttgataagctcaacggattgctggatggtgcgctgaaggcagggctgaacgaaattcgttccgtctcgctgggcgttgcgcaaccggagaagtataaagacgaagcgcgtaaagcggcgattgatgatgccattcatcaggcacagcagctggcatccggcttcaagagcaagctcggtccggtttacagcgtgcgttaccacgtttcaaactaccagccaagcccgatggtgcggatgatgaaagcggacgccgcgccggtttctgctcaggaaacctacgagcagccaaccattcagttcgacgatcaggttgatgtggtgttccagctggagccgactgaaaagccagctcagtaa

SEQ ID NO: 524593 - DNA, 594 bp, Stenotrophomonas maltophilia
atgatccttccccttggtccacaaaatgcgttcgtgatgaatcagggcatccgccgtcagtaccatctgatgattgccctgctgtgcgcggtgagcgatctgctgctgatttgcgccgggatttttggcggcagcgccctgttgatgcagtcgccgtggctgctggcgctggttacctggggcggcgtagcgtttctgctgtggtacgggtttggcgccctgaaaacggccatgagcagcaatcttgagctggcgagcgccgaagtgatgaagcaagggcgctggaagattatcgtcaccatgctcgccgtgacatggcttaacccgcacgtttatcttgatacgttcgtggtgctcggcagcctggggggacagctggacgttgagccgaaacgctggtttgcgctcggtacggtcagcgcctccttcctctggttctttggtcttgcgatcctggcggcatggctggcaccacgactgcgtaccgccaaagcgcagcgcattatcaataccctggtggggctggtgatgtggtttattgccttccagctggcgaaagagggcattcatcacgtacagggattgttcaactaa

SEQ ID NO: 524594 - DNA, 855 bp, Stenotrophomonas maltophilia
atggaacaacttgatgttgtagacagcatcaatcatgcgggtaactggctggtgcgcaaccaggcgctactgctgagctacgctgtgaatattgttgccgctattgccatcatcattgtcgggatgatcgtggcgcgtatcgtatcgaacgcggtcaaccgggtgatggttgcacgtcacattgacgccacggtcgccgatttcctctccgcgctggtgcgttacggcatcatcgcctttacgctgattgcggcgctggggcgtgtcggcgtgcagacggcatccgtcatcgctgtgctcggtgctgccggtctggccattggtctggcattacagggttcgctgtcgaacctggcggcgggcgtactgctggtaaccttccgtccgttccgttccggtgaatacgtggatttaggcgggatcgcgggtaccgtgttgcaggtacagattttctctaccactctgcgtactgtcgacggtcgtattgtggtggtaccgaacgggaaaatcattgccggcaatatcattaacttctcccgcgagccggtgcgtcgtaacgagctgatcatcagcgtggcgtacgattccgatatcgatcaggtgaagtctctgattaccaacatcattgcttcagatgaccgtattctgaaggaccgcgagcagaccgttcgtctgaatgaactgggcgcatcatccattaattttgtggtgcgcatctggagcaaaagcagcgatctgcaaaacgtttactgggatgtgctggagcgcattaagcgtgacttcgatgccaacggcatcagcttcccgtacccgcagatggatgtaaacgtcaaaaaagtcaaagaagcagagtaa

SEQ ID NO: 524595 - DNA, 1080 bp, Stenotrophomonas maltophilia
atgtctaaaatttttgatttcgtaaaacctggcgttatcactggtgatgacgtacagaaagtgttccaggtagctaaagaaaacaacttcgctctgccagcagttaactgcgtaggtaccgactccatcaacgccgtactggaaaccgctgcaaaagttaaagcaccggttatcgttcagttctctaacggcggcgctgcgttcatcgcaggtaaaggcgtgaaaactgacgttcctcagggcgctgctatcctgggtgctatctctggcgcacatcatgttcaccagatggctgagcactacggtgttccggttatcctgcacactgaccactgcgcgaaaaaactgctgccatggatcgacggtctgctggacgcaggtgaaaaacacttcgcagcaaccggtaagccactgttctcttctcacatgatcgacctgtccgaagagtctctggaagaaaacatcgagatctgctctaagtacctggcgcgtatgtccaaaatgggcatgaccctggaaatcgaactgggttgcaccggcggtgaagaagacggtgtggacaacagccacatggacgcttctgctctgtacactcagccagaagacgttgattacgcttacaccgagctgagcaaaatcagcccacgtttcaccatcgcagcatccttcggtaacgtgcacggcgtgtacaagccaggtaacgtggttctgaccccgaccatcctgcgtgattctcaggaatatgtgtctaagaaacacaacctgccgcacaacagcctgaacttcgtcttccacggcggttccggttcttctgctcaggaaatcaaagattccgtaagctacggcgtagtgaaaatgaacatcgataccgacacccagtgggcaacctgggacggtatcctgcaatactacaaaaccaacgaagcttacctgcaaggtcagctgggcaacccgaaaggcgaagaccagccgaacaagaaatactacgatccacgcgtatggctgcgcgctgcccagacttctatgattactcgtctggagcaggcattcaaagaactgaacgcggttgacgttctgtaa

SEQ ID NO: 524596 - DNA, 1164 bp, Stenotrophomonas maltophilia
atgtctgtaattaagatgaccgatctggatctggcaggtaaacgcgttttcatccgtgccgatctgaacgtaccggttaaagatggcaaagtgaccagcgacgcgcgtatccgtgcatctctgccaaccattgaactggctctgaagcagggcgctaaagtgatggtcacctcccacctgggccgtccaactgaaggcgagtacaacgaagagttctctctgctgccggttgttaattacctgaaagacaaactgtccaacccggttcgcctggtgaaagattacctggacggcgtggaagttgccgaaggtgagctggttgttctggaaaacgttcgcttcaacaaaggcgaaaagaaagacgacgaaaccctgtccaaaaaatacgctgcgctgtgcgacgtattcgtgatggatgcattcggtacggctcaccgtgcgcaggcttctacccacggtatcggtaaattcgcagacgtcgcctgtgcaggtccactgctggctgaagaactggaagcgctgggtaaagcactgaaagaacctgctcgtccgatggtcgctatcgttggtggttctaaagtttctaccaaactgaccgttctggattctctgtccaaaattgctgaccagctgatcgttggcggtggtatcgcgaacaccttcgttgctgcgcaaggccacaacgtgggtaaatccctttacgaagcggatctggttgacgaagccaaacgtctgctgagcacctgtgatatcccggttccaactgacgttcgcgtggcgaccgagttctccgaaactgctaccgcaacccttaaatctgttaatgacatcaaagatgaagagcagattctggacctgggcgacgtttctgcacagaaactggctgaaatcctgaaaaacgcaaaaactatcctgtggaacggtcctgtcggcgtgttcgaattcccgaacttccgcaaagggactgaaatcgtggctaacgctatcgcagacagcgaagcgttctctatcgcaggcggtggtgacaccctggcagctatcgacctgttcggtatcgctgacaagatctcctacatctccactggtggcggcgcattcctcgaattcgtggaaggcaaagtcctgccagcagtagcaatgctcgaagagcgcgctaagaagtaa

SEQ ID NO: 524597 - DNA, 1020 bp, Stenotrophomonas maltophilia
atgaccgtacgcgtagcgattaatggcttcggtcgcattgggcgcaacgtggttcgtgctttatatgaatccgggcgtcgtgcggaaatcaccgtggtggcaatcaatgaactggcggatgctgcgggcatggcgcatttgttgaaatatgacaccagccacggtcgctttgcctgggacgttcgccaggaaagggaacagctgttcgtcggtgacgatgccatccgcgtgctgcatgagaacagtattgaagagctgccctggcgcgaactgggtgtggatgtggtgctggactgtaccggcgtgtacggtaaccgtgaacatggcgaagcgcatctgaatgctggcgcgaaaaaagtgctgttctcccatcccggcagtcacgacctcgacgccaccgtcgtgtttggtgtcaaccagcacgagctgcaggctgaacaccgcattgtctccaacgcctcctgtaccaccaactgcattattccggtcattaaactgttagacgatgcgtatggcattgaatccggtaccgtgaccacgattcactccgccatgcacgatcagcaggttatcgacgcctaccatccggatttacgacgcactcgcgcggcgagccagtccatcattccggtggatacgaaactggctgccgggatcacgcgtattttcccgcagtttaacgaccgtttcgaagcgattgccgtgcgcgtcccgacgataaacgtcaccgcaatcgatcttagcgtgacggtgaaaaaaccggtaaaagcctgtgaagtcaacctgttgctgcaaaaagcggcacagggagcatttcatggtatagttgactatacggaattaccgttggtctcagtggattttaaccacgacccgcacagcgccatcgtggatggcacgcagacgcgagtcagtggtgcgtacctcatcaagacgctggtctggtgtgataacgaatggggctttgctaaccgaatgctcgacaccacgttagccatggccgcaaaaggtttcaggtag

SEQ ID NO: 524598 - DNA, 711 bp, Stenotrophomonas maltophilia
gtgaaaattgggctaaaggtcaacggattagatgtagaagcacattaccctgatgacgaaatcgaaaatgttcataagcctttgctgcggcaactggcgaaactgcattctgccagcgccagcaaacgtacgattgtttttctcagcgcgccgcccgggacgggcaaatctacgttgaccgccttctgggaattcctctctcgtcagatggaggggatgccgccgatccagacgttgccgatggatggttttcatcactacaacgcgtggcttgaggcccataacctgcgtgcgtacaaaggcgcgcccgagacctttgatgtcgacaggcttgcgcaacatctgcggcagataaaagaaggcgacagtacctggccgcagtatgaccgacaaacgcacgatcctgtcgaagaggctattgtggtaacggcccctgtcgtgattgttgagggtaactggctgctgcttgatgacgaacgatggcgaacgctgatggaatactgcgatttttcattgttcattcgcgcgcccgctgaagcgttacgtacgcgcctggtagggcgtaagctggccgggggactctctcaggccgacgccgacgcgttttatgcgcgcaccgacgggccaaacgtggagcgtgttttgcgtcacagccgttctgccaatgtggaactgatgatgtcggcaaatggcgaataccgactcgtctga

SEQ ID NO: 524599 - DNA, 510 bp, Stenotrophomonas maltophilia
atgacgacgctgacagaagacgatgtgcttgagcaactggatgctcagaataacctcctcgcattcatgacgacggcacagtcttttttgctccagggcattaaatgttttctgccgtcgctgtttgtcgataacgatgaagagatcgtggaatatgcagtgaagccgttactcgcccggagtgggccgcttgatgacatcgatgtggcgttacgcctgatctatgcgctggggaaaatggaaaaatggctctacgccgacattacgcatttttcgcagttttatcagtatctgaaagagcaggatacgatccctgacttcgccgatgacatcacctgggattttatcagcaacgttaattgcatcacccgtaacgcgacgttattcagcgcgctggagtcgatgaaatttgctgactttgccgcatggtctgaggtgcgctttaccgcaatgatcaagacggcgctcaccctggcggtaacgacaattttaaaggaactgacgccgtga

SEQ ID NO: 524600 - DNA, 972 bp, Stenotrophomonas maltophilia
atgatgtctctggcatggccgctctttcgcgttacggaacaggcggcgctggccgcctggccgcaaaccggatgcggcgataaaaaccgaatcgacgggctggcggtaaccgccatgcgcgaggcgctaaacgcgatagcgattcgcgggcgtatcgtcatcggcgaaggtgagattgaccatgcgccaatgctgtggattggtgaggaggttggaagcggtgtcggcccggcggtagatattgccgtcgaccccatagagggcacccgcatggtggcgatggggcaaagcaatgctctggcagtgatggcgtttgcgcctgagggtagcctgtttcatgcccctgatatgtacatgaaaaaactggtggttaacgcagcggccgccggggcaatcagcctcgatctcccgctggcagaaaaccttcgcaacgttgcccgggcgctgggcaagccgctggagcatctgcggatggtgacgctggacaaaccgcgcctgcaaaatgcaattgccgaggcgacgcagctgggcgtgaaagtgtttgcgctgcccgatggcgatgtcgctgccagcgtactgacctgcttacaggataatccttatgatctgatgtacaccacaggcggcgcgccggaaggggtgatctccgcctgcgcggtgaaagcgctgggcggcgatatgcaggcggaactgatcgatttctgtgaagcgaaaggggagagtcctgagaaccgtcgggtcgccatgcaggagcactgccgctgtgcggagatgaaagtggaagtcaatcgtatctatacccttagcgaactggtaaagggcaatgacatcctgttcagcgcgacgggcgtgacgggcggcgaactggttaaaggtattcaacaggttgcgaagggtgtgcgcacacaaactttactgatcggcggcgcagatcgaacgtgtaatataatagactctctgcattcacggtga

SEQ ID NO: 524601 - DNA, 1278 bp, Stenotrophomonas maltophilia
atgaaaacgaaagtggctgccatttatggcaagcaggatgttcgtatccgcgaatttgaactgcccgaaataagcgacaatgaactgctggtgagcgtaatttccgacagcgtttgtttatccacctggaaggcagccaaattaggcagtgaacataaacgtgtgccggacgatctggaaaatcatccggtcattaccggacatgaatgcgccggggtgattgttgaggtcggaaaaaaccttaccgggaaatataaaaaaggtcagcgctttgttttacaaccggcaatgggattgccaagcggttattccgctggatacagctacgaatattttggcggcaatgcgacgtatatgattattccagaggtcgcgattaatctgggctgcgttttaccttatcacggctcctattttgcggcagcttcgctggtggaacccatgtgctgcattatcggcgcgtataacgccaattatcatacgacgcaatatgtttatgagcaccggatgggtgtgaaaccgggaggtaagattgcgcttctggcctgcgccgggccgatgggaattggcgctattgattatgcgattaacggcgggattcagccgtcgcgcgttgtggtggtagatattgatgaggcccgccttgcgcaggcggaaaaactcctgccggttgagctggcggcacaaaagggtattgagcttatctatgtcaatacctctgtactggagaacccggccgctacgttacgcgcattaactgacaatgtcggcttcgacgacgtgtttgtctatgctgcggttccggcggtcattgaactggctgacgatcttctcgccgaggacgggtgcctgaatttcttcgccggaccaacggacagcaatttcaaggtgccgtttaatttttacaacgtccattacaacagtacccacgtggtgggcacctccggcggctcgacggaggacatgaaagaggcgattgcgctgagtgcgacgggccagcttcagccgtcgtttatggtgacccacatcggcggccttgatgcggtgccgcatacggtactcaacctgccggacatttctggaggcaagaagcttatctataacggtgtcaccatgccgttaacggccattgccgattttgccgaaaagggtaaaaccgatccgcttttccgggagctggcaaggcttgtggaagagactcacggcatctggaatgaaaaagcagagcgctatctgctggcgcagtttggggtggatattggggaggcggcagcatga

SEQ ID NO: 524602 - DNA, 771 bp, Stenotrophomonas maltophilia
atgcagcaggcttccgagacgggtaaatccatcttctttatggtggcctccaaccccgggccgggtttaggcctgctgctggcttttgcttttttcggcaaagggatggcgaaaaagtcagcccccggcgcgatgatcattcacttcctgggcggcattcatgagctctatttcccttacgtactgatgaaaccgctgacgctgattgcgatgattgctggcggcatgagcgggacgtgggtatttaacctgttaggcggtggactggtggctggcccaagtccgggttcgattttcgcctacctcgcgttaacgcctaaaggcgcattcctcgccacgattgctggcgtaacggcaggcacgttggtcacctttgcggtcgcctcttttatcctgaagatggataaaaatagcgaagctgaaacggaagatactttcaattattctgccaacgccgtaaaagccatgaagcaggaaggcaagttttcttaccaggatgttaagcatatcgcttttgtctgcgatgccggaatgggctctagcgctatgggcgcgacgacattccggaagcgcctggaaaaagccggacaaaatatcgaagtaaaacattatgccatcgaaaatgtgcctgacgacgcggacattattgttacccatgccagcctggaggggcgcgctaaacgggttagtgacaaaccgttagtgttgataaaaaactatctcggcgatccgaagcttgacgaattatttaagcatctaacggcgaattaa

SEQ ID NO: 524603 - DNA, 555 bp, Stenotrophomonas maltophilia
atggaacacaagtctgctcgtgcaaaggtccaggcttttgggggctttttgactgcaatggtcatcccgaatattggcgcttttattgcctggggatttattaccgcattatttataccaaccggatggatgccaaatgagcatttcgccaaaattgtcggaccgatgatcacctatttactgccggttatgattggctctaccggtggacacctggttggcggcaaacgtggggcggtgatgggggggatcggcactatcggcgtgatcatcggcgcggatattcctatgttcctcggctcaatgattatggggccactcggcggcctggtgattaagcatatcgaccgaatgctggataaacgcattccagcgggttttgagatggccatcaacaacttctcgctgggtattgcgggcatgatcctctgcctgctggggtttgaagtcatcggtcctgcggtgtcgattgccaataactttattaaagagtgtattgaatcactggtacatgcaggctacttgccgctgctgtcgttgattaacgaaccgtga

SEQ ID NO: 524604 - DNA, 444 bp, Stenotrophomonas maltophilia
atgcggttaattgattatttccctgaatcctcaatatcaataaaatccgcagcaaaggactggcaggaagccattgatttttccatgtcgtctttgctgcaaaatcattgtattaacgctgattatattgaggcaattaaaacctcgacgctcactaatggtccttattacattctagctccgggtgtagcgatgcctcatgcccgtccggagtgcggtgccttaaaaacaggtatgtcattaacgcttcttaaacaggaagtgcaatttgccgacgacgatgagcccgtaaaattactcattggtttatctgcggcggatgcggattcacatatcgacgctatccaggcattaagcgaattattatgtgaagaagatatgctgtcagcgttgttaaccgctaagtcagaaaagcaactggcggatattatggctcgcgaataa

SEQ ID NO: 524605 - DNA, 1992 bp, Stenotrophomonas maltophilia
atgtcctcacgtaaagagcttgctaatgctattcgtgcgctgagcatggacgcagtacagaaagccaaatccggccacccgggcgcccctatgggcatggctgacatcgccgaagtcctgtggcgtgatttccttaaccacaacccgcagaacccggcatgggcagaccgcgaccgtttcgtgctgtctaacggccatggctctatgctgatctacagcctgctgcacctcactggctacgatctgccaatcgaagagctgaaaaatttccgtcagctgcactccaaaactccaggtcacccggaagtgggctacaccgctggcgttgaaaccactaccggtccgctgggtcagggcattgcgaatgccgtgggtatggcgattgctgagaagaccctggcggcacagttcaaccgtcctggccacgacatcgttgaccacttcacctatgcgttcctgggcgacggctgcatgatggaaggcatttctcacgaagtgtgctccctggcaggcaccctgaagctgggtaaactggttgcgttctacgacgacaacggcatctccatcgacggtcacgttgaaggctggttcactgacgacaccgccgcacgtttcgaagcctacggctggcacgttgtgcgcggcgttgatggccacgatgctgactcgattaaacgtgccgtagaagaagcgcgcgccgtgaccgacaaaccgtccctgctgatgtgcaaaaccatcatcggcttcggttctccgaacaaagcgggcactcacgactcccacggcgcaccactgggcgacgcggaaatcgcactgacccgtgaagcgcttggctggaaacaccctgccttcgaaatcccatctgaaatctacgcgcagtgggatgcgaaagaagtgggccaggcgaaagaagcggcctggaacgagaagttcgcggcttacgcgaaagccttcccacaggaagcggctgaattcacccgtcgtatgaaaggtgacatgccgtctgacttcgacgcgaaagcgaacgagttcattgcgaagttgcaggcgaacccgtctaaaatcgccagccgtaaagcgtctcagaatgcgatcgaagcgtttggtcctctgcttccagaattcctcggcggctccgctgacctggcgccatctaacctgaccctgtggtctggctctaagccaatcaacgaagacactgccggtaactacatccattatggtgtacgtgaattcggtatgactgcgattgccaacggtatcgctctgcacggtggtttcctgccgtacacctctaccttcctgatgttcgtagagtatgcacgtaacgccgtgcgtatggccgcgctgatgaaacagcgtcaggtgatggtctacacccacgactccatcggtctgggcgaagatggtccaactcaccagccggtagagcaggtggcttccctgcgcgtgaccccgaacatgagcacatggcgtccatgtgaccaggttgaatctgcggtggcgtggaaatacggcgttgagcgtcaggacggcccgaccgcgctgatcctctcccgtcagaacctggcgcagcaggaacgtaccccagagcagctggcaaacatcgcccgcggtggttacgtgctgaaagattgcgcgggccagcctgagctgatctttatcgcgaccggttctgaagttgaactggccgttgccgcatgggaaaaactgactgctgaaggcgtgaaagcgcgcgtggtttccatgccatctaccgatgcgttcgacaagcaggatgccgcgtaccgcgaatctgtactgcctaaagcggtctccgctcgcgtggcagtggaagcgggtatcgctgattactggttcaaatacgtgggtctgaacggcgctatcgtcggtatgaccacgttcggtgaatctgctccggcagagctgctgttcgaagagttcggcttcaccgttgagaacgttgtcgctaaagcgaaagaactgctgtaa

SEQ ID NO: 524606 - DNA, 759 bp, Stenotrophomonas maltophilia
atgaaaatgcgtgcaattgggctggctgtgggaacaacgctcctgctaagcggctgtcagaatatggattctaacggcctgatgacctcaggcgcagaagcttttcaggcctactcattgagcgatgcgcaggtgaaagcgctgagcgacgaggcctgtaaggatatggatggaaaagctacgcttgccccggcaaacagcacctacacgcagcgtctgaacaagattgcttccgcgctgggcgacaacattaacggtcagccggttaactacaaggtgtatatggcgaaagacgtcaacgccttcgcgatggctaacggctgtatccgcgtttacagcggcctgatggacatgatgaccgacaacgaagtggaagcggtgatcggccatgaaatgggtcacgttgctctcggtcacgtgaagaaagggatgcaggttgcgctgggcaccaatgccgtgcgtgctgcggcggcctctgcgggcggcattgtcggcagcctgtcccagtcgcagctgggcgacgtgggtgagaaactggttaactcccagttctcccagcgtcaggagtcggaagcggatgactactcttacgatctgttgcgcaaacgcggcatcaatccatcgggtttagccaccagcttcgaaaaactggcgaaactggaggaaggccgtcaaagctccatgtttgacgatcacccggcctccgttgaacgcgcgcagcatatccgtgaccgcatggcggcagacggaattaaataa

SEQ ID NO: 524607 - DNA, 1641 bp, Stenotrophomonas maltophilia
atgagcgaaatgataaccgtcggcgacgccatcgccagaacgctggagcagtatcaggttgaggccatctacggcgtcatctccattcacaacctgccgatagcggatgcggttgggcagcggggcaatatccgctttgtacccgcgcgcggtgaagccggttccgtcaccatggccgatgctcacgggcgcttttccggcctcggcgtggcgctgaccagcaccggcgcgggggccgggaacgcggtaggcgcgctggtggaagcgatgaatgcctgcacgccgcttctgcatttaaccgggcaggtagagaaagcctggctggacgccgacaccgggtttatccatgaaacccgcgatcagctgaccttcctgaaggccagctcaaaacgggcgtaccgtatcagcaatgcgaatcaggcgatagccattctgcataaagccatccaggacgcgcagaccccgccgtgcggaccggtttcggtggaaatcccgattgatattcagggcgccaaaattccgctgtcgctggtaactgccccggtcaaaccggcatcggttccagccgtggataccgggatggttgacgcgctgtgggcgcagctcaaacaggcgaaacagccgctgctgtggctgggcggcggggcgctgggaagcgctgaggcggtgaaaaaactggcggatgcgggcatcaccgtgatttccagcacccacgcgcgcggcgtgctgccggacgaccaccgcgccagcctgcgggcgttccacaactcgccgtcggtggaggcgctgattgcgcagtgtgattttacgctggtggccggttcacgtctgcgcagcaacgaaacctgctcctggacgcttgagctgccgtccccgcgggtgcagattgatatcgacccggcggcggccagccgtaactacctgatggatagcacgttgatagcagattgttccgcgctgcttggcgcgctggctaaaaaagtgcagagccgcgagtggggcaacgcccagtgggatatgcaggtgcagcaggcggtcgggcaagctgagcaggggctgcgcgagcagtgcggcgcctatgcgaagcttaacgacgccatagaaaaagccctgccgaaagacggcctgctggtgcgcgatatcaccgtgtccggcagcctgtggggtagccgtctgttcagggctaacggtccgctgctgaacattcactctctcgccggggcgattggtatgggactgccgatggccatcggcaccgcgattgctaacccgcagcgcagggtggtgggactggtgggcgacggcggcctgagcctcaatttaggcgagctggcgacgctggcgcaggagaaagccaacgtgacgctgctcatcatgaacgacgggggctacggcgtaatgcgcggtattcaggataaatattttggcgggcgtcagtattataacgaactgcatacaccggactttaccctgctggcgcaggcgattgggctacaggcctggagcgttgagcgggccgaggattttgatgcggtgatgacggaagcgctggcgatgccggggccgtcggtggtggaagtgcggatggggcagattggcgcccttaagtttgccgggccgccacagaaaacgctgtactga

SEQ ID NO: 524608 - DNA, 1278 bp, Stenotrophomonas maltophilia
gtgcgggcgaagatcctgcacaaggtggcggatcttattgaatcccgtgtggatgaactggcgcagatgcagagccgggataacggcaagccgctggcggaagcgtgcgggctggtgatgagcgcggcgggaacggcgcgctactttgccgccgcctgcgagctgctggaaggggaacttccgacaccgcgccagccggatctgctgacgctgagccgctacgagccccttggcgtggtagcggccatcacgccgtggaactcgccgattgccagcgaaatgcagaaggtcgcaccggcgattgccgccgggaacgcggtgatcctcaagcccgccgaagccacgccgctgatggcgctggagctggcgcggatttttgaacaggccgggctgcccgccgggctgctgagcgtgctgccgggcaaaggctcggtgattggcgatgcgctggcgcgtcatccttgcgtgcgcaaaatttcctttaccggcggaaccactacgggccgtcatctggcgcacgtggcggcggaaaaactgatcccggcctcgctggaactgggtggcaaatcgccgaccatcgtgctggaggatgccgatatcgaacaggcggcgcgcgggatctgctacggcattttcagctcggcggggcaggcgtgcatcgccggatcgcggctgtttatccacgagagtatttacgccccgctgatggcgaggctgctggaattaactcgcgggctgcgcgtcgggcatccgtttaccgacggcgtgcatgtaggaccgctgatcggcgagaaacatcgccagagcgtgatcgagtacgtcgaactggcgaagcgggaagggggccgcgtgctgtgcggcggcgagatccctgccgatcccgctctggcaaacggcagctttttccagccaaccattatcgaagggctaaacaacagcgctcgcgcctgtcaggaggagatcttcggcccggtgctggtggcgatgccgtttggcgatgaagcggcgttgatcagcgaggcgaacgactcggtttacggcctggcggcggggatctggacgcgcgataccgggcgcgccctgcgtctcagcgagcagctggaggcaggcacggtgtggatcaacacctacaaagtttttgcgatttcgaccccgttcgggggctttaaagagagcggtctgggccgcgagaagggtatccaggggctgaaagcctggatgcaacaaaagagcatttatctggcgacgggtaacagcgtcaaccactggtgcgactga

SEQ ID NO: 524609 - DNA, 174 bp, Stenotrophomonas maltophilia
atggacgatctgaagatttttatcggcggccagtggcgacacggcggaggtaacccgatgcagagccacttcccggcagacgggtcgatcaatgcgacgctgaacgccgccagtctggatgacctggaggaggcgatagacgccggagagcgcgcctggcgcgatcccgcctga

SEQ ID NO: 524610 - DNA, 192 bp, Stenotrophomonas maltophilia
atggatgacacccgcgtgcagctgatggttgacccggcaacgaaacgtaacacccacacgctgcacgtcgaagggctgtttggcgaattccatctggagctgagcgggctgccgctggcgtctaaccctaaaacctccaccctggcggcactgagcgcggtgcgcgcctgccgcgagctggccctgagctga

SEQ ID NO: 524611 - DNA, 591 bp, Stenotrophomonas maltophilia
  misc_feature (559)..(568): n is a, c, g, or t
atgaaaaaggtaatgttgattggttttggtgccatggcgcaggcggtgattgagcgcctgcccgccggtgtggctatcggctggatcgtggcgcgcgcatctcaccatgccgccattcacgaccagtttggcgatgcggtcgaggcgctgacgtcgccaatggcgtgcgcgcaaacgccggatctggtgctggaatgcgccagccagcaggcggtggcccagtacggggaagagatcctgcgtcgcggctggcatctggccgtcatttccaccggcgcgctggcggacagcgcgctggagcagcgtctgctcgcggcgggcggaaaactgactctgctttccggtgcagtggccggtatcgacgggctggcggcagcgaaagagggtgggcttgagcgcgtcacctatcagtcgcgcaaaagcccggccagctggcgcggcagctatgccgagcagcttatcgatctgaattcagtggctgaggcaaaggtcttttttgaaggcagcgctcgcgaggcggcgcggctgttcccggcgaacgccaacgtagcggcgaccnnnnnnnnnnctcggcggcgtcgggatggatga

SEQ ID NO: 524612 - DNA, 795 bp, Stenotrophomonas maltophilia
atgaatgcacaaattgacgggcgcgtagcggtagtcaccggcggttcttctggcattggctttgaaacgctgcgcctgctgctgggggaaggggcgaaagtcgccttctgcggccgtgacccggatcggctcgccagcgcccatgcgacgctgcaaaacgaattcccccacggggagattttttcttaccgctgcgacgtgctgaacgccgacgaggttcaggcctttgcggatgcggtgcaggcgcgctttggcgcggctgatctgctgatcaacaacgccgggcagggctacgtggcgcacttccatgacaccccgcgcgaggcgtggctgcacgaggcagagctgaagctgtttggcgtcatcaatccggtgcaggcgtttcagccgctgctggagcagtcagacattgcctctgttacctgcgtcaactccctgctggcgctacagccggaggagcacatgatcgccacctccgctgctcgtgccgcgctgttgaacatgacgctcacgctctcgaaagagctggtgggtaaaggcattcgcgtcaattccattttgctcggcatggtggagtccggccagtggctgcgccgctttgaaaaccgggcggacaaaagccagagctggccggagtggacggcggatatcgcgcgcaagcgcggcattccaatggcgcgcctcggcaggccgcaggagcccgcgcaggcgctgctgttcctcgcctcgccgctggcctcgtttaccaccggcgccgcgctggacgtttccggcggcttctgtcgccatctgtaa

SEQ ID NO: 524613 - DNA, 771 bp, Stenotrophomonas maltophilia
atgacgggttttcgtgaacagggaagcggcattccgctgatgctgctacacgggatcagctctggcgctgcgtcctggcacaagcagatggcgctgaacggttttcgcgtgctggcgtgggacatgcccggttatggcgaaagcccgatgctggccgtcgcgcgggcaaacgcgggggattacgccgacgcgctggcggcgatgctcgaccgcgccggtgtctggcaggcagtgctggttggccattccctgggggcactggtcgcaagtgcctttgcggcgaagttcccggatcgcgtcattcatcttgtactggccgacgctgcgcagggctacggcaatgccgcgccggagcagcgggagcaggtctggcgcaaccgcgagcagcagatggcgttgggcggcgaaatcctcgcccagacccgtgccgcgaagctgctgcgccccggcgcgcgcgcggaagatatcgccaccgtcgcggcgggcatgcgcacgctgcgcccggaaggctaccttgccgccgcgtggatgctggcgcatgacgacattcacggctggcttaaacgatacgccggcacgtttgaagtctggtgtggcgagcaggacgcgataacgcagcccgaactggtgcaggggctggcgctgcgctacggcatgccgtttaccgccattccgcaggccgggcacgccagctatctcgataacgacgtgtttttcaaccaacagcttttacgcattaacgaagaggtgcgcgatgaatgcacaaattga

SEQ ID NO: 524614 - DNA, 531 bp, Stenotrophomonas maltophilia
atgactgattcaaccgtaacccacaaaacgggcatcaaacctgaccatctgacgatggaagagtgggtcgagtcgcgcatcgcgcgcttcgaaggccgtaaatacgactggaacgcgctgaagttccaggccgattttgacccgaaataccgccgggcgcagatgcgctacatcggcaccggcgcaaccggcgtggcgaacgacaccaataccgtgcaggcggaccatttcaccttctccaccatggtactgccgtcgaagtgcgaagggccgctgcacctgcacgacgacgtggaagaggtgttcttcatgctcaaggggcaaatcacgctgatgatccaggatggcgacaactacaccgaaacggtgctgcgcgagcgtgacctgatctccgtcccgccgggcatctatcgcggcctgtttaaccacggggaagaggaggcgctgatgtgcgtcatgctgggaaccaacaagccggaaatcccgacctatccgtccgaccatccgctctcgaaagtgaagcggaactaa

SEQ ID NO: 524615 - DNA, 294 bp, Stenotrophomonas maltophilia
atgcacctcgataccccgctcgccgtcatcgcggcgatgagcttcagcacctttatgtggggcaccggcgcgcccaacattttcgccctgctggccaaggccacccatccccgggtgagcgccacggcgggcggcattttcaacgggctgggaaactttgcaggcgcgctgtcgccggcggttatgggcgcgcttatcgccttcacccacagcatggattccgggctgatttttctggcggtgatggcggcggtgggctgcgtcctgttactgccgctgctgagacgttactga

SEQ ID NO: 524616 - DNA, 591 bp, Stenotrophomonas maltophilia
gtgttccaaatgaaaatcaaaaatgtggcgctggcgattgccgcggcggggctgctgttatcttctcaatcagtactggcaagcagtgattctggcgttaatgcttctctggataccggtgcgggttcgcaaagtacgggcggggtgatcaattttaccgggaagattacccttatttcctgtgatattactccggcctctaaaaacaaaacggtagaccttggggcgtgggcaaaaagctactttgacgatcacaacgaaacgacgccgcgcgagttcaaaatcaacgtggaaaactgcccggagacggttgaatcggttgcggtactgtttgacggaaccaaagatacggtgaatgacacactgcttcaggttacgccgggtgaaggtatggcgacgggtgtcggcgtgaagctttataacagcgatcgcagcaccgcgattaaaccgggtacggtatctgaaacaaccgcaccggatgatcaaggcaatgctgaattaactttctatgccgcacttgacaaagatggcacggaaatcaacgccggcgatgttaacgccgtatccaacttcctgatggtttataactga

SEQ ID NO: 524617 - DNA, 675 bp, Stenotrophomonas maltophilia
atgatgaaacgtttatcgtatattatgctcactgcattaatggttagttctgcgtcagtttccgctggcgttgtaatggggggaacacggatcgtatacccgcaaaacagcaaggaggtggcattttctgtttctaatatggaaagtgcggttccctatcttattcagtcgtgggttgaaggcgatgggccggataaaaataacgctgcgccatttattgtcacaccacctctgttcagacttgatccggagcagaccaacacgctgcgtattcaatataccggcgctccgctgcccacagatcgtgaatctgtattctggctcgatattaaagcgatagcgccaaagccaaaagagagcagcaacgaattacaggtaaacgtcaaatcgaaatttaaaatcttctaccgcccggacaacctgaaaggggacgccgccacggcctggcagaaaataacgttttcgcgaacgggaaaagggcttaaggccgctaacccgacgccatactacgtctctttttatcgtctgaccgttggcgggcataaaattgagcagccgggcatgatcggtccaggggaaacccgggaatggcctgtgtccgcctccgggggcgtaagctggtcggctattaatgattttggtgccatcaccgccacccacacccagcctctttaa

SEQ ID NO: 524618 - DNA, 2481 bp, Stenotrophomonas maltophilia
atgcgttttcgcctgtttcgttacgcgccgctttcggtgttgctgcttagcttcagccgcacggggatggccgaggattactttgatcccgccgcgctggagctttcctctactgaacagaaaacggcggatctgcactatttctctgaaaagggcgggcagatgccaggcacctggctcgtgacgctggagattaacggacgcgaggagcggcatcaggagatcaccttcgtcaatgagaaaggcagcctgcaacccgtttttagcgtatcgctgctggaagcgcttggcgtaaatgtaggggccattcctgcattctcccggttgcaggagggagaaacgttcacgcacctcgaggattttattccggcagcgcgaacttcttatgatttcaaccaacagcgtctctttctcagcctgccgcaggcggcaatgaaacaccgcagccgtggctatgtgccgcagtcgcagtgggacgatggtatcccggcggcatttactgattacagtctgtcgggcggtcaggcccgtcatcagagcggggtcacgacatccagctatctgagcctgcgtaacggcatcaatctgggggcgtggcggctgcgtaacacctcggcctggagctacagcgacgcgggcggcgaccattttcagtcgcaaagtagctggctgacccgggatattcgccgtcttaacagccagctacggatcggtgatgcctggaccgcaggcgacgtcttcgatagcgtggcgtttcgcggggtacagctctcatcaagcgaaagcatgttgccagacagccagcgcggcttcgcaccaaccatccgcggcgtcgcacacagcttcgctaaagtctccgtttcgcaaaatggctatgtgatctatgaaacctgggtggccgccgggccatttatcattaacgatctgttcccgggcgcacaaagtggcgatctacaggttacggtcacggaaagtgacggctcaacgcgcgtctttacccagccctattctgcggtgccgtttatgcgacgccagggcagcctgaaatacagtctcaatgcaggacgatttcactccggctccggtgatgcgcgttcgcccgaatttgttgaaggcgctttcttctacggtctgctctccaggatgacggtgtatggcggctttcgtacggcgagcaactatcaggccggtgcaattggcgtaggcagagggtttggcgcatttggctcgctgggtattgacgatacgctggcaaaaagccgtttacccgacggcaaaagcgcgatgggacaggcgtggcgcattcagtaccagaaagatttcagcgctaccggcaccgccttcaacctggcgagctatcgctatgcctcgcgcaattactacgaatttagtgaactgaatcagtctgacagccaacagctgcaactcaataatcgccgtagccgctcgcaggtcactttttcacagacgctgggtcagttcggcagcctcagcgtctcggcatggatgcaggattactggcatacgtccgggcaggataaaaccatccacattggctggtacaccagctggcggggtatttcctggggcgcggggtatgactacaccgactcagcgcttgagcagcatcccgatcgcaccgtatcgtttaacgtcaatgttccgcttggcaactggctgccgggcagttcggtcagttactacgccaaccacaacaatcgtgggatgaccacgcagcaggtgtcactcaacggcagcgcgctggcgaaccgcaacctgaattacagcgttcagcagagtaagaccagtgagggagaggccgacagcaccagcctggcgctgcaatacaacggtggctacggcaacgtcagcctcggttatgaccacagccgaaacggtagcaacgcgagtcttggactcgccggaggcgttatcgccacgcagtatggcgtcacgcttagccagccgctgggcgataccgtcgccctgctgcgcgtgcccggcgcggcgaacgttgagccggagggctacaacgggatccataccgacagccgcggctatgcggtcatgccaacgctctcggcgtatcgcaaaaataccgtcagccttgatacggcgacgctgggtgagaacgtcgacattgagcaaagcggtctgacgctcattcccaccagcggcgcggtggtgctggccaattacacaacccacattggttatcgcgttctgttttccctgcgctaccacggcgaaccgttgccgtttggcgcgcaggctgaagtggtggagcagaaccgccattctgcaaaccgaagcatggtcgctgacggcggtcaggcctacctgagcggggtaccagagcgcggcaccctgcgcgtcacctggtatgaaaacggggagcagcagcaatgccagacacctttcagactggggaaagctcatatggcccccggtatcgccacgctgtccgttgagtgccattag

SEQ ID NO: 524619 - DNA, 1095 bp, Stenotrophomonas maltophilia
atgcgtcgttttattcactggtttttctatctgagccttctttcgctttttggcatgctgagttttcatgcccatgctcagacttcaccttgccgcaccacgcgcgatcagtgggtcgttcaggtgccttatgccattgggtatgcgcccggcacggctgactggacgccgatatctgcgccgatacagtctaccggggcagatttctacagctgtgatggcgggaatgatgcctggcgtagtatcggctttgtcgacgtggataaccccgtcggcaccgtggtgggtgaagacggtgcgtcgcggcacgtctacaaaacccagattgacggcatcggctacgcgctcgggtttcgcgagcagcagtactgcggcgccgatgcgatacgctatattgacggcacaagtcaggtgaatggcaatgagtcccggcgcatttgcgacgcatcgcaaaaccccgcctttgccagcgcctcaacgtacaaaatgcagttctgggtggtgttttacaaaatcccgacgaccagcgccatgcctgacgataacgccaattcccaggagcaaaatgtcggctcgctgatattgcaggcgggagaaaatcaagccagcgccaccaacgtggcgacaccggtacagatccatctcgccagcttcaccgtcaggcgtaccagctgctcagtgggctctcgcagcattcttgttcccatggggagcgtgagccagcgtgaatttcacggcatcggctcccgcgccggaggcggacgcttcagcattccggtgacctgtgaaaataacacggcggttaagatgggtttctttggcgataccacgccgggcaacgatcgggcgctggcgttgacgaagcaggaggatagcgccagcggtgtcgggatcgaactgctttacggtgacaataccggttcggttcaggggcaggtggtatcgtggaacacccctcaggtgtcagcgcttggccaggtgggggataaccagacgcagaccttctggtttgatgcgcattacattcagacggaagagaacgtaacggcgggaaaagcagatgcgatggccacgtttaacctgatttacaactga

SEQ ID NO: 524620 - DNA, 363 bp, Stenotrophomonas maltophilia
atgaaagaagtcgaaaagaacgaaattaaacgcctgagcgaccgtctggatctgatccgccatcagatggctggcctctcccttgttgattccgccgagaaatatgccgagctggaaaaagagtccgtgaagctggaggcggaaattgagcgcctgcgcgatgtgaaaggccagaagctgagtaaagaggcgcagaagctgatgaacatgccgcatcgccgcgcgatcaccaaaaaagagcaggccgacatgggcaagctgaagaaaagcgtccgtggcctggtggtggtgcacccgatgactgagcttggccgcgaaatgggcctgaaagagatgacgggttttagtaagaccgcgttctga

SEQ ID NO: 524621 - DNA, 591 bp, Stenotrophomonas maltophilia
atgatgcagagtccggcgcaggttagcctgcgcccgaataacagattgtcagatatgcaggcaataatggaacaaacccaggcctttgaaaatcgtgtgcttgagcgtctgaatgctggcaaaaccgtacgaagtttcctgatcgccgccgtcgagctgttaaccgaggcggtgaacattctggtgcttcaggtgtttcgcaaagacgactacgcggtaaagtatgctgtagaaccgttactggacggagacggaccgctgggcgatttatcggtacggctgaagctgatctacggtcttggcgtgctcaaccgtcaggagtatgaagacgccgagctgttaatggcgctgcgcgaagagctcaatcatgacggcaatgagtacaccttcaccgatgatgagatactcgggcccttcggcgaactgcactgcgtatccgcgctccctcccgcacctcagtttgatgacagcgaccctgagctgtacatgatgcaaaagctgcgttatcaacaagttgtccgctccaccatggtactttccctgactgagctgatttctaaaatcagcttaaaaaaagcgtttcagaagtaa

SEQ ID NO: 524622 - DNA, 1149 bp, Stenotrophomonas maltophilia
atgaaagcattacattttggcgcaggtaatatcggacgtggctttatcggtaaactgctggcagacgcgggcattaccctgacattcgccgatgtgaatcaggtggttctggatgccctgaatgcccgtcatagctatcaggttcacgtggtgggtgaaaacgaacaggttgaaacggtctctggcgtcaacgcggtaagcagcattggcgacgacgtgattgacctcatcgcaagcgttgatctggtcaccacagccgtgggtccggtggtgcttgagcgtatcgccccggcggtcgcgaaaggcctggcgaagcgtaaagcacaaggcgttgaaacgccgctgaacatcatcgcctgtgaaaacatggtgcgcggcaccacgcagctgaaaggccacgttctggccgctgtggctgatgaagataaagcctgggttgaagcgcacgttggttttgtggattccgccgttgaccgcatcgttccgccatcagaatccgccaccaacgacccgctggaagtaaccgtggaaaccttcagcgagtggatcgttgataaaactcagtttaaaggcgcgctgccgtccattccgggaatggaattaaccgataatctgatggcatttgtcgaacgtaaactcttcacgctgaacaccgggcatgctataaccgcgtacctcgggaaattggccggtcatcagacgattcgtgacgcgatcctcgatgagaacatccgtgcggtggtcaaaggggcaatggaagagagcggcgcggtgctgatcaaacgctacggttttgatgctgataaacacgcagcatacatccagaaaatcctcggtcgttttgaaaacccgtatctgaaagatgacgttgagcgcgtgggtcgtcaaccgctgcgtaaactgagcgcgggtgaccgcctgattaaaccgctgctgggcacgctggaatacggtctgccgcacgctaacctggtgaaagggattgctgccgcaatgcattaccgcagcgagcaggacccgcaggcgattgagctggctcagctgattgatgacaaaggcgcacaggctgcgctggcgcagatttccggtctggatgccaacagtgacgtggttgcggaggcggtcagcgcatacaacgcaaccaaatga

SEQ ID NO: 524623 - DNA, 1830 bp, Stenotrophomonas maltophilia
  misc_feature (332)..(341): n is a, c, g, or t
atgtcatccgatttcaagatcaaagtgcaaagctttggtcgtttcctcagcaacatggtgatgccaaatatcggcgcgtttatcgcgtggggtattatcaccgcattatttattccgacagggtggttgcctaacgaaacgctggcgaaacttgttggcccaatgattacgtatctgctgccgctgctcatcggttataccggtggtcgtctggtgggcggtgaccgtggtggtgtcgtgggtgccatcacaaccatgggggtaattgtcggtgcggatatgccgatgttcctcggtgcgatgattgccggtcctctgggcggctgggcgannnnnnnnnngatcctcgcgattctggcgttcctcggcattggtcctgcggttgaagtgctctccaaactgctggctgcgggcgttaacttcatggtggcgcacgacatgctgccgctggcgtctatcttcgttgaaccggcgaaaatcctgttcctgaacaacgccatcaaccacggtatcttctcaccgctgggtatccagcagtcacacgatctcggcaagtccatcttcttcctgattgaagcgaacccgggtccgggtatgggcgttctgctggcgtacatgttctttggtcgcggcagcgcgaaacagtctgctggcggcgcggcgatcattcacttcctgggcggtattcacgaaatttacttcccgtatgtgctgatgaacccacgtctgatcctggccgttatccttggcggtatgaccggcgtgttcaccctgagcgtactgggcggtggtctggtgtctcctgcttctccaggctctattctggcggtgctggcgatgaccccgaaaggcgcctacttcgcgaacatcgcggcgatctgtgcggccatggccgtctccttcgtggtctccgctatcctgctgaaaaccagcaaggtgaaagaagacgacgatatcgaagcggcaacccgtcgtatgcatgacatgaaagccgaatccaaaggcgcaacgccgctggcggcgggtgatgtctctaacgacctgagccacgtgcgtaaaattatcgtggcctgtgatgccggtatgggttccagcgcaatgggtgcgggcgtgctgcgtaagaaagtgcaggatgcgggtctgaccaacatctccgtgaccaacagcgcgattaacaacctgccgccggacgttgacctggtgatcacgcaccgcgatctgaccgagcgcgccatgcgtcaggtgccgcaggcgcagcacatttccctgaccaacttcctcgacagcggcctgtacaccagcctgaccgaacgtctggttgcggcccagcgccatgaagataacgaagtgaaggtgcgcaccagcctgcaagacagcttcgacgagagcaacgcgcatctgttcaaactgggcgcagaaaacatcttccttggccgcacggcgaccaataaagaagaggccattcgcttcgccggtgagcagctggtgaaaggcggctacgttcaaccggaatacgttgaggcgatgctggagcgtgaaaagctgaccccaacctacctgggtgaatccatcgcggttccgcacggtacggtggaagccaaagaccgcgtgctgaaaaccggcgtggtgttctgtcagtatcctgacggcgtgcgcttcggtgaagaagaggacgacatcgcccgtctggtgattggtatcgccgctcgcaataacgagcatatccaggtgattaccagcctgaccaacgcgctggatgacgaaacggttattgagcgtctggccaataccaccagcgttgaagaagttctggctctgcttaacaagtaa

SEQ ID NO: 524624 - DNA, 609 bp, Stenotrophomonas maltophilia
atgaaactcatcggcagttataccagtcctttcgtgcgtaagatttcgattctcctgctggagaaagggattgaatttgaattcgtaaatgaacaaccgtacaacgcagagaacggcgttgcgcagtacaacccgctggggaaagtcccggcgctggtaacggacgagggcgactactggtttgattccccgatcattgcggagtacatcgagctgcttggcgttgcgccagccatgctgccggcggatccaaaagcagcgctggcgatgaagcaaattgaagccctggcggatggcattatggatgcggcattaacgtccgtacgcgagcaggcaaggcccgccgcccagcagtcagaaaatgagctgctgcgccagcgcgaaaaaatcagccgcagcctggatatgtgcgaacagctgatccgcgacgggaaaattcagagcgatagcctgaatctgacgacgatcgccatcgcctgcgccattggctaccttaatttccgccgcgtctcgccgggctggtgcgtggatcgtccgctgctggtcaaactggcggagacgctcttccagcgcgaaagtttcgcccggactgaaccaccaaagacttga

SEQ ID NO: 524625 - DNA, 1386 bp, Stenotrophomonas maltophilia
atgactactcatcattccctctacagccagatccccgctaccgatcgtctgcttcgtgatccgcgcatcactgcggtgctggagcagtttggccatactgcaacggttgacatgctacgccagcttcaggacgatgcgcgtcgccatattcaggctgaaaacgcgctacccggctggtgcgaggcatgggcgcaggaagttgaacgcaggctgagcaagcacgcgcaaagcgcgttgcgcccggttattaacctgacaggcacggttctgcacaccaatctgggccgggcacagcaggcagaagaagcgatagaggccgtcacccgggccatgcgctcgccggtgacgctggagtacgatctggacggcgccgggcgcgggcatcgcgatcgcgcactggcggatcttctctgccagatcaccggcgcggaagatgcctgcattgtgaataacaacgcggcggcggtgctgttaatgctggcggccaccgcgagcggaaaagaggttgtcgtctctcgcggcgagctggtggagatcggcggggcgtttcgtattccggatgtcatgcgccaggcgggctgcacgctgcatgaagtgggcacaaccaaccgtacccatgcaaaagattatcgcgcggcggtgaatgaaaacactgccctgctgatgaaagtgcataccagtaattaccacattgaggggttcaccaaaacggtggaagaggccgaactggccgccatcgggcgcgagctaaacgtgccggtgattgccgatctcggcagcgggtcgctggtggatatgcgccagtacggtctgccgaaagagccaatggtgcaggaaatggttgctgcgggcgtaagcctggtcagtttctccggcgacaaactgctgggcgggccgcaggcggggattatcgtcggcaggcgcgagctgattgcgcagctacagcagcacccgctgaagcgcgccctgcgtgccgataaaatgacgctggccgcgctggaagccacgctgcggctctatctccacccggagaaactggctgaccgcctgcccacgttgcgtttgctgagccgtgatgcggcctccattcgcgcgcaggcggaagcgctactgccgcaggttgctccccattaccctgagtttgacgttcgtatcgagccttgcctgtcgcaaattggcagcggctcgctgccggtggacaggttaccgagcgaagcgctgacgttcaccccgcgcgacggacgcggaagccagcttgaggcgctgtcggcgcgctggcgtgcattaccgacgccagtgattggccggatcggtgatggtcgtatgtggctggatttacgctgcctggaagatgaagggcggtttctggagatgatgttgaaatga

SEQ ID NO: 524626 - DNA, 1839 bp, Stenotrophomonas maltophilia
atgattattgccaccgccggtcacgttgaccacggcaaaaccacgttattgcaggccattacgggcgtgaatgccgatcgcctgccggaagagaaaaagcgcggcatgaccattgacctgggttacgcctactggccacagcccgacggtcgcgtgctgggctttatcgacgtgcccggccacgagaagtttctttccaatatgctcgcgggcgtgggcgggatcgatcacgctctgctggttgtcgcgtgcgatgacggggtgatggcgcaaacgcgcgagcatctggcgatcctgcaactgacgggaaacccgcagttgaccgtcgcccttaccaaagcggaccgtgtggatgaggcgcgtatcaacgaggtgcgtgaagaggtactggcggcgctgagtgaatatggttttaaggatgccgctctgtttgtcaccgtggcgacagaaggccgcggtatcgacgctcttcgcgaccatttgcagcagatcccgtctcgtgagcatgccagccatcaccgcttccgtctggcgatcgacagggcgtttaccgtgaaaggggctgggctggtggtgaccggtaccgcgctgagtggcgaagttaacgtgggcgataccctgtggctgacgggcgtgaacaaaccgatgcgcgtgcgcgggcttcacgcgcaaaaccagccggtggaacaggcccatgccgggcagcgtatcgcgctgaatattgctggtgatgccgaaaaagaccagcttaaccgcggcgactggctgctggccgacgcgccgccggagccttctgaacggattatcgtttctctacagacccacacgccgctgacccagtggcagccgctgcatatccatcacgcggccagccacatcaccggacgcgtgtcgctgctggaaaacgatctcgccgaactggtgttcgactccccgctctggctggcggataacgaccgcctggttctgcgcgacatctccgcgcgcgaaaccctggcgggcgcccgcgtggtgatgctgaatccgccccgtcgcggcaagcgtaagcccgagtatttagcgtggctggcctcgctggcccaggcccgtgacgacaagtctgcgttagatatccaccttgagcgtggtgcggtggatctggctgcgttcgcctgggcgcgccagctcagcggtgaaggattgcgtcttctgacgcaggagccgggttttattcaggctggcaacagcctgctgaacgcgccggtggcggcgcgctggcagcgtaaagtgttgagcacgctggcgacctaccatgaacagcatcaggatgagcccggtccgggccgtgaacgtctgcggcgtatggcgttgcccatggaagacgacgcgctggtgctgttgctgattgaaaacatgcgtgaaagcggcgtgattgcaagtcatcacggctggctacacctgccggaacataaggccggttttaccgctgagcaggacgcggtctggcaaaaagtggcggcgctgtttggcgatgaaccctggtgggtgcgcgatctggcgcgtgaaaccaataccgatgagcagctgatgcgtcaggtactgcggcatgcggcgcagcagggcatgattgtggcgatcgtgaaagatcgttattaccgcaacgatcggatcgtggcgtttgcgaacctgatccgggagctggatcaggcgcgcggatcaacctgcgccgcagacttccgcgatcggctgaacgttggacgcaaactggcgattcagatcctggagtatttcaaccgcatcgggtttacgcgtcgtcgtggcaatgaccatgtgctacgcgacgcgcagttatttccgtaa

SEQ ID NO: 524627 - DNA, 885 bp, Stenotrophomonas maltophilia
atgcagctatttatcggctttgacgtgggtggaacccacatcaaacacggcgtaattaatgaaaacggcgaagaactgacatccgatgaatatgatacgccggacgatgaaagcaccttcaaagagaagtggaaagcggtagtggataaatactgccaggagcacgagatcgccagtattggcgtgagttttccaggacatatcaatcaccatactggcgaagcggccaaagccggggcgctggactatcttgacggcgaaaacctgtgcgaactgttcgcacagctgaccgatctccccgtgacaatcgaaaacgatgccaattgcgcggcgctgggcgagcgctggcagggcgcgggcaaggactatgagcatttcgtctgcatcaccatcggcaccggcatcggcggcggtatcgtcatggagggcgatctctaccgcgggtcgcactaccgggcgggtgagtttggcgtgctgcccgtaggcaatgagggcgaaccgatgcatgaagtggcgtccgccagtggcctgatgaaagcctgccgccgcgcgctggccgtgtcggaagatgagatgcctgatggtgaggagctgtttaaacgcatggacagcgacgtgcatctgcgcgaggccattgaagcgtgggcgcattgtctgtcgcgcggtatttacagcgtgatctctatgtttgatccgcaggcggtgctgattggtggcggcattagtgagcaggagaaaatctatctcctgctggataaatatttacagcgattcgaggagtgggaagcgctccgggtgcccatccttccctgcgagctgggtaaccaggcgggaaggctgggcgcggtctggctggctaagcagaagcaggcgcgcagcgcttaa

SEQ ID NO: 524628 - DNA, 1539 bp, Stenotrophomonas maltophilia
atgacaaacaatcctccctcatcgcgtatccagcctggcgagtatggttttccccttaagctgaagccccgctatgacaactttatcggcggcgactgggtggcgcccgtcgacggtgaatactattccaacctgacgcccgttaccggtcagccgctgtgtgaaattgccagttcgggcaagcgggatatcgatttagcgctggatgcggcgcataaggcgaaagataagtgggggcaaatgtccgttcaggacagagcggccattttgttcaaaatcgccgatcggatggagcagaatctggagctgctggcgaccgcagaaacgtgggacaacggcaagccgatccgcgaaaccatggcggcggacgtgccgctggcgatcgaccatttccgctattttgcgtcctgcattcgtgcccaggaggggggaataagtgaagttgacaaagataccgtggcgtatcacttccacgagccgctcggcgtggtggggcaaattattccgtggaacttcccgctgctgatggcgagctggaaaatggcgcccgcgctggcggcgggtaactgcgtggtgctgaaacctgcacgcttaacgccgctttcggtactgctgctgatggaggtgattggcgacctgttgccgccgggggtcattaacgtggtcaacggggccgggggagagatcggcgaatatctggctacttcaaagcgtattgccaaagtggcgtttaccggctcaacggaagtgggtcagcagatcatgcagtacgcgacccagaacatcattccggtcaccctggagctgggcgggaaatcgccgaacatcttctttgccgacgtgatggatgaagaggacgccttcttcgacaaagcgctggaagggtttgcgctgtttgcgtttaaccagggcgaagtctgcacctgtccgagccgcgcgctggtgcaggaatccatttatgagcgctttatggagcgggcgatccggcgcgtggagtcgattcgcagcggtaatccgctggataacgttacccagatgggggcgcaggtatcgcatggccagctggaaaccatcctcaactatattgatatcggtaaaaaagagggggccgatgtgttgaccggcggtcgtcgtaaggtgctgggcggcgatttgcaggagggctactaccttgagccgactatcctgttcggtaagaacaacatgcgcgttttccaggaggaaatttttggaccggtgctggccgtcaccacgtttaaaaccatggacgaggcgctggagctcgctaacgacacgcagtatggcctgggggcgggcgtctggagccgtaacggtaaccttgcctataaaatgggccgcggcattcaggccggacgcgtatggacaaactgctatcacgcctatccggctcatgcggcgtttggcggctacaaacagtcgggcatcgggcgcgaaacccataaaatgatgctggagcactaccagcaaacgaaatgtctgttagtcagctactccgataaaccgctggggctgttttaa

SEQ ID NO: 524629 - DNA, 1950 bp, Stenotrophomonas maltophilia
atgaccataatggaagccgacctgcatcaactgaaaatcaacgacccgtttcttggtcagtaccaacggctggtccgcgatgtggtaatcccctaccagtgggatgcgcttaacgatcgcgtggcggaggctgaacccagccacgccatcgccaacttccgtatcgcggccggtctggaacagggggagttctacgggatggtctttcaggacagcgacgtggcgaaatggctcgaagccgtggcgtggtcgctgtgccagaagccggatgccgaactggaaaaaaccgccgacgaggtgatcgagctggtcgcagcggcgcagtgtgaagatggctatctcaatacctatttcacggtgaaagcaccggccgagcgctggaccaatctggccgagtgccacgaactgtactgcgccggacatatgattgaagcgggtgtggcgtatttccagggaaccggaaagcgccgcctgctggacgtggtgtgcaggctggcggatcatatcgacagcgtgtttggcccgggcgaaaaccagctgcacggctatccgggccacccggaaatcgagctggcgctgatgcggctgtacgacgtcacgcaggagccacgctatctcaatctggtgaaatactttattgaggaacgcggcacacagcctcacttctacgatatcgaatatgagaagcgcggcagaacgtcatactggaacacctatggcccggcgtggatggtcaaggacaaagcctacagtcaggcacatcagccccttgccgaacaacaaacggccatcggccatgccgtgcgtttcgtctacctgatggcgggcatggcgcatctggcgcgcctgagcaacgacgaagggaaacgtcaggattgcctgcggctgtggaacaacatggcacagcgccagctgtacatcaccggcgggattggctcacaaagcagcggcgaggcattcagcagcgattacgatctacccaacgatacggtctatgccgaaagctgcgcctccatcggcctgatgatgtttgcccgccggatgcaggagatggaggcggacggccactacgccgacgtgatggagcgcgcactatacaacacggtgctgggtggcatggcgctggacggtaagcatttcttttatgtgaatccgctggaagtgcacccgaaaacactggcctttaaccatatctatgaccacgtgaaaccggtgcgccagcgctggttcggctgcgcctgttgcccgccgaatattgcgcgcgtgctgacctcgctggggcactatatttataccgttcgcccggacgcgctgttgatcaacctgtacgtgggaaacgacgtcgccattccggtgggggaaaacaccctccagctgcgtattagcggaaactatccgtggcatgagcaggtgaaaatcgagataacctcaccagttccggtgactcacactctggccctgaggctgccggactggtgtgcggaaccggctgtttcgctcaatggtcaagccattacaggcgaggtctcccgtggatacttatacctcaaccgcaactggcaggaaggcgacacgctgacgctgacgttaccgatgccggtccgccgcgtgtacggcaacccgcaggtgcgccagcaggcggggaaagtcgcattgcagcgtgggccgctggtttactgcctggaagaagccgataacggcgcaaatctgcataacctttctttgccgcaagacagcgcgtttcgggtatttgaaggcaaaggcattttcgcgcacaagatgctgatacaggcggaagggattgggtgtcaggcgaaggacactgatgccctgtggcagtacgaccactcgccggtagaacgtcagccccagacgctgacctttattccgtggttcagctgggcaaaccggggagaaggggaaatgcggatatgggtggatgaaggctga

SEQ ID NO: 524630 - DNA, 1401 bp, Stenotrophomonas maltophilia
atgacttccacaccgattacagacgcagaagttgcaaaacaggcagccgatgaccggctgtcagtccgcgagaaaattggctacggcctgggcgacgcgggcggcacggtaattacctgcctgatcatgaacttcctgacctttttctataccgatgtatttggcctgacgcccgcgctggtgggcacgctgtttattgcccttcgggtatttgacgcgatttccgatcctgtgatgggcgtgattgccgaccgcacgcagagccgctgggggcgttttcgtccgtggcagctgtgggtcgcgcttcccatcgggatcgtcggcgtgctgaccttcaccgtcccggacgccagcatgggcgtgaaaatcgcctgggcgttcggcacctatttgcttttgtccgtaggctataccgccatcaacgtgccgtattgcgcgctgatcaacaccatgaccacccgccacaacgaggtaatatcctgccagtcctggcgcttcgtactgtgcggcgtggcgggctttctggtctccgttggcctgccgtggctggtgtcagagctgggacagggcaataccgcccggggttatcagctgggcgtcggcgtactgtgcgccatcgctgtggtgatgttcttgtgctgcttcttctgggtgcgcgagcgcgtcccgcttgcgctgatggggaaatttaccctgcgcgagcacctggcgggcctgcgtaaaaacgatcagctgctgctgatgctggtgatgtcgtttctgctgatcaacgtcttcaacattcgcggcggcgggtacatgtacttcatcacctacgtgcttcagggcagcacggcgtacacctcgctgtttttcaccatggtgacctttgccgccattctgggcgcggtgatcgtcaacccgctgtcgcggcggattgataccgtcaaactctactactacaccaacctggtactcgctgcgcttgctatgggaatgtggttcctgccaggtggcccggcgcaccagacgctctggcttatcgtgattttaagtaacggcgtgatcctgggcttcaccctgccgcttcacttctcgctaatggcctttgccgatgactacggcgaatggaaaaccggcgtgcgctcctcggggatgaatttcgccttcaatctatttttcatcaagctcgcgtgggcatccagcgccgggatcatcagcctggtgtttattgccgtggcctatcagccaggcgcgggcaaccagacacccgcctcattgcagggcattaccgccatggagacgctgctccctgcccttttccacctgctgctggcggtcgctatccgctggtgcaggcttaacaatcccgtgatgtcgcgcattgccaccgatttgcgccagcgtcatgtacagtcctga

SEQ ID NO: 524631 - DNA, 819 bp, Stenotrophomonas maltophilia
atgcttgaattatccatagcacttccgattaaggttcaaaatggcgggttatttatctcccggggcgtgggtcgtcatcccgcacgaaaattatcttcgtgggagataatctttgtcgaaaaagggacattaacgatccaggaggaaaatacgctgtttgaggtaaacgccggcgagagtttattactttggccgaagcggcggcatgtcggcgtggaagattttccgggcgatctcaaattttactggctgcattttgaggtggatgaaggcttgcctgcgttgccaggtgcgacgccactgtcgattgagcaacactgtagcgtgcgggatccgcaatatgttattgcgttattccgtcagtttttaagcgagcaggaaaaattacagcgtagccaggcgctggagataattttgctgttaattttgcagcagatatcgctctcgccgggatatgaagataaagcggatgatgcgggcgcagcaatggcgtggaaggccaaacagcttatccgcactcactttcatttgcccatatccacttcacagctggcgaaagagctgcactgcaacgcagattacctggggcgagtatttcgccggacgtttcatttaaccctgacggaggcaatacaccgccagcgcgtcagggccgctgaaaaattgttgctgaacgatgcggcctcattaactgaagtggccacccggtgcggttttaatgacgtgggttattttcggcaaatattctcgaaacataccgggttaacgcccgccgtctggaaacggcggtactgtaaagagcatattaattccggatga

SEQ ID NO: 524632 - DNA, 390 bp, Stenotrophomonas maltophilia
atgatgtcgcatcaaagcagcgccacgccagaagcgtttacctcacggatccgcgtggttaaggggggaaccttcaccacggccgtgggctgccatcagtgtgaagatgcgccctgcgcgaatgtctgcccgacgggggccattcaccgtgctgcgggagcctggctcgttgagcaggctcgctgtatcggctgcaaaagctgtatggtggcgtgcccgttcggggcaatgcaggttcgggttgttggagatcgcgttcaggcgctgaaatgtgatttgtgcatgcttcgcgagggcggtcccgcctgcgtcgaagcctgtcccacccacgcgctgcgctgcatagaacccgccagactacgcgcggaacggctgcgtaatctggcctga

SEQ ID NO: 524633 - DNA, 1254 bp, Stenotrophomonas maltophilia
atgacgttttcacaattcggcgacaaatttacccgccattcaggcattacccgcctgatggaggacctcaacgacgggctgcgcaccccaggcgctatcatgcttggcggcggaaacccggctcaaattccggagatgaacacctacttccagacgctgctggcagacatgctggaaaacggtaaagcaaccgatgcgctatgtaattacgacggccctcagggtaaaacagaactactgacgcttctggcggcaatgctgcgggaagcgctgggttgggatatcgaaccacagaacattgcactgacaaacggcagtcagagcgcgtttttctacttattcaatctgttcgccggacgccgcgccgacggcaccacgaaaaaagtgctgttcccgctggcaccggagtatatcggctatgccgatgccggcctcgaagaagacctgtttgtttccgcacgtccgaatatcgagttgttgccagagggccagttcaaatatcacgtcgattttgaacatctgcatatcggtgaagagacgggcatgatctgcgtatctcgtcccaccaacccgacggggaacgtgatcaccgacgacgagctgatgaagctggatgcgctggcgaatcagcacggcatcccgctggtgatcgataatgcctatggcgtaccgttcccggggatcatcttcagcgaagcgcgtccgctgtggaacccgaacatcatcctctgcatgagcctctccaagctgggcctgccgggcagccgctgcggcattatcattgctaacgagaaaatcatcaccgccattaccaacatgaacggcattatcagcctttcccctggcggcatcggcccggcgatgatgtgcgagatgatcaggcgtaacgacctgctgcgcctgtcgaatgaggtgatcaagccgttttactctcagcgcgttcaggaaactatcgccatccttcgccgctacttaccggaggaacgctgcctgatccataaaccggaaggggcaattttcctgtggctgtggtttaaggatctgcccattacgacagagctgctttatcagcgtctgaaaaagcgtggcgtgctgatggtgccgggggattacttcttcccgggactggataaaccgtggccgcatacgcaccagtgcatgcgcatgaactacgtcccggacccggaaaaaatcgaagcgggtgtgaaaattctcgccgaagagattgagaacgcctggcgcgaggccggttaa

SEQ ID NO: 524634 - DNA, 2031 bp, Stenotrophomonas maltophilia
atgaaacgcactgcattagctgttctgatgttacccgcattcgcgcatgccgactggtcatcgccgggatttgacgcattcaacgctgaaggtaccggcgtctttaccagccaggcaacgcttgcgaagggtatccgtccactgacgttgagtcttgacaacgcgtgctggcagccgacaaaggccattaagctcaacgagatgctgtcgctcaaaccgtgcgaaggcacgccaccgcagtggcgattattccgtgacggcgtttatcagatgcgtattgatacgcgctctggaacgccgacgctgatgctgacggtacaaagtgcggcgccacagcctgtcgcaaacgttacccgccagtgcccgaagtgggacggcaaaccgctcacgatcgacgtcgttaacacgttcccggaaggcacggtggtgcgtgatttttacagcaaacagaccgcgaccgttcaaaatggcaaagtgactcttcagccagccgccaacagcaatggcctgctgctgcttgagcgcgccgaaacggacaaacccgcgccgttcagctggcaaaacgccaccgtctatttcgtgctgaccgatcgcttcgtgaatggcgaccccaccaacgacaacagctatggccgccataaagatggtatgcaggagataggtactttccacggcggcgatctgaaagggcttaccagcaaactggattaccttcagcaactgggcgtgaatgcgctctggataagctccccgctggagcagatccacggctgggttggcggcggcaccaaaggggatttcccccactacgcgtatcacggttattacacccaggactggacgaaactcgacgccaacatgggcaacgaagatgatttacgccagcttgtcgacgacgcgcacaggcgcggtatccgcgtcctgtttgacgttgtcatgaaccacgcgggctatgcgacgcttgcagatatgcaggaatatcagtttggcgcactctatttacagggagatgagctgaaaaaaacgctcggcgaacgctggactgactggaagccaggcgcgggtcaaagctggcacagcttcaacgattacatcaacttcagtgacaaagccgcatgggaaaaatggtggggtaaaaaatggatccgtaccgatatcggtgattacgacaacccgggctttgacgacttgaccatgtccctggccttcctgccggatctgaaaacggaatcaaaaaccccgtcaggtttgccgaacttttatcaacacaagcccgacaccaacgcgaaagtgatgacgaatttcacgccgcgagattacctgacccactggcttagccagtgggtacgtgactacggcatcgacggtttccgggtcgataccgccaaacacgttgagcatgaagcctggcagcaactgaaagaccaggccagccaggcgctggccgcgtggaaggccgccaacccggacaaaaaactcgacgatgcgccgttctggatgaccggtgaatcctggggccacggcgcgatgcagagcgattattaccgtcacggcttcgatgcgatgatcaactttgactatcaggagcaggcggcgaaagcagtggactgtctggcagatatggatttgacctggcagcaaatggcagaaaagctgcaaagttttaatgtgctgagctatctctcctcccacgatacgcgtctgttccgtgaagggggtcagcgcgccgctgagttactgctgctggcgccgggaagcgtgcagatctattacggcgatgaatcagagcgtccatttggcccgacaggctccgatccgctacagggaacccgttcggatatgaactggcaggacgtcacaggtaaacaggcgttaactgtcgcccactggcagcttctggggcagttccgcgcccgtcatccggctgtgggtgaaggcaagcaaacaacgctgtcaatgaaagaaggctacggctttgtgcgcgagcacaagggcgataaggtgatggtggtgtgggcgggtaatcagtag

SEQ ID NO: 524635 - DNA, 573 bp, Stenotrophomonas maltophilia
atgccttacattaaaagtcaaaatgccgcgattactgcggatcgtaactggctgatcgccaaacagtacgatagccgctggtcgccgtctgagcgcactcgcctgaaagacatcgccaaacgctataaagtgaagtggagcgggaacacgcgtcgtgtgccgtggaacactctgttagagcgtgtggacattattccaggcagtatggtcgcgacaatggccgccgccgaaagcggttggggcacctcgaagctggcgcgcaacaacaacaatctgtttggcatgaaatgcgcaaaaggtcgttgtactaatgcacccggcaaggtgaagggctattcacagtttgaatcggtgaaagattccgtgaatgcctatgtggtgaatctgaacacccacccggcctactcttcgttccgtaagtcacgcgcgcagctgcgtaaggcggatcaggaagtgacggccacggcgatgatccacaagctgaaaggttattccacccagggacagcgctacaacaactacctgttctccatgtaccaggataaccagcgtctgattgccgcacatatgtaa

SEQ ID NO: 524636 - DNA, 1179 bp, Stenotrophomonas maltophilia
atgtttgaaaagcgtcaccgcattacgttgttattcaatgccaacaaagcctatgaccgtcaggtggttgagggggttggtgaatatttgcaggcgtcgcaatccgaatgggatattttcatcgaagaagatttccgtacccgtctggagaacatcaaagactggctgggagacggggttatcgctgactttgacgaccccgtgattgaacagttgctgagtggcgtcgacgtacctatcgtgggcgttggcggctcttaccattcagcggaacattacccccccgttcactacatcgccacggataaccatgccctggttgagaccgccttcctccatttaaaggagaaaggcgtccatcgttttgcgttttacggattgcccgccaccagcggaaagcgctgggcgatggagcgtgagtatgccttctgccagctggttgcccaggagaagtatcgcggcgtcgtttatcaggggctggaaaccgcgccagaaaactggcagcacgcacagaatcgcctggctgactggctgcaaacactgccgccccagacagggattatcgccgtgacggacgcccgcgcccgccacgtattacaggtgtgcgaacatttgcatattccggtgcctgaaaagctgtgcgtgattggtattgataacgaagagcttacgcgctatctgtcgcgcgtggcgctctcatccgtggcgcagggtacccgtcagatgggctatcaggccgcgaagctgctgcaccgactgttagacaacgaatccctgccgctccagcgtctgctggttccgcccgttcgcgtggtcgagcgtcgctcaactgactaccattccttaaacgatccggccgtgattcaggcgatgcactacattcgcaatcatgcctgcaaagggattaaggtcgatcaggtgctggattcggtcggcatttcacgttcgaatctggagaagcggtttaaagaggaagtcggtgagacgatccacgccgtgatccatgcggaaaagctggagaaagcgcgcagtctgctgatctccacctcgctgtcgatcaacgagatttcacagatgtgcggctatccgtcgcttcagtatttctattcggtgttcaggaaagagtatgacaccacgccgaaggagtaccgggaacggtacagtgaagtcctgctctag

SEQ ID NO: 524637 - DNA, 1182 bp, Stenotrophomonas maltophilia
atgtcgaaaagcaacccgtctgatatcaaagtcgctgttccgacgcccggtgcgttcgcaggacttaaatcgctgaatctgcaagtttttgtaatgattgccgccattatcgtcatcatgttgttctttacctggatgaccgatggctcctatttgagcgcacgtaacgtctctaacctgctgcgtcagaccgccatcaccgggatcctggcggtggggatggtctttgtgattatctcagcggaaattgacctgtcggtagggtcgatgatgggtctgctcggcggcgtggcggcaatttttgacgtctggctcggctggccgttgccgctgacgattgtggtcacgctggtactgggtctgctgctaggtgcgtggaacggctggtgggtggcctaccgtaaagtcccgtcgtttattgtcaccttagcagggatgctggccttccgcggtattctgattgggatcaccaacggcactaccgtctccccgaccagcgcctcgatgtcccagattggccaaagctacctctctgatggcgtcggttttacgatcggcgtggttgggctgatggcgtttgtcgcgtggcaatggcgaggacgcatgcgtcgccaggcgctggggctggcctcgcctgcctcaacctcggttgtcggccgtcaggcgcttactgcggtgattgtgctgggggccatctggctgctaaacgattatcgcggtgtcccaacgcccgttctgctgctggcgctgttgctgttaggtgggatgtttatggccacacgtaccgcattcggtcgccgtatttatgctatcggcggcaatcttgaagccgcgcgtttatctggtatcaacgtcgagcgcaccaaactcgccgtctttgccatcaacggcctgatggtagccatcgcggggctgatcctcagctcacgtctgggtgcgggttccccgtctgccggtaatattgccgagctggacgccatcgccgcctgcgttattggcgggaccagcctcgccggaggtattggcagcgtggcgggggcggtgatgggcgcatttattatggcttcgctggataacgggatgagtatgatggacgtgccgacgttttggcagtatatcgtcaaaggggccattcttttgctggcagtctggatggactctgccaccaagcggcgcgcctga

SEQ ID NO: 524638 - DNA, 1542 bp, Stenotrophomonas maltophilia
atgtcttatttacttgaaatgaaaagcatcaccaaagccttcggggcggtgaaagcggtcgacaacgtaagcctgcggctgaaccccggcgaagtgatgtcgctgtgcggcgaaaacggctcggggaaatccacgctgatgaaggtgctgtgcgggatctatccgcacggcagctacgagggcgaaatcgtctttgccggtgaggtgcttcaggccacgcacattcgtgataccgaacgcaaaggcatcgctatcattcaccaggagctggcgctggtgaagcaccttaccgtgctggaaaatatctttcttggggccgaactctcgcgccacggcgtactggattacgacaccatgacgctgcgctgcgaaaaactgctggcccaggtgagtctcgctatctcaccggatacgcgcgtgggcgacttaggtttgggccagcagcagctggtggagatcgccaaggcgctaaataaacaggtacgcctgctgatcctcgacgagccaaccgcctcgctcaccgaacaggaaaccgccgttctgctcaatatcatccgcgacctgcaaaaccacggtatcgcctgcatctatatttcgcacaagctcaatgaggtgaaagctatttccgacaccatctgcgtcatccgcgacgggcagcacattggcacgcgtgaagcagaaggcatgagcgaagatgacatcatcaccatgatggtgggtcgcgagctcaccgcactgtatcccaacgaaccacacaccataggcgaagaactcctgcgcgtggaaaacctgacggcgtggcatcccgttaaccgccacatcaagcgcgtggataacctctccttctcgctgcaccgcggcgaaattctcggtattgcgggtttagtgggtgccggaagaaccgaggccgtgcagtgtctgtttggcgtctggccggggcgctgggaaggcaaaatttatatcgacggtcagccggtaaaaatcgacaactgccagcaggccattgccaaaggcattgctatggtgcccgaagaccgcaaaaaagacggcatcgtgccggtcatggcggtgggaaaaaatatcactctggcggcgctcagccagttttccggcgcgctgagcagcctggatgatgccgcagaacagcagtgtattcttcagtcacttgccaggctcaaggtgaaaacctcctcgccggaactggcgataggtcgcctgagcggcggcaaccagcagaaagcgattctggcacgctgcctgttgcttaatccgcgcattttaattctggacgaacccacgcgcgggatcgatatcggcgcgaagtatgaaatctacaagctgatcaaccagcttgtgcagcaagggattgccgtcattgttatctcgtccgaattgcctgaagtgctggggctgagcgaccgcgtgctggtcatgcatgaagggaaactcaaagccaacctgaacaaccagaacctgacgcaagagcaggtgatggaagctgccttaaggagcgaacgccatgtcgaaaagcaacccgtctga

SEQ ID NO: 524639 - DNA, 993 bp, Stenotrophomonas maltophilia
atgaggataaagaacctgaccctaacgctctgcactactctcctgcttgcaagctttgccggccacgccaaagaggtcaaaatcggcatggcgattgatgacttacgcctggagcgctggcaaaaagatcgcgatatctttgttaaaaaagcggaatctctcggtgcggaggtgttcgttcagtccgctaacggcaacgaagagacgcaaatgtcgcaaattgagaatatgatcaaccgtggcgtcgatgtgctggtcattatcccgtataacggccaggtattaagcaacgtggtgaaagaagcaaaacaggaaggcataaaagtcctggcttatgaccgcatgattaataatgcggatattgattattatatttcgttcgacaatgaaaaggtgggtgaattacaggctaaaagcttgatcgcaaaagtgcctcaagggaattatttcctgatgggcggctcacctgtggataacaacgccaaactgttccgtcagggacaaatgaaagtgctgaagccgtatatcgacgagggcaaaattaaagtcgtcggcgaccagtgggctgacggctggttaccggaaaacgcgctgaaaattatggaaaacgcgttgaccgcaaataacaacaaaatcgatgcagtggtggcctctaacgacgccactgcggggggcgccattcaggcgctgagcgcgcagggtctggctgggaaagtcgctatttccggacaggacgccgaccttgcgggtgtaaaacgcattatcgcgggtacccagactatgacggtctataagcccattaccgagcttgccaataccgccgccgaaattgccgttgagctgggcaatggccagcaacctaaagcagacgcgacgttaaataacggcctgaaagacgtgccagctcgcctgcttacccctatcgaagtcaacaaagagaatattgacgccacggtggtgaaagacggtttccataagaagagtgaactgtaa

SEQ ID NO: 524640 - DNA, 1386 bp, Stenotrophomonas maltophilia
atgtctattcactattactccagaagcaagaccacgccgcataccctgattatggagctcaatatgcaagcttatttcgaccaactcgatcgcgttcgtttcgaaggcacgaaaacgaccaatcctttagcatttcgtcactacaacccggatgagctggtgctgggtaagcgcatggaagatcacttgcgctttgccgcctgctactggcacaccttctgctggaacggtgccgatatgttcggcgtgggctcttttgaccgtccatggcaacagccgggcgaggccattgagctggcgaagcgtaaagccgacgtcgcgttcgagttcttccataagctgaacgtaccgtactactgtttccacgatgttgacgtgtcgccggaaggggcgtcgctgaaagagtatctgaacaattttgcgcagatggtcgacgtgctggctgaaaaacagcagcaaagcggcgtgaagctgctctggggtacggctaactgctttaccaaccctcgctatggcgcgggcgcggcaaccaacccggacccggaagtcttcagctgggcggcaacccaggtcgtgactgcgatgaacgccacgcatcagctgggcggtgagaactatgtgctctggggcggtcgtgaaggctatgaaacgctgctgaatactgacctgcgccaggagcgtgagcagattggccgctttatgcagatggtggtggaccacaagcacaaaatcggcttccgcggtacgctgctgattgagccaaaaccacaggagccaaccaagcatcagtacgactacgatgtcgccaccgtgtatggcttcctgaagcagtttggtctggaaaaagagatcaaagtgaacattgaggctaaccacgccacgctggcgggccactcgttccatcacgaaatcgcctctgcgattgcgctgggcatcttcggatcggtggatgcgaaccgcggcgatccgcagctgggctgggataccgaccagttcccgaacagcgtcgaagagaatgcgctggtgatgtacgaaatcatcaaagcgggcggtttcaccaccggcggcctgaacttcgacgccaaagtgcgtcgccagagcaccgacaaatacgatctgttctacgggcatattggcgcgatggacaccatggcgctggcgctgaaggtggcggcccgtatgattgaagacggtgagctggataagcgcgtggcgaagcgctacagcggctggaacagtgagctgggccagcaaattttgaaaggtcagttatcgcttgcggagatcgcgaagtacgctgaacagcatcagttggcaccgcagcatcagagcggccatcaggaactgctggaaaacctggtcaatcactacctgttcgataaataa

SEQ ID NO: 524641 - DNA, 1455 bp, Stenotrophomonas maltophilia
atgtatatcgggatcgatcttggcacgtcgggggtgaaagccatcctgttaagcgagcagggcgatgtgttagccacgcagactgaaaagttgcaggtttcacgcccgcagccactttggtcggaacaagatccggagcagtggtggcaggcgacggaccgcgcgatgaaagccttaggtgagcagcacagcctgcgcgacgtgaaagcgctgggcattgccgggcaaatgcatggcgccacgctgctggatagccagcatcgcgtactgcgcccggctattctctggaacgatggccgctgtgcggaagagtgcgcgatccttgaggagcgtgtgcctgcgtcccgcgagattacgggcaatctgatgatgcccggttttaccgcgccaaaactcctgtgggtgcagcgccatgagcctgagatttttcgtcaggtggcgaaggttctgttgccgaaagactacctgcgttttcgcatgacgggggatttcgccagcgacatgtctgacgccgcgggcatgatgtggctcgacgtggcgaaacgggactggagcgaagcgatgctggatgcctgccagctgacgcgcgatcatatgcctgcgctgtttgaaggcagtgatatcacgggcgctttgcagccttctgttgctgaacgctggaatatgccagccgtacctgtcgttgccggcggtggcgataatgcggcgggtgcggtcggcgtggggatggtggagacaggacaggccatgctctcgctcggcacttccggcgtctattttgccgtcagtgacggctatcgtagtaaccctgaaagcgccgtacacagcttctgccacgcgttgccgggtaaatggcatttgatgtcggtgatgctgagcgcggcatcctgcctcgactgggcggcaaagctgaccggaatggcggacgtcccggcgcttatcacagcggcacagcaggcggatgatactgccggtgcggtctggtttttaccgtacctttccggcgagcggacgccgcataacaacccggaagcgaaaggggtcttcttcggccttacccatcagcacggcccggcagagctggcgcgcggggtgcttgaaggggtcggttatgcgttggcggacggcatggatgtcgtgcatgactgtggcctgacgccatccagcattacgttaattggcggcggggcacgaagcagctactggcggcagatgctttccgatatcagcgggttgcagctggactatcgtactgggggagatgttggtccggcgctcggtgcggcacggctggcgcaaattgcgctgaaccgggataaaccactgccccagcttttgccccagctgccgcttgaacagcagcatcgtcctgatgcgaaaaatcatgctcgctacgctgaaagacgagacgttttccgcaaaatctatcagcagcttttaccgctaatgtcataa

SEQ ID NO: 524642 - DNA, 996 bp, Stenotrophomonas maltophilia
atgcagtcaaaaattaactggattgataacctgcggggaatagcctgtctgatggtggtgatgatccacactacgacctggtatgtcacgaacgcgcacagtatcagccctgttaactgggatgtcgccaatattctgaactcagcctcacgcgtgagcgtcccgctgttctttatgatttccggttttctcttttttggcgagcgtagcgcgcagccgagacatttcatccgtattgtctcctgtttgctgttttacagcgccatttcgctgctctatatcatcctgttcacttcaattaatgctgaacgttccctgctcaatttgttgcaaaaaccagtgttctatcatctgtggtttttcttcgcgataatggttatctatctggtttcgccgttaattcaggtaaaaaacgttagcggtaaaatgctgctggccttgatggtaataatcgggatcgtggcaaacccgaataccgtctcacagaaaattgatggctttgaatggctgcccgttaacctctatatcaacggcgatacgttttattacgtgctgtacggcatgctggggcgcgccatcggcatgatggagactcaaaagagaggaataaactggctttgcgcggcagcatttatcgccggtgtgtttattatctctcgagggacgctgcacgagctgcaatggcgcggaaactttgccgatacctggtatctctactgcgggccgatggtctttatctgcgcggtttcgctgctgaccctgtttaaaaacaccctgaatgcccgcccgcttccggtgctggggtttatctctcgccactcgctgggcatttacggttttcacgcgctggtgatccacgccctgcgcacccgcggcgttgagcttaaaagctggccggtgctggatattgtctggatatttaccgttacgctggttgtcagcctgctgctctcaatgctgctgcaacgcatcgatacacgcaggtttgtgagctaa

SEQ ID NO: 524643 - DNA, 207 bp, Stenotrophomonas maltophilia
atgagcccggagcgttccctgaatatggaacagctgtgcagggatcaggcggctcaacgttataattccgaagcacagaaaattcatattaacggcttcgagcgctttcagggcagctatgaactgaaaggctatacggcgcgtaaagagggctttgtctgctcttttgatgcagacggccagtttttacatctctcaatgcgctaa

SEQ ID NO: 524644 - DNA, 912 bp, Stenotrophomonas maltophilia
atgcaaaagtttgataccaagaccttccagggcctgatcctgaccttacaggattactgggctcgtcagggctgcaccattgttcaacctttggacatggaagttggcgcaggcacctcacacccgatgaccagcctgcgcgcgttagggccagagccgatggcgaccgcctatgttcagccatcccgtcgtccgaccgatggccgttacggcgaaaacccgaaccgtttgcagcactactatcagttccaggtggtgattaagccatcacctgacaatattcaggaactgtacctcgggtcactgaaagagctgggtatggatccgaccattcacgacattcgtttcgtggaagataactgggaaaacccaacgctgggtgcctggggtctgggttgggaagtgtggctgaacggcatggaagtgacccagttcacctacttccagcaggttggcggtctggaatgtaaaccgatcaccggcgaaatcacctatggtctggaacgtctggccatgtacattcagggcgtagacagcgtttacgacctggtctggagcgacggcccgctgggtaaaaccacctacggcgacgtgttccatcagaacgaagtggagcaatccacctataacttcgaatacgcggacgtggacttcctgttcacctgcttcgagcagtacgagaaagaagcccagcagctgctggcgctggagactccgctgccgctgcctgcctacgagcgtattctgaaggctgcccacagcttcaacctgctggatgcccgcaaagcgatctccgtgactgaacgtcagcgctacattctgcgtattcgtaccctgaccaaagccgttgctgaagcttactacgcgtcccgtgaagcccttggcttcccgatgtgcaaccgaaacaaataa

SEQ ID NO: 524645 - DNA, 2070 bp, Stenotrophomonas maltophilia
atgtctgagaaaactttcctggtggaaatcggcactgaagagctgccaccaaaagccctgcgcagcctggctgaatctttcgctgcgaacgtcactgctgagctggataacgctggcctggcgcacggtaaaattgagtggtttgctgcaccgcgtcgtcttgcgctgaaagtggcaaatctggcggcgtctcagccggatcgcgaagttgaaaaacgtggcccggccattgcccaggcgttcgacgcggaaggcaagccgagcaaagcggctgaaggctgggcgcgcggctgcggtatcaccgtcgatcaggccgaacgtctgaccaccgacaaaggtgaatggctgctgtatcgtgcccatgtgaaaggcgaaagcgcggaagcgctgctgccagatatgattgcgacctcgctggctaagctgccgattcctaagctgatgcgctggggagcgtctgacgtacactttgtgcgtccggttcacaccgtgaccctgctgctgggcgataccgttattccggcgaccattctgggcgtggcgtccgatcgcgtgatccgcggccatcgctttatgggcgagccggagttcaccatcgacaatgctgatcagtacccgcagatcctgctggagcgcggtaaggtcattgctgactacgaacagcgtaaagccaaaatcaaagctgacgccgaagaagcggcgcgcaaaattggcggtaatgccgatctgagcgatagcctgctggaagaggtgacctctctggtcgaatggccggttgtgctgaccgcgaaattcgaagagaaattcctggccgttccggctgaagcgctggtgtacaccatgaagggtgaccaaaagtacttcccggtttacgccaacgacggccagctgctgccaaatttcatcttcgtcgcgaacatcgaatcgaaagatccgagccagattatctccggtaacgagaaagtggtgcgtccacgtctggcggacgccgagttcttcttcaacaccgaccgtaaaaaacgtctggaagataacctgccgcgtctgcaaaccgtactcttccagcagcagctgggtacgctgcgcgacaagactgaccgtatcgcggagctgtccggctggattgcccgtgaaattggcgccgacgttaaccacgctacccgcgcgggcctgctctccaagtgcgacctgatgaccaacatggtgttcgaatttaccgacacccagggcgtgatgggcatgcactacgcgcgtcatgacggcgaagcggaagacgtggctgtggccctgaacgagcagtatcagccgcgctttgccggtgacgatctgccgtctaacccggttgcctgcgccgtggcgattgccgataagatggacaccctggcgggtatcttcggtatcggtcagcatccgaaaggcgacaaagacccgtttgcgctgcgtcgtgctgcgctgggcgtgctgcgtatcatcgtagagaagaacctcaatctcgatctgcaaacgctgaccgaagaagcggtccgtctgtacggcgataagctgaccaacgcgaaggttgtggatgatgttatcgactttatgctcggtcgtttccgcgcgtggtatcaggacgaaggttactccgttgataccattcaggcggtgctggcgcgtcgtccgacccgtccggcagatttcgatgcgcgtatgaaagcggtatcccacttccgtacgctggaagcggcgtctgcgctggccgcggccaacaagcgtgtatccaatatcctcgcgaaatccgacgagacgctgaacgaacgcgtaaacgctgcaaccctgaaagagccggaagagatttctctggcgatgcaggttgtggtgctgcgcgacaagctggagccgtatttcgcggaaggtcgctaccaggaagcactggtggagctggcggagctacgtgacgtcatcgatgccttcttcgagaaggtgatggtgaatgtggaagataaagagctgcgtattaaccgtctctcgatgcttgagaaactgcgtgagctgttcctgcgcgtggcggatatttcgctgctgcaataa

SEQ ID NO: 524646 - DNA, 1164 bp, Stenotrophomonas maltophilia
atggaaaaggttgtcattgttgatgcaattcgcaccccgatgggccgttcaaaaggcggtgcattccgtaacgtgcgtgcggaagatctctcggcgcacctgatgcgtagcctgctggcgcgtaacccggcgctggaccctgctgcgctggacgatatttactggggctgcgtccagcagacgctggagcagggtttcaacatcgcccgtaacgcgtctctgctggcggagatcccgcattcggttccggcggtcaccgtcaaccgtctttgcggctcgtcgatgcaggcgctgcacgacgcggcacggatgatcatgaccggcgatgcgcaggcctgtctggtgggcggcgtggagcacatgggccacgtgccgatgagccacggggtcgatttccatccgggcatgagccgcaacgtggcgaaagccgccggtatgatgggcctgaccgccgagatgctctcccgtctgcacggcatcagccgtgaaatgcaggatgcctttgccgcgcgctcgcatgcccgcgcctgggccgccacgcagtctggtgcctttaagaatgagatcatcccaaccggcggtcacgacgcagacggcgtactgaagcagttcagctacgacgaagttatccgtcctgaaaccactgttgaagcgctttctaccctgcgtccggcgtttgatccggtcaccggcacggtaacggcgggcacctcgtctgccctgtccgacggtgccgccgccatgttagtgatgagcgaaagccgcgcccgcgaattaggcctgacgccacgcgcccgcgtgcgttcgatggcagtcgtgggctgcgatccttccatcatgggttacggtccggtcccggcgtcaaaactggcgctgaaaaaagcggggctgagcgcaagtgatatcgacctctttgagatgaatgaagcgttcgccgcgcagatcctgccgtgcattaaagatctggggctgatggatcagatcgacgagaagattaacctcaatggcggcgcgatcgccctcggtcacccgctgggctgctccggggcgcgtatcagcaccacgctgatcaacctgatggaacgcaaagatgcccagttcggactggcgacgatgtgtatcgggttgggtcaggggatcgcgacggtgtttgagagagtgtaa

SEQ ID NO: 524647 - DNA, 1731 bp, Stenotrophomonas maltophilia
atgccgcgcatgttgggtgccgacagcgcgctggaaatcattgccgcaggtaaagatgtcggcgcggaacaggcgcagaaaatcggtctggtggacggcgtggttaagcctgaaaaactgattgaaggcgctgtagccattctgcgtcaggcgattaacggcgatctcgactggaaagccaaacgtcagccaaagctggagccgttgaagctcagcaaaattgaagccaccatgagcttcaccatcgccaagggcatggtgatgcagacggcgggtaaacactacccggcgccgatcacggcggtgaaaaccattgaagcggcagcccgtctgggccgtgatgaagccctgaagctggaaaaccagagctttgtcccgctggcgcacaccaacgaagcccgcgcgctggttggtatcttccttaacgatcagttcgtgaagggcaaagccaaacaactcaccaaaaacgttgaaacgccaaaacacgcggcggtactcggagcgggcattatgggtggcggcatcgcctaccagtctgcctggaaaggcgtgccggtagtgatgaaagacatcaacgagaaatccctgacgctgggcatgaccgaagcggccaagctgctgaataaacagcttgagcgcggcaaaattgacggtctgaagcttgcaggcgtgatctccaccatccagccagtactggaatacagcggtttcgaccgtgtggacgtggtggttgaagcggtcgtcgagaacccgaaagtcaaaaaagcggtgctggccgaaaccgaagacaaggtacgtccggaaaccgtgctggcctctaacacctccaccattcctatcagcgaactggcgagcgtgctgaagcgtccggaaaacttctgcgggatgcacttctttaacccggtgcatcgcatgccgctggtcgaagtgatccgtggggaaaaaacctccgacgaaaccatcgccaaagtggtggcgtgggcgagcaagatgggcaaaacgccaatcgtcgttaacgactgcccgggcttcttcgttaaccgcgtgctgttcccgtacttcgccggtttcagccagctgctgcgcgacggcgcagacttccgcaaaatcgacaaagtgatggaaaaacagttcggctggccgatgggcccggcgtacctgctggacgttgtcggcatcgacactgcccatcacgcgcaggcggtgatggcggcgggcttcccgcagcgcatgcagaaagattatcgcgacgccattgacgccctgttcgacgccaaccgctttgggcagaaaaacggtctgggcttctggcgctataaagaagacagcaaaggcaaaccgaagaaagaagaagatccggcggtggatggcctgctggccgacgtcagtcagccaaaacgcgacttcactgacgatgagatcatcgcccggatgatgatcccgatgatcaacgaagtagtgcgttgcctcgaagaaggcattatcgccagcccggcagaagcggatatggcgctggtgtacggcctcggcttccctccgttccacggcggcgcgttccgttggctggatacgctcggcagcgctcgctatctcgatatggctcagcaatatcagcacctcggtccgctttatgaggtaccggaaggtctgcgtaacaaagcgcgccataacgaaccctactatccagcagttgagccagcccgtccggttggcacgctgaaaacggcttaa

SEQ ID NO: 524648 - DNA, 876 bp, Stenotrophomonas maltophilia
atgaaaatacttcccgttatctctcccaaaggtggagaaggcaaatccacgtttgctgcttaccttgccggttttcttgccgatgccggcctgaacacccttcttgtggatgcagactattcccagcccacagccagcagtatcttcgcgctggagcatgaatcccctttcggtctctatgaattgctgatgcagatggtcagtgaccatacgcaatgcatttcgcagaccgccataaaaaatctcgatgtcatctactctaacgacccggacgaactgttgccgaccgcgatgctccacgctgcagacggccgtctgcgcctgcgtaacatacttcagcatcctttctttaaccgttatgacgtcattattgtggattcgaaaggcgcaacaggcgtcatgaccgagctttccctcctttcctctaccggtaatgtgatgggcgttgttaaacccatccttccggatgtccgtgaatttatccgcggctcccttcatatgcttacccgcctgaaaacctatgaaaattacggtatccgccttcctgatatttccattctcgtcaactgtatcgaaaacactctgcttgaccgtgaagcaatggacggtcttgccgccatcattaacgaaaaacattacgacgcctctgcgctgggcaaccgtgacgtttatcgtttactcgatacccgtatcgaggcgctggatattttcaaactggggcacgtcaagcagcagcccgtgcatcgtctggaatacaaaacacgccgcaaaggtccggccgcagccgtcaccatgcacgacctcgcgtctgaactgttccccgagtggcagagccatttcagtgacgttctgacccgggaggtgcgtcatgtctga

SEQ ID NO: 524649 - DNA, 1371 bp, Stenotrophomonas maltophilia
atgtctgagatgatgatgccctgctcttatgaggctgagcaggccgtactgggcggactgatgcttgataacgaccggtgggatgaggtgatactgcaaatctccccggaagatttgttttcccggccgcaccgtatggtctttcgcgtgatggccgagctggccggagaagggctaccgctcgatctcatcactattacggaacggctggagaacagaggcgaccttgaacagtgtggcggctttgcttatctggctgaaatgagtaaaaacacgccgtctgcagccaatatcctggcatacgccggggtggtggcggagaaaagccgcctgcggcagctgatgactgtgggtaacagtcttctttccgatgtgcaagccccgaaagccagctcggcgggcattcttgagtcggccgaaggtaagttgtttaacattgccgaacagggagccatgcagctcaacagtgagaccggtgttaacgaggcgctggataaactgctgacgcagctggaaagcatgtccgccagtgacggcctcaccgggacaccgacagggttcagtgaactggacgcgatgacctgtggtctccagcccggcgatctggccctgctggccgcccgtccttccatggggaaaacgtcgctggccatggccgcctgcacagcggccgtgagcgcaaaacctgacgatcacgtctttgtgttcagtcttgaaatgccctcagagcagctgatgatgcgcctgctggcgatggaaggccgggtggaactgtcccggcttcgcagcggcaacatggatgatgaagactgggctcgcgtgtccgaggcaaccggtcgcattattgagtggaaaaaccgtctgatcattgatgataccagttaccagaccccggccacactgcgcgcccgcgcccgtcgctatgtccgcaaatacggcagaccctctctcatcatgctggactatctgcagcttgtccgctcccccgagcaggaaaaccgcacgcaggaaatagcggaaatttcccgctcgcttaaggcgctcggtaaagagctgggctgtccggtactggcgctttcccagctcaaccgcctggtggagcagcgggccgataaacgccccaataatggtgacctgcgtgactccggtgcgctggagcaggatgcggacctcatcatgtttatttaccgggatgaggtttataaccccggcacccctgatgccggggtggctgagatcattgtcggcaagcagcggcaggggccaaccggcacggtaaaagtcaaatttgacgggcgttacaccctcttttcggagtttcaggaaggcagctatgacttcggttaccgcagcgggaggaaacaggcatga

SEQ ID NO: 524650 - DNA, 1701 bp, Stenotrophomonas maltophilia
atgagccgtaaaagttctaatgtgggggctgccatgctgcagcccggacgccagtcgcaggcggccggcaatatcagcgtcatgccggcggctgaaatgcccatggtcctgacgctcgaccagttaagcccgaatcctgataatccgcgaacatcacgcaatccgcgttatgacgatatcaaggcttccatccgttcgcgcgggctggacaccgtgcccaaagtcacccgtgacccggatggtgagcccgatatgtacatcttcagcgacgggggtaatacacgttatcagatcctgtcagaactgtggcaggaaaccggagaagaccggtttttccgcgtccatgtgttgttcaagccgtggccgggacggctgcagtgtgttattggccatctggcagagaatgaagtgcgcggggagctgagttttattgaaaaagcgcaggggatccacaaagcccgctctatatatgaagagcagatgggaaagacggtttcgttgcgtcagttgtcagagctactgacccgtgaaggtttgccagtccattactcaacagtcagccgtatggaagatgcgctgaaatatctttatccgtggatcccagacctgcttgagtccgggcttggcaggccacaaataacgtcactgctggcgctccggcatgatgcggaacgcgtgtgggatgagttttgcctgatttcagacacaggcgataaatccttcagcgacgtttttggccagtgttgtggccgtttcaactccccggaactgtggtctctggagatgtttcgcgatgaatttattggtgatttactgcaggcgttaccccatccggaactggactatgaccgctggatgatggaactcgatcctaaagaacgcaaccgcagacatcactttggcgagccggagacggttgcctttcccgccgcaaacaagtctgttaatgctgatcacgccctgcataccacaggctcagatgagagtgaaggcgtcccgctacctgtctccagttcacgtcctgaggtctcaggaggggctgtaacgcccgttccgggtaatgcgtcttctccttctgaaacaccgattaatgagccccctcggcatgaggttcagccagatatgtacggtgccgcgccggttatttcaggtgagagtggggatgttagcgggctggttaccctctccgatgggtacggagaagagaatggtggagaagaggacaatggggaggatggcctgctttctcttttaacaccagaacctgaagttgtcctgcaggatgacgcgccggtgagtaatgacagcatctggcatgtgccggcccatcaggacgatatcgaacacctgcagaataccgcttttcgtctggcatgggagctgggtgaggtccttggctgcgaagatgaaattcttcctcaacgcgacaaggacatgtctgccggttacgtcggggcaggtgaggtgtgttctgaagccgccgcatttctgctgggcctgaccggcgaagcgcctgtgctgcatccggcggcaggggtgtgtggtctgccggagcttttcaccggcggcccgggtgagggggaagcacctgccctgacagatgaagatgctctgaaactgctccgcctgatgcgcgttatgcgccgtctccgggagctgcaacgcggtctgaagtacggggaggataacagtgatgaataa

SEQ ID NO: 524651 - DNA, 711 bp, Stenotrophomonas maltophilia
atgaataactcacagcgacagttgcgactgctgaatcttgtcaggaaactgctgaagctgggccgcagcaacagtaatgcccatgaggcaggactggccctgcagcgtgcccagaagctgatggccagatacggtatcagcgagcttgatgccggccttacatccgtgcgcgaagcgtcttcccgcacggccccttcggatgctgaaaaagttccggaatggatggtgacccttgtccggggcgtctgtcatgcctttggctgccaggcttattactcatggcgtcagacctctgccgggtatcgccgttcggtaaccttttacggattcagtgaaaaacctgagatagcagcctatgcctttgatgtgctgacgcgccagctgaaagatgccacaaattcttatctcaaaacccagagtaagcggctgaaactggccacacgccgggcgagagcggagcagttccgtgacggctgggtatgtggggtgcgtgaggtgatatcggcaactgacatcagcagcgaggagcagcaggtgatgagtcactggctggaaagccgcagtatgaaaacagtcacaacccgtgaactgaaagcctgccgcggggcggatacagcacgttatcaggggtatgaagccggacaaaatgcccgtcttcatcagggtgtcagcggccggggtccggcagccattggttaccgtcaggattaa

SEQ ID NO: 524652 - DNA, 591 bp, Stenotrophomonas maltophilia
atgatgaacagtttatctcaggctgcaaacggattattgatgcagctggttatggatctcagaagtggctatctccgccgctgcgaatcgctgggactgaaccgcgaggaaatgcagatgctgcaggggctctcgctcgaagagcttcactacctttccggcagtgaggtgtcgatcatcagtgtgggcatcaatcacggcaatctggtgcgcatgctacagcaggcccggacggaacagaaacgactccagcgtatcgatcgggcgctggcgctgggcggctccattgaactgatggccaattacttcgggctctccagtacggacgtggcggcccgccgtcgcattgccggtatcgatgtccggccggggcgcggtaacgcactgggtgatgaggaaaacgccgccctgtggcgtcagtggcaaaagtccggcgttgaagacgcggaaagtgctgacgggctggacgtaatgatgctggctgcagaacagatgaacgtctcgctgacgtcggtctggcatgccgtccgcggctggcacaagacccggcagccttctccggcccgaacgccggtaaggaagacggcatga

SEQ ID NO: 524653 - DNA, 249 bp, Stenotrophomonas maltophilia
atgaaatacagaatggttgcgccgggcctgcgggctccccatggtacgccgccgcaatgctgtcaaaaggcgttacgtcaggttcgccgtttccggcagggggcgcgtaattacacccggctcgatgagaaaggctgcggttactacaaaatcgatctcggcccgttctggcgtctgctgagtcgcaacgaaggccggacatggcttcttctcagccacgaacgctataacagcgccatacggaaatag

SEQ ID NO: 524654 - DNA, 1239 bp, Stenotrophomonas maltophilia
atgagtctgcctgcagaaagcctgattgcttatacgctggataaaatgaatgcccgccttgcggccagtccccggcgggatgatggcaggatacgtaacggcctgctgtttactggaaatgtgcatgattccattccccgccggctgttgctcgacacgcggttgtcaccactggacaagatgggctggatgatgatccggctgtatgcacaaaataatgagggggcggttttccccagctatgacgaactgcagctgcagcttgcctcacccggaaaggggaaagcctcaagggaaacggtaagccgcgtcctgcttatgctgcgaataaccggctggctcagcctctgtaaacgcgtgcgggatgataaagggcgggtgcgggggaatatctatgctcagcacgatgagcccctgacgttcagcgatgcggaaatgctcgacccccgcttccttgatacggtggcggatgcctgcctgagtaaaaaccggactatcagccagaccgcccgcgaagtgctcgacgatataaaaaacgaccccaccatgcgccattatcgcagccatcttgcgctgatcgaatcgcgtctggaccgcccacagacgcccagccagatggcgaaacatcatcaccgaataccctgtcccgcaccgggttcggaaaccgaactcagtcataaacggccaggaatcgccgctaaaaaacagggttcggataccgaactcagtccagaaaggcataacaactcactaagttcggaatccgtactgccagtaaaaacagtcagttatggccgggttcggaaaccgaaccattacgtacgtagtatcacacacagtgtgaataaaaatacgtacgtaccgggtaaacctgtgcttcccgacagtctgcatgaacttgttccggcagaagatattgccatgctgaccgcacagctgcaggcgttgcctgaggagcaggcacaacttgtgctgctcagcctgcaaaaggtgatggcacgccagcagctcagcaacccggtaggctggttgctggccgtgatgaagaaagcgcgtgagggcaggttatacgcgccccgtcagggtggcgatatatctgacagtgtcgggcaaaaaacagttcagcgtcccgaacagcaacaatggaaacccgaaccacgcgcctctgcccgcccggtatcggaggaaaatatcagggatctggtgaagaaaattcgggaaaaaatcataaattcatga

SEQ ID NO: 524655 - DNA, 726 bp, Stenotrophomonas maltophilia
atgtctgatggtaaaacaaagggcggaacgaccgcttcacgagcgggggccctacagtcctctgttaatatcctgctccatacacattatgcaatccggctttgggagggcaggaaacgtgatgctccggacgatacaggggtgaaaaaaaagaggcctgaaataatcagcatgccgcaagccattgcgcgagctggtaatgcttcccgagactcagcggcagataatccctatgccgatatggctctggtacggctcgaagaagccctgcaacgagcaacacttaaaattaatgaaaacttcagttcactggatgccatattgtcagccgtacccaaaggggtaacgctctcggaagttgaatcagccgatccgttaaatgtcagcgttttcagccgttcaccgttaggataccggtgcgtatggcttctggttggatatgatcagttagcaatgaaagctttccaggcttttcattacgggctgatttcgcgttcgcaacgtgacactatcctggacaatggtggccatgctgttcgtcaggtctatggcgtgattcagccttaccgaacacttgcagtgactcgccgtgatattgcagaaaaaaccacgcaagggcttgttgccattgagcgaaatggcgaacctgatccggatgtgttaagcggtaaaaaacgctcttcgttctcacctccgcttaaaaacaacatagcagaggaggaataa

SEQ ID NO: 524656 - DNA, 555 bp, Stenotrophomonas maltophilia
atgattcgtcctgtgttcctcctcacctccttctttttactgagcggatgcgcaacaacggactgggctgcgattaataaacaggtcagtgacacagccgcaaacctgacaaaaacgttgggcggcaacagcagcggagaaagtggcgggatgccgctgatgagcccggcagggcaacaggccatgcagtccgtcgataaaacgttctccgtgccggtcgatgtggatacggcagcggcccgcttaaagcggcactataaattcatttccacgcaggagcttgagtccatgcgccaggcagcaaatgacggggactggaaagcggcggctgaagatgatgcgcatcccgtctgggacgccatgccgggcagctactacaaaatgggctccgactggaacggacgtgatcacctggatatcgaaatcgaaaaaaacgggtccggcagcaggctctatgttgtctatcgctcatcatcatcacagcgcctggcccggtccggcgtcacgaaactgatgaatgatgtccgcgctgttgcggcgggtgaaaaaagctga

SEQ ID NO: 524657 - DNA, 2010 bp, Stenotrophomonas maltophilia
atgcaactctttctgtgtgaaaaaccctcccaggcaaaggatattgcccgcgtgctgggcatcagcaagcgtgagcagggatttatcagcggcggtaacatcgttgtgacctgggcggtcggccatttactcgaaactgccagccctgaagcctatggcgagcagtatggcaggccgtggcgtgccgatgttctgcctgtgctgcctgaggcctggaaaatggtcgtcaaggagcagacaaaatcgcagttcactgttatcagtaagctgctcaaaaaggcctctgaggtggtcatcgccaccgatgccgaccgcgagggcgaggtgatcgcgcgtgagctgctggaatactgccgctacagtggcgcggtacgccggctctggttgtcagccctggatgaggccagtgtgaaggaagcactgggcaatattcttcccggagaaaaaacagccctgctgtacgatgccggcaagggccggagccaggctgactggctcatcggtatgaacctgacccgcctttatactctcaaggcccgtgactcaggggtgtcagaagtgctgtccgtcgggcgggtacagacgccgacgcttgccatggtggttaaccgggataatgaaattacgtccttcgtgccaaagccctggtggcaggtacatgcgcttattgaaaaagagggcgtccggttccgggctggctgggtgcccgttgagcagtactgtgatgaggaaaagcgttgcatcaatcctcaggctgcccgggcggtgggacagctgtgtcagcagcagggcagggctgcggtactggaggtgacacagaagcgggagaaaacggcggcacccctctgttttgacctgggcacccttcagcaggtctgttcccgaaaattcggcatgggcgcaaatgatgtgctcgccattgctcagtcactttacgaaacccacaaagcgaccacctacccccgtacagactgcggttttctgccaacttccatgcagcaggaaatatccgacgtgctggcggcagtggcgaaatccgatccggctgtggccccggtactgaatcagctggacaggcagtttgtctcgcgtgtctggaatgacaaaaaaatcaccgcgcaccatgccatcattcccacccgacaggcatttgatttgtcacgcctcagcgccgatgagctgaaggtctaccagctgattcgccagcattatttcgcccagttccttccgctgcaggaatctgacgtgacggaggcctctttcaatatcggtggacagctgttccgtacacgcgggaaagtcggtgtggtgacgggctggaagtcattgttcctggctgaaaaagatgacgatgaagaggacgtcgacggtgacagtatggcgctgccggcgctggcaaaaggggatatttgcgctgtcaccggttctgaggttaaggatatgaaaaccagtccgcccaaaccgttcacggaggggacgctgattgctgccatgaagaacgcggccagtttcgtcagtgacccgaagctgaagaaagtgctgcgtgataacgccggtctgggcacagaggcgacgcgtgcggccgtgcttgaaaccctcttcaaacgacactatctggagaaaaaagggaagcacatccactcaacgcagatggcccgggagctgattgcggccctgccggaaacgctgacgagcccgggcatgaccgcattatgggagcaggcactggatgatatttcgcaggggaaaatgtcgcttgcggtctttatgcaaaagcagctgcagtggacccgtcaccttgtcgaaaaaggccgccaggacagtgtgaaaattactgctcccgtcacgcctccctgcccgttatgcaaaggacccccgcgtaaacgtaaaggtaaaaatggtgattttggggggtgcatacgctatccggactgtgagggaattatcagtacaggtaagaagaaagcagcgaagcgtaaaaaaacatcggttaaggctaaaacagaataa

SEQ ID NO: 524658 - DNA, 471 bp, Stenotrophomonas maltophilia
atgtctgcaaacaatacttctgcatctgcaaaatctgagtacttcaacctgactattaaaggcatcgggtatctcagcaacatccgccaggttaaccatcagaatggctcgttcctcagctgcgtaatcaatgcactgagcggtccgactgacaatccggcctacgtccgttttgacatttctgtcgcaggtaaagaggctaccagccttatcgcccgctgccagaaagccgtcgatgaagacaaaaaagtcctgctgggctttaacctgagtaatccgtccacggacatatttacgctgaacaagggcgagcatgccggcgaacagcgtgtcagtctgaaagcccgcctgataaaggtggactggatcaaaataggccaggacatggtctacaagactgaaaaatctgactccgtgccgccgcagaatggctctgccgcacaacaaaactacgcagaaaactcattctga

SEQ ID NO: 524659 - DNA, 537 bp, Stenotrophomonas maltophilia
atgtcctcacgcggcgttaacaaggtgattcttgtcggtaatctcggccaggatcctgaagtgcgttatattcccaatggcagtgcagttgccaccctttctctggccacgtctgagagctggcgtgataagcagtccggtgaacagaaagaagtgaccgaatggcaccgggtggttattttcggcaagctggcagaaattgcgggtgaatatctgcgcaaaggctcccaggtttacatcgagggccagctgcgcacacgcaaatggaccgatcagtctggccaggagaaatacatcacagaggtggtggtaaacattggtggcaccatgcagatgcttggcggtcgccagtccggcagcggtcagaatacgtcttcccggaatgactggggccagcctcagcaaccttccggaccgactcacagtggccaggcttccggcagcagtgccggtgcgccaccgatggacttcgatgacgatataccgttcattggattcgggtatggagtaccaaaatcggcaatccatgcactctga

SEQ ID NO: 524660 - DNA, 243 bp, Stenotrophomonas maltophilia; identical to SEQ ID NO: 108034

SEQ ID NO: 524661 - DNA, 249 bp, Stenotrophomonas maltophilia
atgactatttcagctaaacgggtcagcttcgatgaggccacgatgtgggttgaactcaacgacgcccgtaccatcggtgtgccgctggcatggtttccacgcctgttgcatgcttcaactgaacagcttaacagctatgaactgagtccccgtggtatccactgggacgcgctggacgaagacatttctattgcggggttgcttgaaggccgcggcgatgtgacccatcgtccccataaagtagcctga

SEQ ID NO: 524662 - DNA, 666 bp, Stenotrophomonas maltophilia
atgaaacgtaacacctctcacaacatattttcaccaggcaggcttgccactgttcttcccctgctgctccttgcgggctgtgtttcccagccgcaaaagttgcagcaacgtgagcctgcggacccgacacccggcaccaccgtcacccgcaacgttcagccggtctctccggacgagtatgcgcggacgccggaagtggtgcgctacgatcgttatctgctggtcagtaccgatccgcaggcggcccagcgtgaccctctctcgcaaattattgatattcgcatcccgtcatccctgcatcctactgtggcggatgcgctgcgttacgccctgcgccagtccggttattccctgtgcgcgaccggctccgccaacggcgtgctttaccgccaggcattgccggccgtccagtaccagctgggcccgatgcgcctgcgtactgccctgcaggtcctggccggtccggcctggcagcttgaggtggatgatgtacagcgtgtggtctgccacagcctgcgcgacggctaccagctgccggtctcccagcttccgccgccggtcagcacctggtccacgcctgcgccgtccgccgtgtcacaaccggccatcagcgcccctcagtcagtacccgttaaacctgtcagcggagggtttctgagaaaatga

SEQ ID NO: 524663 - DNA, 759 bp, Stenotrophomonas maltophilia
atgagcgaacagcaaccattccatactgaccccgctccggcccgtaaaagattcagctggcgtccccgccgccgcctcatctggggcgctgccagcggtgtggcgctggccggcattctggcgctgggctacaccgccttcagtctgggcatatcgaaccttgatgaacgccttgcacgccttgaatctcagggcagtacagcggccactgttgagacagtcgcggccctgcagtcagatgtgaccacgctcaaaaccggcctgcaggatacccggaaaaaacttggcgagatgcagcaggagctgagcgcagcagcgaaacaggccggcagcgacgacgccgtgcgtcagtcattgcgaacccttcaggacgcccagcaggggctggaaacccgcctgagtgcgctgactgagcagctgacagcgctgaaatcacagccggcacccgcacccgccgcacctgtcgcctcaccggtaaaaaaaaacgagcctgctgcaaaaaagccccgtcccgctgacacacgtcgttctgctccatcccttcgcgtggcccgcactgcgccttttgtgctgacgggagtggagaagcggggggcagagtcctgggctgccatcgcgccccggggctacagcaacctgtcgcaggtggccctggtcggagagggtgaaaccgtgtccggctggacgctggtcagtgccggttatggtgaggcgacgtttcgggttaacggccgccagaccgtgctcagagcagaataa

SEQ ID NO: 524664 - DNA, 723 bp, Stenotrophomonas maltophilia
atgaaactgaaacatacctttttagccgccatgctgctgagtcccctgaccctggccgcgaccacatcaggacagatggatgtcagccgacaggaatcaacacaacgggcggactccgcacagcaaaacctgcagcagcaggccggtcagtggggactcagtgccgacgattatcagcgttatcagcagctgatgaagggaccccggggtacccagtcgccgggtctcgatccgctttccaccctcggtatcgaggcgcagacgccggcagagcgccgtaagtttgctgaaaagtgggtgaaggaagagtttgcccgcacccagaaagagcttgatttccagcgtgaggtgaacgcggcctggcagcgcctgtatccgggcacactgccggtcaatatggggaacgcctccggcgtggcgcacgacagtggcggccggctggcgctgttcgtcaggtcaaaagactgcgcaacctgcgacgcgaaactgtctgccgtgctggctgacaaccggccggtggacatctatctggtcgacagccagggcagtgatgatgcgcttcgcagctgggcgcgggaccatcacattcccgtggaaaaggtccgcaagcgccagatcacgcttaaccacgacggcggccggtggatgcgctttggtaacggcctgatgccggttttactgcagcaggcgggagacggtaaatgggcaatcgcagcattctga

SEQ ID NO: 524665 - DNA, 636 bp, Stenotrophomonas maltophilia
atgggcaatcgcagcattctgaccggcgcactggcgctgggcttactgatggcggccgtccctgacggccatgctgaccagacggtgccggagggttacgtccgcgtggccatggcgcacggcgtgccccccgaagcgctttactcggtatcactgagcgagtcttcgcgcaaacttccccgcggaatacggccatggccctggaccatcaatgtggcaggcaaagggtatcgctatgagacgcgcctgcaggcctggcaggcgctgcaggtctttatgaagagtcacccgcttaagcgcatcgatgtcggtattgcccaggtcaatctgggctggaacggtcatcattttgcctcgacgtgggatgcgtttgacccttacaccaacctgaacgccgccgccaccattctgcgtgagtgctgggcgcgtaagccaggcagctggctggatgcggccggctgctaccaccatcccgcaggtggtcagcctgctgcacgttaccgcgccattgtgagagggcatctggcaaaaatcagccctgcaccccgcatttctgcgccggcagctgaagcgccccgctcggttgctgcgctcacccccgatccaggcttcgtctggactgaacccgggagataa

SEQ ID NO: 524666 - DNA, 534 bp, Stenotrophomonas maltophilia
atgaaaacgctgtccttactgctgtttaccctccttcccctgaccggccatgctgaactgaatgtgattgctgatctgggcggtgaagatgctgcgccgtattttgaggccgttaataaacagcccggcatgcccggcgtcagtgacgtacagccttcacgccagccggaccacggtgttccgctggctgacgggatggcgggtatgttacccgttaacacacctgaactgagcccggggaatacagcagaccggccgctgcagttgcccggcatcggggcgttgtttctgatcggggatgatgctctgtcccgtgaatggctgaaagccaatgccggcgcgctggctgaacagcatgcggccgggatgatagtcaacgtcacagacatggataccgtgcgcgagctgcgcgaactggcacccggtgtcagcctggccccggcttccggcagcgagctggcccgtcgcctgcagattgagcattatccggtactcatcaccgataccggcctgacgcagcagtttaagccgtaa

SEQ ID NO: 524667 - DNA, 573 bp, Stenotrophomonas maltophilia
atgagcacgccagatatcaacggtctgctgatggcacacccttatggggcggtcatactgatagtccttttcctggtggtgatggcctttctgaacctgcgctggcgtgagaaagccagcacccgccgtcaccggcgataccgggcaacggcggggcgggtactgattaaactgaccctcctgccgggagacgggcagcgtctgacctatctgcgcaaaatcagcccctatgtctttgaagagctgttgctgtctgcctttgaacgtcaggggctaaccgtggtgcgcaatgcctcctacagcggtgacggcggccttgatggccaggtcatcatcgacggcgagcactggcttatccaggccaaacggtacagtcgtgctgtttcccccgcacatgttgaggacttcgaccgacttctcctgcactccggccgccgggggctctttatccacacgggccgtaccggaaaaatgagccgcacccttcatatggcgtcaccgcgcctgcgcatcatcagcgggcaacgcctgctggccattctcgccgggcaggacgtccggcagtatctctga

SEQ ID NO: 524668 - DNA, 489 bp, Stenotrophomonas maltophilia
atgcacatcatcctgaacagcctgcgctacgctttgtggcttgtgttctgtttattccgtcatgccgttttcgtgcctgccgctttcggcggtgtctgcctgctcgcctggcttgttttcggccatccggtcagtgacctgaacgaccagttgcagaaggaggcaacggcatggcgcaccgcgccgcccggacattacatgtgggaggaatgcccggtgcctgataatgcggctccgcctgaggcaaagccggcagcctgtaccgtcactgccgtctccacagaaaccgcggcgaacaattacctgctgtcattgcgggccgtatggatcatttttttcatcctgtcgaatgttctgtatgtgctctggcgcttactggcggatgccctgcgttaccactccctttcctgcagggaagccggtgccgggaggggaacgtatatccgtatggccgacggtaaaattataaaggaggcagacgatgagtaa

SEQ ID NO: 524669 - DNA, 2100 bp, Stenotrophomonas maltophilia
atgagtaaccgttacgtcattgaggccctgctgcgtccggccgttgagctgaataccgccgtggtatcgggcatggcggcgtatgtctgtgtgcaggcaccctgggctgtcgctctggctccgactgtcagctatgtcaccgcagccgggtttgcggcgctggccgtcacccgcacgcatcaggggatgaagattattcgctaccgccggaatctccgccgcctgacgcgctatgtcatgagtactaaacagatccccgtcagtcatcgtcgcctgtttctaggccgggggttccgctggacgcaaaaacacacccagcggctgcaggatacgctgcgccctgaagtggcccgttacctgcagccaaaccgcttttacctgggggcgcgtcagctcgaaatgatgacagagcaccgtctgccctggctgggtaagctgctgagtgccgatacgccgctgaacccggtgcggccgttaccaccggtgggcggcaatccggcgctgcacggcatcgagcccgacgaaaaagacgtcaccctggctctgggggagcgcgttggccatacggtggtgtacggcaccacgcgcgtcgggaagacccggctggcagagctgctagtcacccaggatatccggcggggtgaagtcaccatcgtgtttgatccgaaaggcgacgcagacctgatgaaacgcgtctgggcagaggcccaccgggccggacgcggggacgagctgtatatttttcatcttggctggcctgaaatttcagcccgttataatgccgtcgggcgttttggtcgcgtgtcagaggtggcgtcccgcgtggccggtcagctgtcgggtgaggggaacagcgcggcattccgcgaatttgcctggcggttcgtcaacatcatcgcccgtgcgctggtcgccctgggtgagcgccctgactacacgctgatcatgcgctacgtgaacaatatcgccgatctctatatccgctatgcggaaaaaatcatccaggcgcagctgccggctctgcagacgcagattgagaataatcagcaggtgctgggagaggacgacgtgccccgtaacatgcagggtcagccggatgccttacgtatctgggccattgaggttgccctgagttcagaagagggtaaaaaactctatgatcccatccttgacgggctgcggtcagcggtacgttatgaccgtacttactttgacaaaatcgtggcgtcgctgctgccgctgctggaaaaactgaccaccggcaagaccgccgagctgctgtcgccggattatcaggacattgacgacacgcggccgatttttgactgggaacagatcatccgtaaaaaagccgtggtgtatgtggggctcgatgcgctcagtgacagtgaagtggcgagcgcggtcggtaactccatgttcgccgatctggtgagtgtggccgggcacatttataaacacggtatcaatgctggcctgccgggcgggaaagaagggaagtccctgattaacctgcactgcgatgagtttaacgagctgatgggggatgagtttattcctctcatcaacaaagggggcggtgccggcatgcaggtgacagcctatacccagacgtcttctgatattgaggcacgcatcgggaatgcggccaagacggcccaggtacagggtaactttaacaacctgattatgctgcgcgtcagggagaaccgcaccgccgagctgctgaccacgcagctgccgcaggtggagatttacaccaaaacgctggtctccgggcaccaggacacggcggatgtcaatgcagaccaggacttcacctcaagcacccaggaccgcgtcgggacggtaaaagtcccgctgctggagccggccgatatcgtgacgctgccaaaagggcaggcgtttgccctgctggaaggcgggcaactgtggaaaatccgcatgccgctgcctgccggggatgctgatgatgtgctgatgccggaaagtattgagaaaatagcggaggagatgcggcgcagctatcacagcggcgaatcctggtggcgggacggtccggccctgaacgtgccggtcacaggaggggcgaatggctga

SEQ ID NO: 524670 - DNA, 759 bp, Stenotrophomonas maltophilia
atggctgaggtaaaacgtcccccacagcagcagacgctgccggaacgcaagcacggcattctgtataatctgctctggggctggccatgggccctggtgggcgtggtgctgtcctcgctgctgctgagcctgctgattgaatatatcggcatcgccttcttctggccggaagccggggcggcgcacagtgaagcggtcatgaacaccgagctggggtggctgtccacagagttcacccgcagcctgctgctgtctgaaccatcggtgacggttgtgcgctgggtgagcaccgcctatcagtgggcctttgtggacagtggcttcctggactgggtccggcagcagtatgcacaccagatgcacagtgacaatgccgtcacccgggaaatcaacagctggagcggctggcttgccggctacctgcgtgaatacctgctggccacggtatggatcagcattatcaccctggtacgcgtcaccatcctggtgctgtccgtgccgttgtttgtgctggtcgtggtggtggcgctggttgaggggctggggcggcgtgatctgcggcggtacggcgcggggtatgaaagttcgtttgtctatcatcatgccaagaagctggtcaaaccggccgctgtggtgcccgccatgctgtacctttcctggcccacggcagtctaccccaatctgctgttgttgccggcggctgttctgctggggatcgccgtaacggtgaccactgcgtcgttcaagaagtatctttaa

SEQ ID NO: 524671 - DNA, 348 bp, Stenotrophomonas maltophilia; identical to SEQ ID NO: 81043

SEQ ID NO: 524672 - DNA, 348 bp, Stenotrophomonas maltophilia
atgaactcacatcgtccggccatgcggcgcaaccgtcgtgtcccgggcatcactggcctggtattgctgacctttctggcatcagctgctgcacaggcatccgagaaagacgagcttgcgtctgttcagcgtcagctggaccaggttcaggcgtcgcttgaacgggcccgcgtggcggttgcacaggccgacccggctgaccgtggccgctttttctttgattaccgtcaggccacatccgatctcaacaccatccgcagcggcattgaccgctatctggagccctcccgcgcgcaaccgcgtgacccgtcttttgtggccggtaattaccggcgggagcggccctga

SEQ ID NO: 524673 - DNA, 243 bp, Stenotrophomonas maltophilia
atgcccatgacatccgaacaaacgaacgcgtttaaagccggctccggcagtcttgatgtgaacatccttcatctgctctgcatcggggcactgctggcgtttctttttttatgggccgcgtgggcgctgtcggatgtctggaccggctggagtaacaccaaagtgcgtgacgcggccctggggcgttttgccgtccgcaccgtgctgctgttgcttgtgtgtatctggatgtttgccagttaa

SEQ ID NO: 524674 - DNA, 387 bp, Stenotrophomonas maltophilia
atgcaccattctgagtctgttgttgcccgcctgcgccgtttcggcagtcgtacgctgacccgcgccggtacgcttgccctgctgggctggctcacctgcaaaccggcctttgcggatttgccaagcgttgaagcgcctgagtccggaggcggaagcgggctgtcgggacaaatcaagggctacctgcaggacggcattgttatcggggggctggtcgtggcggccgttgcctttatcaacgttgccattgccgccctgcacaccttcaccgaagtccgcaatgagaaagccacctggaccaaattcggggccattgtggtggtgggtgtggtgctgctggttgccgttatctggctgctcggcaagtctgccgacattctgctgtag

SEQ ID NO: 524675 - DNA, 357 bp, Stenotrophomonas maltophilia; identical to SEQ ID NO: 186797

SEQ ID NO: 524676 - DNA, 660 bp, Stenotrophomonas maltophilia
atgagccgttttcgccatgcggtaaaagaccgcgaccagcatattcagacgctgcgcatcgcctgcgccgtgctcgcctttttccttttattcacctgtgccggctggatgctggcgcccagcaagctgaccgtgcataacccgccggatttacgtaccggcagcacgcggccctggtgggaagtgccacccccgacggtctactcctttgcgttctacatttttcagcagctcaatgcctggccgaaaaacggcgaggtggattattccggcaaaatcaatgcgctgtcgccgtatctgacgccgtcctgtcaggatttcctgaaagcggatgcaaagaaacgcggtgacgccggggagctcaccgaccgcgtgcgcgtggtgtatgaagtgcccggtcgcggttaccagtcacagagcgtgaccgtacaggatcgcgatcactggattgcccgcctggacgtggtggccgacgaatatttccatgccgagccggtcaaacgcgccctggtacgttacccgcttaaagtggtgcgctgggaaggtgatgcggagcgcaacccgttcggtctggcgctggactgttatgccggtgtgccccagcgtctggaggcggcaccgcctgcacctaaaccggagaagtcaggagtgtttcagtga

SEQ ID NO: 524677 - DNA, 951 bp, Stenotrophomonas maltophilia
atgagtaaaaacccccactaccgcgccgggctgatggcgctgtccttcgccctgctgcccctggcaatgctggtatcacgtcctgccggcgcagatgagctgatgaaatgggagcgtattccgctgcagatccccctgaaggtggggcaggagcgggtggtctttgtggacaaaaacgtccgcgtcggttttccgccggcgcttaacggtaaactccgggtgcagagcaccgggggagccgtctacctgaaagccgacagcgcctttccgcagacgcgggtgcagctgcaggatgtggaaagcggcgaggttctgctgtttgatatcgccgccggtgaaaaagggccgactgagccggtgcggctggtctacagcggtgatgtcagcacgctgagtcacgccggcgatgcggccggtcagccaggtggtgcagaccgggctgcttccggatcaggctcatctgctcccaccggcagcgatgatggtactcaggcaaagcgtaaaaaaatccgctacagcgcccccatcccggtgctgctgacccgctatgccgctcagagcctttatgctccggcacgtacggtcgaggcggtcccgggtattcatccggtcaatcctcatctgccccgacgtgtcagcacgctgtatccctctgaaccattaacggtcacgccgctggctggctggggtgtggcaaaccgcagcgtggtggcactcaggctcacgaacaccggcagccgtaaggtcgttctggatccacgctcgctgcagggacagtttgtgtccgccaccttccagcaccgctgggtcggtcctgccggcacgccggaagacaccaccacggtgtatgtggtgaccgccggtcgtccggagagcgcatttattgctgagccgtctgcgctgcgtaaagcggcccgcacggtaaaacaggaggcccgccatgcagattaa

SEQ ID NO: 524678 - DNA, 1503 bp, Stenotrophomonas maltophilia
atgcagattaaatctaatgccctggtgaaaattatcgtgccggccgtggtgattgccgggctggccgtggggctcaaaagctgcaaaaacgaaccggcagaacaatctcaggcaaaacaaagcggcggccccctgcataatctctcgccggatgaactgaaggcgctgggtgtggaaggcgacacgccggaggacaccctgcgcacgcttatcggccggctgaacgatgtgcgtgaccgccagaaaacgctggataagcagaacgcggatttggtgaaagaaaacgagcggttgcgccgacgcaatcaggacgtttcaggacaggtgaatgaggccgttaatggtctgcgcgagcagtacgacaagcggcaggcgcagcttcagaacgaacaactgagcctgacggcgaaaatccaggagctgaccgacaaactcaaaaagcctgacaccgagaaaaaaacggcggacagcgatatcccgctggggctgggcctggacggcatgggcagcagtaccgggggggcggcttctcagggcagcgacggcatgatgtgggtcgcgccgacggaccagaaagagacggacccgcgggacgcggccagcggcaaggcatctcctcagttcccgacttcttttctgggtgaaaatgagctgacccgacagaaagcggcctatgaggagaaagtgaagggacgtacgaatgaaaaaggggcggaagagagcgcagagccggtttacacgctgccggaaaattccacgctggtcggcagccgcgccatgacggcactgcttggccgtgtgcccatcaacggcaccgtgaccgatccttatccgtttaaggtgcttatcggtaaggataacctgacggcgaacggcatcgagttaccggacgtcgaaggggcgattgtttccgggacggccagcggagactggacactgtcctgtgtgcgcgggcaggttaacagcgtcacctttgtcttttccgacggtacggtacgcaccctccccagacccgacgccagtaacaacgccagcgggcaaaataataacgctcaggctaaacaggataccggcaccagtggcggtatcggctggatttcggatgaaaacgggatcccgtgcattggcggcgaacgtaagtccaatgcctccacctatctgcccaccatttttggcctgtcggctgccggtgcggcgggtgaagcgatgagccaggggcagtacaccacacagaataacgtgaatggcatttccgccaccatgaccggcgacgccggacaggcggcgctggggaaagccatttccggcggcatgtctgaaaccaccgactggatcaaacagcgttacgggatgacgtttgatgccatttatgtgccgcctggtgcccgtctcgccgtgcatatcacccgtcagctggccattgattatgaagataagggccgtaaggtgcgctacgacttcaccctgccgggtggcatcagtgacaacggcggactggactga

SEQ ID NO: 524679 - DNA, 369 bp, Stenotrophomonas maltophilia; identical to SEQ ID NO: 81035

SEQ ID NO: 524680 - DNA, 411 bp, Stenotrophomonas maltophilia
atgtacagaacggttttcattctggccctgagctgtgtgatgctcagcggctgctcaacctccaaagaggaaatgctgccggcgggcgataacaccatgctggaactgtggaacggggcggacggtggcggcagtacttcccgccagtctgcggcggtccgcgacacgctgcgacgcccgctgactggcagcgaaacgcaggcggacgcgcaggccgaccgcagctacagccgtactcaggaaagcgaaatcacccagcagtttccccggctgcccaaccccgacatggtgatgtatctgtatccccacctggcagacggtaacacgccggtgccgggttacagcactgtgttcccgttctacagccagacgcagtatgccatgcctggcgagcgcacggaggccctgtaa

SEQ ID NO: 524681 - DNA, 2859 bp, Stenotrophomonas maltophilia
atgctttcactgtttacgcgtaataaatccaccgaccggcagacgccggttgatgacggccagtccgttcaggcagatgaaaccctgaccgcggccgtgaagggccggcaacccctgaagcgccccgggaaaatgacgcgccaggatgaggagaaggtttatcacgccagtccgtccatcattgactttttgccctgggcagaatttctcgatgaagagcagtgtctcctgctcgatgacggcgtgtcggtgggggccgtttatgatgtgacaccggtggcgaccgaagggcgaaccgaagagcgcctggaacagatccgggactcggttgaggatgcacttcaggacagctttgatgaacatgacgtgaatccctgggtcgtgcagttcttctgccaggacgaggacgacactgacgcgtacctggacaggctgcgcgggtatgtcaaaccacatgcacagcgcacggcgtttaccgacgcctggctgggtgaaatggagcgccatatccgcagtatctcccggcctgagggactttttactgactcgctgattaccggccagccgtggcgcgggcagcagcgccgcacccggatggttgtttatcgctggcttggtaaaagccgggatccgatgccgccggtggcgatgctcaatcaggtgtgcgaccgggtcgttaatgccctgggcggggcggggatccgctgcacccggcagaacggcctgcaggtgcatggctggctgctgcggctgttcaatccgtcaccggactgggtggagaaaaccacgctctatcggcaggctgcttacgcagacccgcgcgagacacctgaaggcaccgtgccggtcagcaatgattttgccgaaaccctgtggttcacgccgccggtttcagacccggaaaacggcgtgtggtggattgacaacaagccgcactgcgcggtggcggtggaaaaactgcgtacaccgccggagccgggcaccctgaccggcgagaaaagccggggtgaaaagaaaattaatgccctgatggatatgtttccggaagggaccatggtgtgcatgaccgtggtggtacagccccaggaccggcttgaagagcagtttaaccggctgtcgaaaaatgcggtcggtgagaataccgagtcgggccgcgtccgccaggatgtgaagacggtcaaagagtatctgggcaaccggcacaagctgtaccgggcggggatcaccttcctgctgcgcggcgacgacatgaccagcctgaagcgcaagcggctggagctgtccaccgtattgctcggggccggtctgcagccggtacggccggagtttgaagaaggtccgctgaacagctggctgcgggcgctgccgatgtgctttaacccggacagcgacagaaaacactggtatacccgtctgacatgggttcagcacctggcaggacttttgccggtaaccgggcgggaaaccggcacggggcaccccggcttcagctttttcaaccgcggcggggataccctgacattcgatccgctcaacaagctcgaccgcacccagaacgcgcatctgctgttgttcggcccgaccggggcgggcaagtcggccacgctgtgtgccgcgctctcccagctgatggccgtccatcgtccgcggctgtttattgcggaggccgggaattcgttcggcctgctggccgacttctttgacagcctcgggctgacggtgaataaaatcagcgtcaaacccgggagcggcgtcagtctgccgccgtttgctgatgctcacaaactggtggaagaaggcctggccgcccaggccgttgatgagagcgacctgccggatatcgacacggacgacgatggcgaggatgacaagcgtgacgttctcggtgaaatggaaatctccgcgcgcatgatgatcaccggcggtgacccgaaagaagaggctgaccttaagcgtgccgacagggcgatgatacgtgaggcgctgctgatggcggcacatgccacgtataaggaagggcggcagatgctgccgtctgacctgcagaaggcgctgtacgacattgcctctgacaacgatgagggcgtcatcaatgtccgcaatgcccagcgcaaggcgaaagcggcggaaatggcggaatccctgggcatgttcactcaggccgggagctttgaagcggagctgttcaaccgtgaaggggagctgtggccggaagcggacgtgacgctggtcgacctggggcatctggcgcgtgagggctacgaggcgcagatggccctgaccatggtctcgatgaccaacatgattaacaacatcgcggagcgtgaccagttcctgggccgggatattgtcttcacggtggatgaggcgcatatcgtgacggttaatccgctgctgtcgccgtacatgaccaaggtggtcaagatgtggcgtaagctcggggcctggttgtggctggccacccagaatcttaaggattacccagacattgccgaaaagatgcttaacatggcggaatggtggatttgtctgaccatgcctccggaagaggtcaaagatatcagccgttttcgcgcgctcacgccggagcaggaatcggtgctgctttccgccagtaaactgtcggggtgttatacggaaggcgtggtgctggcgaaacggatcgaagcgctgtttcgtgccgtgccgcccagtctcttcctggcactgggcatgacggaaaaagaagagaaagccgaacgccgggcgctgatgaatgaatttcactgcagcgaactggaggcggcaaaacgcgtcgcgcagaatctggaccgtctgcgcggtctgacggaaaaacaacaggagcctgccacggtatga

SEQ ID NO: 524682 - DNA, 378 bp, Stenotrophomonas maltophilia; identical to SEQ ID NO: 193626

SEQ ID NO: 524683 - DNA, 150 bp, Stenotrophomonas maltophilia; identical to SEQ ID NO: 193627

SEQ ID NO: 524684 - DNA, 1095 bp, Stenotrophomonas maltophilia; identical to SEQ ID NO: 193628

SEQ ID NO: 524685 - DNA, 2220 bp, Stenotrophomonas maltophilia; identical to SEQ ID NO: 193629

SEQ ID NO: 524686 - DNA, 573 bp, Stenotrophomonas maltophilia; identical to SEQ ID NO: 193630

SEQ ID NO: 524687 - DNA, 1140 bp, Stenotrophomonas maltophilia; identical to SEQ ID NO: 193631

SEQ ID NO: 524688 - DNA, 1305 bp, Stenotrophomonas maltophilia; identical to SEQ ID NO: 193632

SEQ ID NO: 524689 - DNA, 399 bp, Stenotrophomonas maltophilia; identical to SEQ ID NO: 193633

SEQ ID NO: 524690 - DNA, 993 bp, Stenotrophomonas maltophilia
gtgaatacaaaaccttcccgcatcagaaccacggtgtgctcgctggcggttgccacggtactgggtacggcaaccgcgccggcagctattgcagcacttaacaccgcgcagattattgccagcgccgtgtcgcaaaactgtatcagctggcgtgtgagtggcatctgttactggctgttctgcaccccctttggctgcaaggtgcgcacatcggtcaaagtcacccacttcattcctcagacagtcgtttcgacctatgtcgctccgggcggcaacccgtggcaggaaatggcgtttgtcagccagaccgccggcgggttagagagtgctgtgaccagcgggctttccggtgtttctgccggaggagccaatccggccgacatgaaaaatcccggccagcgcaagtctgccgtccgtttcaaatatgccgatgcgattggccacccggccacctccctgattggcggcagtattccgggctattcctgtgataccgcagccaccccgttaatgccttacttcctgagtacgctggattcggcggcctggcgcacgggcgtgccggagtccctctatccggaggcgcttgtgcccggccagcgggaaatcggcagtcaggccgcagcaaatatgtggggcaacgtctatccccgttcggggtttgtcagccagaccgatgatgataaagcctctgccgtggtggcacagcgtgtcgcagacattatcacccgcgccgggcagccgcatgtgtatcaggtgctcaaaggcaaccgtcatgacgggtactggccaccgggcgaggttaaggaaaacaccggcacacgcaatcacaaatggcagcggctggccccccacatgacacagtcatgtgccgtcttcccggacgggagccacaccgccgcgagcgacaacaacgaagcctttgcgttctggcagccctacagctgctgcaaacgacgcgggcagacatttctgggcagcactgatatctga

SEQ ID NO: 524691 - DNA, 1572 bp, Stenotrophomonas maltophilia
atgcagtttggcagtaagccgctgttcgaaaatatttccgtcaaatttggcggcggcaaccgttacggcctgattggtgccaacggtagcggaaaatccacctttatgaagatcctcggcggtgacctggagccgacgctgggcaacgtgtcgctcgacccgaacgagcgtatcggtaagctgcgtcaggatcagttcgccttcgaagagttcaccgtgctcgacaccgtgatcatggggcatgcggagctgtgggaagtgaagcaggagcgcgatcgtatctacggtctcgctgagatgagcgaagaagacggttacaaagtggccgacctggaaacgcagtacggcgaaatggacggttattctgcggaagcgcgtgcgggcgaactgctgctgggcgtcggcattcctgttgaacagcattatggtccgatgagcgaagttgcgccaggctggaagctgcgtgtgctgctggcgcaggcgctgttctctaacccggacatcctgctgctcgacgaaccgaccaacaacctggacatcgacaccatccgctggcttgagcagacgctgaacgatcgcgacagcaccatgatcatcatctcgcacgaccgtcacttccttaacatggtgtgtacgcacatggcggatctggattacggcgagctgcgcgtttatccgggcaactatgatgagtacatgacggcggcaacccaggcgcgtgaacgtctgcttgccgacaacgccaagaagaaagcgcagattgcggacctgcaatccttcgtcagccgcttcagcgctaacgcctctaaatcgcgccaggcaacgtcgcgtgcccgtcagatcgacaaaatcaagctcgaagaggtaaaagcctccagccgtcagaacccgttcattcgcttcgagcaggacaagaagctgttccgtaacgcgctggaagtggaagccctcaccaaaggcttcgatgaaggcccgctgttcaaaaacttcaacctgctgctggaagtgggcgagaagattgctatcctgggcgccaacggcgtgggtaaatctaccctgctgaaaactctggtgggcgaaatgcaaccggataccggtaccgtgaaatggtctgaaaacgcgcagattggttactacgcgcaggaccatgaatatgagttcgaaaacgatctgaccgtcttcgactggatgagccagtggaagcaggaaggcgacgacgagcaggcggtacgcagcattctggggcgtctgctgttcagccaggacgacatcaaaaagcccgccaaagtgctctccggtggtgaaaagggccgtatgctgttcggcaagctgatgatggaaaaaccgaatatcctggtgatggacgaaccaaccaaccacctggatatggaatcgatcgaatccctgaacatggcgctggagatgtatcagggcaccctgatcttcgtctctcacgaccgtgagttcgtcagctccctggcgacccgcgtgatcgaaatcacgccagagcgcgtggtggacttcaccggtaactacgaagattacctgcgcagtaaaggtatcgagagttaa

SEQ ID NO: 524692 - DNA, 2364 bp, Stenotrophomonas maltophilia
atgaaaaccctgaaaaactggaccatcgatacgcagtcggcgaatcatctggaactgctggtggataaccagcaccgtctgtgcctgtatgtgctggaagagaatctgttccgcgtgctgatcaagcgtaaaggccagctggcgctggaccgcacctggagcatcgcgccggaacaagacgtaccgtgggaaggccgccgtcgtgacgatgtcagcggcttcacctgcccggcctggacactgacgcagcagggcgatgcgttaaccgtagcgaccgaacagctgcgcgtcaccgtccaccagcccctgtggctggagtggcactaccgcaatgaagcgggcgagtggcacccgctggttaacgaccgtcccaccagcgcctacctgctcaatgcccacggtgacggcgtggcgcactatctcagccgtcgcaaggatgaacgtttttacggtctgggtgagaaagcgggggatttacagcgtaacggcaaacgctatgagatgcgtaacctggacgcgatgggctataacgccgccagcaccgatccgctgtacaagcacatcccgttcaccctcacccgtcgcgatgacgtgagctacggcctgttctacgataacctgagcagctgctggctggatctgggtaacgagatcgacaactatcacaccgcctaccgccgctggcaggcggaagcgggcgatattgactactacctcttcaccggcaagcgcgtgctggacgtgacgaaagccttcgtgcgcctgacggggaaaacgctgttcggaccgaagtggagcctgggctacagcggctcgaccatgcactacaccgacgcgccggacgcgcaggaccagctcatgaacttcatccgcctgtgcgatgagcatgccattccgtgcgactcgttccagctctcctccggctatacctcgattaacggcaagcgctacgtctttaactggaactacgacaaagtgccgcagccgaaggtgatgagccaggcgttccacgacgcggggctgcggcttgcggcaaacatcaagccgtgtctgttgcaggatcatccccgctacggcgaagtggcggaacgcggcctgttcattcgcgattcagaaaccgatgcgcctgaacgttccagcttctgggatgacgaaggatcgcatctcgatttcaccaacccgcagacggtgcagtggtggcaggacggcgtgaccacgcagttgctggagatggggatcgattccacctggaacgacaacaacgagtatgaagtgtgggacggggaagcgcgctgctatggcttcggccaggcgatcgccatcaagcatattcgcccggtgatgccgctgctgatgatgcgcgcctcgctggaagcacagcagcgctttgcgccggataaacgtccgtatctgatctcccgctccggctgtgccggaatgcagcgctacgttcagacctggagcggcgacaaccgtaccaactgggacaccctgcgctataacatccgcatgggcctgggcatgagcctgtccggactgttcaacgtcggtcacgacgtcggcggtttctccggcgacaagccggatgccgagctgttcgtgcgctgggtacagaacggcgtgatgcatccgcgctttaccatccactcgtggaatgacgatcgcaccgtgaacgaaccgtggatgtacccgggcgtgacccctgcgattcgcagcgccattgaactgcgctatcgcctgctgccgtatctctacaccctgctctggcaggcgcacgccgacgacgagccgatgctgcgcccgaccttcctcgatcatgagcacgatgcgcagtcctttgaagagtgcgacgacttcctgctgggccgtgacctgctggtggccagcgtcgtcgaagccgggcagcgcgagcgccgcgtctggctgccggataacgaaaccggctggtacgatttttacacccacgcgtggtatgcgggcgggcaatcgatcgtccttgatgcgccgctggaaaagctgccgcttctggtgcgcgcaggggccggtttgccgctcagcgaacgcatccgtcacgtgagcgccgataaagacgatacccgcgagctaaaactgttcccggtgaaaggcgtcggcaccacctccgggctgctgtttgaggatgacggcgaaagctggggctacctgaacggcaatgcgctgtgggtggaatgggagatggtgtgcgacggcgcaagtatcaacctgaaggtgaatgcgcgcggcgactatcgtccggcatggaaggcactgaaggtgtcgttaccgacgggggaaaaacgtacgctgcgggtgaacggggttgaagggggcgagtgggtggtttag

SEQ ID NO: 524693 - DNA, 1302 bp, Stenotrophomonas maltophilia
atgagtcaggacatcaacaacaccgttgcgacaagcaaaacccgtcgcgtcattaagaatctgcgctggtacgtactggtgctgtttcttcttggcgtgaccgtaaactacatcacccgtaactcgttaggtattctcgcccccgagctgaaagagagccttggtatcaccaccgagcaatactcgtggatcgtcggcgcgttccagatcgcctataccattttccagcccctgtgcggctggctgattgacgttatcggcctcaagattggctttatggtctgcgccgggatttgggcgctgatgtgtatcttccacgcaggtgccgggagctggctgcatctcgcgatcctgcgcttctttatgggcgcgtccgaagccgccgccacgccagcgaacgccaaaaccatcggtgaatggttcccgaaatcagagcgtcctgttgccgccggttgggcgggcgtgggcttctccatcggtgcgatgctggctccgccaatcatttacttcgctcatgcgtcgttcggctggcagggtgcgtttatgtttaccggcgtgctggcgctgctgtgggtgatcctgtggtggatcttctatcacaacccggagcagcacccgaacctgagccgcgacgagctggcgtttatcaaacaggataacgaacccgcaccggtcaggctgccctttctgaccgcgctgaaaaccgtctcgaagaacaaacggttctacggtatcgccattccggcctttatggcggaacccgcctgggcggtgctgagcttctgggtgccgctgtacctcgccaaagagcacggcatggatttgaaacagatcgcgatgttcgcctggctgccgttcctcgccgccgacctcggcagcgtggcgagcggctacctcacccggctttatacccgctggttcggctgcacccgcgtcaactcggtggtggcaagttcagtgaccggcgcgtttttgatgatttctctggccgttgtggccgtgacccgcgacccgtatatcaccatcgtgctgatctccatcggcggtttcggccaccagattatctcctgcatgctgagcgcgctggtcgtggagtcgttcgacaagggccagatggcgacggttaacggcatgcgcggctcggcggcgtggatcgccagcttcctgttctcccttttgattggggtgaccgccgacaaaatcggcttcaacccgctctttatcgccatgggcttctttgacctgattggcgctttcttcctggtggcatttattgctgaacgtcgcgccaagcgcgcctga

SEQ ID NO: 524694 - DNA, 1074 bp, Stenotrophomonas maltophilia
atggataaaaggcttaaaatcaccgaaatcgccgcccgtacccggctctccatcagcaccgtttcccgcgtgctggcggggaaggcaaacaccagcgaaaaagcacgggcaacggtgctggcatgcgcgcgggagctgggggtaatagagggcatggcggcggggcgtctgttgcttaacagcctgatggtgtttgccccgcagcgggcgtttgacgagcggtctgacatcttttattaccgcgtcatccagagcgtgagcaaagggctggcctcgcacgaggttcgcctgcgttactgtgcgctggaggagaacgacagcgacgcccagctgtttctggcccgcatgaacgaagtggacacccaggcggcgatccttctcggtatcgacgatccgcatatccacgatctggcggtagacgtgggcaaaccctgcatgctgattaactgccgggaccgccacatgcgcctgcccgccgtcgcgccggatcaccgcgccattggcgagcgggcggcggagtacctgttcgagatggggcaccgggaggtgatgaatgtgctgtgtttgcgtcgctataccatggagctgcgcctgtcggggatccgcgacgcgtggcacggccataacctcaggtttagcgaccggcgcgatctgctgatggtgccaagcttcagcgccaaagagacggagcagctggtgagtgagtggcttcaccagcaaaaagggaaagatctgccgacggcgttcctggtgggcggcgactttatggcggcggggaccatcagcgccctgcaaaaacacggtctgcgcgtgccgcaggatgtctcggtgatgagcatcgacggctttaatctcgcggcgattcaggatgtgcctctgacggcggtgcatgtcccgcgcgatgagctgggaacagaagcggtatatatgctccagcagcggctgatgcgcccggacgcgccggtcggaacattgctgctaaacggcacgctggccgtgcgggaatcggtacggcggatacgtcagggaaaacgacgcaccgccgttgagcgggaagggctttacgacagttaa

SEQ ID NO: 524695 - DNA, 1257 bp, Stenotrophomonas maltophilia
atgacctttaccagcgaaacgttgccagcggaccacaaagcggcaattcgtcagatgaaacgcgcgctacgggcccagatcggtgacctgcaggcagtgttcgaccggcttagcgacaaaatcgccgcccgcgtggcggaaattaatgcccttaaaaataaaggtgaatccgtatggccgataatcccctttacggatgtgaaaaacggtacgatcaccgccgaacagcgcgaagcggttaaacgtcgcggctgcgcggtgatcaaaagccacttcccgcgcgagcaggcgctggcatgggatcaatcgatgctcgactacctcgatctgaataagtttgacgaggtttacaaaggacccggcgataacttcttcggcaccttaacggcctctcgcccggagatttatccgatctactggtctcaggcgcaaatgcaggcgcgccagagtgaagagatggcacaggtacagtcgttcctgaaccgtttatggacatttgagagcaacggtaagcagtggttcgacccggacgtgagcgtaatttatccggaccgcattcgccgccgcccaccaggaacaacctcgaaaggccttggcgcacacaccgattccggcgcgctggagcgctggctgctgcccgcttatcagcaggtctttgcccgcgtgtttgacggcaacgttgagaaatatgatccgtggaatgctgcgcaccgtacagaggtggaagagtataccgtcgataacaccaccaaatgctccgtgttccgcaccttccagggctggacggcactgtcggacatgatccccggccaggggctgctgcacgtggtgccgatcccggaagcgatggcttacattctgctgcgtccgctgctggacgacgtgccggaagacgaactgtgcggcgtggcgccggggcgcgtgctgccgatttctgagaagtggcatccgctgctcatcgaagcgttgaccagcattcccgcgctggaagccggtgattctgtctggtggcactgcgatgtgatccactcggtcgcgccggtggaaaaccaacagggctggggcaacgtgatgtatattcctgccgcgccgatgtgcgagaaaaacctcgcctacgcgaaaaaggtcaaagaagcgctggaaaccggcgcgtcaccgggagatttcccgcgcgaggattatgagaaaagctggcaggaccgtttcaccgtgaacgatctgaacatccacggcaagcgcgcgctgggcatggcttaa

SEQ ID NO: 524696 - DNA, 816 bp, Stenotrophomonas maltophilia
atgaccgtaaaagttatcgtcaccgatatggacggaactttccttgatgatgccaagcagtacgatcgtgaccgcttccaggcacagtttgagcagcttaaagcccgtaacatcgaatttgttgtcgccagcggcaaccagtattaccagctcatctcctttttcccggaactgaaagatcagatctccttcgtcgcggaaaatggcgcgctggtgttcgaccacggcgaacagattttccacggtgagctaacgcgtcatgagtcgcagatcgtcattggtgaactactgaaagacaaagggctgaattttgtggcctgcgggctggagagcgcgtacgtcagcgataaggctccagaagcgttcgtgaagctgatgtcgaaacactaccatcgcttaaaacccatcagcgattaccgcgacattgacgacgtgctgtttaaattctccctgaacctgccggacagcgatatcccgaatctggtcgataaactgcatgtctccctggacggcatcatgaagccggttaccagcggcttcggttttgtcgatttgattatcccgggcctgcacaaagccaacggcatcagtcgtctgctgaaacgctggaaagtctccccgcaggcctgcgtgggcattggcgacagcggcaacgatgcggaaatgctgaagctggtgaaatattcatttgcgatgggcaatgcggcagaaagcattaaagcggtcagccgttacactactgacgataacaaccatcagggcgcgctgaatgtgattcaggccgtgctcgacgcccactccccgttcgacgtctga

SEQ ID NO: 524697 - DNA, 2433 bp, Stenotrophomonas maltophilia
atgaccaccctgaatctcaacaccctcagcgagcgcatcaaggcgcacaaaacggctctggtgcatatcgttaagccgccggtctgtaccgaacgcgcgcagcactataccgaaatgtatcagcagcatctggacaagccgatcccggtacgtcgcgcgctggccctcgcccaccacctggcaaaacgtaccatctggatcaagcacgacgagctgattatcggtaaccaggccagcgaagtgcgtgccgcgccgatcttcccggaatataccgtctcctggattgagaaagagattgacgatctggcggaccgtccaggtgcaggctttgcggtgagcgaagagaataaacgcgttctgcatgaaatctgcccgtggtggcgcggccagacggtacaggatcgctgctacggtatgtttaccgacgagcagaagggcctgctggaaaccggcatcatcaaagcggaaggcaacatgacctccggtgacgcacacctggcggtgaatttcccgctggtgctggagaaagggctcgacggcctgcgcgcgaaagtagccgagcgccgctcgcgcatcaacctgacggtactggacgatctgcacggcgatcagttcctgaaagccattgatatcgtgctggaagccgtaagcctgcacatcaggcgcttcgccgatctggctcgtgagatggccgccagcgaaacccgcgacagccgccgcgacgagctgctggcgatggcggaaaactgcgacatcatcgcccaccagccgccaaaaaccttctggcaggcgctacagctgtgctacttcattcagttgatcctgcaaattgagtccaacggtcactccgtctcctttgcccgtatggaccagtacctttacccgtactatcgccgcgacgtggagctggaccagagtctggatcgcgagcacgccattgagctgctgcacagctgctggctgaagctgctggaggtgaacaaaatccgctccggctcgcactccaaagcctctgcgggcagcccgctgtatcagaacgttaccatcggcggccagaagctggtcaacggtgagccgatggacgcggtcaacccgctctcctacgcgattctggagtcctgcggtcgcctgcgctccacccagccgaacctgagcgtgcgctaccacgcgggcatgagcaacgacgtcctcgacgcctgcgtgcaggtgatccgctgcggcttcgggatgccagcgtttaacaacgatgaaatcgtcatcccggaatttatcaagctcggcgtggaacgagaggacgcgtatgactatgcggcgattggctgcatcgaaaccgccgtcggcggaaagtggggctatcgctgcaccggcatgagctttatcaacttcgcccgcgtgatgctggcagcgctggaaggcggtcgcgatgccaccagcggccaggtattcctgccgcaggaaaaagcgctttcggccggtaatttcggcaatttcgacgaagtgatggcggcgtgggataaccagatccgctactacacccgcaaatctattgaaatcgagtacgtggtggacaccatgctggaagagaacgtccacgatattctctgctcggcgctggtggacgactgcatcgaacgcgcgaaaagcattaagcagggcggcgcgaagtatgactgggtttccggccttcaggtggggatcgccaacctcggtaacagcctggccgcggtgaagaagctggtgtttgaccagggcgttatcggtcagcaacagctggcggcggcgctggcggatgacttcgaggggctgacccacgagcagctgcgccagcgcctgatcaacggcgcgccgaagtacggcaacgacgacgacagcgtggacctgctgctgacccgtgcctacgaaacctacattgaagagctgaagcagtatcacaacccacgctacggccgtggcccaattgggggtaactactacgcgggcacgtcgtctatctccgcaaacgtgccgtttggcgcagcaaccatggcgacgccggacggacgtaaagcgcataccccgctggcggaaggggcaagcccggcctccggtaccgaccacctcggcccgacggcggtgattggctccgtgggtaaactgccgacggaagcgatcctcggcggcgtgctgcttaaccagaagctgaacccgtcgacgctggaaaacgacagcgatcgccagaagctgatggtgctgctgcgcaccttcttcgaggtgcataaaggctggcatattcagtacaacattgtctcgcgcgaaacgctgctggaagcgaagaaacaccctgatcagtatcgtgacctggtggtgcgcgtcgcgggttactcggcgttcttcaccgccctgtcaccggatgcgcaggacgatattattgcccgtaccgagcatacgctgtaa

SEQ ID NO: 524698 - DNA, 900 bp, Stenotrophomonas maltophilia
atgatcttcaacatacagcgttactccacccacgacggccccggtattcgaaccgtggtgttcctgaaaggctgctcgctgggctgtcgctggtgccagaacccggaaagccgctcccgcacgcgggacgtcctgtttgacgcccgtctgtgtctggacggctgtgacctgtgtcagcaggccgcgccagggtgtgttgaacgcgcgctgaacgggttgaccatccatcgtgaaaaattaagtgaaaagacgctcactgccctcaccgactgctgcccgacgcaggcgcttaccgtctgcggtgaagagaagcaggtggaggagattatggccaccgtgctgcgcgacaagcccttctacgaccgcagcggcggcgggatcaccctttccggcggcgagccgtttatgaatcctgacctggcgcacgccctgtttaaagccagccatgaacaaggcattcatactgcggttgaaacctgccttcacgtgccctggcattatatcgagccttcactgccgtatgtcgatctgttcctggcggacctgaaacatgtcgacggcgaggtgttcaagcagtggaccgatggctctgctaagcggatcctggacaacctgaagcgcctggctaccgtcgggaagaagatcaccatccgcgtgccgctgatccagggctttaacgccgatgaagcgtcggttaccgccattaccaacttcgccgccgatgaactcggcgtcgatgatattcattttctgccgtatcacacgctgggcatgaacaaatacaccctgctcggccaaccctactctgcccctgacaaaccgctggataaccctgccctgctggacttcgcgcagcagtatgcctgccagaaagggttaaccgcgaccttacgaggataa

SEQ ID NO: 524699 - DNA, 663 bp, Stenotrophomonas maltophilia
atggaactttatctcgacacatctgacgttgcggcagtcaaaaagctggcgcgtatcttcccgctggcgggcgtgaccactaacccaagcattgtggcggcgggtaaaacccccctggaagagttgctgcccgcgctgcacgacgcgctgggcggcaagggccggctgttcgcccaggtgatggcgaagaccgccgaggggatggtggaagacgcacgtaagctgcgcgcgataatcgatgacctggtggtgaaagtgcccgtgaccgctgaagggctggcggcgatcaaaatgctgaaagcagaagggatcccgaccctgggtaccgcggtatacggcgcagcgcaggggatgctctccgcgctggcgggtgctgagtatgtggccccttacgtgaaccgcgtggacgcgcagggcggggacgggatccagacggtgattgaactgcaacaattgctgacgctgcacgcaccgcagtcaaaagtgctcgccgcgagctttaaaaccccgcgccaggcgctggactgcctgctggcagggtgcgagtccatcacgctgccgctggacgtggcgcagcagtttattacctctccggcagtagatgcggcaattgtgaagtttgagcaggactggcagggggcgtttgggcggacgtctatttga

SEQ ID NO: 524700 - DNA, 753 bp, Stenotrophomonas maltophilia
atgacggtggaactgagcgtcccggagatgatgcgctacaaccgccagatcgtgctgcgcgggtttgatttcgagggtcaggaagcgctcaaggcggccagcgtgctggttgtgggtcttggcgggctgggctgcgcggcagcgcaatatctggctgcggcgggcgtcggccgcatgacgctgctggatttcgataccgtgtcggtgtcgaacctgcaacgccagacgctacacagcgacgcgacggttggtcagccgaaagtggaatctgcgcgcacggcgctggcgcgaattaaccccaacgttcagttcaccctgattgacgcgatgctggatgacgacgcgctgtttgcgcagattgcacggcatgacctggtgctggactgcaccgataacgtcgccattcgcaaccagctcaatgcgggctgctttgcccataaaacgccgctaatttccggcgcggccatccgcatggagggtcaaatcagcgttttcacctacgttgagggagagccctgctaccgctgcctgagccgtctgtttggcgagaatgcgctgacctgtgtcgaggcgggcgtgatggcgccgctggttggggttatcggttccttgcaggccatggaggcgatcaaggtgctggcgcattacggcacgcccgcagcgggcaaaatcgtgatgtatgacgcgatgacctgtcagttccgcgagatgaagctgatgcgtaatccggggtgtgaggtgtgcggaggttaa

SEQ ID NO: 524701 - DNA, 1233 bp, Stenotrophomonas maltophilia
atggattttaccgccggactgatgccgcttgagacggcactctcgcagatgcttgatcgtattactcccctgcacgacgttgagacgctgccgcttgtgcgctgttttggccgtattgccgcgcgcgatatcgtctcgccgctgaacgtgccggggttcgataacgcggcgatggacggctatgccgtacgtctggcggatttgcaaacgggtcagccgctgccggtggcaggtaaagcctttgccgggcagccgttcaacggtgagtggccagcgggcacctgcgtgcgcattatgaccggcgcgccggtgccaaagggctgtgaagccgtggtgatgcaggaagagaccgaactaacggacgacggcgtgcgttttaccgccagcgtcaaagcgggacagaatatccgccacatcggggaagacattaccctcggcgcaacggtctttgccgccgggcaaaaactgacggtcgccgaactgccggtgctggcatcgcttggcatcgcggagattgacgttgtccgcaaggtacgcgtggcggtgttctcaacgggagacgagctacagcttccgggtcagccgctgaacgaggggcagatttacgacaccaaccgtctggcggtgcacctgatgcttgagcaactgggctgcgaggtgattaacctcggcatcattcctgacgatccggagaaactgcgcacggcgtttatcgacgcggacgcctctgccgacgtggtgatcagctccggcggcgtttcggttggcgaagcggattacaccaaaaccctgcttgaagagctgggtgaaatcgccttctggaagctggcgattaaaccgggcaaaccgttcgcgtttggcaaacttccgcacagctggttctgtggcctgccgggtaacccggtctctgccgcgctgaccttctaccagctggtgatcccgctgctggcgaagctttcaggcaacaatgccgacccgctgccggaacgtgtgcgcgtgcgggcggcaacgcgcctcaaaaaatctccgggccgtctcgatttccagcgcggcattctggcgcgcaacgccgatggcgagctggaggtgagcaccaccgggcatcagggttcgcacatctttagctccttcagccagggtaactgctttatcgtgctggagcgcgatcgcggccacgttgaggcgggcgaatgggttgaagtggaacgctttaaccacctgttcggaggctga

SEQ ID NO: 524702 - DNA, 939 bp, Stenotrophomonas maltophilia
atgagtaaagcggttatcgcaattcatggcggtgccggggcaatcacccgtgcacagctcagtcccgagcaggagaagcgttatattgatgcgctgaacgccattgtggaaacaggccagcgcatgctggaagcgggcgaaagcgcgctggacgtggtgaccgaagcggtgcgcctgctggaggagtgtccgctgtttaatgccggtattggctcggtctttacgcgcgatgaaacgcatgaactggatgcctgcgtgatggacggtatcaccctgaaagcgggggcggtggcgggcgtcagccgactgcgcaatcccgtgctggccgcgcgtctggtgatggatcaaagcccgcatgtgctgctgaccggggcgggggcggagaaatttgccgtcgagcacgggatggatacggtctcgcccgatcttttttccaccgaggagcgttaccggcagttgctggaggcccgtacagcggggatgacgcagctggaccatgccgcgccgctcgatgaacgcagcaaaatgggcacggtaggcgcggtggcgctggataaagccggtaacctcgccgccgcgacgtcgacaggcggtatgaccaacaagcttcccggacgcgtcggcgatagtccgctgccgggggccgggtgttacgctaataacgccacggcggcggtgtcatgcaccggcactggcgaagtgtttattcgcgcgctggcggcctacgacattaccgcgctaatggattacggcggattaagcctgagtgaggcctgcgagcgggtggtaatggagaaactgccagccctgggcggagatggtggcttaatcgcggtggatcgggagggcaacgtggcgctgccgttcaacagtgaagggatgtaccgggcgtgggggtatgccggcgatgcgcccagcacaggcatttatcgtgaataa

SEQ ID NO: 524703 - DNA, 1872 bp, Stenotrophomonas maltophilia
gtgccgcacagtgaagagctggacaactgcgaagtgctggctgtccaccaactgaatattgcctttcaggaagagcggcagttcatccctgcagtacagaatttatcgttttcgctcaggcgcggcgagacgctggcgattgttggcgaatcaggttccggtaaatccgttaccgcgctggcgctgatgcgtctgcttgagcagacgggcgggcaggtcaccagcgagcggatgctgttgcgccgtcgcaaccgtcaggttatcgatctcaacgagctgagcgcgtcccggatgcagggggtgcgcggggcggatattgcgatgatttttcaggagccgatgacctccctgaacccggtcttcccggtgggcgagcagattgccgaatctatccgcctgcatcagggactgagcggtgatgaggcgctcaacgaagctaaacggatgctggagctggtacgtatccctgaggcgcacgcgattttgtcccgctatccgcatcagctttccggtggcatgcgccagcgggtgatgattgcgatggcgctgtcgtgccgtccggcggtgctcattgcggacgaacccaccacggcgctggatgtcaccattcaggcccagatcctgcaactgattaaggtgttgcagcaggagatggagatgggggtgatattcatcacccacgatatgggggtggtggcggatattgccgatcgggtgctggttatgcatcagggcaatgctgtggaaaccggcacggtggagcaggtctttcatgcgccggtgcatccttatactaaagcgctgctggcggcggtcccgcgtctgggcgccatgaatggcagtgattttccgcgccgttttccgctgttctctcagaccgaacagggccaacaggaagacgaaaccgagcagaacacggtggtttccggcaggccgatccttgaagtgcgtgaactggtgacccgtttcccgctgcgtagcgggatcctcaatcgcgtgaagcgcgaagtgcatgcggttgaatacgtcagttttgatctctggccgggcgaaacgctggcgctggtgggggagtccggctgcggtaaatccaccaccgggcgggcgctgctcaggctggttgagtcgcaggaggggagcatcaccttcaacggtgagcgcatcgatacactccccaatggtaaattgcaggcggtgcgccgggatattcagtttatttttcaggatccttatgcgtcgctcgatccgcgccatacggtggggtactcgattatggagccgctgcgggtgcacaacctgctcgacggtgaagccgcgcagcgccgcgtcgcgtggctgctggagcgcgtgggcctgaaaccggagcatgcctggcgttatccgcacgaattttctggcggtcagcgacagcgtatctgcatagcccgggcattggccctcaatccgaaagtggtgattgcggatgagtccgtgtcagcgctggatgtctccatccgcgcgcaaatcatcaatctcctgctcgatttacagcgggatttgggcattgcgtttctgtttatctctcacgatatggcggtggttgagcggatcagccatcgcgtggcggtgatgtacatggggcaaattgttgaaattggcccccgtcgggcggtatttgaaaacccgcaccatccgtacacccgcaagctgatggccgccgtaccggttgccgatcctgaacatcgtcacgcccagcgcgtgctgttgcaggacgaaatgccgagcaatattcgtaaacggggcgaaactctggagcgcgtggcgctgcgtgaagtcggtcccgatcattttgtcgcacccccgcgtcagggcaatgcattctcgcggttataa

SEQ ID NO: 524704 - DNA, 1539 bp, Stenotrophomonas maltophilia
atggttccttttgttgctcgtcaatggctgcttgctgcgagcgtgacggctgcgctggccgccgcccccgcgatcgcggcgaaagacgtggtggtggctgtggggtctaacttcacgacgctggatccgtatgatgctaacgacaccctttctcaggcggtggcaaaatccttctaccaggggctgttcggcctggaccgcgagatgaagctgaaaaacgtgctggcggaaggctataccgtgtcggacgacgggctggtctataccgttaaactccgtaccggcgtgaagttccaggacggcaccgacttcaacgccgaggcggttaaggtcaacctggaccgagccagcaatccggaaaacggtcttaagcgctacaacctgtataaaaatatcgcccaaaccgaggcggttgatccggcgacggtgaagatcaccctcaaagagccgttttcggcgtttatcaatatcctggcgcatcccgcgacggtgatgatttcccctgcggcgttaaagaaatacggcaaagagattggcttccacccggtggggaccggaccgtacgaactgcttacctggaaccagaccgattatgtgaaggtgaagaaattcgccggatactggcagccggggctgccgatgctggataccctcacctggcggccggtcgtggacaacaatacccgcgccgcgatgctgcaaaccggcgaagcgcagtttgccttcccgatcccctacgaacaggcagcgctgctggcgaaaaacagcaagctggagctggtggccagcccgtcgattatgcagcgctacatcagcatgaacgtcacgcaaaaaccgtttgataacccgaaggtgcgcgaagccatcaactacgccattaaccgccaggcactggtgaaggtggcctttgccggctacgccaccccggcgacgggcgtgatgccgccaaccattgagtacgcgcagagctatcagccgtggccgtacgatccggcgaaagcgcgggaactgctgaaagaggcgggctatccgaacggctttagcaccacgctgtggtcgtcgcataaccacagtaccgcgcagaagatgctgcaatttacccagcagcaactggcacaggtgggcattaaagccagggtcacggcgatggatgccggacagcgcgcggcggaagtggaaggcaaaggacagaaagagagcggcgtgcggatgttctacaccggctggacggcttcaaccggtgaagcggactggtccctgtcgccgctgtttgcttcccagaactggccgccaacgctgttcaataccgcgttctacagtaatccgcaggtggataaggatctggccgatgccctgaaaaccaccaaaccggaagagaaagcgcgcctgtacaaagaggcgcaggacattatctggaaagagtcgccgtgggtgccgctggtggtggaaaaactggtctcagcccacaataaagcgctgaccggtttttacatcatgccggatacgggctttagctttgatgacgcggatctaaaataa

SEQ ID NO: 524705 - DNA, 921 bp, Stenotrophomonas maltophilia
atgctgaattatgtgtgtaaacgcctgctggggcttatcccgacgctgctgattgtggccgtgctggtgtttttgtttgtccacatgctgcccggcgatccggcgcgtttgattgccggaccggaagcggatgccacggttatagaactggtgcgtaaacagctcggtcttgaccagccgctgtatcggcaatttctgcgctacattggcaatgtccttcagggcgatttcggcatctcgatggtgtcgcgtcgtccggtgtcggaggagattgccagccgctttatgcccaccttctggttaacgattgccagtatgagctgggcggttgtgtttggcctgggcgcggggattgtcgccgccgtctggcgcaaccgctggccggataagctcggtatggcgctggcggtcaccggtatctctttcccggcgtttgcgctgggcatgctactgatgcagattttctccgtcgagctgggctggttgcccaccgtcggggccgacacctggaagcactacattctgccctctatgacgcttggcgcagccgttgcggcagtgatggcccgcttcacccgcgcctcctttgtcgacgtgctgagcgaagattacattcgcaccgcgcgggcaaaaggggtgagtgagaaatgggtcattctgaagcatggttttcgtaatgcgatgatcccggtggtcacgatgatgggactacagttcggcttcctgctgggcggctctatcgtggtagagaaggtcttcaactggccggggctggggcgtctgctggtcgactcggtcgatatgcgtgactatccggttattcaggcggaagtcctgcttttctcgctggaatttattcttatcaatctcgtggtggacgtgctgtacgccgccattaacccggccatcaggtataagtaa

SEQ ID NO: 524706 - DNA, 912 bp, Stenotrophomonas maltophilia
atgcgattactgaactggcgtcgccaggccattttaaacgctatgccggggatcaggccggaccatattcgcaccccgtgggttgagttctggcgtcgattccgtcgtcagcccgtcgctatggtcgccgggttgtttgtgttactgctgatcctggtggcgattatcgccccctggatagccccgtttgatgcggaaaactacttcgactacgaccggctgaacgatggtccgtcgatgatgcactggtttggcgtggactcgctcgggcgcgatatattcagccgcgtgctggtaggggcgcagatctcactggcggccggggtcttcgcggtgctgatgggcgcagcaattggcaccgtgctggggctggtggccgggtactacgaaggctggtgggaccgcatcatcatgcgtatctgcgacgtgctgtttgcctttcccggtattctgctggcgattgccgtggtggcggtgatgggcagcggcatggcgaacgtcattatcgccgtggcggtattctcgattcccgctttcgcgcgtctggtacgtggcaacacgctggtgctgaagcagcagacctttatcgagtcggcgcgcagcatgggagccagcgatgccaccatcctgttcagccatattctgccgggaacggtctcgtctatcgtggtctatttcaccatgcgcataggcgtgtcgattatctcggcggccagcctgtcgtttctggggttaggggcacagccgccgacgccggagtggggtgcgatgctgaacgaggcgcgggcggatatggtgatcgccccgcacgtggcgatcttcccgagcctggcgattttcctgaccgtgctggcgtttaacctgctgggggatgggctgcgcgacgcgctggatccgcggattaaggggtag

SEQ ID NO: 524707 - DNA, 1326 bp, Stenotrophomonas maltophilia
atgagcaatgttacgcacccgccgaaaatcggctttgtctccctgggctgcccgaagaacctggtggattccgaacgcatcctgactgaacttcgcactgaaggctatgacgtggtgccaagctacgacaacgccgacatggtgatcgtcaacacctgtgggttcatcgacagcgcggtccaggagtcactggaagccattggtgaagccctgacggaaaatggcaaagtgattgtcaccggctgcctgggcgcgaaggtggatcagatccgcgaagtgcatccgaaggtactggagatcaccggcccgcacagctacgagcaggtgctggaacatgttcatcactacgtaccaaagccaaagcacaacccgttcctgagcctggtgccggaacagggcgtgaagctgacgccgcgccactatgcttacctgaaaatttccgaaggctgcaaccatcgctgcaccttctgcatcatcccgtcgatgcgtggcgatttggtgagccgtccgattggcgaggtgctggcagaagccaaacgcctggccgacgcgggcgtgaaggagttactggtcatctcccaggacacctccgcctacggcgtggacgtcaaacaccgctccggcttccataacggcgagccggtaaaaaccagcatggttggcctgtgcgagcagcttgctaagctcgggatctggacgcgtctgcactacgtctacccttacccgcacgttgacgacgtgattccgctgatggcggaaggcaaaatcctgccgtatctggatatcccgttacagcacgccagcccgcgcattctgaagctgatgaagcgtcctggatccgttgaccgccagctggcgcgcatcaagcagtggcgcgagatctgcccggatctgaccctgcgctccaccttcatcgttggcttcccgggtgaaaccgaagaagatttccagatgctgctcgacttcctgaaagaagcgcgtctggatcgcgtgggctgcttcaagtacagcccggttgaaggcgcaacggccaacgagttggcggaccaggtaccggaagaggtcaaagaggaacgctggaaccgctttatgcagctgcaacagcagatctctgcagaacgcttgcaggagaaagtgggccgcgaaattctggtcattatcgacgaagtggacgaagaaggcgcgattggccgcagcatggcggatgcgcctgaaatcgacggcgcggtgtacctgaacggggaaaccaacgtcaagccgggcgatattattcgcgtgaaggttgaaaacgccgacgagtatgatttgtggggcagccgggtttaa

SEQ ID NO: 524708 - DNA, 228 bp, Stenotrophomonas maltophilia
atgcgtgaaaaagcacccatcctgaaagcgtactgcgctgaaaacgaactagtggcgctgcgccgcgccgccgaggtgctttccatcgccggggtctgtttgatgaacggacgtcacgactgcccgaattttattgccgttaacgcggagaagcttgaaaactgcctgaccacgctcgcgctttgcatcatgtgtctgaacaagccggaaacgcttgcccgacactga

SEQ ID NO: 524709 - DNA, 1128 bp, Stenotrophomonas maltophilia
  misc_feature (848)..(857): n is a, c, g, or t
atgcctcgatcctcgctgcttttcctccctgtactgttattcccgctttcgctgcttgcggcgcccgagacggttaaggtcgacgtgctacagacaaaactggatcacccctggtcgctggcgtttctgcctgataataaggggctgctgatcacgctaaaagacgggcagcttaagcactggcaggcagggaaagggctctccgatccgattatcggcgtgccgaaggtctgggcgagcggccagggcggattgctggacgtggtgctggccccggattttgaacaatcacggcggatctggctcagcttcgccgaggcgggtgatgatggaaaagcgggcaccgcggtgggctacgggcggttgagcgatgacctctcgcgcattgagggcttccaggtggtgttccgacagatgccgaagctctctactggcaaccactttggtggacggctggtgttcgacggcaaaggccatctctttattggcttaggtgaaaacaaccagcgcccgacggcgcaggatctggataagcttcagggcaaggtggtgcgcctgacggaggacgggaaagtgccgccggataacccgtttgtgaacaccgccggtgcacggcctgaaatctggtcttacggcattcgcaacccgcaggggatggcgatgaacccgtggagcgacgcgctgtggcttaatgaacacggccctcgcggcggggatgagatcaacattcctgaaaaaggcaaaaactacggctggccgatggccacgcacgggatcaactacagcggcctgaaaatcccggaagcgaaaggcgagcacgttgaggccactgaaaaaccgctgtttgnnnnnnnnnnctggaaagtgtcgcccgccgtcagcggcatggcgttctacaacagtgacgtcttcccgcaatggaaaaacaagctgtttatcggcgcgctgaaggagaaagacgtcatcgtgctgagcgtgaagggcaataccgtgacggaggacgggcgcattcttggggataaagatcagcgaattcgcgatgtgcgcgtcgggccggatggttatctgtacgtgctgaccgacgagacggacgggcagctttggaaagtcagcccgtccgggtcgtaa

SEQ ID NO: 524710 - DNA, 627 bp, Stenotrophomonas maltophilia
atgattacgctgtggggcaggaacaattcgaccaacgtgaaaaaagtgctctggacgctggaagagctggatttaccgttcaagcaggttatggtgggcctggagtttggcgtgaataaagacgcggactacctggcgatgaacccaaatggactggtgccgctactgcgcgatgacgagacagacgccacgctgtgggagtctaacaccatcgtgcgatacctcgccgcgcagtacggccagggtcggctgtgggtagaaaatccagcccagcgcgcgcagggcgaaaaatggatggactgggcaaaccagacgctttccccaacgcaccgcgtgatcctgatggggcttatccgtacgccggaagccgatcgtgattatcccgccattcatgccgcccaggacgcgtgcgagtcgctgtttgcgatgatggacgacgaactggcgaagcatacctggttctccggcgacacgttcggcgtgggcgatatcgccgtcgcccctttcgtctggaacctcactaacatgggtctcagctggaccccgcgccctcaccttcagcgctggatccagcagctcagcgagcgcccggcgtatcgcaacgtggtgatgatcccggtgacctga

SEQ ID NO: 524711 - DNA, 1206 bp, Stenotrophomonas maltophilia
atgacgcaaaaaacttcctctctgcgcagcctggcggcaggctcggcgctgcttttcctttttgccccaacgctccatgcggcggaacagacagcgcccgaagcgccgcctgttgatgcgcgcgcctggatcctgatggattacgccagcgggaaagtgctggcggaaggtaacgccgacgagaaactcgacccggcgagcctgacgaaaattatgaccagctatgtggtcggccaggcgttgaaagcgggcaagatcaagctgaatgacatggtcaccgtcgggaaagatgcctgggcgactggtaacccggcgctgcgcggctcgtccgtgatgttcctgaagcctggcgaccaggtctccgtgtccgatctgaataaaggggtcattattcagtcgggaaatgatgcctgtattgcgctggccgattacgtcgcgggcagtcaggactcatttattgggctgatgaatggctacgcgaaaaaactgggtctgaccaataccacttttaaaactgttcacggcctggatgcgccgggtcagttcagtaccgcgcgcgatatggcgctgctgggcaaagcgctgatccatgacgtgccggatgagtacgctatccataaagagaaagagtttaccttcaacaatatccgccagcctaaccgtaaccgtctgctgtggagcagtaacgttaacgtggacggcatgaaaaccggtacaactgccggggccggatacaacctggtggcttctgcgacgcagggcgatatgcgcctgatctcagtggtgctgggaacgaaaaccgaccgaattcgttttaacgaatccgaaaaactgctgacctggggtttccgcttctttgaaaccgtcacgccgattaagccggacgccaccttcgtcagccagcgtgtctggtttggtgataaaagtgaagtaaacctgggagcgggtgaagcgggttccgtcaccattccacgcggtcagctgaaaaacctgaaagccagctataccctgaccgagccacagctcaccgcaccgctgaaaaaaggtcaggtggtcgggacgatagatttccagcttaacggcaaatctattgagcagcgtccgctggtggtaatggaagcggtggaagagggcggcttcttcagccggatgtgggactttgtgttaatgaaattccacggctggtttggcagctggttcagctaa

SEQ ID NO: 524712 - DNA, 759 bp, Stenotrophomonas maltophilia
atggaaacacgtcgcgatgaccgcattgctcagctgcttcaggcgctgaagcgcagcgataagctgcatcttaaggaagccgcttccctgcttggcgtgtctgaaatgaccattcgtcgcgatctgaacagcgacagcgcccccgttgtgctgcttggcgggtatattgttctggagccgcgtagcgccagccattatctgttaagcgatcaaaaaacacgcctggtggaagagaagcgcaaagccgcgcggctcgccgcctcgctggtgcagccgcatcaaacgctgttttttgactgcggtacgacaaccccgtggatcatcgaggccatcgacagcaccgttccctttaccgccgtctgttattcgctaaataccttcctggctttgcaggagaaaccagcatgccgggtgattttgtgtggcggcgagtttcatgccagcaacgccatcttcaagccgctgaatattcaggacacgctgagcaatgtatgccctgatatcgccttttactctgcggcgggcgtgaatgtgaaacagggggcaacctgttttaatcttgaagagttaccggtgaaacagtgggcgctcaacgccgcgcagcagcatgtgctggtggttgatcacagtaaatttggcaaggtccgtccggcaaggatgggagaactgtcgcgctttgacgccatcgtcagtgattgccgcccggatgacgagctggtggcatacgcgaaagcgcagcaggtgaagttgatgtattga

SEQ ID NO: 524713 - DNA, 609 bp, Stenotrophomonas maltophilia
atgttagaaaatctgaactacgaactgttttacctgctcaacgccacgccgtcgtcaccggaatggatgatcgatctcgccaccttcattgcgaaagatctgattagcattgtaccggcgctggcggtgatcctctggttatggggacctcgtacacaggtcaccgcccagcgccatctggtgatcaaaatggcgatggcaattggcgtgagcgtgctggcaagctacgtgctgggtcacgccttcccgcacgatcgtccgtttgtcgatcgcgtcggctacaacttcctgcaccatgcgccggatgactcgttcccgagcgatcacggcacggtgatcttcacctttgcgctggccttcctgttctggcatcgcctgtggtccggcatggtgctgatgggcgtggcagtcgccatcgcctggtcccgcgtctacctgggggtgcactggccgctggatatggtcggcggtttcctggtggggctgatgggctgcgtcagcgcagccatcctgtggagcctctttggcccggcgctttatcgtggattatcacaggcctatcgcgttctgtttgctcttccgatccgcaaaggctggatacgtgactaa

SEQ ID NO: 524714 - DNA, 729 bp, Stenotrophomonas maltophilia
atgacacacgccgtcagcccttcagaattatctaagttaccgacaaataagacaaaacgtctttaccgtttgcctgcccgcttttatggttatcaacttttcgtgcttattgcccttgcggtgctttttacctggctttcgcgcgatgaatcgcttgaccgatggataaccggtttctggtatgacgcagcggcgcatcattttccgctacagcaaaacccgttgctggatctgctgaaccatcggctggcgaaatatgtgaccattgttatcgctgccgcatcgctgatttacggcgcttacaaacgcaatgcccgactggtaacggccgcgattctgatggggctgggtgcgctggtagtaggggtgctgaaaagcataagccaccacagctgtccgtgggatctggtggaatatggcggcaggtccgtttcgtatcccctgttcagcgccgttccggcagacagcggaccgggacgctgctttcccggcggccacgcctccagcgggtttatggtgatggggctgttttttgccttctggcgtgaacgtccgcgcctggcatggtcctttgtcgcgtcaggcgttgttatggggctggtgatgggcttcgggcaggtcatgcgcggcgcgcattttttctctcacaacctgtgggccgggtggtgggtctggttttcccaggtgctggtttacgggctggtttccacctggtttgctaaagagtaa

SEQ ID NO: 524715 - DNA, 1233 bp, Stenotrophomonas maltophilia
atgataaaccgttcttcttccggtaatcgtctgggtcgtcaggcgttactttttcctctgtgtctggtgctttacgaattctctacctacatcggcaacgacatgatccagcccggcatgctggctgtggttgagcagtacaacgcaggtattgagtgggtaccgacatccatgaccgcctatctggcgggcggcatgtttttacagtggctgttagggccgctgtcggatcgtattggccgccgtccggtgatgctgacgggcgtagtgtggtttatcgtcacctgtctcgccacgctgctggcgcagagtattgagcagttcacgctgctgcgtttccttcagggcgtgagcctgtgctttattggcgccgtgggctatgccgctattcaggagtcgtttgaggaggcggtgtgtatcaaaattaccgcgctgatggcaaacgtggcgcttattgcaccgcttcttgggccgctggtgggagccgcatgggttcacgtcgcgccgtgggaggggatgttcgtcctctttgccgcgcttgcggctacctctttctttggcctgcaccgtgcgatgccggaaaccgccacccgcctgggcgaaaagctctcgcttaaagagctggggcgggattataaggcggtgctgaaaaatggccgttttgtcgcgggcgcattggcgacgggctttgtcagcctgccgctgctggcgtggattgcccagtcgccggtcattatcatcagcggcgaacagcttagcagctatgagtatggcctgttacaggtgccgatttttggcgcgctgattatcggtaacctggtgctggcgcgtctgacgtcgcgccgtaccgtgcgttcgctgattattttgggcggctggcccatagcggcagggctgattatcgcggcggtggcgaccgtagcctcgtctcatgcgtacctgtggatgacggcggggctgagtgtttacgcgtttggtatcggcgtggcgaatgctggcctggtgcgcctgacgctgttcgccagtgaaatgagtaaaggcacggtgtctgccgcgatggggatgctgcaaatgctgattttcaccgtcggtattgaggtgagcaagcatgcttatgcgtttggcggaaacgggctgttcagcctgttcaatctcgcaaacggtgtgctgtgggtagggctgatggtggtgttcctgaaggacaaacgcgtcggaagcgcactgcaaccgtaa

SEQ ID NO: 524716 - DNA, 813 bp, Stenotrophomonas maltophilia
atgagcgttaaactgattgcagtcgacatggatggctccttcctgagcgatgcgaaaacctataatcgcgcgcgttttctggcgcagtacgcgcgcatgaaagcgcaaggcatccgttttgtggtcgccagcggaaaccagtactaccagctgatctcatttttccccgagatcgcccatgaaatcgccttcgtcgccgaaaacggcggctgggtggtggatgcgggcgaagacgtgtttaacggcgaactgtcgaaagagcattttctgaccgtcgccaccctgttaaacgacgtgcccggcattgagataattgcctgcggaaaaaacagcgcctacacgctgaaaacgtataacgacctcttcaaagagattgcggcgaaatactatcaccgccttgaaagcgtcagcagctttgacaacctcaacgatattttcttcaagttcgggcttaacgtctctgacgacgaaataccgcgcattcaggcgctgctgcatgagaagcttggcgacatcatggtgccggtgaccacgggtcacggcagtatcgacctgataatccctggcgtgcacaaagctaacggcctgcggatcctgcaagcgcgctggggcattgaggacagtgaagtggtggcctttggcgacagcggtaacgacgtggagatgctgcgccaggctgggtttggcttcgcgatggccaacgccagaccgcatattaaagcggtagcccgctatgaagcgccaaataataatgacgaaggggtgctggacgtgattgatatggtgctggaggggaaggcgccgtttaattga

SEQ ID NO: 524717 - DNA, 1215 bp, Stenotrophomonas maltophilia
atgacgctaacttctcctcgcaaagccctgcatctgcgcatgtgggcgctgtttatgttcttcttcatccccgggctgctgatggcttcctgggcaacgcgcaccccggcaatccgcgatacgctatccgtctcgacggcggagatggggatcgtactgtttggcctgtcgattggctcgatgagcggcatcctctgctcggcctggctggtgaagcgctttggcacgcgcgcggtgatccgcaccaccatgtgctgcgccgtggtgggaatgttcgctttgagcgtggcgctgtggttcgcctcgccgctgatgtttgcccttgggctgatggtatttggcggcagctttggtgcggctgaagtggccattaacgtcgagggggccgccgtcgaacaggcgatgaacaaaacggtgctgccgatgatgcatggcttttacagcctcggcacgctggcaggcgcgggcgtggggatggcgctgacggcgctgggcattgcggccaatgtgcacattttgctggcggcgctggtctgtattatcccgatcctcaccggcatcagggctattcccgcaggcacaggacaacacgcctcggacgaacagaagtctgcggcaaaagggttgcccttctatcgtgatttccagctaatgctgattggcgtggtggtgctggcgatggcatttgctgaaggctccgccaacgactggctaccgttgctgatggtggacgggcacggatttagccccacctccggctcgctgatctacgccggatttacgctcggcatgaccgtcggacgctttaccgggggctggtttatcgaccgttacagccgcgtggctgtcgtccgtgccagcgccctgctgggtgggctgggcatcgcgatgatcatctttgtggatgtggactggattgccggtgtgtcggtgatcctgtgggggctgggcgcctcccttggcttcccgctgaccatttccgctgccagcgataccggtcccgatgcgccgacgcgcgtgagcgttgtggcgaccacgggctaccttgccttcctggtggggccaccgttgcttggattcctcggtgagcactacgggttgcgcagcgccatgctggtggtgttagggttagtgattattgccgccctggtggcgcgtgcggtggcaaaaccggaagcagaacaaacgacaatggagaagggatatgagcgttaa

SEQ ID NO: 524718 - DNA, 552 bp, Stenotrophomonas maltophilia
atgagcagaccaccaaacgaccctaaccgccgcgagaagatactccaggcgacgctggacaccattgctgagcacggtattcatgccgtcacgcaccgcaaaattgccacctgcgcaggcgtaccgctggggtcgatgacctactatttcgacgggatggagtcgcttctggaggaggcgttcacgtggtttacgcagcagatgtctcagcagtaccgggatttcttcgcgggggtgaccgggcgggagagggcgtgcgaggccattaccacgctgatccacagttcagccgtgaccacgccacacaatatggcgctgatgtatcagctgtacgcttttatgcaccgcagcgccgcgctgaaaacggtgatgcaggactggatgaagatgagccagactacgcttaagcagtggtttgatccagccaccgcccgtgcgctggatgcgtttatcgaggggatgacgctgcattttgtaaccgaccggtcgccgttaacccgggaggagatccgggcgatagtgggacggattgcaggcgaggataccgtctga

SEQ ID NO: 524719 - DNA, 174 bp, Stenotrophomonas maltophilia
atgctgctataccccattctgattaaccgtccgattgtggtgacgccgctgggtacacgtctgtgccgcccttctgaagtcgttctcgacatccttccggacgcgcaaaaaggggcatttacaaaggaagatggcgaagtcgtcgttgacgccagcgggaaaaaaatctcctga

SEQ ID NO: 524720 - DNA, 273 bp, Stenotrophomonas maltophilia
atgagcaacatcactatctaccacaacccggcctgcggcacgtcgcgcaatacgctggagatgatccgtaacagcggtacggaacccgaaattattctctatcttgagaacccaccgtcgcgtgatgaattgaccaggctgattgcagacatggggatttccgtgtgcgatctgctgcgtaaaaagtcgagccttacgagcaactgggccttgccgggggaaatttcaccgatgaccagcttattgatttcatgctgctataccccattctga

SEQ ID NO: 524721 - DNA, 1290 bp, Stenotrophomonas maltophilia
atgtttctggcaggggctatttttctgtttacgctggtactggttatctggcagcccaaagggctcagtatcggctggagtgccaccattggcgccgcgctggcgctggcgagcggtgtgatccacgttaacgacattccggtggtctggaacctcgtctggaatgcgacggccacgtttatcgcggtaatcgttatcagtttgctgctggatgagtccggttttttcgagtgggcggcgctgcacgttgctcgctggggaaacggtcgcggggggttgctgtttacctggatcgtgctgctgggtgcggccgtggcggcgctgttcgccaatgacggtgcggcattgatcctgacgcctatcgttatcgccatgctgctggcgctgggattcagcaagcaggccacgctggcgttcgtgatggcggcgggatttatcgccgataccgccagcctgccgctgattgtctccaacctggtcaacatcgtctcagcggacttctttaagctgggctttagcgaatacgcctcggtgatgatcccggttgatatcgccgcaattgccgcgacgctggtgatgctgcatctgttcttccgcaaggaaataccgccggaatatgacctggcaaaactccgcgagcccgcacgggccattcatgacctgccgacattcagaacgggctggatcgtgctgctgctactgctcgtcgggttctttgtgcttgaacctctgggtatcccggtcagcgctatcgcaacaactggcgcgctgattttatttgccgttgctaaacgcgggcacgccattaacaccgggaaagtgctgcgcggcgcaccctggcagatcgttatcttttcgctggggatgtatctggtggtgtatggcctgcgtaatgccgggctgacggagtctctttcagacgttcttgatcgcttagccggacacggactctgggccactacgctgggaaccggatttatcaccgcctttctgtcatccataatgaacaatatgccaacggtattgatcggcgcgctctccattgagggtagtgcggcaacaggtttgattaaggaggcgatgatttacgctaacgtgattggctgcgatctggggccgaaaatcacccccatcggtagcctggccaccctgctatggcttcatgtgctggcacagaaaaacatgaccattacctggggctactatttcaggacgggcatcataatgacgctgccggttctgtttgtgacgctcaccgcgctggcgctacgtctctccttcacactgtaa

SEQ ID NO: 524722 - DNA, 321 bp, Stenotrophomonas maltophilia
atgctccacccgctccagctcttcaaaaccctctccgacgaaacgcgcctctccatcgtcatgcttctgcgtgaagcgggcgagctgtgcgtctgcgatctctgctccgctaccaacgagccgcagccgaaagtctcccgccacatggccttactgcgcgaggctgggctggccatcgaccgtcgcgagggtaagtggatctactaccgtctctctcccaacatgcccgcgtgggcggcaaccgttatcgacaccagctggaactgcctgcgggaagagacgcgtatgaagctgaaaaaccgcctcccgggctcgtgctga

SEQ ID NO: 524723 - DNA, 480 bp, Stenotrophomonas maltophilia; identical to SEQ ID NO: 120541

SEQ ID NO: 524724 - DNA, 183 bp, Stenotrophomonas maltophilia; identical to SEQ ID NO: 120542

SEQ ID NO: 524725 - DNA, 300 bp, Stenotrophomonas maltophilia
  misc_feature (256)..(265): n is a, c, g, or t
atgtaccattctgaagagatcatccgccagcttcagagccaaaagatactggcaatgaagctggaccgggcggtacgtgatgtaggtgaagaggtaaagagccacctgaataatataggtgccggtgcccaacgcctgctgtactacacctcctgctttactgatgaatattacgatgtatgcacccgacaaaacctggaggacgctcgattccgaaagggcatattccatctcgtttctcgctggaaaatcgtcnnnnnnnnnntgcaggcgtcgcatcgactgtttgcctctatgtga

SEQ ID NO: 524726 - DNA, 699 bp, Stenotrophomonas maltophilia
gtgacagcgtcagaccagacaggtttcccctcgtgcgtgcagcacatctcacacgacattacaggcatcaagcttgaacccattgtcgccctctcctcttcgcgcacggtaggggctgaagtgctcagcgtgctgtcaccgcatcaacaaagcgaaggcttttttcacgactggtccgctgctcgggcgcttatgctgctggaagcacagatcgctgcgttaaaaaaaccctttccctgcgacaaccttttcataaatttgccgataaccgttctgaccataccggaaatgttccagcgtttactgcaacttaacagcccaccgctgaacattgaactcgtggagcctgcttccttcttttctctctcagacccggcacgtctgagggtgagttgtgcgcttcagcagttgacggcgcaaggacatcggatctggttggatgacattgatgaagcgtcagggcgcgcgtttttgtcctgccgcatgccgttaagcggaataaaaatcgataagatcgctttctggcgtttacgtgcaacgccagcgctggcaaacctggtcacgctttgttcaaaaattgctgaaaatgtactcatagaaggcattgaaacagaaacggaccgtaagtttgcgcttcaggctggcgcgcgcttcggtcagggatattattggccatcctggagatggcaggaggactga

SEQ ID NO: 524727 - DNA, 249 bp, Stenotrophomonas maltophilia
gtgccctgtaacggccgcggcggcgaccggatggtcagcgttagcgaccacggttgcacgggcgacgggatgataactaccgtctgttgcggctgcgacggcgacagggtgatcggcagatacaaccgccgttgtgcgggcgacaggatggttaccttcaccggtggccgccgcaacggcaacaggatgatcggcggaggcgacggcagtcgcacgggctaccggatgatttgcaaatgcagaaaatga

SEQ ID NO: 524728 - DNA, 429 bp, Stenotrophomonas maltophilia
atgaaaaaatatttactcatcgcgttgagctttctggctatcaccagtccggcgagttacgctggcatccgatcgctggtggaggatggcacggttctgcagagccaaattattacgcatacccgagaagggtatcatccgctgcgtaccttaaccgcgggcacgattggtggcgtagtgggtcaccagttcggtaacggcaaagggaaaaccgccatgacggtagccggtgcaacagccggggcggcggcttctcataaccggcagtctaacgaattggcagcacaggaagtgaagttacttatcaagactcaatccgggcagactattcaggtggtgcagcacaataatggtttgacatttaaccctggcgacaaagttcgtatcatcacaacgggttctaataccaccgtggaaaaaacatactaa

SEQ ID NO: 524729 - DNA, 720 bp, Stenotrophomonas maltophilia
atgattacaaaaatgaaataccgtggttttcacgtctgttataaaaataacgatacacgatacctggaaatactggacgatatattgtcctgtaatgtaaaacgactcagcgttcagatggtatttaaaagccttccgcatacccacgtctctttactgaataccccctatggacagtttgtattaaagatttactcccccaggaaaaaaaggatagaaaaatttttcaaatcgttttttacgcccaaccccaacgaaaatttgattgagcggatcgactatgctggcaggcaaggtcataccttcccgaatgatttttatctcctggctgaacgccggattttcagattcgcaaaaatctcgctcatgttgtttgagtatgtccccggtccggagttacgcgttcttcccgcgatcacgccggacataaagcgtgaaatccgacacagtatgcagaaaatgcacaatctgaaaatcatttccggcgatgcgcacggcgggaacttcatcctgagtgaaaaaggaataaggatcatcgatctgtccgggaagcgttgtaacgcgaaaaggattgttgaagacaacgtgacggccagccttcgcattggtattcccattgaatcccaccggcgttgggaaaaacgcctgatcgcaaaaaaaatcagacgacaccataaaatcgtccagaggaagtatctggcgcgttcaaataccgcttaa

SEQ ID NO: 524730 - DNA, 276 bp, Stenotrophomonas maltophilia
atgaaaaaaacgactgctattttgttgggcaccgcgtttctgtttaccaccaacgcctttgcggctgaaatgatgacaaaaaacgaattcgaaaaagttgagtctcagtacgaaaaaatcggtaccgtgagcacggctaacgaagtctctgtcgacgatgcgaaaaaagagctggtcgaaaaggccgataaagaaggtgctgatgtgctggtgctgacttccggtaatacaaacaacaaaattcacggcaccgccgatatttacaagaaaaaataa

SEQ ID NO: 524731 - DNA, 2184 bp, Stenotrophomonas maltophilia
atgaacaacaccacaatgcacaaaacgctgctggcgattgccatcggcgcggttacacactccgcctttgcggcggaagagaaaaaagaggacaccatcgtggtccagtccacggcggggagtgatttcaaacccggcggtgaccaactgcttccggccttcctcgacggccaggtggctaacggcggacgtatggggatgctcgggcagcagaacgccatggacgtgccgttcaacatcattagctacacctcgaagctggtggaagatcagcaggcgaaaaccattgctgacgtggtcgctaacgacgcgggcgtgcagttcgttcaggggtacggcaacagcgcggaaaccttccgtatccgcggcctgaagtttgacggcgacgatatgacctttggcggattgtccggcgtactgccgcgccaggtggtggatgcccagatggttgaccgcatcgagatcttcaaaggggccaattccctgatgaacggcgcggccagctcgggcgtgggcgggatgatcaaccttgagccaaaacacgcgggcgacatcccgcaggcgaaagtgggcgtcgactacacctcggattcccagattggcaccacgctggatgcggggcgtcgctttggcgataacgaccagttcggcgcgcgggtgaaccttgtgcatcgtgaaggcgaaaccggcgtgccgaacgaccgccgccgcaccacgctgctctccaccggtctggattacaaaggtgaccgtttccgcacctcgctggacctgggctatcagaaaaaaaccttccacggcagcccgaccagcgtcaacatctcggcggtggacttcgtgcctgaaccaccgaagaacgatcgcaacttctcgcagaagtgggcctacagcgatatcgaaaacgaattcggcatgtggcgcagcgagtacgacatcaccgatagctggacggcctataccggcctcggcgcacagcacgcgcacgaagaggggatctacagcgcgccgaagctcctggataaaggcggtaatgcgacggtcagccgccttgataccaaccgcatcagcgattccgtcagcggcatggcgggcattcgcggtaacttcatgaccggcttcgtctcgcacaaggtgaatgtcgggtattcggcgatgaccaaaaacgaaaaaatcgcgtggaaaatgtctgccgcggcggataacccgaccaccaacatctaccacaacactggcgttgctatgccggacagcagcaacttcagcggctcaggcggcaaatacagcgatccgctgaccagtgggcgcacccgcacgcagggctggctgttgagcgataccctgggcgtgctggacgacaaactgctgtttaccgcaggcgcacgccatcagaaagtggtgattcgcgggtacaacaaaattaccggtgcggaaaacgacgcggacggttttgacggtagccgctggatgccaacctacggcgtggtctataagccgtgggaggaaatttccctctacgccaaccacaccgaggcgttacagcccggtgaaactgcgcctcgctcagcaaacaactacggccagagcaccggtatcgtgcactctaagcagaacgaagtgggtgtaaaggcggactttggccgcgtgggcggctccctggcactgtttgagatcaaaatgccgtcggctatcctcgacgacagcggccactacggcctggacgctgaacagcgtaaccgtggcgtggagctgaacgttttcggcgagccaatgcttgggatgcgtctgaacgccagcgccacctggcttcaggccgagctgaccaaaactaaaaacggcgtgaaccaggggaacgacgcgatcggtattccgagcttctacgccgtgctgggggcagaatacgatatcaagccgattgagggcctgacggcgaccgcgcgcgttaaccactccggcacgcagtatgctgacctggcgaataccaaaaagctggacagctacaccacgctggatctgggcatgcgctatcgcttcgcggtgaaccacaatgaaaaccagatgaccgtgcgcgcaggcatcgacaacgtgaccaacgagaactactggtcaagcgtggatgattccggtacttacatcactcagggcgagccgcgtacctttaaggtctcggttggctacgagttctaa

SEQ ID NO: 524732 - DNA, 1974 bp, Stenotrophomonas maltophilia
atgggcagacccctcaaatccgtatttaaaaaagaacatcgcgacgatatcagtaaccgcagcgctaacccggtattctccgaggtggcagaggtgttcctctcccgccgccgttttctccagatgggggccgtagcgggggctgccgtatcattcccgtatctgatcacacccgagaatgccattgccgcggtctcaaaaccgtccgcgctggcaaaagcggtttccctgggctttaccagcatcgacgtctccacggaagatacggtcagggtgccggaaggctatattgcccgtccgttctatcgctggggcgatccgacaggcatcaaaaacaacatgccggcgtttaaaccggacgccagcaataccacagacgaacaggccgtgcaggcgggcatgcaccacgacggcatggcgtggtttagcctgccgcagggcgggcaaagcccggagcatggcctgctggcgctgaaccatgaatacatcgacaacggaatgctgtttacggacggtacggcgaactggagcctcgacaaagcccgcaaggggcagaacgcgatgggcgtgtcggtggtggaagtgaaaaaaacgggcagcgcttgggaggtggtgcgtccgtcttcgttcgcccgccgtattaccgtcaatacgccgatgcagcttaccggcccggcgcggcatcaggacttaatgaaaaccgccgccgatccgcagggggaacgcgttctgggcaccatgcagaactgcgccaacggccacacgccgtgggggacctatctcacctgcgaggagaactggtcggacatatttgtgaaaaaagccgatctcaacccgctggaaaaacgctacggcattagcgacagcgatgaatcataccgctggaacgaggtggatgagcggttcagcgtcgataaaacccctaacgaacccaaccgtttcggctgggtcgtggaaatcgatccctacaacccgacctccaccccgcgcaagcacaccgcgctgggccgcttcaagcatgagggggcagccgtcacgctcgccgccgataatcgcgtggtggtttatatgggtgacgaccaaaagtttgagtacatctataaatttgtttcggataaaaaatacgatcccgcgaaccgcgaagccaatatgcagctgctgacgtccggcacgctgtacgtcgccaggttcaacgaaaacggcagcggcgactggctgccgcttgtcttcgggcaaaatggcctggataaaagcaacggttttgcaagccagggcgatctgctgattaaaacccgtctggcggccgacgtggtgggggcaacgaagatggatcgccccgagtggatagccgtcgatccgcacgccagcggcagcgtctactgtacgctcaccaacaacagcgatcgcgggaaagagggcaaggcaccggtcgatgctgctaacccgcgcgccaacaacgtgtacgggcatattatgcactggctcgaagagggggccgatcctgccgcctcacgctttaagtgggatattctggtcatggccgggcgcaccgacggcgacgatccgaaggccaaaggctcgatgcagggcgcggaatttggcagcccggacggcctgtcgtttgaccaccagggcgtcctgtggatccagaccgatgtctcctccagcaccatcaataagaaagcgtacgaggggatgggcaataaccagatggtggctaccattccaggcaccaacgagtatcgccgattcctgaccgggccgcgcgggtgcgaaatcaccggcattgcatttacgccagacaaccggacgctgtttatcaacattcagcatccgggggagggtggggatgatattaccgacccggccaaccctcgcgctgtttccagctggccagacgcgagcccgaacgggcgtccgcgatcgtcaacggtggtgatcgtcaaagcagacggcgggatcatcgggtcgtga

SEQ ID NO: 524733 - DNA, 1386 bp, Stenotrophomonas maltophilia
gtgaaagacgcgtcatccgcttcaggccatggtagcgctgaagcttcgtcggatcagagtccgacgctgcaacgtggtttgcaaaatcgacatattcagttaattgcccttggcggcgcgatcggtaccgggctgtttctcggcatcggccccgccattcaaatggctggcccggcggttctgctgggttacgctctcgcagggattatcgccttcctgatcatgcgccagctcggcgagatggttgttgaagagccggtgtccggctccttcgcgcattttgcctataaatactggggtccgttcgcaggcttcctctccggctggaactactgggtgatgtttgtgctggtgggcatggcggagctgaccgccgcaggcatctatatgcagtactggctgccggatgtcccgacgtggatctgggcggcggccttcttcatcattattaacgccgttaaccttgtgaacgtgcgcctgtatggcgagaccgagttctggtttgcgctgatcaaggtgctggcgattatcggcatgatcggctttggcctgtggctgctgttctccggccacggcggcgagcgtgcatcgatcgacaacctgtggcagcacggcggcttcctggcgactggctggaaagggctgatcctctcgctggcggtcattatgttctcctttggcggtctggagctgataggtattaccgctgccgaagcgcgcgatccgcacaaaagcattccgaaagcggtcaaccaggtggtgtaccgtatcctgctgttctatatcggctcgctggtggtgctgctggcgctctatccgtgggtggaagtaaaatctgacagcagcccgttcgtgatgatcttccatgacctgaacagcaacgtggtggcttccgcgctgaacttcgtcattctggtggcgtctttgtcggtgtacaacagcggggtttactccaacagccgcatgctgtttggcctctccgtacagggcaacgcgccgaagttcctcacccgcgtcagccgtcgcggcgtgccgatcaattcgctgttcctttccggcgctatcacctcgctggtggtgctgatcaactatctgctgccgaaagaggcgtttggcctgctgatggcgctggttgtcgccacgctgctgctgaactggatcatgatctgcctggcgcacctgcgctttcgcgccgcgatgcgccgcaaggggcgcgagacgcagttcaaggcgctgctctatccggcggggaactacatctgtatcgcattcctcggcctgattctggtgctgatgtgcaccatggatgagatgcgcctgtcagcgatgctgctgccggtgtgggtggtgttcctgtttgttgcgtttaaactctctcgaaggtaa

SEQ ID NO: 524734 - DNA, 1236 bp, Stenotrophomonas maltophilia
atggtgtcaactgagagtagtgaaaagacgataacgcagcaccggctgctggtgccgcgtctgtcgctgatgatgtttctgcaattttttatctggggtagctggtcggtcacgcttggcctggtgatgacccggcacaacatgtcactgctgattggcgacgcgttctcagccgggcccatcgcctccattctttcgccgttcgtgctcgggatgctggtggaccgcttcttcgcttcacagaaggtgatggcggtgatgcacctcgcgggcgcggcgatcctctggttcgtgccgggggcgctgattgctgagaacggcgcgctgctgattggcctgctgtttggctacacgctctgctacatgccaacgctggcgctgaccaataacatcgcgttccacagcctggcaaacgtggataaaaccttcccggtggtgcgcgtgtttggcaccatcggctggatcgtggcgggcatttttattggcgtcaccggcgtggcgtccagcgtgaccatcttccaggtggcggcggtcagctccgtgctgctggcgctctatagcctgacgctgccgcacacgcctgcaccggcgaaaggcctgcctgtgaaggtgcgcgatctcttctgcgcggacgccttcgcgctgctcaaaacccgccacttcttcgtcttctccgtctgcgcaatgctgatctccgtcccgctcggcacctattacgcctacaccgcctcgtatctggcggatgccggcattgccgacgtcagcaccgccatgtccttcgggcagatgtctgagatcgtcttcatgctggttattccgctgctgttccgccgcctgggcgtgaaatatatgctgctgatcggcatgctggcgtggttcgtgcgttatgccatgttcgcgctgggcgtcagcgaggaggggcgcattctgctgtatctgggcattctgctgcacggcgtctgctacgatttcttctttgtcgtcggctttatctacaccgaccgcgtggcgggagaaaaggtcaaaggccaggcgcagagcatgatcgtgatgttcacctacggcatcggcatgctgctcggctcgcagatttcaggggcgctttacaaccgcctggtggcagggcagaccgtgccgcaggcgtgggttacattctggtggatcccggcggtggctgccgcggcgatcgcgctgattttccttctcacgtttaagtatgacgatgacaaggcgtaa

SEQ ID NO: 524735 - DNA, 1026 bp, Stenotrophomonas maltophilia
atgaggacaatgaaaggaccgggtatttttctgtcgcagtttattggcggggaagcgcccttcaacacgctcgacgggctggcaggatgggcggcgtcgaagggttacagagcggtgcaaatcccctgcaaccatccgcatatctttgatgtggagaaagccgcagagagtcaggcctactgcgacgacatcaccgcaaagctggccgcgcacgggctggtcatcagcgagctgtcgacccatctggaagggcagcttgtggcggtgaacccggtttacagcgaggcgtttgaccacttcgcacccgcatccgtgcgcggtaacgatgcggcgcgtcaggcgtgggcgacggaaaaactgaagcaggcggcggtcgcctcggcccgattaggcctgaaagcgcacgccaccttctccggctcgctggcctggccgtttttctatccgtggccgccgcacaacgagcagcgttttcaggaggcgttcgaggcgctggcaacccgctggcggccaatactggataccttcgacgagcagggcgtggacgtctgctttgagctgcatccgggggaggatctgcacgacggcgtaaccttcgagcgttttctggcgctggtggataaccatccgcgctgcaacattctctacgacccgagccatatgctgcttcagcaaatggattacctgacctttattgatctctaccatgcgcgcattaaagcgttccatgtcaaggacgcggagttccgccccagcgggcgcagcggcgtctacggcggctaccagccgtggatcaaccgcgccggacgttttcgctcgctgggtgacgggcagatcgactttaagggcatcttcagcaagctgacccagtacgactacgacggctgggcggtgctggagtgggagtgctgcctgaaggatggcgatactggcgcgagtgaaggcagcgaatttatccgccgccacattattcccgtttccggacgggcgtttgatgatttcgccgcagggggcagccatgattaa

SEQ ID NO: 524736 - DNA, 1167 bp, Stenotrophomonas maltophilia
atgatttcgccgcagggggcagccatgattaacgtcgggattatcggcagcgggtttattggcccggcacacatcgaggcgctcaggcgtctcgggtttgtgcaggtggtcgcgctctgcgacggttcgctcgttaaggcgcaggaaaaggcgcgccagctaaatgtgccgcatgcttacgccagcgtggaagaactgctcgcgcaccccaatctgcatgcggtgcacaactgcacgccgaaccacctgcacgcggagattaaccgccagatcctgcgcgcgggcaagcacgtgttttccgaaaagccgctgtgcatgacgccggacgaggcgcgcgagctggtggcgctggcagagcaggcgggcgtggtgcatggcgtgagctttgtctatcgtcagtttgcgatggtgcgccaggcggcgagcatgatgcgcgccggcaccctcgggcggctgtttgcctcgcacggcagctatttacaggactggatgctgctggaaaccgactacaactggagggtggatgccgcgctcggcggcgcatcgcgggcggtggcggatatcggctcccactggtgcgatacggtgcagtatgtcaccggcaggcgcattactgaggtgatggctgatttatccatcgtctggccgacgcgcaaggctaacgtggcgggcagtcagacgtttacgcacgacgaacatgctcactatgaagataaactggtcaccaccgaggacttcggctcggtgctgttgcgttttgacgacggcagcaagggcagctttagcgtctcgcaggtgagcgcggggcgaaaaaaccgcctgacctttgaaattaacggcagcgagcagtcggtggcgtgggatcaggaaaccccgcagcagctgtggatcggccatcgcgcccgggcaaaccagacgctcagcgacgatccgggtttgatgaaccgtgatgtggccgacagcgcccatttccccggcggacacattgaaggctggccggatgcctttaaaaatatgatggcgcagttttaccgtgccgtgcaggcgggagcgatgccggataagccgcagtttgccaccttccacgatggcgccagtgtgatgtatatccttgatgcgattgtgaaaagccatcagcagcagcgctgggtgcgtgtggaatactga

SEQ ID NO: 524737 - DNA, 972 bp, Stenotrophomonas maltophilia
atgtcaattcagaaaatcgctcaactggccggggtatccgtggcaacggtctctcgcgtactgaataacagcgataccgtgaaggcgaaaaaccgcgagcgcgttttgcaggcgatccaggagagtaactaccagcccaatctgctggcgcgtcagctgcgcaccgcccgcagctatatgatcctggtgatggtctcgaacatcgccaacccgttctgtgccgaagtggtgaagggcatcgaagccgaggcggagaaaaacggctaccgcattctgctgtgcaactctggctcggatattgagcgctcccgctcgggcttaagcctgctctccggcaaaatcgtcgatggcattatcactatggatgcgttctcgaagctgccggagctggccgcgctgattggcaacgcgccgtgggtgcagtgcgccgaatacgccgatgcgggcgcggtctcctgcgtggggattaacgatgttgatgcctcccagcacgttgtcagccagcttgccgacgagggccgcaaacgcattgcgctcatcaaccacgacctcagctacaaatatgcccgtttgcgcgaacgcggctataagagcgtcatacacctgcgggatctggactatcaggcggtggagtacgccagtgagctcagctccagtgcgggcatggcggcgatgcaaaatctgttaacggcaaacccgccggatgcggtgtttgccgtttccgatacgctggcggcgggggcgctgcgcgtcattcagcaggcagggctgcgggtgccagaagatatcgcggtggtgggttttgacggcaccgagctggcggagatgatttctctcaccaccattgaacaaccgtcgcgggatatcgggcgcaaggcggtcaatctgctgttaaataagatcgacaacccggatgcgcccacggaaagggtcatgatggactggcgctttatttcccgcgccagcacctga

SEQ ID NO: 524738 - DNA, 1245 bp, Stenotrophomonas maltophilia
atgcaggaattaattgctcaggttgaagagttagggattgaaattaatcacaccacctctttagtgattatctttggtattatttttcttacagccattatcgttcattttattctgcacaaagtggtgctgcgcgccttcgaaaaacgcgcgcaggccagcagccatttatggttgcagatcattacgcagaacaagttatttcaccgtctggcgtttaccctccaggggataatcgtcaacgttcaggcggttctgtggctgcaaaaaggcagcgaagcggcggaaatgctcaccacctgcgcaaaattgtgggtgatggtctatgccctgctctccttcttctcgctgctggacgtcatattcaatctgtcgcagaaaatggccaccgcatcacagctgccgctgaaggggatattccagggcatcaagctggtgagcgccattctggtgggaatattaattatctcccttctgatcggtcagtcacccgccattctgataagcggcctgggtgcgatggctgccgttctgatgctggtctttaaagacccgatactgggcttagtggccggtattcagctctccgccaacgacatgctgaagctcggggactggctggagatgccgaaatacggggccaacggcacggtgaccgacatcggcctgaccaccgttaaagtgcgcaacttcgataacaccatcaccaccatcccgacctgggcgctggtgtccgacgcgtttatcaactggagcggcatgtcagcctccggtggtcgccgcatcaagcgtagcctgaatatcgataccaccagcattcatttcctcgatgagcaggagcagcagaaactgattcaggcgaaactgctgaagccgtatctggccgcgcgtcatgaggaaattaacctgtggaatcagcagaacggcgaaggggaaacggtattaaacctgcgcaagatgaccaatatcggcaccttccgtgcctatctgaatgaatatctgcgtaaccacccgcgtattcgtaaagatatgacgctgatggtgcgccagctcgcgcccgatgccaacgggctgccgattgaaatatatgcctttaccaacacggtgatttgggcagaatacgaagatattcaggccgacatcttcgatcatattttcgcggtggtggatgaatttggcctgcgtattcaccagtcgccaaccggaaacgatattcgctcgctggctggcgtcatcgccagataa

SEQ ID NO: 524739 - DNA, 1437 bp, Stenotrophomonas maltophilia
atgaatacgtcagttgtttcaccgggtcgtgcgggcctgatattgctattaaccggccagatgctgccgctgattgatacctcgatcaccaacgtggcgctggattccatcacccattcgttacacgccaccgccaccgaactggagctgatcgtcgccctctacggcgtggcctttgccgtctgcctggcccccggcagcaagctgggcgataaccttggccgccgtcgcttgtttatgtggggcgtggcgagttttggcctggcctcgctgctgtgcggcatggcgggcaatatcgaacagttgcttgccgcgcgcattattcagggcgcgggcgccgcgctgatcatgccgcaaattctcgcgacgttgcacgtgacgttaaaaggaacggcacacgccaaagcgatcagtctgttcggcggtatcggcggtattgcgtttatcgttggccagatgggtggcggctggctggtgtcggcggacatcgccgggcttggctggcgtaacgccttctttatcaacgtgccgatttgtctggtggtgctggcgttgagccgtcgctacgtaccggaaacccgccgcgacacgccgtcgcgcattgactggaccgggactatcctgctgacggcgatactgtgctgtctgctgttcccgatggcgctcggcccgcaatggcactggtcgtggccgctgaaggccgcgctgctggcgattgtgccgctggtctatttgatggtgttaaacgcgcgtaagaaagagcgagaagatgcccacccgctcatcgcgccgcgcctgttgcagttgcgcagcatccgctttggcgtgctgatcgggatactcttttttagcgtctggtccgggtttatgttctgtatggcgctgaccatgcaaagcggtctggggatggcgccgtggcagtccgggaacagctttatcgcgctcggcgtcacctattttatttccgcctggttcgccccacgcctgattgcccgctacagcaccagcgccatcctgctgaccgggcttgtgattcagcttgttggcctggtggcgctgatcgccacgttccgtcactgggggatgcagaataccgcgctgacgttggccccggccaccgggctggtgggttacgggcaggcgctgattgtaaacagcttctaccgtatcgggatgcgcgatattcagcctgacgacgcggggtccgcgagcgcgattttaagcacgctgcaacaggctgcgctggggcttggcccggccattttcggcgcgattttgctgcacgggctgcaaaatcatcacggagattacacacaggcgatcaacgtcttcctgatgttggaaacggccatgatgggggtgctggcagtggccacgctgcgtatgcgccatcgtctgtgtttaccggtcgtcaaggcctgtccggcgacaaaataa

SEQ ID NO: 524740 - DNA, 870 bp, Stenotrophomonas maltophilia
atggcgctgatgtctgaacctgtcacctctctccaggatgacacccgcaagcagctgggcgcgtttttgcgtgcccggcgcgaaagcctcgatccgcagcggctcggcttaccgcgcagcggccgccgccgcacgccgggcctgcgccgggaggaggtagcgatgctcgcggatgtcggtgtgacctggtacacctggctggaacagggccgggacgtcaatccgtccagcgcggtgatggccgccattgcaaaagcgctgcaatgcaccccgaccgaagcccggcatctttttgtgcttgccggtttgccgccgggcgaagccccgcaggcggtgtgctgtgaggggatcagcgaaggcacgcgtcgcctgctggataccctgatgccgaagcctgccagtattcagaaaccgaatttcgatatcgtggcgtggaacgacagcttcggacacctgatgggcgtcgatttcaacgctatcccgccggaagatcgcaactgtatttacctgttcctcacccatccggcgtggcgcgcgcggctcggcaaacgtgacgacgtgctgccgattttcgtctcctacttccgcgcggcaatggctgagcaccgtggcgacccgctctgggaagcgaagctggcgcgtttttttgcggtttctgaggagttcaaaaccctgtggcaccagcgcaacgacgtgcgcggcgtggagaaccagctcaagctgttcacccatcccgagctgggggattttcatctccagcagatgtactggtactccgccccgcgaaacggatcgcggctgctggtctatttaccggtggacgaggcgggtgagagggcgatggcatggctggaggcgcaggggaaataa

SEQ ID NO: 524741 - DNA, 183 bp, Stenotrophomonas maltophilia
atgatcgactgggcgtttaccatgaactatcgcattagtgtggcggacggtacggtgggagaagagtggacgttaacgcccgtaaattcctacgctgagctggaagagcgctggattgcttttgcctggggaaacgatcgtgaggtccatccgcatcgcaggcttgtcatcagtaaagcgtaa

SEQ ID NO: 524742 - DNA, 276 bp, Stenotrophomonas maltophilia
atgcaccgcgtggatctgaaagatgacgaccagtggatggcgaagcaggtttacctgaacgtcggcaacttcctgctgggcgtggccgcgatgggcctggacgcagtgccgattgaaggcttcgatgccgcaatcctcgacgaagagttcggcctgaaagagaaaggcttcaccagcctggtggtggtgccggttgggcatcacagcgttgaggatttcaatgccacgctgccgaagtctcgcctgccgctgagcacgattgtgactgaatgctaa

SEQ ID NO: 524743 - DNA, 423 bp, Stenotrophomonas maltophilia
  misc_feature (385)..(394): n is a, c, g, or t
atggatattatttctgtcgccctgaaacgccactctaccaaggcgttcgacccagccaaaaaactgaccgcagaagaagcggaaaaaatcaaaacgctgctgcaatacagcccgtccagcaccaactcccagccgtggcactttattgttgccagcactgaagagggtaaagcgcgcgtggcaaaatccgcggcgggcacctatgtgtttaacgaacgcaaaatgctggatgcctctcacgtggtggtgttctgcgcgaaaaccgcgatggacgatgcctggcttgagcgcgtcgtcgatcaggaagaggctgacggccgtttcgccacgccagaagcaaaagccgcgaaccacaaaggccgctgctattttgccgacatgcacnnnnnnnnnngacatgcaccgcgtggatctgaaagatga

SEQ ID NO: 524744 - DNA, 369 bp, Stenotrophomonas maltophilia
atggacagtaaagccttgcaggaacatgccagacgcgtcgcgctggagatgccttttaccgaacattgctggccgtttggcccggagtatgacgtgtttaaggtgggcgggaaaatttttatgctgatggcgaccgctcacggtcgggcccacgtcagcctgaaatccgatccggaaaaatcgctgctcaatcagcagatctaccgtggcgtggagcctggctaccatctgaataaaaaacactggatctccctttatggcacggacgacatcacgcctgaactggtcaccgacctgattacggattcgtggaatctggtcgttgataaactgccgaaaaaagatcagaagtggattcggccagcctga

SEQ ID NO: 524745 - DNA, 591 bp, Stenotrophomonas maltophilia
gtggcacgtccgaagagtgaagataaaaaacaggccttactggaagcagcaacggctgcgtttgcgcagtcaggtattgccgcctcaacggcgttaattgcccgtaatgcgggcgtcgctgaagggacactgtttcgctactttgctaccaaagacgatctgctgaatgccctctatctgcatctgaagcaggatctttgccagaccatgctggcgaacctcgatcgcaccatcacccagccaaaagagcatacccgtaatatctggaacagctatgtggactggggcattcgtaaccccctggcgcatgcggctatccgccagattggcgtcagtgaaaagctgaacattgaaaccgagcaggcggtgaaagacatgttcccggaaatacacgaactgtgtcaccgctcggtgcgcccggtgtttatgtctgacgagtttaagaccttcggtgatgcaatattcttatcgctggctgaaaccaccatggagtttgccgcgcgcgatccgtcccgtgccgtcgattttaaagcgctgggctttgaagccatgtggcgcgggcttgctgaggaagagagccatggacagtaa

SEQ ID NO: 524746 - DNA, 1227 bp, Stenotrophomonas maltophilia
atgtcaaagatcgaaaaccttcttgacggcgtaatcatcctatctataatgagtgcttactcactcataatcaagttcaacccgcgcaaactatcggacagggcgcgttggcgggtcaggataatgaaaaagcctctattcatctgcgtggtgttagtcatgattattgcttcagctgccagtttaccgtttgtactgaatgccggatttggccagccaccgcagggtgcgcagctctctgaagtggaggcctctccgcactatcgcgacgggcaattccataacacgctccctacgccgggctttaccgggcaacaaaatatgctggtggcgtggtggcagttccttacccgtaaaaccgaaaacgcccgtcctgcgcagccgctgccgctggtgaaaaccgatctggcgagcctgtcgcctgaacaggacacgctggtgtggctcggccactcctcctggtatatgcagctggcggggcaacgaatcctgatcgatccggttctgagtaactacgccgcaccgttctccttcctcaataaagcctttgcgggggagtacccgtggcgtgcggagagcatgccggagatcgacctgctgattatctcccacgatcactatgatcatctggattacgccaccatcaaggcgctgctgccgaaggttaagcgcgtggtcaccccgctggacgtgggttcgcatctgcgctactgggggatgaaccctgagattatcgacgagcgggactggaaccagtcggtacgtatcagcgatgcgctgacggttcacgtgttgccggcgcgccatttttccgggcgcggcattaagcgtaaccagaccctgtggggcagctttatgtttgtctctccggagcagaaggtctactacagcggagattccggttatggcccgcacttcaaagcaattggcgagcagtttggcggagtggacttagccattatggaaaacggccagtacgaccaggactggaagtacattcatatgcatccggcggaaacggcgcaggcctcggcagatctcaatgccagagcggtcgtaccgggacataacgggcgttttgtgctggcgaaacatacctggaacgatccactgatccagctggcgaaagccagtaaggataaaaactaccggctgctgacaccggagctgggcgagcccgtgctggtgagtgataccacgcaacaatttcgcgagtggtgggaataa

SEQ ID NO: 524747 - DNA, 342 bp, Stenotrophomonas maltophilia
atgacgatttccgctcaggtcattgatacgattgtcgaatggatcgatgacaacctacaccagccgttacgcatcgaagagattgcccgccatgcgggttactcaaaatggcatttacagcggctgtttatgcagtacaaaggcgaaagtctggggcgctacatccgcgaacgcaagctgctgatggcggcgcgcgatctacgtgagtcagacgagcgcgtgtacgatatctgcctgcgctacgggtttgactcgcagcagacgtttacccgcatctttacccgcaccttcaaccagccgcccggggcgtaccgcaaagagaaccatagccagacacattaa

SEQ ID NO: 524748 - DNA, 2145 bp, Stenotrophomonas maltophilia
atgtttaaaaataataagataatgtatctctggctgatgagtctggcgacgaccagcgtcgcggctcaggcagaaacgaaagaagaaacgattacggtgacgcagggcgtgagtgaagagcccactgcgcccgtaaaaggcattgtggcgacgaaaacgctctccgccaccaagaccagcgcggagattgtgaagacgccgcagtcggtatcggtgatcacccgcgatcagatgaacatgcaggacgtcacatccgtttcgcaggcgctgcgctactcggcgggcgtgtttaccgaataccggggctcgtctaaccgtaacgacgaggtgtttgtgcgcggctttagctacgtgccaaaattcctcgacggcttaagctttggtgcaacggcctcatcacagacgggcacagttgacccgtggctgctggagcgcgtggagctggtgcgcggcccggcgtcggtcctgtttggtcaggtgaatcctggcgggttaatcagcatgaccagcaagcgcccgacggcggaggccattcacaacgtgcagttccgcaccggcaataacgatctcgccgaaggtgcgtttgatttcggcggcaggctgagcgacgacggccgcgtactgtatcgcgtgaacggtatcgcccgtacgcagcataatcaggtggacgattataaagagacgcggatggcgatcgccccggcgatcacctggtatccgaacgatcagacccgctttacgctgctgaccagctaccagaaagatccggatgccggataccgcaacttcctgcccgcgtatggcacggtgaaaagcgtcgacgggaagtacatcccacgcgactttaacgtcagcgatccgaattacaatcagtcctggcgcgagcagacgatgattggctacgagctggaacaccagttcgccgacaacctcaccttccgccagaacgcccgttacgccaccatcaagcagaaataccgttatctggtttacgccaacagcgcggccaacagcacggtgttgacccgtcgcgcccagcgtgaagagcgcacgaccaatgaatttggcctcgataaccagctggaatatctgctggagaccgggagcgtcagccataccctgctcggcgggtttgattacaagacaagcaaggataaacagctgctggcgcgcgggagcggctcacagtatgacctcgactggacaaccccggtttacggcgtgaacgtggatgaaagcaccttcaaaacggcctccgacgagcagcaaaatctcgaccagatggggctgtatcttcaggatcagatgagttggaacaactgggagtggctggtttccgggcgctacgactggagcgaagtgcgtaccaacgacttcaccgataatagctttacgcagcagaacgacagcaaatttacctggcgcactggcctgctgtacgcgttcgattttggtctctcgccgtacatcagctacagcacgtcgtttgagccgaacctgcaaaccaaccgtgcgccgggcgtcgcgccattcaggcctactaccggggagcagaccgagattggcctgaaatatcagccggtcgacaccacgctgatgactctcgcgctgtacgatttaactcaggacaacgtagcgacctataacagcgctgaaggctggttcgaaaatgcgggcaaggtgcgttcgaaaggcgctgaagcggaaatccacgccacgctgatggataacatcaacctgattggctcctacacttacaccgatgcaaaaaccgaaagcaccacggtggcgggcaccgagggcaagaccccggcgcgtatcccgacgcatatggcgtctgcgtttgccagctataccgttccgggcggggcgctcaagagcctgaccgctggcgtggggatgcgctacatcggcaccagctacggcgatgcgaagaacacctttaaggtgccatcggtggatctgtatgacgcgatgctgcgctacgatctgggcgagatgaaccgcagcctgaaaggggcaagcgtgcagttcaacgtcaataacgtggcggacacgaagtatgtggcatcatgcgcaagcgatacggcgtgcttctacgggattggccggacggtgacggcgacggtgaattatcggtggtaa

SEQ ID NO: 524749 - DNA, 1569 bp, Stenotrophomonas maltophilia
atgaagagggtatggagtgggttgctgttggggatcggcgcgctgcccgccatggcggcaacgtgcgagcagtcgtcccggcagggcgatgttcagggaaagtttgatgccagcggcgaagtctgcttctccctgcctgaactgggtgaaaattacgtttccgccacgctgaatggcgtgacggatgcgcgcctgctggatgggcaaaaccgccgcatccgcacgctgatcgaaaacggtcctgcggacggggaacacacgctgctgtttgccctgccggtgaaacagaacacctcgctggtgctacacggcgaagccggtaagccgtggcgttttcagtggcggatgaaagagacctctccgttaccacgcgtgcagatgctggcgccagaaagcccgacgctaaaggcgctggcaaacgtcatttctgccggtggaagtaccgaggcgttctggcaggcgcagcgtcgacagggaacgccaatggtggaaccggtagatgcgaaccataagcgcgtgacctttctgtggcgcggcgcgcgggataacgtcttcattctcggctctccggcgggggatcacgatccgctgttccgcctgggcaacagcgacgtctggttccgcagctacgtggtccccgctgatacggtgatgcaatataagctcgcccccgatgtgccgatcgttgaaggctctgcccgcgatcaacgccgcgccatcctggtgagcgcacaggccgatccgcttaacccgaacacctttggggagcagaaggcggatcgatggaaccgttactcgctgctcgatctcagcccggcgcgctactgctccgttcaggccacggcaaagccgctggtgcacgggacgttgagccgtcagagtttttccagccacatcctcggcaacgcccgcgacgtgatgatctacaaaccgcgcggcgcacagcccgcacgctggacgttaattctgttcgacgggcagatttatcaggacgaataccatttcgccaacgtgctggacggtctgattgcccggcatcacctgccaccgattaacgtggtgtttatcgacagcctcgatcacgcccgtcgcggcaacgagctgccgccgaacccggattttgctgactttttggcgcacgagctgctgccgtggctgcgcgagcagggcatcggcatgcagcggcagaaaacggtgctggcggggtcgagctacgggggaatcgcctcgtcatgggtagcgctgcgctatccgcgcctgtttggcaacgtgctgagcctttccggctcctactggtgggcgccgaaaggtgacgcccccggctggctgacgcgtcagtaccagcagtcgccgccgtatccggtgcgcttctggttacaggccggaaagtttgaaaccacggggccgggcggcggcatttatcgcaccacgcaggattttgaacaggtgctgaaggaaaaaggctatcgcgtcagcttccacccctcatccagcggccacgactacgcggcctggtgtgaagcgctgatccacgggatgcgcgatcttactggcttacgacgccagtga

SEQ ID NO: 524750 - DNA, 249 bp, Stenotrophomonas maltophilia
atgaaacacccgttagaatcgctgctcaccgcagggggcattttgctgatggccctgctctcctgtctgctgttacctgcgccgtcgctgggtctggtgctggcgcagaaactggttcagacctttcatatggtcgatctgaatcagctgtacaccattctgttctgtctgtggtttttggtgctcggcgccatcgaattctttatcctgcgtttcatctggcgccgctggttttcactggcgtcgtaa

SEQ ID NO: 524751 - DNA, 2709 bp, Stenotrophomonas maltophilia
atgaccaaaaaaaatttctcgcagaatatgccacccgcaggcgggcaggcgtaccagcagaccgtagagcaggtgcttgctcaggcgcagagccaggcgaatggtctggaccgcaccgaggcgcaggcgcgtttgcagaagcatggcccgaacgcgctgccggagaaaaaaggcaagccgggctggctgcgttttctcgcgcattttaacgatgtcctgatttacgtcctgctggcggccgccgtattaacggctgtaatgggacactgggttgatacgctggttatcctgggcgtggcggtaatcaatgccttaattggccacattcaggaaagtaacgcagaaaaatccctgaagagtattcgcaatatgctctccagcgaggcgcgcgttattcgtaatggtaaccatgaaaccatcccgacgacggaaatcgtcccgggcgatattattgtgttgcgcgcaggagatcgtattccggcggatatgcgcttaatagaagcgcataatttacgcgtggaagaggcaattctgaccggcgaatccaccgtggtggataaacacattaatccgctgagcggtgaattgccgctgggcgaccgcaccaatatggtcttctccgggacgaccgtaagcgcgggcggtggcgttggcctggtcaccgcgaccggtaaggatacggagctcggccacatcaaccagatgatggcgggcattgaaaagcaccgcaccccgctgctggtgcagatggacaagctgggcaaagcgattttcgccatcattctggcgatgatggccgcgctgtttgtcttcagcctggtgttccgcgagatcccgatgggcgagctgctgctctccctgattagcctggcggtagcctccgtaccggaaggtctgccggcgattatctccatcatcctctctctgggcgtacaggcgatggcgcgtaagcgggcgattatccgcaagctgccgacggttgaaaccctgggcgcgatgaccgtggtctgctcggataaaaccggcaccctgaccatgaacgagatgacggtgaaagccatcattaccgccgatgcgtgctatcgcgtggacggcaacagctacgagccggtgggcaacctctacctcgaaggcagcgacgagccggtgcagatccagccgggcaccgtgctggagcagtacctgcgcaccatcgacctgtgtaacgacagccagctgattcaggacgagcgcggcctgtggggcatcacaggcggcccgaccgagggcgcgctgaaggtgctggcggcaaaagcccacctcgcaccggtcgagaccaccctggtcaacaagatcccgttcgactcgcagtacaagtacatgagcacccactaccagattggcggtgaggagcagattttgatcaccggcgcgccggacgtgattttcgccctgtgtgagcagcagcagacccgcaacggtgcgcaagcctttgaccgcgcgtactgggaaacggagatggagcgctatgcgcgtcaggggctgcgcatggtcgccgcggcgttcaggccagcgaacggtgagcaggcactgactcacgacgacctgagccacggcctgatcttcctcggcattgccgggatgatggatccgccgcgtccggaagcgattgaggcgattaacgcctgccagcaggcggggatccgcgtgaagatgatcaccggggatcacccgcagacggcgatgagcataggccagatgctggggatcactaacagcgagcaggcggtcaccggctatgagctggagaagatggacgacgcggagctggccgaagcggcggtgaagtacgacatcttcgcccgtaccagcccggagcataagctgcgcctggtgaaagcgttacaggacaaaggcgaaatcgtcggcatgaccggtgacggcgtgaacgatgcgccagcgctgcgtcaggcggatgtgggtattgcgatgggcatcaaaggcacggaagtcaccaaagaggcggcggacatggtcctgacggacgataacttcgccaccatcgccagcgcggtgaaagaggggcgtcgcgtttacgacaacctgaagaagaccattctgttcatcatgccgaccaacctggcgcaggggctactgattgtgattgcgctgctggcggggaacatcattccgctgacgccggtgctgatcctgtggatgaacatggcgacctccgccacgctctccttcggcctggccttcgaggccgccgagcgcaacatcatgcgccgcccgccgcgtcagaccgggcagcacgtgatggacgcctacgccgtatggcgcgtggctttcgtcggcaccatgattgccatcgccgcctttgcgctggaagcctggctggccccgcgcgggcacagcgcggagttcatccgcacagtgctgctccagatgctggtctgcgcccagtgggtgtacatgattaactgccgcaacaccgaagggttctccctgaaccgcggcctgctggcgaacaaagggatctggctggtaacgggcgtactgttcctgctccaggcggcgatcatctacctgccgtttatgcagatgctgttcggcaccgaagcgctgccgctgcgctactggttcgtgacgctggcggtggcgggggtgatgttcttcgtcgtcgaaatcgagaagcgactgacccgcaggttccgtaaggctgcataa

SEQ ID NO: 524752 - DNA, 1065 bp, Stenotrophomonas maltophilia
atgaaactcccacttctgttcgcgctcctcgccgctaccctgccgcccgcattcgccgcagtcattcccgtgcgtgtcgccaccgtggagcagaccgcccacgccgccgaacgtcagatcccgggtcgcattgaagcgattcacaccgttgaactgcgcgcgcgtacggaaggcgtcatcaccaaaatccactttcgcgacggccagtacgtgaaaaaaggtgacgtgctgttcgagctggacgacgccgagccgcgcgccgccctgcgcctggcgcaggccgaagtgaaaagcgccgaagccacgctgcgtcaggcgcagcagcagctgtcccgcttcgaaagcctgggcagcagcaacgccatcagccgccacgacgtggacaacgcccgcatgcagcgcgacgttgccagcgccgcgctggagcaggcgaaagcccgtctcgacacccgcagcgtcaccctcaactacacgcgcattacctcaccgattgacggacgcgtggggcacagcaactttcacgtcggcagcctggtggatcctgccagcggtgtgctggtagaggtggtgcagctcgatccgatccgcatcgcctttgcgctggaagagggcgcgtttgccaccaaagccggacagcatgcggatatcagcgccatgaagcaggcctggcaggcgctgattgacagcaacggccagcgcgtcagcggggaactcacctccgtggacaaccgcatcgacccgcgtaccgccagcgtgatgctgcgcgccgagttcgccaacccgcgccatcagctgctgcccggcggcaatgtgaacgtctacctgcgtccggcaagcgagcagcctgtcctgaccctgcccgccgctgcggtacaacagaatggcgacgggttcttcgcctgggtggttaacgccgaggataaagccgaaatgcgtccgcttaaggtcgccgggcagatgggccagcagttcctgattgcctccggcgttaagcccggtgagcgagcaattactgacggtgcgcagcgcgtgcagccaggcgctgccgttcagatactgaattaa

SEQ ID NO: 524753 - DNA, 3156 bp, Stenotrophomonas maltophilia
atgctgacgtttttcatcaaacgcccgcgctttgcgatggtgattgcgctggtcatcaccctgctgggggccatcgcgctgaggattattccggtggagcagtacccgcagatcacaccgccggtcgtgaatgtgtcagcgtcatggccgggcgccagctcggctgacgtggcggaggccatcgccacgccgctggagacgcagctgaacggggtggatcatatgctctatatggagtccaccagttcggacgaaggcacgtacagcctgaacatcacctttgcggcgggcaccgatccggatctcgccgccatagacgtgcagaaccgcgtggcgcaggccgtggcgcagctgccgaccgaggcgcagcaaaacggcgtgcaggtgcgcaagcgcgccaccaacctgatgatgggggtaagcctttactcaccaaataacacccacacgccgctgttcgtcagcaactacgccagcacccaggtgcgcgaggcgctgtcgcgtctgccgggcgtcgggcaggtacagatgtttggcgcgcgcgactacagcatgcgcatctggctgcgtccggaccgcatgaatgccctgaacgtgaccagcgatgacgtggcgcaggcgttgcgcgagcagaacgtgcagggggcggcaggccaggtcggcacgccgccggtgtttaacggccagcagcagacgctaaccatcaacgggctagggcgcttaaaccaggccgacgactttgccaacatcattatccgcaccggggagatgggccagctggtgcgcctgaaggacgtcgccaccattgagcttggctcgcgcagctacagctcgggcgcgcagctgaacgggcatgactccgcctaccttggcatctacccgacgccgtccgctaacgccctgcgcgtggccgatgcggtgcgcgcggagctggaacggttatccacgcgcttcccggacgatctggtctatgaagtcaaattcgacaccacctcgtttgtggccgctaccatcaaagagattggcgtctcgctggcgctgacgatgctggcggtggtggtcgtggtgtccctgttcctgcaaagctggcgcgcgacgctgattgtcgcccttgccattccggtgtcgctggtgggcacctttgcggtgctctacgcgctcggctactccgcgaacacgctcagtctgttcgccatcattctggcgctgaccatggtggtggatgacgccatcgtggtagtggagagtgtcgaaacgctgatggcggaagggcagagccgcacggcggcgaccgcgctggcgctgcgtcagattgccgggccggtgattgccaccacgctggtgctgctggcggtgtttgtaccggtggcgctcctgccggggatcgtgggcgagctgtaccgccagttcgcggtgacgctctcgaccgccgtcacgctctcaagcctcgtggcgctgaccctgacgcccgcgctctgcgcgatgctgctgcgcccgcgtccggcacagcccgccgccgttttccgtgggttcaaccgcgggctggacgccacgcgcacgctttacacccggatcgtgagcgtgttcaacctccgtccgtggctggcgctgctggccaccgcaggcgcggcggcggtggtggtattcagctttatgtcgatgccaaagggcttcctgcctcaggaggatcagggctacttcttcgccagcgtccagctgccggaggcagcctcgctggagcgcaccgaagcggtgatgaccaccgcgcgcgagctgatcgctaaaaacccggcggtggaagacgtgattcaggtctccgggtttaacatcctcaacggcaccagcgcatcgaacggcgggtttatctccatcatgctcaaagactggagcgagcgtccgccgctggatgaggtgatgggcacccttcagcgccagctgctggccctgccggaagccaccatcatgacctttgcaccgccgacgctgccggggctgggcaacgcctccggcttcgatctgcgcattcaggcacaggcggggcagagcccggcggagctggagcgcgtaactcgcgaggtgctggcgaaagccaaccagcacccgcagctgagccgcgtgttcaccacctggagcagcaacgtgccgcagatgacgctcaccgttgaccgtgagcgcgcggcccgcctcgacgtgccggtgtcgcgcatcttcagcagcctgcaaaccgcctttggcggcacgcgcgccggggatttcagcgtcaacaaccgcgtctaccacgtggtgatgcagaacgagatgcagtggcgcgagcgcgcagagcaaatcagcgagctgttcgtgcgcagcaacagcggcgagcgggtgcgtctgagcaacctcgtcaccatcacgccgaccgtcggcgcgccatttattcagcagtacaaccagttcccgtcggtatcggtgagcggctcggcagcggaaggggtgagcagcagcaccgcaatggcggcgatgggcgagattctggcggaaaacctgccagccgggtacgactacgcctggagcggcatgtcgtatcaggagcagcagaccgggaatcaggcgatatggattgtgctggcggcggtggtgatggcgtggctgttcctcgtcgcccagtatgagagctggacgctgccggcgagcgtgatgctctcggtgctgttcgccatcggcggagcgctggtctggctgtggctggcaggctatgccaacgacgtgtacgtgcagattggtctggtgctattgatagccctcgccgccaagaacgcgatcctgatcgtggagtttgcccgcgcccggcgtatggacggaatggcgattgtcgatgccgcgcgggaaggggcatcgcgccgcttccgcgcggtaatgatgaccgccgtgtcgttcatcataggcgtcctgccgatgatgctggcgaccggggcgggtgcccagagccgccgtatcattggcaccacggtgttcagcggcatgctggtagccaccgtggtggggatagtgttcatcccggcgctgttcgtgctgttccagcgccttcgcgaatgggggcacggccttacggactcgtcgcccacagctcacagtgcttctgcaccagagaaatcagcgagccgccatcggcgataa

SEQ ID NO: 524754 - DNA, 1122 bp, Stenotrophomonas maltophilia
atgcccttacccgatttcaagtcctctgaaccttataccctcggcattgagctcgaactccaggtggttaacccgccgggttacgatctgagccaggactcctctgccctcatcgccgccgtcaaagacgacatcaaagggggcgaagtcaaacacgacatcaccgaaagcatgctcgaaatcgccaccggcgtatgccagaccatcgaccaggcggcggcccagttctccgtgatgcagcagagcatcctacgggcggcgtcggagcagcacatccagatctgtggcggcggcacgcacccgttccagaaatggcagcggcaggaggtgtgtgacgacgagcgctataacgtcacgctggagcgctttggctatctgattttgcaggcgacggtgttcggccagcacgtgcacgtgggatgccgaaacggggacgacgcgatttacctgctgcacggcctgtcgcgcttcgtgccgcactttatcgccctcgccgcgtcgtcgccttatatgcagggcacggacaccaagttttcctcgtcgcggctcaacatattttccgggttcccggataacggccagatgccgtgggtcaacagctggcaggagttcgaggggctgttccgccgcctgagttccaccagcatgatcgacagcattaaggatctgcactgggacatccgccccagcccgcactttggcaccgtggaggtgcgggtgatggatacgccgctgacgctcggtcacgccattaacatcgccgggcttattcaggcgacgtcgcactggctgctgactgcgcggccctataagcatcaggaacgggattttctgctgtaccgctttaaccgttttcaggcctgtcgctacgggctggaaggcattctgacggacgtgcataccggcgagcacaaaaccgtggcggaggatatcgcctggctgctggagcaggttgcaccgtcggccgagaaactcggcgcgacgagcgccatcaaggaaattgccctgctgttaaagcagggcaagagcgaggcgcagcgcatgcgggactttatcgccgatggcggctcgctgatttctctggtgcagaagcactgtgagctgtgggcgacgagtccgtaa

SEQ ID NO: 524755 - DNA, 891 bp, Stenotrophomonas maltophilia
atgtctgactatccaaccattgcgctgattggtcccggtgcgattggcaccaccattgccgcggtgctgcatgacgcgggccgtacgccgctgctgtgcggtcgcaccgcgcatccggtattacgcctgcgtcacgatgaggatgaaactgtggtgcccggtccggtactcaccgatcccaccgtcattacgcgccccgtagacctcgtttttgtggcggtaaaaacgacgcaaaatgccgacagtgccgggtggctgcgcgccctgtgcgatgaaaacaccgtggtctgcgcgctgcaaaatggcgtggagcagaaagcccagcttgcgcctttggtcaacggcgcaacggtgctgccgtcggtggtctggttcccggcgcagcgcgagccggacgcctccgtctggctgcgggcaaaaccgcgtctgacgctaccggacgtgccgcaggcgcagcgggtggtcgaggcgcttcgcgggacgcgctgtgatgttgagctctcgacagatttcaccaccgtcgcctggcgcaagctgctgcaaaacgcggtcgccgggctgatggtgctggccaaccgccgcgccgggatgttcagacgcgaggatatcagcgaactggcgctggcctacctgcgcgaggggcttgccgtcgcccgcgccgaaggggcgaagctggacgatgcggtggcccaggagattctggcgaacttccagcgtgcgcccgaggatttaggcacgtcaatccttgccgaccgtcaggccgatcgcccgatggagtgggatattcgtaacggcgtgatccagcgctatggccgcaggcatggtattgcggtgcccatcagcgacgtggtggtgccgctgctggcggcggggagcgaggggccgggctaa

SEQ ID NO: 524756 - DNA, 438 bp, Stenotrophomonas maltophilia
atgtcagaaccatcttcgcagtgcctgtttaatgaaggaatgattgcttttcctgagggctatcaggaccgtaccgtcaatgtcttcgcgccgcctgcagcggatgcgcccgcgttcaacatttcccgcgatgccctcaaccccggcgaagcgcttgccgcgtatatcgatcgccagctcgccctgatggcaaagcacatcaagggctggaagcagggtgagcgcagcaccgctacgctgggcgacagccttttacagggtgaaaccgtccatgccagctacctgcgcgacgggaaacgcatctggcagcagcaggccgtgtttaacgtcgacggcgataaaatcctggtgttcactatgacctgcacccgcgcgccgggcgatgccgacgtcgtgctgtttggcgatcttctcaggagcttccgcttccaccattaa

SEQ ID NO: 524757 - DNA, 2625 bp, Stenotrophomonas maltophilia
atgtttgaagcagcacgcgttggtgatgatatcggccactccggtgcgctggccgggatgattgccggaacgattgtcggtggcctgattgccgcagccgggggcattctggcgggggccatgtttattgccggtctcggcgcatcctgtcttggcgtgggcgtcctgctcgtcggcgccagcctggccgtgggatattacaccggggagttggcgactgccgccagggacagcatcgccgacgccggggcatccagcatgacgaagaaaggcgtcatcacctccggctcgcccaacgtgtttatcaacggtaaacccgccgcgcttgccaccgatagcaccgtcgactgttctgacgacggctcgcagcagatggccgaaggctctaagcgagtctccattaacagccagcctgcgtcacgcatcggggatcgcaccacctgcgacgcgaaggtgatgaccggttcggacaacgtcattatcggcggcgatccgcagcaaaccctccccattcagtctgaagtgcccgagtggctctacaaggtctccgatcttaccctgctgttcgccgggcttctcggcggctggggcggtgccgctggcaaagtcggagcgctctctaagctgctgggcaaaatccccggcatcaacaagctggcccgtatcgcctgtcgcgccggcacgctgatgaccggcgtggcggccgcggggatcatcgcccgcccggtggatatcgtcagcggacagaagtttctcagcggggatgatgagctggacttcgtcctgccttcccgtcttccggtgcgctggcagcgctactggcgcagcggcaatcccggcgacagcgtgttgggccgcggatggagcctgttctgggaaagccgcctggagccttatcaggacggcctggtgtggcgcgcaccgtccggcgattacgtcgccttcccgaaggtcccgaaagggatgcgctcctactgcgaaagcgaaaaaaactggcttgaacatcaccaggacgacagctggtcggtgtatgacgttagcggcgagcgctggcactatgcgccgctgcgggatgatgccccgtcgctgctccagcgcctctccgaaccctgcggcaacgatatcctctttgagtggaatgcggataataccctgcatgccctgaccgacagcgcgggccagcgcgtggtctgccgctacgaccgcgacaggctcgttggcgcctggctggatgacgagatctgcctggtcagttacgcttatgatgaacagcgccagctggtctccgtgaccggccggggcggtagcgtgcgccgacgcttcagctggcaggacgggctgatgagcgctcatgaggacgccaacggcctgctgagcgaataccgctggcgggagattgacggcctgccgcgcgtggtcggcttccgccatagcggcggcgaacggctgacgttcgaatacgattttgagaacggcacccgccgcgcgacccgcgaagacggcgcgcaggcgcactggctggtggatgacgacgacaacgtcgcgcgcttcacggattacgacggtcgccagacgacgtttgtctaccgggacggcgagctctgccacgtcattctgccgggcggggcgatgcgccgcagcacgtgggacaaatacggccgcatgaccagcgagacggacccggcgggccgccgcacggagtatcactggcatcgcctgaccgaccgcatcacccgcacggtttacccggacggtacctcatcgcaggccatgtacgaccttcgcggtcgactgctgtcggagacggatccggccggtagcaccaccgcgtatcgctatcccgatgatgaagaattcctcccggagagcatcaccgacgctatcggcggcgtggtgcgcctggtctggaaccaccaggggctgctgacgcagcgcaccgactgctccggcagcgtcacccgcttcacctacgaccgcttcgggcagctgattgccagcgaagatgcagaagggaatatcacgcggcgggagtggagccgtgccgggctgctcagcgccgtgatccatccggacggtagccgcgagtcgctggtttggaacgaacgcggccagctcacgggctggcgcgacccgctggaaagcgaggtgagctgggcctataacgcgctcggcctcccggtcagccttaccgaccgtattggccgcgtgcgccagtggcgctacgacccgcgcggtaacctgctgcggctcgataacggcaacggggcggaataccgcttcacctatgacgccgtgggccacccgctcagcgaaatgcgcccggacgagaccgtgcgccatatggaatgggacgcgcgagggttcctctgcgcgctcgaagaaaacggacggcctgccgccgacggcggtatcgcccgtcgcgtccagcagttcagctatgacgacagcgggctgctgatcgggcgcactcagcgccacgcggagtaccgctacttccgcgacctgagcggccagattacccgcatccgccgcacgccaaccgccgaaggcgttgccctgggtatcgaaagcgatgagatcgcttaccgccacgacgccgccggacgcgtcagggaaaattcatga

SEQ ID NO: 524758 - DNA, 1371 bp, Stenotrophomonas maltophilia; identical to SEQ ID NO: 162315

SEQ ID NO: 524759 - DNA, 1437 bp, Stenotrophomonas maltophilia
atgagtcaaaccactttgtatccggtcgtaatggcgggtggatccgggagccggttgtggccactgtcccgcgtgctttatccaaaacaatttctgtgcctgaagggcgacctcaccatgctgcaaacgacggttaaccgtctgcacggcgtggagtgtgaaagcccggtggtgatctgtaacgagcagcaccgctttatcgttgccgagcagctgcgccagctgaataaactgaccgaaaatatcattctggagcctgcgggacgtaacaccgcgcctgctattgctcttgcggcgctggcagcaaaacgcagcagcccggactgcgacccgctgatgctggtgctggcggctgaccacgttattcagcaggaagacgccttccgcgacgcggttcgcgcggcgattccttacgctgagaacggcaagctggtgaccttcggcatcgtgccggatcttccggaaaccggctatggctacattcgccgcggcaacgttacgcctggtgaaggcgacagcgtggcctttgacgtggcgcagtttgtcgaaaaaccgaatctggaaaccgcccaagcctacgtggccagcggtgaatactactggaacagcggtatgttcctgttccgcgccggtcgctacctggaagagctggaaaaatatcgcccggatatcttaaatgcctgcgaaaaagcgatggcggtggtggatccggatctcgattttatccgcgtggacgaagaagccttcctcgcctgtccggaagagtccattgactatgcggtgatggaacgtacggcagatgcggtagtggtgccgatggatgcgggctggagcgacgttggctcctggtcgtcactgtgggagattagcgcgcataccccggagggtaacgtccatcacggtgatgtgatcagccacaaaacggaaaacagctacgtctacgccgaatctggccttgtcaccacggtaggggtgaaagatctggtggtcgtgcagaccaaagacgcggtgctgattgccgaccgtaatgccgtgcaggacgttaaaaaagtggtggagaagatcaaggccgatggccgccacgaacaccatattcaccgtgaagtctaccgcccgtggggcaaatatgactccatcgacgctggcgagcgctatcaggtgaaacgcatcaccgtgaagccgggtgaagggctgtcggtgcagatgcaccatcaccgcgccgaacactgggtagtggtggcgggaaccgccaaagtgaccatcaacggtgaagtgaagctgctcggtgaaaacgaatccatttatattccgctgggtgccacgcactgcctggaaaacccggggaaaattccactcgacttaattgaggtgcgttccggctcttatctggaagaggacgatatcgtgcgcttccaggaccgctacgggcgggtgtaa

SEQ ID NO: 524760 - DNA, 1005 bp, Stenotrophomonas maltophilia
gtgccgaaacagccctcgacgctgaaacgtttaattcatctgggcagctttgccctgagcagtttcttcccgctgatggcgcaacgtcgctggaagccggatcgcatcatcggcgtggtgccgaccctgttctgcacgccaggcatgcgcctgctgggcaaactctccggcgcgcgcaccctgctgcacattcaggattatgaagtggacgccatgctcggactggggatggccgggaaaggcaagggcggcaaggtggcgaagctcgccagcgcctttgagcgcagcggcctgcacaacgtggattacgtctcgaccatctcgcgctcgatgatgaacaaggcgcaggagaagggtgtcccggcggagaaggtgatcttctttccgaactggtccgaagtggcgcgtttccgcgatgtgacagaccaggatgcgcaggcgttacgcgcgcagctcgggttgcctgctgagcaaaaaatcattctttactcaggcaacatcggcgaaaaacaggggctggagagcgtgattgacgccgcgcttcagctgagcgaacacccgtggatgttcgtgatagtcgggcagggcggcggtaaagcgcggctggaaaaaatggccagcgagcgcggactgaccaacatccgcttcttcccgcttcagtcttatgacgcgctgcccgcgctgctgaaaatggcggattgccatctggtggtgcaaaaacgcggcgcggcggatgcggtgctgccgtccaagctgaccaacattctggcagtgggcggaaatgcggtgattacggcagaagccgcaacagaattaggccagctgtgcaacagctacccgggcattgccgtttgcgtagagccagaatcggttcctgcgctggtgaccggaattgagcaggcactcgccatgccaaaagagaacacggtggcacgtgaatatgccgaacgcacgctcgagaaagagaacgtgctgagccaatttattgcagatatacggggataa

SEQ ID NO: 524761 - DNA, 483 bp, Stenotrophomonas maltophilia
atgatgtttttaagtcaggaagattttgccacggtggtgcgttccactccgctcatctcaattgatttgatcgtggagaacgaacgcggcgagttcttgctggggaaacgaaccaatcgtcctgcacagggcttctggttcgtgcccggcgggcgcgtgcagaaggatgagacgctaagcgatgcgtttgagcgtctcactctggcggaactgggcctgcaactgccgatggcagcgggccagttttacggggtctggcagcacttctatgacgataacttttcgggcaccgggttcaccacgcactatgtcgtgctggggttccgcctgaaggtgagtgaggcagacctgcgtctgcctgattctcagcatgacgattaccgctggttaacgccagaggcgctgctggcaagcgacaacgtccatgacaacagtcgggcgtacttccttgcggaacgtcaggccgaggtgccaggcctatga

SEQ ID NO: 524762 - DNA, 966 bp, Stenotrophomonas maltophilia; identical to SEQ ID NO: 161503

SEQ ID NO: 524763 - DNA, 1122 bp, Stenotrophomonas maltophilia
atgtctaaagtcgctctcatcaccggcgttaccgggcaggatggttcttacctggcagagttactgctggaaaaagggtatgaagtacacggtattaaacgtcgtgcgtcttcatttaacaccgaacgtgtcgatcatatttatcaggatcctcacgcggcgaacccgaaattccacctgcactacggcgacctgaccgatacctccaacctgacccgcatcctgcaggaagtacagccggatgaagtctacaacctgggcgcgatgagccacgttgcggtttccttcgaatccccggaatacaccgctgacgtggacgccatgggtacgctgcgtctgctggaagcgattcgcttcctgggtcttgagaagaaaacccgtttctatcaggcatctacctctgagctgtacggcctggtgcaggaaattccacagaaagagaccacgccgttctacccacgttctccgtacgcggtagcgaaactgtacgcttactggatcactgtgaactaccgtgaatcctacggcatgtacgcctgtaacggcattctgttcaaccacgaatccccacgtcgtggcgaaaccttcgtgacccgtaaaatcacccgcgcgatcgctaacatcgctcagggcctggagtcttgcctgcacctcggcaacatggattccctgcgtgactggggccatgcgaaagactacgtgaaaatgcagtggatgatgctgcagcaggaacagccagaagacttcgtgatcgcgaccggcgtgcagtactccgtacgtcagttcgttgagatggctgcggcacagctgggcatcaagctgcgcttcgaaggcaccggcgtggaagagaagggtatcgttgtttccgtgaccggccacgacgcaccgggcgtgaagccaggcgacgtgattgttcaggtggatccgcgttacttccgtcctgctgaagtggaaaccctgctgggcgacccaaccaaagcgcacgagaagctgggctggaaaccagaaaccaccctgcaagaaatggtatccgagatggtggccaaagatcttgaagcagcgaaaaaacactccctgctcaagtcccatggctacgaggttgccatcgcgctggagtcctga

SEQ ID NO: 524764 - DNA, 549 bp, Stenotrophomonas maltophilia
atgcaggaattaaatggattctccgtgccgaaaggttttcggggcgggagcggtattaaagttcaactgtggtgggctgtacaggcaacgttatttgcctggtcgccgcaaatactgtaccgctggcgcgcatttttactgcgtctgtttggcgcaaaaataggaaaaaacgtagtcattcgtccttcggtgaaaattacttatccctggaaattaacgcttggggattacgcctgggtaggggatgacgcggtgttatatacccttggcgagattacgattggcgcaaattcggtggtttcacagaagtgttatttgtgcaccggcagtcacgattttatgagcccgcattttgatattaccgcttcgcctgttgtgatcggtgaaaaatgctggctggcaacagacgtctttgttgcacccggtgtttctgttggcgatggcacggtagtcggtgcccgcagcagcgtttttaaatcgcttccggcaaataaaatttgccgtggcaaccccgcagtggtgatacgcgaacgcgttgaaactgattaa

SEQ ID NO: 524765 - DNA, 747 bp, Stenotrophomonas maltophilia
atgtttcttagcgtcattactgtcgcctttcgtaaccacgaaggggtggtaaaaacctggcgctcgctgcgcaacctggcgcgcgatccgagcctcacctttgagtggatcgtggtcgatggcggctcgaacgacggcacggcggagttcctggaaaaacttaacggtgagttcaacttacgttacatcagcgagaaagataaaggcatttacgatgccatgaataaaggcatcaacatggcgcaggggcgctacgccatcttcctcaattccggcgacgtgttccatgaagatgtggcgctgtttgcacgccagctggcgcgccagaaagaagatgccatgtttatcggtgatgcgctgcttgatttcggcgaggggaaaaaagtcctgcgcggcgcgaaaccaggctggtatatctaccacagcttgccggcaagccatcaggctattttctttccgatgagcggcctgaaaaagcagccttacgatttgcaatataaagtgtcatcagattatgccctggccgccagcctgtacaaatctggctacccgttccgtcgaattaaaggactggtatccgaattttcaatgggcggcgtgtcaacctcgaataatctggaattgtgccaggatgccaaaaacgtgcagcgtaaaatattacgcgtaccggggttctgggcggaattatcttatttcttacgtctgaaaacgacgggtaaagcgaaagccttatataacaaagcctga

SEQ ID NO: 524766 - DNA, 1221 bp, Stenotrophomonas maltophilia
atgtctcgttctatcagaatctgtagttatctgctgctgccgctgatctacctgctggtcaacgtcaagattgcccagctcggtgaaagcttcccaatcaccatcgtcaccttcctgccggttctgctgttgctatacgttgacaagcttaacctcaaaaagctgatgattgcgctggggatcgggtttggtctgacggcctttaactacatctttggtcagtcgctggacgccagcaaatatgtcacctccaccatgctgtttgtttatatcgttatcattattggcatggtgtggagtattcgttttaaaactatctctccgcacaattataggaaaatcctcaggttcttttatattgtcgtcgggctgattgttatgcttgcggcattggagatggcgcaaattattctcacaggcggcagtagcctgatggaaataatttcgaaatatcttatatacagtaacagctatgtactgaacttcattaagtttggtggcaagcgtaccactgcgctctattttgaaccggcgttttttgctctggcattaatctcaatttggctcagcatcaaacagttcggtatcaaaacccccaagaccgatgctatgattcttgcaggaatcgttctgtcagggtcgttctcaggggtaatgacgtttattctgttttacctgctggagtgggcgttccagtacctgaacaaagaggcgattaagaaaaaactgccgctggcgatcatttctctgacggtatttttagtgggcgtaatattcgccttcccgtacatttctgaacgtctgggtgatttgggaacggaaggttcgtcgtcctattatcgcatcattggtccactggtgatggtgggttattccttaacccatattgatggcgtagtaagattcggctcactttacgaatatgttgcatcattcggaatctttaacggtgcggatgtcggtaaaaccatagacaatggtctgtatctgttaattatctatttttcctggttcgccgtactgttgacactgtggtatctgtttaaagttttcaaaatgatgattaacgcgtttggtgataaccagaactttcgcgtgcaactttatctgttcacaccggtgtcgttgttttttaccgggtcaatatttagcccggaatatgcattcttaattgtatgtccgtttattttgcgcaaagcgttgaatattacgagcgtatga

SEQ ID NO: 524767 - DNA, 1218 bp, Stenotrophomonas maltophilia
atgaacattctgcaatttaacgtacgcctcgcagagggcggggcggcaggcgtagcgctggatctgcaccagcgcgcgctgcaaaaaggattacagtcgcgctttgtttacggttacggcaagggcggcaagaaaagcgtcagccatgataactatccgcaggtgctgaagcagacgccacgtctgacctccatcgccaatattgcgctgttccgcctgtttaaccgcgacctgttcggcaacctgaataacctctaccgcaccgtcacccgcacccgcgggccggttgtgctgcacttccacgtgctacacagctactggctgaatctggaagaggtggtagcgttttgtggaaaagtgaaggcgcacaagccggacacccgtttcgtctggacgctacacgaccactggagcgtgaccggacgctgcgcctttaccgacggctgcgaaggctggaaagataactgccagaaatgccctacgctcagcaactatccgccggtgaaggtcgatcgcgcgcatcagctggttgagggcaagcgtcagctgttccgcgacatgctctcgctcggctgcacctttatctctccaagccagcacgtggcagatgcttttaatagcctgtacggagcagggcgctgccagattatcaacaacggtattgatgtggcgacggaagagatcctggccgaactgacgcccgtagccattaccacgggcaagccgaaaatcgctgtcgtcgcccatgacctgcgctacgacggcaaaaccaaccaacagctggtgcgcgacatgatggcgctcggcgacaaaattgaactgcataccttcggcaaattctcgccgttcgaaggcgctaacgtggtgaatcacgggtttgaaaccgacaagcgcaaactgatgagcgcgctcaacggtatggacgcgctggtgttcagctctcgagtggacaactacccgctgatcctgtgcgaagcgctctccattggcgtgccggtcattgccacccacagcgacgcggcgcgcgaagtgctggagaaatcgggcggtaaaaccttcagtgagaacgaggtgctgccgctggtgcagctgtcgaaggccgatatcgcgcaggctgtttttggcacggacctggaatcgttccgcaaccgcagccgcaaagcgtacagtggacaacagatgctggaggagtatgtctcgttctatcagaatctgtag

SEQ ID NO: 524768 - DNA, 492 bp, Stenotrophomonas maltophilia
atgtttctggaagattgccgcgctaacagctggagcctgcgcccgtgctgcatggttctggcctaccgtattgcgcacttttgctcggtgtggcgcaaaaaaaatgtgctgaacaatatctgggccgcgccggtgctggtgctgtaccgcatcatcaccgaatgcttttttggctatgaaattcaggccgctgccaccattggccgccgctttaccattcatcacggctatgcggtcgtcatcaacaagttcgtcgtcgcgggtgatgatttcaccattcgccacggggtgacaatcggcaaccgtgggccagacagcctggcctgcccggtgattggcaataacgtcgagctgggcgccaacgtggtgattatcggggagattaccgtgggcaataacgtgacggttggcgcaggtagcgtggtgctggacagcattccggacaatgcgctggtggtgggcgagaaagcccgcgtgaaggtgattaaatga

SEQ ID NO: 524769 - DNA, 843 bp, Stenotrophomonas maltophilia
atgagcacacaacgccctttgatttctatctatatgccgacatggaatcgtcagcagctggcgatccgcgcgattaaatcggtcctgcgtcaggattacgataactgggaactgattatcgtggatgactgttcctcctcttacgaacagctacaaaagtttgtcgaagacctgaacgacccgcgcgtggtgtacacgcacaacgccatcaactccggggcgtgcgcggtgcgcaatcaggcgattatgcaggcgaaagggcagtatctgaccggtatcgacgatgatgacgaatggacgccaaaccgtctgtcgatcttcctgtcgcacaaagcgcagctggtgacccacgcgtttctgtatgccaacgactatgtctgtcagggcgaggtctattcgcagccggccagcctgccgctgtatccgaaatcaccgtattcccgccgcctgttctacaagcgcaacattatcggcaaccaggtgtttacctgggcctggcgctttaaggagtgtctgttcgataccgagctgaaggccgcacaggattacgacattttcctgcggatggtggtggagtacggcgagccgtggaaggtggaagaggccacgcagatcctgcacatcaaccacggggagatgcagatcacctcgtcaccgaaaaaattctcgggctacttccatttttaccgcaagcacaaggacaagtttgaccgtgccagtcggaagtatcagctctttaccctctatcagatccgcaataagcgcatgaactggcgcacgctgctgacgctgctgtcggtgcgtaacggcaagcgtctggctgacgggcttcgggggaaataa

SEQ ID NO: 524770 - DNA, 2163 bp, Stenotrophomonas maltophilia
atgacagaaaaaacaagaccttctgccgccccgacgtcgggcagtgatgaaatcgatatcggtcgcctggtcgggaccgttattgaagcgaaatggtgggtgctgggtataaccgccatctttgccgtggcggcgatcgtttatacgctgttcgcgacgcctatttacagcgccgacgcgctggtgcagatcgaacaaaataccggaaactcgctggttcaggatatcggctctgcgctggccaacaagccgccggcatcggaggctgaaattcagctgatccagtcgcgcctggtattgggcaaaacggttcacgatctggggctggatatcgcggtcaccaaaaacaccttcccggtgtttggcgcaggctgggatcgcctgatggggcgcagtaacgatacggtaaaagtgaccgacttcgtgattccaaaaggggcaggggaccaaacctttaccctgaccgtgctgggacccaaacagtatcagctgaccagcgacgcaggcttcagcgcgcgcggcgaagtggggcagatgctgaccaaagatggcgtgagcatcagggttggtgccatccaggcgcacgagggcggtgagtttacggtcaccaaattctcgacgctcgggatgatcaacaatctgcaaaacaacctgaccgtcaccgaaaacggcaaggacaccggcgtcctgagcatgaccttcaccggtgaagacaaggatcaaatccgcgacatcctgaacagcatcacccgtaactaccttgagcagaacgttgagcgcaagtcagcggaagccgctaaaagcctcgcgttcctcagtaaacagctgccggaggtgcgcgcccgtctggatgacgccgagaacaagctgaacgcataccgtcaggataaagactccgtcgacctgccgctggaggcgaaatcggttctcgactccatggtcaatattgatgcgcagctaaacgagctgacctttaaagaggcggaaatttccaagctctataccaaacgtcacccggcgtaccgcacgctgctcgagaaacgtcgtaccctggaagaagagaaggcgaagctgaatgaccgcgtgaccgcgatgccgaagacgcagcaggaaatcgtacgcctgacgcgtgatgtggaatccggccagcaggtttacatgcaactgctgaacaagcagcaggagctgaaaatcaccgaagccagcaccgtgggcgacgtgcgtatcgttgacccggcgattacccagccgggcgtgctgaagccgaagaaagcgctgattatcctcggcagcattattctcggcctgatgctctctatcgtcggcgtgctgctgcgctcgctgttcaaccgcggtatcgaaagcccgcaggtgctggaagagaacgggatcagcgtgtacgccagcatcccgctttcggagtggcagaagtcccgtgacagcgtcaaaactgttaagggcgtcaagcgttacaaacagagccagctgctggccgtgggtaacccgaccgacctggcgattgaagcggtgcgtagcctgcgtaccagcctccacttcgccatgatgcaggccaaaaacaacgtcctgatgatgaccggtgtcagcccgtcaattggtaagaccttcgtctgtgccaacctggcggcggtggtgagccagaccaacaagcgcgtgctgctgatcgactgcgacatgcgtaagggctacacccatgagctgctgggcaccaacaacgttaacggcctgtcggaaatcctgctgggtaaaggggagatcagcgagagcgccaagccgacctcgattccgaaatttgacctgatcccgcgtggccaggtaccgccgaacccgtctgaactgctgatgagcgagcgcttcacgcagctgatcgagtgggcaagcaaaaactatgaccttgtgctgatcgataccccaccaattctggcggtcaccgacgccgccgtggtagggcgtcatgcgggcaccacgctgatggttgcacgctatgcggtgaacaccctgaaggaagtggaaaccagcctgagccgctttgagcagaacggtattgaggtgaaaggggtcattctgaactccatcttccgccgtgcgacgggttatcaggattacggctactacgagtacgaatacaagtctgactctaaataa

SEQ ID NO: 524771 - DNA, 444 bp, Stenotrophomonas maltophilia
atgtttaacaaaattctggtggtgtgtgtggggaacatttgccgttcccccacggctgaaaggctgttgaaaaattaccagcctgcgttaacggtcgactccgcagggctgggcgcgctggtcggaaaaggtgccgacgaacgtgccgcaagcgtcgcccttgagcataacctctcactcgacgggcacgttgcccgtcaggtctctggccgaatgtgccgggaatatgacctgatcctcgcgatggaaaaacgccacattcacgcgctgtgcgatatcgcaccggagatgcgcggcaaggtgatgctgtttggtcactgggatggtgagcgcgaaattcccgatccgtatcgcaagagccgcgaggcctttgaggcggtatacaccttactagaccagtctgcccgccagtgggcgcaggcactgaaagctcagcagggataa

SEQ ID NO: 524772 - DNA, 1137 bp, Stenotrophomonas maltophilia
atgatgaaatccaaaatgaaattgatgccattattggtgtctgtgaccttgatgagtggttgcacggtctttcccggcagcaatatgtcaacaatgggcaaggatgtgattaaacagcaggatgctgattttgatctcgacaaaatggtgaatgtttacccattaaccccacgtctggtagaacaattacgcccacgtccgaatgttgctcagccaaatatgtctctggaccaggaaattgcctcttaccagtatcgcgttggtccgggtgacgtcattaacgtgaccgtctgggatcaccctgaactgaccacacctgcgggccagtaccgcagctcaagcgacaccggtaactgggtacagtccgatggcaccatgttctatccctacattggcaaagtgcacgtcgcgggcaaaacgcttgctgagatccgtagtgatattaccggccgcctggcgcagtacattgctgacccgcaggtggacgttaatatcgccgcgttccgatcccagaaagcctatatctcaggccaggtcaacaaatccggccagcaggctatcactaacgtcccgctcaccgttcttgatgcgatcaatgccgcaggcggcttaaccgacggtgctgactggcgcaacgtggtgctgacccacaacggcaaagagcagcgcatttcgcttcaggcgctgatgcaaaacggtgacctgacccagaaccgtctcctctatccgggcgatattctttacgtgccgcgcaacgacgatctgaaagtgttcgtgatgggtgaagtgaagaaacagagcacccttaagatggacttcagcggtatgaccctgaccgaagccctgggcaacgcggaaggtatcgatctgaccgcctccaacgccagcggtatctttgtgatccgtccgatcaaaggcgaaaacgcgaaaggcaagattgccaacatctaccagttggacatgtccgacgcgacgtcgctggtcatggcaacgtcgttccgtctccagccatacgatgtggtctatgtcaccaccgcgccggttgcccgctggaaccgtctgatcaaccagttgctgcctaccatcagtggcgttcgctacatgacggatacggcgagcgacattcatacctggtaa

SEQ ID NO: 524773 - DNA, 1584 bp, Stenotrophomonas maltophilia
atggaatggattgccgatccatcaatctgggccgggctggtgacgctggtcgtcatcgaattagtgctcggcattgataacctggtgtttatcgccatccttgccgataaattacccccttcacaacgcgaccgcgcccgcgtgacgggtcttctgctcgccatggtgatgcgtctgctgttactggcctcaatatcatggctggtcacgctcaccaaacccttattcagcgtgcagggtctgagctttagcgcccgcgacctgatcatgcttttcggcggattgttcctgctgttcaaagccacggttgagcttaatgagcggctggaaggaaaagacagtgaaaaccccacccagcggcgcggcgctaaattctggccggtggtcgcgcagatagtggtgctggatgccgtcttttctctcgactccgtgattactgccgtcgggatggttgaccatctggcggtgatgatggccgccgtgatcattgccatcaccctgatggtgctcgccagtaaagccctgacgcgcttcgtgaacagtcacccgactatcgtcattctctgtctgagcttcctgctgatgattggctttagcctggtggcggatggttttggcttccatatcccgaaaggatatctgtacgcagccattggtttctcggtgcttattgagtttcttaaccagctggccattttcaaccgccgccgttttctttccgcgaaccagacattacgacagcgcaccgcagatacggtgatgcgcctgctgagcggcaaaaaagaggatgccgagctggatgctgaatccgctgcgatgctagccgaccacagcgacgggcagatcttcaacccgcaggaacgccggatgatagagcgcgtgcttaacctcaaccagcgctcggtcagcagtatcatgacctcccgccacgacattgagcatattgacctgacggcaccggaagagcagatccgtgccctgctggataaaaaccagcacacccgcgtggtggtgaccggcggagaagaggaagaagagctgctgggcgtggtacacgtgattgacctgctgcaacagcagcttcacggcgagccgctcaacctgcgggcgctggtgcgccagccgctggtcttcccggaagcgctgccgctgctctccgcgctggagcagttccgcaacgcgcgtacccacttcgcgtttgtcgttgatgagtttggttctgtggaagggctggtgacgctcagcgacgtgatggaaaccatcgccggtaatctgcctaatgaggtggatgagatcgatgcacgccacgatattcagaaaaacgcagacggcagctggaccgccaacggccatatgccgctcgaagatctggtgcagttcgttccgcttccgctggacgagaagcgcgaataccacaccatcgccggtttgctgatggaatatctgcaacgtattccgcagccgggcgaagaggtccaggtggggaattacatgatcaaaaccttgcaggtagagagccatcgcgtgcagaaggtgcagctgataccgctgcgcggtgaagatgagatggattttgaggtgtaa

SEQ ID NO: 524774 - DNA, 1851 bp, Stenotrophomonas maltophilia
atgagaagagttctgacaacgctgatgattttgctggtggtgctggtggctggcctttcagcgttggtgctgctggttaacccgaatgacttccgggcctacatggtgcggcaggttgaagcgcgcagcgggtatgaactcaagctggacgggccgctgcgctggcacgtctggccgcagctcagcattctctccggacgtatgtcgctcaccgcgccgggcgccgcgcagccgcttgttacggcggataacatgcgtcttgatgtcgcgctcatcccgctcttatcccatcagctccaggttgaacaggtgatgctgaaaggggcggtgattcagcttacgccacaaaccgaagccgttcgtcaggcgaatgctccggtcgcaccgcgtgaaaatactttgcctgacgttccgtctgacaccggctggtctttcgatattggtaatctgaaagtcgctgacagcgtgctggttttccagcatgaggatgacgaacagatcaccgtccgcaatatcaacctcaggatggagcaggacgccaaccatcaagcgaccatggagttctccgggcggatcaaccgtaaccagcgcgatctcaacctgtcgatgaatgcgaacgtgaacgcctctgactacccgcaccagctgacggcggacgttcagcaggtcaactggcagctgaccggcgcggatttacccgcgaaggggatcgccggccagggcacgatgcaggcggtgtggcacgaggagcgcaaacagctcgaactgaacgcgctcaacctccaggccaacgacagttccctgaaggggcaggcgagcgtcacgcttgatgaaaaacccaagtgggtgttggatctgcaattcgacaagctgaaccttgagaacctgctcgcggcccaaacggtgaatgcgaccgatgagggtgtcgcgcagggagggcaaagccaggtcacgcagtcgcgtccggtgatctcctccagtctcgatctgcctgactacaatggtctgcgcggatttaccgccgacattctgctgaaagcgaatagcgtgcgctggcgtgggattgattttactgacgtcaacagccagatgttcaaccacaacggcctgctggtcatctctgagctcagcggaaaaatgggggcaggaaatctctccctgccgggcacgctggacgtacgtaaagacgttgccagcgccgcgttccagccgcgtctggaaaacgttgagattggcaccatcctgaaagcctttaattacccgatttccctcacggggcagctgtcgctggccggggatttctccggcacgaagattgatgcggatgccttccgtcgtagctggaaggggcaggcgcacgttgagctaaaagattcgcgcatggaagggctgaacttccagcaactggtgcagcaggcggtagagcgcagcagcagcgtgaaggcgaatgaaaactacgacagcgcaacccgtctcgatagctttaccagcgagcttgccctcgacaacggtcagctctcgctcgacgagatgcagggaatctcgtccctgctggcgctgaccggaaacggcgcgctggatctggtgaaagagacggttgacacccgcttcaatgtccgcgtgaaggccggctgggaaggggaaggccagcttgtcgagttcctgaaacagacgccgataccgctgcgcgtgtacggaaaatggcaggaactcaattacagtttgcaggtcgatcagatcctgcgtaagcaccttcaggatgaagcgaaacgtcggctgaatgactgggcggaccgcaataaagagtctcagtctggtaaggacgtgaaaaagttgctcgataagctctga

SEQ ID NO: 524775 - DNA, 582 bp, Stenotrophomonas maltophilia
atgcgtctttgtgaccgcgatatagaagcctggctggatgaaggccgcctgtctatcaccccgcgtccgccggttgagcgtattaacggcgtgaccgtcgatgtacgtctggggaataagttccgcaccttcagcggccacacggcaccgtttatcgacctcagcgggccgaaagacgaagtcagtgcggcgctggatcgcgtcatgagtgacgaaatcgtcatcgaagaaggagaggcgttttatctccatcctggcgaactggcgctggcggtgacctttgaatcggtcacgctgcctgcggatctggtcggctggcttgacggacgctcttctctggcgcgtctgggcctgatggtgcacgtcaccgcgcaccgtatcgatccgggctggtctggccgtatcgtgctggagttctttaacgccggtaaactgccgctggcgcttcgcccgggaatgatgatcggggcgttgagcttcgaaccgctgaccggcccggcagaccgtccttataaccgccgtcaggacgcaaaatatcgcgaccagcagggtgcggttgccagccgtatcgataaagactga

SEQ ID NO: 524776 - DNA, 642 bp, Stenotrophomonas maltophilia
atgactgataagtctcatcagtgcgtcatcataggcatcgccggcgcatcggcttcaggtaaaagtcttattgccagtacgctttatcgcgaactgcgtgaacaagtgggtgatgagcatatcggtgttattcccgaagatagctattacaaagatcaatcccatctttcgatggaagagcgcgtaaaaaccaactacgaccaccccagtgcgatggatcacagtctgctgttccagcatctggaagcgctgaagcgcggcgaggcgattgagctgcccgtctacagttacgtggaacatacccgcacccaggaaacgatccgcattgagcccaagaaggtgattatccttgaagggattttgctgctcaccgacgcccgtctgcgcgaatcaatgaacttctcgattttcgtcgataccccgctggatatctgcctgatgcggcgtattaaacgcgacgttaacgaacgcggtcgctccatggactccgtgatggcgcagtatcagaaaaccgttcgcccgatgttcctgcaatttattgagccttctaaacaatacgccgatattattgtgcctcgcggcggtaaaaaccgtattgccattgatatcttaaaagcgaaaatcagtcagttttttgaataa

SEQ ID NO: 524777 - DNA, 3330 bp, Stenotrophomonas maltophilia
atgaataaacaataccagcgggttttggttactaccccacatcctttactgcggcttgtctgtctgggtctggtcacgttcattttcaccttattttcccttgagctgactcgcttcggtacgctgctggcgccattgtggttcccgacctccattatgatggtggcgttttaccgccatgcgggaaaaatgtggcccggcatcgccctcgcctgctcctttggcaatatttttgcctcgtggatgctcttttcatgggaatcaatcaacttaacctacacggcaatcaatattattgaggcctgtgttggtgcggtgttgctgcgtaagctgctcccctggtataacccgctgcaaaacctcaacgactggatacgccttgccctcggcagcgccctggtgccgccgctggtgggcggcattctggttcattttctggtgccaggcgcggagccgctgcgtaattttctgttttgggtactttcagaagccattggcgcgctggcgcttgtaccgttaggtctgctgtttaaaccgcattacctgctgcgccaccgcaacccgagactgctgctggaaacgctggtgaccctggtcgttacgctggttcttagctggacggcaatcacctggctgccgtggccgttcacctgcatcatcgttttgctgatgtggagcgcggtacgcctgccgcgaatggaagcattcctgatttttttattcaccatcatgatggtgtccttgatgatggcgcgaaacccgccctccatgacaccttcaaacatgatggtgaccttcaacgcgccatggcttcccttcctgatgatgctgctccccgccaacattatgacgatggtgatgtatgccttccgggccgagcgtaaacatattactgaaagcgaagaacgttttcgtaatgcgatggaatattccgcgattggtatggcgctggtgggcattgagggccagtggcttcaggccaacaaggcgctgtgcaatttcctcggttacagtcagtctgagcttcagtcgctcacgttccagcagttaacctggccggaagatttaaataccgacctggagcagttgcaacagctgattaacggggagatcaacagctacagcctcgaaaaacgctactacacccgcagcggcgaggtggtgtgggcgctgctggccgtttccgttgtgcgccatgcagacggcacgccgctctactttattgcccagattgaagacatcaacgacctgaaacagaccgagtgggtgaataagcgtctgatggagcgtatcaccctcgcgaacgaagccggcggcatcgggatctgggagtgggatctcgagccggacgtgatcagctgggataaacggatgtttgagctgtacgagatccccccgcacattaaacccacctggcagctctggcatgcggccatggtgcctgaagatcgtgcgcacgccgaacaggtactgcgtgagtcactccaggccagggtgcctttcaagctggaatttcgcattcgcgtcaaggatggcattcgccacattcgttcgctggcgaaccgggtgctgaacaaacagggcgaagtggagcggctgttagggatcaatatggatatgaccgaggtgaagcaactgaacgaggcgctgttccaggaaaaagagcgcctgcatatcaccctcgactccatcggcgaagcggtgctgtgcaccgatatcgacatgaacatcacctttatgaacccggtcgccgagaagatgagcggctggtcgcaaagcgaagcgctgggtcagcccgttctgaaggtgctgcacattaccttcggcgagaacggcccgttaatggaaaacatccacagcggcgatatgtcccgtaccgatatcgaacaggatgtggtgcttaactgccggaatggcggcagtttcgacattcattacagcattaccccgctcagcaccctggaggggcacgctatcggctcggtgctggtgattcaggatgtcaccgagtcgcgcaaaatgctgcgccagttgagctacagcgcttcccatgacgcccttacccacctggcgaaccgcgtcagttttgaaaaccatcttaagcgcctgttgcagacggtacaggagactcatcagcgtcacgcgctggtctttatcgatcttgaccgttttaaggcggtgaacgataccgcaggccacgcggcgggcgacgcgctcctgcgcgaactctcttcgctgatgctgaccatgctgcgctccagcgacgtgctggcgcgtctgggcggcgacgagtttggcctgctgctgccggactgcaacgtcgaaagcgcacgctatattgcgggccggttgatcgacgccatcaacaactatcatttttcctgggaaggacgcctgcaccgcatcggcgccagcgcggggatcacattgattgacgacgctaattatcagacagcggaagtgatgtctcaggccgatatcgcctgttacgcctcgaaaaacagcgggcgcggtgtggtcaccgtctatgaaccccagcaggagcggatccacagcacgcgcagcatgatgtcgctggatgagcagtggcacatgatcaaagataatcatctgctgatgatcgcccgcagcgtcgcctcaccgcgcattcccgagagcagtagcttctggctgatttccctgcggttgtggaccagccagggggaagtgctggaagagcatgccttccgcgccgggctggcggagccggagctgctgcacgcccttgaccgacgtatattcagcgaatttttccgtacctatgccgcacaggtggcggccaaagggatgggcgtcgcgctgccgctctcagaagcgggtttagccagcgtcacgctggtggatgagctgctcgacctgatcaccagaggtccgctgccggcgcggctgctgcatctggcgatcgccgttgatgtgctgagcaatacggatgaaaacgtgcagcagggtctgcaaaagcttcgtcaggctggctgtcgcgtggtgctgacccgggttggacgcgatatgaacgtcttcagccagctcagcgccaacaccgctgattatctgctgctggatgcagacgtggtgaccaacgtccacggcaatctgatggatgagatgatggtgaccatcattcagggccacgcccagcgtctgggcataaaaaccattgccgggccatgccatcagtcgatcatgatgaatacgctgtcgggcatcggcattgactttatttacggcgacaccatcggggaagcgcagccgctcgatctactgctgaataccagctatttcgccatcaactga

SEQ ID NO: 524778 - DNA, 873 bp, Stenotrophomonas maltophilia
atgtacaccctgaactggcaaccgccctacgactggtcgtggatgtttggctttcttgtcgcgcgtgcggtcacgggggttgagaccgttacggaggattactacgagcgcagttttggctatgcggggcaccagggcgttttacgggttacgccagacagcgcaacccatacgctggcggtgtcgctcagccctggcctgatcccggtggcggatatttgcctggatcgcattgcccgcctgttcgatcttgattgcgacccgctaagaattgcgaagaccctgggcgacctcggcgcggcgcggccggggttacgtttgccgggcgcgatggatgcctacgagcagggcgtgcgcgccattctcgggcaactggtgagcgtggcgatggcggcaaaactggcgtcaagagtggtggcgctgtgcggtgaacccatccaggacgcgccgggctacctctgttttcctccgccagaggtactggccgcggtggattcgctggcgttgaaagcccttgggatgccgctcaagcgtgcggagtcgttgattcatctggcgcagtcggtggtggacggtgaattcccgctgttcccgcctgcgaacgtcgaggccgggatgaaggcgctacagcagcgccccggcatcgggcgctggaccgcaaattatctggccttgcgcggctggcaggcgaaggatgttttcctgccggatgattatctcattaaacagcgctttgccggtatgacgcccgcgcagatccgtcgctatgccgagcgctggcagccgtggcgctcgtatgcgctgttacatatctggtacaccgacggctggtcgccgtcagttgatggcgaaatagctggtattcagcagtag

SEQ ID NO: 524779 - DNA, 1353 bp, Stenotrophomonas maltophilia
gtgtttattggattcgactacggcaccgcaaactgctcggttgcgataatgcaaaacggacaaccgcagctcctgaaaatggaaaacggcagtacgctgttgccgtcaatgctttgtgcgcccacgcgtgaagcggtgagcgagtggctgttccgccaccatcaggttccggccacggcggcggagacccaggcgctgctgcgccgtgcggtcagctttaaccgcgaggaagatatcgacgttaccccgtccagcgtgcagttcggcctctcttccctcgggcagtacattgaagacccggaagaggtctacttcgttaaatcgccgaaatccttcctcggcgccagcggcctgaagccgcagcaggtggcgatgtttgaagatctggtctgcgcgatgatgctgcacatccgcaatcaggcgcagtcgcaggtgccggatgccatcacccaggcggtgattggccgtccgatcaacttccaggggctgggcggcgacgaagccaaccaacaggcgcaggggatccttgagcgtgcagcgcaccgggctggcttccgtgacgtggtgttccagtatgagccggttgcggcggggctggattttgaagccacgctgacggaagagaaacgggtgctggtggtggacatcggcggtggtacgacggactgttcattactgctgatgggtccgcagtggcatcatcgtcgcgatcgtgaaaacagcctgctggggcacagcggctgccgcgtgggcggtaacgatctggatatcgccctggcattcaagagcctgatgccgctgctcggcatgggcggtcaaaccgagaaaggcatcgccctgccgatcctgccatggtggaatgcgattgccatcaacgacgtccctgcccagagtgatttttacagcaccgcgaatgggcgtttccttaacgatctggtgcgtgatgcgcaggatgcagagaaggtcgcgctgctgtataaggtgtggcgtcagcgtctgagctaccgggtggtgcgcaccgccgaagagagcaaaattgccctttccgatcgtcctgagcatgcggttacgctaccgtttatcagggacgatctggctacggctatcacccaggaagggctggaaatggcgctggctcagccgctacagcgtattctggagcaggtgcagctggcgcttgagaatggcaaagagaaaccggacgtgatttacctgaccggcggtagcgcccgttcaccgctgatcaagaaagcgctggcggaacagctgccggggatcccgattgccggcggcgatgactttggctccgttacggcaggactggcccgctgggcgcaggtggtgtttagctaa

SEQ ID NO: 524780 - DNA, 1203 bp, Stenotrophomonas maltophilia
atgaaaggcagtaacaaatcccgctgggcaatcgccgttggtctgattgtggtggtcctggccgccgcttggtactggcacagccagtccgcgaactccacggcacctgctggcgccaatagcccctcacaacgtccaacgggcggcgggcgccacggtatgcgcggcgcggcgctggcaccggtgcaggcggcaacggcggtgaataaagcggtgcctcgttatctctccgggctgggaaccattaccgccgccaacaccgtgacggtacgtagccgcgtagacggtcagctgatggccatccacttccaggaaggccagcaggtgaaagccggcgatctgctggcggaaatcgacccaagccagtttaaggtggccctggcgcaggcgcaggggcagctcgcgaaagacaaagccaccctcgccaatgcccgccgcgatttagcccgctatcagcagctggtaaaaaccaacctcgtgtcgcgccaggagctggatacccagcagtctctggtcagtgaatctcagggcaccatcaaggccgacgaagccgcggtcgccagcgcccagctccagctcgactggagccggatcaccgcgccgattgacggccgcgtgggcctgaaacaggttgatatcggcaaccaaatctccagcggagacaccacgggcatcgtggtgatcacccagacgcaccctatcgatctcgtctttaccctgccggaaagcgacattgcgacggtgatacaggcgcagaaggccggaaaagcgctggtggttgaagcctgggatcgcaccaacaagcagaagctgagcgaaggttcgctgttgagcctggataaccagatcgataccaccaccggcaccatcaagcttaaagcacgcttcaacaatcaggacgatgccctgttcccgaatcagttcgtcaatgcgcgaatgctggtcgcgaccgaagaaaacgccgtggtgatcccgacggcggccctgcaaatgggcagtgaaggcaactttgtctgggtgctgaacagcgaaaacaaggtcagcaaacatctggtgaaaaccgggatccaggacagtcagacggtggtgatcagtgccgggctgtccgctggcgaccgcgtcgtgaccgacggtattgaccgtctgaccgaaggggcgcaggtcgaggtggtggaagcgcagaatacaggagcaaaagcctga

SEQ ID NO: 524781 - DNA, 3123 bp, Stenotrophomonas maltophilia
atgcaggtgatgccgccgagctctacaggtgggccatcacgcctgtttatcttacgtccggttgcgacgaccctgttgatggtggcgatcctgctggccgggatcattggctaccgttttctgcccgtgtcggcgctgccggaagtggactacccgaccattcaggttgtcaccctctatccgggcgccagtccggatgtggtgacgtccgccatcaccgccccgctggagcgtcagtttggccagatgtctggcctgaagcagatgtcctcccagagctcaggcggcgcctcggtcgtcacgcttcagttccagctcacgctgtcgctggacgtcgccgagcaggaggtgcaggccgcgattaacgccgccactaacctgctgccgtctgacctgccgaatccaccggtttacagcaaggtgaacccggcagacccgccgatcatgacccttgccgtcacctcctcggccatgccgatgacgcaggtggaagacatggtcgaaacccgcgtcgcgcaaaagatttcgcaggtgaccggcgtcgggctggtgacgctggcgggcggtcaacgccccgccgttcgcgttaagctcaatgcccaggccattgccgcgctggggttaaccagcgaaaccattcgcaccgccatcagcagcgccaacgttaactcagcgaagggctcgctggacggcccaacccgtgcggtcacgctctctgccaacgaccagatgcagtccgccgatgaataccgccagctgattgtggcctatcaaaacggcgcgccgatccgcctcggcgacgtggcaaccgtcgaacaaggcgcggaaaacagctggctcggggcgtgggccaataagcagcaggcgattgtcatgaacgttcagcgccagccgggcgcgaacattattgataccgccgacagcattcgcaccatgctgccgcagctggtggaaagcctgccaaaatcggtgagcgtgaaagtgctttctgaccgcaccacgaatattcgcgcctcggtgtcagacacccagttcgagctgatgctggcgattgcgctggtggtgatgatcatctacctgttcctgcgcaacgttccggcaaccatcattcccgccgtcgccgtgccgctctcgctggtcgggacgtttgcggtgatggtgttcctcgacttttcgattaataacctgacgctgatggcgctcaccatcgccaccgggttcgtggtggacgatgccatcgtggtcatcgagaacatctcgcgctatatcgaaaaaggtgaaaagcccttagccgccgcgctgaagggcgcaggagaaattggctttaccatcatctcgctcaccttctcgctgattgcggtgctgatcccgctgctgtttatgggcgatatcgtcgggcggctgttccgcgagtttgccgtgacgctggcggtcgccattctgatctctgccgtggtgtcgctgacgctaacgccgatgatgtgcgcccgcatgctgagccacgaatctttgcgcaagcaaaaccgcttctcgcgcgcctccgagcggatgttcgagcgcattatcgccgcctacggccgcgtgctggcgaaagtcctgaaccatccctgggcgacgctcggcgtggcgctcggcaccctggcgctcagcgtgatgctgtggattttcattccgaaaggcttcttcccgattcaggacaacggcattattcagggcacgcttcaggcgccgcagacggtctccttcgccaacatggcacagcgccagcagcaggtgtctgagatcatcatgaaagatccggcggtggaaagcctgactgcctacgtgggcgtggacggcaccaacccgtcgctcaacagcgcgcgcctgcaaattaaccttaaatcgctcgatgaccgcgacgatcgcgtcaacgcggtagttgagcgcctgcaaagcgcggtggcgcgcgtgccgggcattgagctgtatctgcaaccgatccaggatttaaccattgatacgcaggtgagccgcacgcagtaccagtttacgctccaggccacatcgcttgatgcactcagcacctgggtgccgcagctggtggataagctgaaagcactgccgcaggtttctgacgtcagcagcgactggcaggataaagggctggcggcgtacgtgaacgtcaaccgcgacaccgccagccgtctgggcattaccatgtccgacgtggataacgccctgtataacgcctttggtcagcgactgatctccaccatttacacccaggccaaccagtatcgcgtggtgcttgaacataacaccgagaacacgcccgggcttgccgcgctggactcgatacgcctgaccagcaaagacggcgggattgtgccgctcagcgccattgccagcgtggaagagcgccacaccccgctgtcgattaaccatctcgatcagttcccgtccaccaccatttcgttcaacgtgccggacgggtattcgctgggcgaagcggtggaggccattctgggcgcggagaaagaactcagcttcccgtccgatattcagacccagttccagggcagtacgctggcgttccaggccgcgctgggcagcaccgtctggctgattgtcgcggcggtggtggcgatgtatatcgtgcttggcgtgctgtatgagagtttcatccacccgatcaccatcctctccaccctgccgacagcgggcgtgggggcgctgctggcgctgatgctggcggggagcgaactggacgtgattgcgataattggcatcatcctgcttatcggcatcgtgaagaaaaacgccatcatgatgatcgactttgcgttggccgccgagcgcgagcagggtatggcgccgcgcgaggccatttaccaggcctgcctgctgcgttttcgcccgatcctgatgaccactctcgccgccctgctgggcgcgctgccgctgatgctgagcaccggcgtgggggccgaactgcgccgtccgctgggcatcggcatggtaggcggtctgctggtgagccaggtgctgacactgtttaccacgccggttatctacctgctgtttgaccgtctggccctgtggacaaaaagccgcttcccgaaacgtgaagaggaggcgtaa

SEQ ID NO: 524782 - DNA, 3078 bp, Stenotrophomonas maltophilia
gtgaagtttttcgccctcttcatttaccgtccggtggcgacgattttactctccgtcgctatcaccctgtgcggcgtgctcggcttccggctgctgccggtggccccgctgccgcaggtcgatttcccggtgatcatggtcagcgcctcgctgccgggtgcttcgccggaaaccatggcctcatcggtggcgacgccgcttgagcgatcgcttgggcgaattgccggggttaacgagatgacctccagcagttcgctgggcagcacgcgcatcattctggaatttaacttcgaccgggatattaacggtgcggcgcgtgacgtgcaggctgcgattaacgccgcccaaagcctgctgccgagcggcatgccgagccgtccaacctaccgcaaggccaacccgtccgatgcgccgatcatgatcctgacgcttacgtcagagacctactcccagggcgagctgtacgattttgcctccacccagctggcgcaaaccatcgcccagattgacggcgtgggtgacgtggatgtcggcggcagctccttgcccgccgtgcgcgtggggctgaatccgcaggcgctatttaatcagggcgtgtcgctggacgacgtgcgttccgccatcagcaacgccaacgtgcgtaagccgcagggtgcgattgaggacagcagccaccgctggcaaatccagaccaacgacgagctgaaaaccgccgccgagtatcagccgttgattattcactacaacaacggcgcggcggtgcgcctgagcgacgtcgccagcgtcaccgattcggtgcaggacgtgcgtaacgccgggatgaccaatgccaaaccggcgattttgctgatgatccgcaagctgccggaagccaacatcattcagacggtgaacagcatccgcgcgcggctgccggagcttcaggaaaccattccggcggccatcgatctccagattgcgcaggaccgctcccccaccatccgcgcctcgcttgaagaggtagagcaaacgctgatcatctccgtcgcgctggtaattctggtggtgttcctgttcctgcgctcggggcgcgccacgctgatcccggcggtagcggtcccggtatcgctgataggcacctttgccgccatgtacctgtgcgggtttagccttaacaacctgtcgctgatggcgctgacgattgccaccgggtttgtggtggatgatgccatcgtggtgctggagaatatctcgcgtcatctggaagcgggcatgaagccgctccaggcggcgcttcaggggacgcgcgaagtgggcttcacggtcctgtccatgagcctgtcgctggtggcggtgttcctgccgctgctgctgatgggcggcctgccggggcgactgctgcgcgaatttgccgtcacgctctccgtcgccattggtatctcactggtgatttcgctgacgctaacgccgatgatgtgcggctggatgctaaagcgcagccaaccacactcacagccgcgccggaaaggctttggccacgtcctgatggcgatgcagtccggctacggcaaatcgctgaaatgggtgctgaaccacacgcgtattgtcgggctggtgcttatcgccaccatcgggctcaacgtctggatgtatatcaccatcccgaaaaacttcttcccggagcaggataccggcgtgctgatgggcggtattcaggcagaccagagcatttcgttccaggcgatgcgcggcaagcttcaggactttatgaaaatcatccgggaagatccggccgtagacaacgttaccggctttaccggcggctcgcgcgttaacagcgggatgatgtttattacccttaagccgcgcggtgaacgtcacgaaacggcgcagcagatcattgaccgcttgcgggtgaagctcgccaaagagccgggggcgaacctgtttttgatggccgttcaggatatccgagtcggcggacgacaggctaacgccagctatcagtacaccctgctctcggatgacttagccgccctgcgcgagtgggagccgaagatccgtaaagcgctggccgcgctgccgcagctggcggacgtgaactccgacagccagaacaacggcgcggagatggcgctcacctacgatcgtgaaactatggcccgcctgggcattaacgtggaggcggccaacagcctgcttaacaacgccttcgggcagcgtgaagtctccaccatctatcagccgatgaaccagtacaaggtggtaatggaagtcgatccgcgctacacccaggacatcagcgcgctggacaagatgtttgtgatcaatgatgacggcaaggcgatcccgctgtcgtacttcgccagctggcagccgtcgaacgcgccgctgtcggtgaaccaccaggggctttccgccgcctcgaccgtgtcgtttaacctgccaaccggctcgtcgctgtctgaggccagtgacgccatcaaccgcgccatgacccagcttggggtgccctcctccgtgcgcggcagctttgccggtacggcgcaggtgttccaggacaccatgaactcgcaggtcattttgatcctggcggccattgccacggtgtacatcgtgctgggcgtgctgtacgaaagctacgtgcatccgttgaccattctctccacgcttccctctgcgggcgtgggggcgctgctggcgctggagctgttcggtgctccattcagcctcatcgcgctcattgggatcatgctattaataggtattgtgaagaaaaacgcgataatgatggtcgactttgccctggacgcccagcgcaacggcaacctgacgccggacgaggcgatattccaggcctgtctgctgcgttttcgcccgatcatgatgactacgctggccgcgctgttcggcgcactgccgctggtcatatccggcggtgacggctctgaactgcgccagccgctggggatcacgatcgttggcggcctggtgatgagccagctgctgacgctctacaccacgccggtagtctatctgttctttgaccgcctgcggctgcgtttttcgcgtaaaaagagaaccacggtgaccgagtaa

SEQ ID NO: 524783 - DNA, 1416 bp, Stenotrophomonas maltophilia
atgaccgacctacccagtaacgttcgctggcaattgtggatcgtcgcgttcggcttctttatgcagtcgctggacacgaccatcgtgaacacagccctcccctcaatggcgaaaagcctgggggagagcccgctgcacatgcatatggtgattgtcgcctacgtgctgacggtcgccgtgatgctgcccgccagcggctggctggcggataaagtcggcgtgcggaacatctttttcaccgccattgtgctgtttaccaccggctcgctgttttgcgcccaggccaataccctcgaccagctggtgatggcgcgcgtgctacagggcgtcggcggtgcgatgatggtgcccgtcgggcggttaacggtgatgaaaattgttccgcgcgcgcagtatatggcggcgatgaccttcgtcaccctgcccggtcaggtcggcccgctgctgggcccggcgctgggcggtattctggtggagtatgcctcctggcactggatcttcctgatcaacctgccggtcggtattatcggcgcgattgccaccctgacgctgatgccgaactatataatgcagacccggcgctttgatttctttggcttcatcctgctggcagctggcatggcgacgctcaccctggcgctcgacggacaaaaagggctggggatctcctccctgtcgctcgccctgctggtagcgctgggtatcaccgccattctctggtatctgtggtatgccagaggcaacgctaacgcgctgtttagcctgaacctgttcaagaatcccacctaccgtcttggtctgttcggcagctttgccggacgcatcggcagcggcatgttgccgtttatgacgccggtatttttacagattgggatgggcttctcgccgttccatgccgggctgatgatgatcccgatggtgctcggcagcatggggatgaagcgtattgtggtgcaggtggtaaaccgctttggctatcgccgggtgctggtggccgccacgctcgggctggcgctggttagtctgctgtttatggccgtggcgctgctgggctggtactacatcctgccgctggtgctgttctgccaggggatcatcaactccatgcgcttctcgtcgatgaacaccctgacgctgaaagatctgccggacgaactggcgagcagtggtaacagcctgctgtcgatgatcatgcagctctccatgagcgtgggggtcacggtcgccggattgctgctcggcatgtacggtcagcaccatctcagcgccgacacccccgtcgcgcatcaggtctttttatacacttacctcagcatggcggtaattatcgccctgcccgcttttatctttgccagagtaccgaatgacacgaccaaaaacgttgtgatccgacgcggcaaaaggagtgcaccatga

SEQ ID NO: 524784 - DNA, 1404 bp, Stenotrophomonas maltophilia
atgaaattctggcgtccggggatcaccggtaagctttttgtggcgattttcgctacctgtatcgtcctgctgattaccatgcactgggcggtgcgggtcagctttgagcgcggctttattgactacatcaagcacggtaacgaacagcgcttacagggcttaagcgacgcgctgggggaacagtatagcctgcacggtaactggcgttttctgcgcaataacgatcgttttatatttcaaattctgcgctcgctggagcacgataatgacgacgaccgcccggggccgggcatgccgccgcacggctggcgcacccagttctgggtgatcgatcaggagatgcacgtgctcgttggcccgcgctcgccggtaccgccggacggtacaaagcgcgccattacctcgaacggcgccacggtgggctgggttattgcctcgccggtcgagcggctgacgcgcaacaccgacatcaactttgatcgccagcagcgccagaccagctggctgattgtcgcgctttctaccctgcttgcggcgctcgccaccttcccgctggcgcgcggcctgctggcgccggttaaacgcctggtggaaggcacgcataagctggcggcgggtgatttctcgacccgcgtggacacccgcagtcaggatgaactgggcaagctggcgcaggacttcaaccagctcgccagcacgctggagaaaaaccagcagatgcgccgcgactttatggccgacatttcgcacgagctgcgcaccccactggcggtgctgcgcggcgagctggaggcgattcaggacggcttgcggcagttcacccccgaatccgtggcctcgctacaggcggaagtcggcacgctgaccaagctggtggacgatctgcatcagctttccatgtccgatgaaggcgccctggcctaccagaaagccccaatcgacgtgatcaatatccttgaagtcgtgaccggcgcgttccgcgaacgcttcgccagccgtgacctgaaaatcaacctctcgctgcctgacagcgcggtggtattcggcgacagagatcgcctgatgcagctgttcaataatctgctggagaacagcctccgctacaccgacggcggcggcgggtttcatatctccggcaagcaggagaacgggcgctttgccctgacctttgcggactccgcccctggcgtgaaggatgcgcagctggaaaaactgttcgagcgcttctatcgcaccgaaggttcacgcaaccgcgccagcgggggctccggccttgggctggcgatttgcgtaaacattgtggaggcgcatggtggcaccatccgcgccgcccattcgccttttggcggggttagcattacagtagagttacctctggaacgggatttatcgagggaagcatga

SEQ ID NO: 524785 - DNA, 723 bp, Stenotrophomonas maltophilia
atgaccgagttaccgattgacgacaacacaccgcgtattttgatcgtggaagacgagcctaaacttgggcaactgctgatcgactatttgcgcgctgcgagctatgcgccaacgcttatcagccacggcgaccaggtgctgccctacgtgcgccagacgccgccggatctgatcctgctggatctgatgctgccgggtactgacggcctgaccctgtgccgggaaattcgtcgtttctccgatgtgcccatcgtgatggtgacggccaaaatcgaagagatcgaccgtctgctggggctcgaaatcggcgctgacgattacatctgcaagccttacagcccgcgggaggtggtcgctcgcgtgaaaaccatcctccgccgctgcaaaccgcagcgtgaattgcaggtgctggatgcacaaagcccgctgatcgtcgacgaaagccgcttccaggcgagctggcgcagcaaactattggatctcacccccgcggagttccgcctgctgaaaaccctctcccacgagccgggaaaagtgttttcccgcgagcagctgctcaaccatctgtatgacgattaccgcgtggtgaccgaccgcaccatcgacagccacatcaaaaacctgcgccgcaagctggaggcgctggacgccgaccagtcgtttattcgcgcggtgtacggcgtggggtatcgctgggaagcggatgcctgcaggattgcctga

SEQ ID NO: 524786 - DNA, 1497 bp, Stenotrophomonas maltophilia
atgctgctcgaagatgaggagctggagcaggaaatcatagccctgattaaagataaaggcatgacggccgacgcggctgcgcatgaagttatcgaaggtcaggcaactgccctggaagagctggacgatgaatacctgaaagagcgtgcggctgacgtacgtgacatcggtaagcgcctgctgcgcaacatcctgggtctggccatcatcgatctgagcgcgattcaggacgaagtcatcctggttgccgctgacctgaccccgtctgaaaccgcacagctgaacctgaacaaggtgctgggtttcattactgatgcaggtggacgtacctcccacacctctatcatggcgcgttctctggagctgccagccatcgtgggtaccggtagcgtcacctcgcaggtgaaaaacgacgactatctgattctggatgccgtaaacaacgtggtttacgtcaacccaactaacgatgtgatcgagcagctgcgttccgttcaggagcaggttgctaccgagaaagcggaactcgctaaactgaaagatctgccagccatcacgctggacggccatcaggttgaagtgtgcgctaacattggtaccgtacgtgacgttgacggcgctgagcgcaacggtgcggaaggtgtaggtctgtatcgtactgaattcctgttcatggaccgcgacgccctgccaacggaagaagagcagtttgcagcgtacaaagcggttgcggaagcgtgcggctcgcaggccgttatcgtccgcaccatggatatcggtggcgacaaagagctgccgtacatgaacttcccgaaagaagagaacccgttcctgggctggcgtgccgtacgtatcgccatggatcgcaaagagatcctgcgtgaccaggttcgcgctatcctgcgtgcatccgctttcggtaagctgcgcatcatgttcccgatgatcatctctgttgaagaagtgcgtgcactgaagaaagagattgaaatctacaagcaggaactgcgtgacgaaggtaaagcatttgacgagtcaatcgagatcggcgtgatggtggaaacaccggcagccgcgaccattgcacgtcatttagccaaagaagttgatttctttagtatcggtaccaatgatttaacgcagtacaccctggcagttgaccgtggtaatgatatgatttcacatctctaccagccaatgtcgccgtctgtactgaatttgatcaagcaagttattgatgcttctcatgcagaaggtaaatggactggcatgtgtggtgagcttgcaggcgacgaacgtgctacacttctgttgctgggtatgggtctggacgaattctctatgagcgccatttccatcccgcgcatcaagaagattatccgtaacacgaacttcgaagatgcgaaggtattagcagagcaggctcttgctcaaccgacaacggacgagttaatgacgctggttaacaagttcattgaagaaaaaacaatctgctaa

SEQ ID NO: 524787 - DNA, 504 bp, Stenotrophomonas maltophilia
atgggtttatttagtaaactgttcggtgacaaaagcaatagcgactccggaactattgagattgttgctccgctctccggcgagatcgtcaatatcgaagacgtgccggatgtagtgtttgctgagaaaatcgttggtgatggcattgctatcaaaccaactggcaacaaaatggttgctccagttgacggtaccattggtaagatttttgaaaccaaccatgcgttctctatcgaatcagatagcggtatcgaactgttcgttcacttcggtatcgacaccgttgaactgaaaggcgaaggcttcaaacgtatcgcggaagaaggccagcgtgttaaagttggcgaccctgtaattgaattcgatctgccactgctggaagaaaaagcgaagtctaccctgactccggttgttatctccaacatggacgaaatcaaagagctgatcaaactgtctggcagcgttaccgtgggtgaaaccccggttatccgcatcaagaagtaa

SEQ ID NO: 524788 - DNA, 837 bp, Stenotrophomonas maltophilia
atggagatgattttattccgggataacacccgggcgcagcaaaccgatattgtcgccgttcagtcgcaggtggtgtacggcagtgtgggaaacagcatcgcggtgccaaatattcgcacccatcgactgaacgttaccgccgtgccgacggtgctgttcagcaatacgccgcactacgacaccttctacggcggggtgatcccggacgagtggttcagcggctacctgaaggcgctggaagagcgcgagatcctgcgcgagcttaaagcagtcactaccggctatatgggcagcgccagccagatcgtgctgttggcgcagtggctgaaggcgatcaaagtgcaacatcccgatctgctggtgctggtcgacccggtaatcggagacatcgacagcgggatgtacgtgaagccggatattcctgaagcctaccgtgagcacctgctcccgctggcccagggcattacgcccaacgtgtttgagctggaagtgctgagcggcaaaccgtgccgtactccggagagcgccattgccgccgcgcaggggctgctgtctgacacgcttaaatgggtggcgatcaccagcgcgccagtggctgacgatccgcaaaatatccacgtcgtgctggtgagcgaggagggcgttaccgtaagcgcacacccgcgcgttgagacggacctgaaagggacgggagatctgttctgttcggagctggtgagcggtatcgtcggcggtaaaaccgtggccgacgccattcgcatggcgggcgacagggtgactgacgtgatgatctatacgcagtcgaaaggctacgacgagcttattctgcctgcataa

SEQ ID NO: 524789 - DNA, 912 bp, Stenotrophomonas maltophilia
gtgaatacactcgaacacaccatcggcaacacccctctggtcaaacttcagcgcatggggtgtgacaacggcagcgaaatctgggtcaaacttgaaggcaataacccggcggggtcggtgaaagaccgggcggcgctgtcgatgattgttcaggccgaaaagcgcggcgagataaagcccggcgatgtgctgatcgaagccaccagcggtaacaccggtatcgcactggcgatgatagccgccctgaaaggctatcgtatgaagctgctgatgccggataacatgagccaggagcgccgtgccgccatgcgtgcctacggggccgagctgattctggtgagcaaagagcaggggatggaaggggcgcgagatttagcgttagcgatggcggagcgcggggaaggcaagctgctcgaccagtttaataacccggacaacccgtacgcgcactacaccaccaccggcccggaaatctggcagcaaaccggcgggcgcatcacccactttgtctccagcatggggaccacgggcacgatcaccggtgtgtcacgttttctgcgcgagcaggagcagccggtgacgattgtcggcctccagccggaagagggaagcagtattccgggcattcgccgctggcccgcggagtatatgccgggcatctttaatgcgcagcttgtggaccaggtgctggatattcatcagcgcgaggcggaaaataccatgcgtgagctggccgtgcgtgaaggcatcttctgcggcgtcagttcgggtggcgcggtagcgggggcgattcgggtggctaaggcaaacccgggtgcagtagtggtagcgattatttgcgatcgcggcgatcgctacctgtcgaccggcgtctttggtgaagagagttattcgcagggggcggggatttaa

SEQ ID NO: 524790 - DNA, 1095 bp, Stenotrophomonas maltophilia
atgagcattgagattgccaatattaagaagtcttttggtcgcacacaggtgctgaatgatatctcgctggatatcccttccggacaaatggtggcgctgctggggccgtctggctccggtaaaaccacgctgctgcgtattatcgccgggcttgagcaccagaccagcggacatatccgcttccacggtacggacgtaagccgtttgcatgcccgcgaccgtaaagtgggttttgtattccagcactacgccctgttccgccacatgacggtattcgacaacatcgcgtttggtttgaccgtactgccgcgtcgtgagcgtccgaatgcggccgccatcaaagcgaaagtgaccaaactgctggagatggtgcagctggctcatctggcggaccgcttcccggcacagctttctggcgggcagaaacagcgcgtggcgctggcgcgtgcgttagccgtggaaccgcaaatcctgctgctggacgaaccgtttggcgcgctggatgcgcaggtgcgtaaagagctccgccgctggctgcgtcagcttcatgaggaactccagttcaccagcgttttcgtgacccacgatcaggaagaggcgatggaagtagccgaccgcgtggtggtgatgagtcagggcaacattgagcaggttgacgagccagagcaactctggcgtgaaccggcgacccgctttgtgctggagtttatgggggaagtaaaccgccttcagggtgctattcgcggcggtcagttccacgttggcgcgcaccgctggccgctggggtatacctccgcgcaccaggggccggtggatctgttcctgcgcccgtgggaagtggacgtcagccgccgtaccagcctggactcaccgcttccggtgcaggtgctggaagctagccctaaaggtcactacacccaattagtggtacagcccctgggctggtacaccgagccgctgaccgtggttatgcgtgacgacgagccgccgcaccggggggaacgcctgtttgtggggctgcaacacgcgcgcatttatcatggcaacgagcgcatcgagacgcgcgaggatattgctctggcggagtcagcctga

SEQ ID NO: 524791 - DNA, 876 bp, Stenotrophomonas maltophilia
atggcggaagttacgcaattgaagcgctatgacgtgccccgcatcaactggggcaaatggtttctgattggtaccggcgtgctggtctccgcattcattctcgtcgtgccgatggtgtacatcttcgttcaggccttcagcaaagggattatgcccgcgctgcaaaacctggccgatccggacatgctccacgccatctggctgacggtcatgattgccctgatcaccgtcccggtgaatctggtgtttggcgtattgctggcctggctggtaacgcgctttaacttcccggggcgtcagctgctgctgaccctgctggatatcccgtttgcggtgtcaccggtggtggcgggtctggtttatctgctcttctacggttccaatggcccgctgggcggctggctggatgaacacgacctgcagatcatgttcgcctggccggggatggtgctggtgaccgtctttgtcacctgtccgttcgtggtacgcgagctggtgccggtgatgctcagccagggcagccatgaagatgaagccgcggtgctgctcggcgcttccggctggcagatgttccgccgcgtcacgctgccgaatatccgctgggcactgctttacggcgtggtgctgaccaacgcccgtgcgatcggtgagtttggcgcggtgtcggtggtatccggctcgattcgcggcgaaaccctgtcgctgccgttacagattgaattactggaacaggactacaacaccgtcggttcctttactgccgcagcgttgctgacgctgatggcgattttgaccctgtttttgaagagtgtggtgcagtggcgtttagagaatcaggaaaaacgtcagcatcaggagggaaatcatgagcattga

SEQ ID NO: 524792 - DNA, 834 bp, Stenotrophomonas maltophilia
atgtttgcagtgtcctccagacgtgtgctgccgggctttaccttaagcctcgggaccagcctgctgttcgtctgtctgattttgttattaccgctcagcgcgctggtgatgcagctcgctgagatgagctggtcccagtactgggaagtgattactaacccgcaggtggtggcggcctacaaggtcaccctgctgtctgcgttcgtggcctcgatttttaacggcgtgtttggcctgctgatggcgtggatcttaactcgctatcgcttcccgggccgcaccctgctcgacgcgctgatggatctgccgtttgccctgccgacggcggttgccggtttgacgctggcgtcgctgttttccgtgaacggcttttacggtgagtggctggcgaagtttgatatcaaagtgacctatacctggctcggtatcgcggtggccatggcctttaccagcatcccgtttgtggtacgtaccgtgcagccggtgctggaagagttaggacccgaatacgaagaggccgcagaaacgctcggcgccacgcgctggcagagttttcgcaaggtcgtgctgccggaactctctccggcgttgctggcgggtatcgcgctctcctttacccgcagcctcggtgaatttggcgcggtcatttttatcgccgggaacatcgcgtggaaaaccgaagtgacctcgctgatgatttttgtccgtttgcaggagtttgattatccggccgcgagtgcgattgcctcggtgatccttgccgcgtcgctgctactgctgttctcgattaacactctgcaaagtcgctttggtcgacgtgtggtaggtcactga

SEQ ID NO: 524793 - DNA, 1014 bp, Stenotrophomonas maltophilia
atggccgttactgtactgaaaaaaggatcgctggcactggcaggtttactgctggtggcgcaggcgcaggcaaccgagttgctgaacagttcttatgatgtttcgcgcgagctgtttgccgcccttaatcccgcatttgaacagcagtgggcgaaagagaacaacggcgacaagctgaccatcaagcagtcgcacgctggctcatctaagcaggcgctggccattttgcaggggctgaaagcggacgtggtgacctacaaccaggtcacggacgtgcagatcctgcacgacaaaggcaaactgatcccggcgaactggcaaagccgcctaccgaacaacagttcgccattttactccaccatgggcttcctggtgcgcaagggcaacccgaagaacatccacgactggaacgacctggtgcgttcagacgtaaagctgatcttcccgaatccgaaaacctccggcaacgcacgttacacctacctggcggcgtggggcgcggcggacaaagctgacggtaacgataaagcgaaaaccgaacagtttatgacccagttcctgaaaaacgtcgaggtgtttgataccggcggtcgtggcgcaaccaccaccttcgccgagcgcgggctgggcgacgtactgatcagctttgaatccgaagtgaacaatattcgtaaacagtacgaagcgcagggcttcgaagtggttatcccgaaaacgaacattctggccgagttcccggtggcgtgggtggataaaaacgttaaggctaacggcacagaaaaggcggcgaaagcctacctgaactatctgtacagcccgcaggcgcagactgttatcaccgactactactaccgtgtcaacaacccggacgtgatgagcaagctgaaagacaaattcccgcagaccgagctgttccgcgtggaagatcatttcggcgcctggcctgaggtcatgaaaacgcattttgtcagcggcggtgagttggacaaactgctggcagcggggcgtaagtaa

SEQ ID NO: 524794 - DNA, 900 bp, Stenotrophomonas maltophilia
atgtctcaggtacagagtggcattttgccagaacattgccgggcggcgatttggattgaagccaacgtcaaaggggacgtggatgccctgcgcgcggccagcaaagttttcgttgataaactggccaccttccaggccaaattccccgaagcccatctgggcgcggtggtcgcctttggcagcaccgtctggcgtcatctgagcggcggcgaaggcgcagaagagctgaaagactttattccttatggcaaaggtcttgcgcccgccacccagtatgacgttctgatccatatcctctccctgcgtcacgacgtgaacttttctgtcgctcaggctgcgattgaagcctttggtgacagtatcgacgtgcaggaagagatccacggtttccgctgggtggaagagcgcgatttgagcggcttcgtcgacggcaccgaaaacccggccggggaagagacgcgtcgcgaggtggctgtaatccaggatggcgtggacgcgggctgcagctatgtgttcgtccagcgctgggagcataacctcaggcagcttaaccgcatgagcgtgcatgaccaggagatgatgattggccgtaccaaagatgccaatgaagagattgacggcgatgcgcgtccggtcacttcccacctgtcccgcgttgaccttaaagaagacggtaaggggctgaagattgttcgccagagcctgccgtacggcaccgcgagcggtacgcacggcctgtacttctgcgcttactgcgcacgcctctacaacatcgaacagcagctgctgagcatgtttggcgataccgacggtaagcgtgacgccatgctgcgcttcacccgcccggtgaccggcggctactactttgcgccgtccgttgagcgcctgctggcgttgtaa

SEQ ID NO: 524795 - DNA, 576 bp, Stenotrophomonas maltophilia
atgaaatcgctgcgtttacttttatgcgctctcccgctggcgttaaccggctgttccacgctctcatccatcaactggtctgcggcctatccgtggaactggtttggctcctcaatggaagtgaccgagcagggcgtgggcaaaatcaccgcctcgacggcgctggatcaggatgccattcaggatgccatcggcagtgattatcgcctgcgcagcggcatgaaaaccgagaacggcaacatcgtgcgctatttcgaagcgttgaaagatgacaaagtggcaatggtcatcaacggcgataaaggtacggtcaaccgcattgcggtgatggatgaagagatcccgacctcaggtggcgtgaaggtgggaacgccgtttggcgaactctatcagaaagcgtttggccactgcgccagtgtgccatcggaggagagcgtggcggtcgagtgtaaggccgacggcagccagcatattagctatgtgttcagcggcacctggaacggtccggaagggttaatgccgtctgacgacaccctgaaaaagtggaaagtgagcaaaattatctggcagcagtaa

SEQ ID NO: 524796 - DNA, 450 bp, Stenotrophomonas maltophilia
atgaagagtactgagttccaccctggcgactacgacgttcacggtcgtctgcgtctgccttttttgttctggtgcgttctgctgttgcaggcccgaacctgggtgctgttcgtgatggctggcgcgtcgcgcgggcagggcgatacgttactgaatctcttttatcccgatcacgattcgttctggctgggattgctgccgggtgtaccagcggtcctggcgtttctgtgcagcggacggcggcaagccattccgcgcttctggcgcgcgcttcgctggctgctgatcctggcgcagtttgtgcttctggtctggcaacccttgctctggctgtacggcgagccgctttcgggtatcgggattgcactggtggtggcggatattgtcgcgctgctgtggctggtcacgaatccccgtttacgcgcctgttttacgcaagagccagattaa

SEQ ID NO: 524797 - DNA, 426 bp, Stenotrophomonas maltophilia
atggagatacgcgtttttcgccaggaagatttcgaagaggtgatcaccctttgggagcgctgcgatctgctgcgtccgtggaacgatccggaaatggacatcgaacggaaggtgaatcacgacgtcagtctgtttctggtcgctgaggtcaacggcgaagtggtcgggacggtgatgggtgggtacgacggccaccgcggctcggcctactatctgggcgtgcacccggaataccgcgcgcgcggcatcgccaacgcgctgcttaaccgtctggaaaagaaactgatcgcccgtggctgcccgaaaatccagattatggtccgggaagataacgacgtggtgctgggcatgtatgaacgtctgggctacgagcacgcggatgtactgacgctgggtaagcgcctgatcgaagatgaagagtactga

SEQ ID NO: 524798 - DNA, 876 bp, Stenotrophomonas maltophilia
atgagcacattcaaaccattaaaagcactcacatcgcgtcgtcaggttctcaaagcggggctggcggccttaacgttatcgggtatcgcaaagcaggctcaggcaaaagaagagagcacgcttaaaaccagtaacggacacagcaagccgaaaaccaaaaaagctggcgcaaagcgtctggtcatgctcgatccgggccacggcgggatcgacaccggcgccattggccgaaacgggtcgaaagaaaaacacgtcgtgctggcaattgcaaaaaatgtacgcgcaattttacgcagtaacggtattgacgcccgcctgacgcgcacgggcgacacgtttatcccgctgtacgatcgcgtggagattgcccacaagcacggcgcagatctgtttatgtccattcacgcggatggcttcacaaacccttccgccgcaggcgcctcggtatttgcgctctccaaccgtggcgccagtagcgccatggcgaaatacctctccgatcgcgaaaaccgggcggatgaagtggccgggaaaaaagccaccgacaaagaccatctgttacagcaggttctgtttgatctcgtgcagaccgataccatcaaaaacagcctgacgctcggctcgcatatcctcaaacggattaaacccgtgcaccgtctgcacagtaaaagcaccgagcaggccgcgtttgtggtgctgaagtcaccgtctattccgtccgtgctggtggaaacctcgttcattaccaacccggaagaagagcgtttactcggcactaaggcgtttcgtcagaagatcgcgaacgccatcgcctccggggtcatcagttatttcaactggttcgataatcaaaaagcgcactccaggaaacgttga

SEQ ID NO: 524799 - DNA, 900 bp, Stenotrophomonas maltophilia
atgaaaccgaatgcacagctggtcaaaactttcctgatgcagctccaggacgcgatttgccagaaactgaccgccgcagacggcggtgaattccaggaagacacctggcagcgcgaagcgggcggcggcgggcgcagccgcgtgctgcgtaacggcggtatttttgaacaggccggggtcaacttctcccacgtccacggtgatgcaatgccagcgtccgccacggcgcatcggcctgaactggcgggccgcagcttcgaggccatgggcgtctcgctggtggtgcatccgcataacccgtttgtgccaaccagccacgccaacgttcgctttttcatcgcggaaaaaccgggagccgatccggtctggtggtttggcggcggtttcgacttaacgccttactatggcttcgaagaggacgccgtgcactggcacaccaccgcacgcgacctctgtctgccgtttggcgaagacgtttacccgaaatacaaaaagtggtgcgatgactatttttatctgaagcaccgcgacgagcagcgcggcatcggcgggctgttctttgacgatctcaataccccggattttgataccgcgttcagctttatgcgcgcggtgggtgaaggctttaccgacgcctatcttccgattgtcgaacgccgcaaagacaccgactacggcgtgcgcgagcgtgagttccagctttatcgtcgcgggcggtacgtggagttcaacctggtgtgggatcgcgggacgctgttcggcctgcagaccggcggacgcacggagtcgattctgatgtcgatgccgccgctggtgcgctgggagtacagctacgcgccaaaagaaggcagcccggaggctgccttgagtgagtttattaaggttcgggactgggtttaa

SEQ ID NO: 524800 - DNA, 2280 bp, Stenotrophomonas maltophilia
atggatgatcagttaaaacaaagcgctctcgattttcacgagtttcctgttccgggtaaaatccaggtatccccgaccaaaccgctggcgacccagcgcgatctggcgctggcctactcgccgggcgtggctgctccgtgcctggaaatcgaaaaagatccgctggcagcgtacaaatacaccgcgcgcggcaacctggtggccgttatctctaacggtacggcggtgctggggttagggaacatcggtgcgctggctggtaagccggtgatggaagggaagggcgttctgtttaagaaatttgccggtatcgacgtcttcgatatcgaagtggacgaactggatccggataaattcatcaacgtggtggcggcgctggagccgaccttcggcggcatcaacctggaagacatcaaagcgccggaatgtttctatatcgagcagaagctgcgcgagcgtatgaacattcccgtgttccatgacgaccagcacggcacggcgattatcagtaccgccgccattctgaacggcctgcgcgtggtggagaaaaatctctccgacgtgcgcatggtggtctccggcgcaggcgccgcggccatcgcctgtatgaacctgctggtggcgctgggcatgcagaagcacaatattgtggtctgcgactccaagggcgtgatctacaaagaccgcgagccaaacatggcggaaaccaaggcggcctatgcggtggaagacgacggcaagcgcacgcttgaagacgtgattgacggtgctgacattttcctcggctgttcaggcccgaaagtgctgacccaggagatggtgcagaagatggcgcgcgcgccaatgatcctggctctggcgaacccggagccggaaattctgccgccgctggcgaaggcggtgcgtgaagacgctatcatctgcaccggacgttcggactacccgaaccaggtgaacaacgtgctctgcttcccgttcatcttccgcggggcgctggacgtcggcgccacggcgatcaacgaagagatgaagctggctgccgttcatgctatcgcagagctggcgcacgccgagcagagcgaagtggtggcctccgcctacggcgatcaggatctgagcttcggccccgactacatcatccctaaaccatttgacccgcgtctgatcgtgaagatcgcgccagcggtggccaaagcggcgatggactccggcgtggcgacgcggccgattgaagatttcgatgcctacgtcgataaactcaccgagttcgtttacaaaaccaacctgtttatgaagccgatcttctcccaggcgcgcgccgacgcgaagcgcgtggtgctggcggaaggggaagaggcgcgcgtgctgcatgccacgcaggagctgatcaccttagggctggcgaaaccgatcctgattggtcgtccgagcgtgatcgagatgcgtattcagaagctcggcctgcaaataaagccgggcgtggactttgagatcgttaacaacgaatccgatccgcgcttcaaagagtactggaacgaatactattcgatcatgaagcgtcgcgggatcacccaggagcaggcgcagcgggcggtgatcagcaacaccacggtgatcggcgcgatcatggttcatcgcggtgaggcggatgcgctgatctgcggcaccatcggcgagtaccatgagcatttcagcgtggtacaggagatcttcggctatcgcgagggcgtccatactgccggcgcaatgaacgcgctgctgctgccaagcggtaacacctttatcgccgatacctacgtcaacgacgatccctccccggacgaactggcggaaatcaccgtgatggcggcggaaaccgtgcgccgctttggtatcgagccgaaagtggcgctgctgtcgcactcaaacttcgggtcatccaaatccgcggcggcgtgcaaaatgcgccagacgctggacctggtgcgcgagcgtgcgccggagctgatgatcgacggcgagatgcacggcgacgccgcgctggtggagagtattcgtaatgaacgtatgccggacagcccgctgaaaggctcggcgaacgtgctgattatgccgaacgtggaagcagcgcgtattagctataacctgctgcgcgtgtcgagttctgaaggtgtgaccgtcgggccggtactgatgggggtgtcaaaaccggtacatgtgttaacgccgattgcctctgtgcgtcgtatcgtcaacatggtggcgctggcggtggttgaggcgcagacgcagccgctgtaa

SEQ ID NO: 524801 - DNA, 951 bp, Stenotrophomonas maltophilia
atgaaccagctagacggcatcaaacaatttaccaccgtggttgcagacagcggcgacatcgagtcgattcgtcactaccagccggaagacgcgaccaccaatccctctctgctgctcaaggcggccggtcttgcgcactttagtcatctgattgatgacgcccttgcctacggcaaacagcgcgggaaaacgcaggaacagcaggtcgccgaagccagcgacaagctggcggtcaatatcggtgcggaaattcttaaaagcataccggggcgcgtctctaccgaagtggacgcccgcctctcgttcgaccaggaaaaaagcattaacaaggcccgccgcatagtggaactctaccaggagcaggggatcgataagtcacgcattctgatcaagcttgcgtctacctgggaaggcatccgcgcggcggaagtgctggagaaagaggggatccactgcaacctgacgctactgttctccttcgcccaggcgcgtgcctgcgccgaagcgggcgtgttcctgatttcaccgtttgtcgggcgtatctacgactggtatcaggcgaaacagccaatggatccgtacgtggtggaagaagatcctggcgtaaaatcggtgcgtaatatctacgattattacaagcagcatcgctacgagaccatcgtgatgggggccagcttccgccgcaccgagcagatcctggcgctcgcgggctgtgaccgtctgaccatctctcctgacctgctgaaaaagcttcaggagagtgaagagacggtgatccgcaagctggtaccgacctctaccgttctgctaaaaccgaaacccatgaccgaagcggaattccgctgggagcacaatcaggatccaatggccgtggaaaaactggcagatggcatccgccagttcgccgtcgaccagcgcaaactcgaagatcttctcgccgccaaactttaa

SEQ ID NO: 524802 - DNA, 1998 bp, Stenotrophomonas maltophilia
  misc_feature (974)..(983): n is a, c, g, or t
atgtcccgtaaagagctcgccaacgccattcgcgccctcagcatggatgccgtacaaaaagccaattccggccaccctggcgcccccatgggtatggctgatattgccgaagtgctgtggaacgacttcctgaagcacaacccgaccgatccgacctggtacgatcgcgaccgttttattctctccaacggtcacgcctcgatgctgctctacagcctgctgcacctctccggctacgacctgccgcttgaggagttaaaaaacttccgccagctgcactccaaaacgccgggccacccggagatcggctatacgccgggtgttgaaactactaccggcccgctgggccaggggctggcgaatgccgtcggcctggcgattgcagagcgtacgctggccgcgcagttcaaccagcccgaccacgagattgtcgatcactacacctatgtctttatgggtgatggctgcctgatggaggggatctcccacgaggtctgctcgctggcgggcaccctgggcctgggcaagctgattggcttctacgatcacaacggtatctccattgacggggaaaccgagggctggtttaccgacgacactgcaaaacgctttgaagcctatcactggcacgtggtgcacgaaatcgacggtcacgatcctgaggcggtgaaaaaagcgattcaggaagcgcagagcgtgaaggacaaaccgtccctgatcgtctgccgcaccaccatcggcttcggctcgccgaacaaagcgggtaaagaagaggcgcacggcgcggcgctgggtgaagaggaagtggcgttgacccgccagaaactgggctggaaacacccggcctttgagatcccaaaagagatctacagggcctgggatgctcgcgaaacaggtgaaaaagcgcagcaggcctggaacgagaagtttgctgcctacaaaaaagcgtatccggagctggcggccgaatttannnnnnnnnnccgccgcatgagcggtggcctgccggaagactgggaagagaaaactcaggcgctgattgaaaacctgcaatctaacccggcgaaaattgccacccgtaaggcgtcacaaaacaccctgaacgcgattggccctgtcctgcccgaactgctgggcggctcggcggatctggcgccaagtaacctcaccatctggtctggctctaaatccctgaaggaagacattgccggaaactatatccactacggcgtgcgcgagttcgggatgaccgccattgccaacggtatcgcccaccatggcggcttcgtgccgtacaccgccaccttcctgatgtttgtcgaatatgcccgtaacgcggcgcgtatggcggccctgatgaaggcgcggcaaatcatggtgtatacccacgactccatcggactgggtgaagatgggccgacgcaccaggcggtagagcagctggcgagcctgcgcctgacgccaaacttcagtacctggcgtccgtgcgatcaggttgaagcggctgtgggctggaagctggccgtagagcgccataacggacccacagcgctgatcctgtcgcgccagaacctggcgcagatcgagcgcacgccggagcaggtgaaaaatatcgcccgcggcgggtacatcctgaaagacagcggcggtaaaccggacgtgatcctgattgccaccggttcagaggtggaaatcacggtaaaagcggccgagaaactgaccgccgagggtcacgcggtgcgcgtggtttccctgccttcaacggatatctttgatgcccaggatgaggcgtaccgcgaatcggtgctgccttcaaacgtcgcggcgcgcgtggcggttgaagctggcattgccgactactggtacaaatatgtgggtctgaaaggggcgattgtcggcatgaagggttatggtgaatccgccccggccgataagctgttcccgtacttcggctttaccgttgagaacgtggtggagaaggcgctgagcgtgctgtag

SEQ ID NO: 524803 - DNA, 1044 bp, Stenotrophomonas maltophilia
atgcgctactgcgttatttttctcttcttcatttgcgtgcttcccgcacctttggtgtgggctgcgcctgcgcagcagtctttttcagactggcaggtgacctgcaataaccagaatttctgcgtagcgcgcaacaccggcgagcatcgcggtctggtcatgacgctgagccgcagtgcgggggcaaaaacagacgccagcctgcgcatcgatctcggcggtctttcgacgcctccggtgaaagagcctgacattgccccgcgcctgctgctcgacaatgtgccgcttcagctcacgtcgcaacactggcagttaaccccctggcatcttaaaacagacgatacgggcaccatcaccacgtttctgaaaaccattcaggaggggcaggcgctgaccctgcgcggggggaagcagacaatctctctggccggtctgaaagcggcgctgctgtttattgatgcccagcaaaaacgcgtcggaagtgaaacggcatggattaaaaaaggagatagtccaccgctgagcgtgccgcctgcgccggcattaaaaaaggtggcagtggtgaaccccacgccaacgccgctgacgcataacgaacttaacgatctgctggattacggtacctggcgcatgaaccacagccagtgctccctcgatccgaaccggcgtgaagtgcgcgtgaccgcgttgaccgatgacaaagcgctgatgatcatcagctgtgaggcgggggcgtacaacaccgtcgatctggcgtggctggtgtcgcgtaaaaaaccgtttgctgccagaagcgtgagattgcgcctgccgtttaccccttccagccagagtagcgacatggagctgatgaatgccagcttcgatgaaaaaacgcgcgagctgaccacgctggcactgggacgcgggattggcgactgtgggatccagacccgctggcgttttaacggccagcgcttccgcctggtgcgctacgcggaagagccaagctgcgataactggaatgggccagatgcctggcccacgctgtggatcacaaggtag

SEQ ID NO: 524804 - DNA, 591 bp, Stenotrophomonas maltophilia
atgtccctgaacattaccgttattaaagacaaaatcctttctgaaaattactttgtcctgcgtaacatcacttacgatctcacccgtaagagcggggacgtcattcgccataaacgcgaagtctacgaccggggcaatggtgcaaccattctgctgtataaccgtgaaaagcaaagcgtggtgctgatccgccagtttcgcatcgcgacatgggtcaatggcaacgcggacggacgtctgattgaaacctgtgcaggtctgctggacgacgatgagccggaagtgtgtatccgcaaagaagccattgaagagacgggctttgaggtgggggcggtgcagaaagtctttgagctgtttatgtcccctggcggggttaccgagctggttcacttcttcattgcggagtacaccgatgcccagcgcacgcaccggggcggtggtgtggacgatgaagacattgaagtgctggaaatgcctttcgctcaggctgtcgacatggtgaaaagcggcgagatccgcgacggtaaagcggtgatcctgttgcagtatctgcaaaccagcggtttgatgaatgctgcgtcggtagcgtga

SEQ ID NO: 524805 - DNA, 1977 bp, Stenotrophomonas maltophilia
atgaatcgttttattatggccaacgctcaacagtgtatcggttgtcgcgcctgcgaagttgcctgtgtgatggcgcacaacggggagcagcacgcgctgagcgagcgccattttcatccccgcattacggtccttacctctggcttacgaaaaagcccagtgacctgccaccactgtgaaaatgcgccctgcgcgcaaagctgcccgaacggagccatcacgcaacacagcgacagcgtacaggtcaatcaacaaaaatgcattggctgtaaagcctgcgtggtggcctgcccgtttggcacgatggacatgctgatcaccccgcttgaaaacgacagcgtaaaggcctcggcgcacaaatgcgacctctgcctggaaaggccgcaaggcccggcctgcgttgaaaactgcccggcggaggtgcttacgctcgccaccccagccgtgctggataagctggttaaacagcgccgacagcgcagcgcaaggctggacacgctgccgtggcacagcgaggcggttcaatcagcccctccgcaaaccaaacggcaacagatgcataacaccccggcgcgcggtgagccggataagctcagccccgacgcgcgcgcaggccattttaatgagatctacttgccgtttcgcccggaacaggcgcagcgcgaagcatcccggtgcctgaaatgtggcgaccacagcatttgcgagtggacctgcccgctgcataaccatattccgcagtggattgagcggatcagggcgggggatatcaccggtgcggctgagctttctcaccagactaactgtttaccggaaattaccggccgcgtctgtccacaggatcgattatgtgaaggcgcctgcaccctgcgggatgcgtcaggggcggtaaccatcggtaatatcgaacgatatatctcggatcgggcgctggcgatgggctggacgccggacgtcagccacgttacaccggtcggtaagcgcgtcgccatcattggtgccggtccggcagggctggcctgtgccgacgtactggtgcgcagcggcatcggtgtgacggtctacgatcgccatccagaaatcggcggattgctgacctttggtattccggccttcaagctggataaatccctgttagcgcggcgcagagagatattcagcgcgatgggtatccgcttcgagctgaactgcgaggtgggaaaagacgtgtcgatggtccaactgcaaaacgactacgatgccctgttcatcggcgtagggacctatcgttccatgaaagcaggtatccctcatgaagacgcgccgggcgtgtacgacgcgctgccgtttttagtggcaaatacgcggaacgtgatgggtcttgaccctgccgcagacgagccgtttatcgacacgcaggggttaaacgtggtggtgctgggcgggggcgatacggcgatggactgcgtgcgcaccgcgctgcgacatggcgcggcgaaagtaacctgcgcctatcggcgggacgaggccaacatgccgggctcaaagaaagaggttaaaaacgcgaaagaagagggcgcggcgtttgaatttaatgtccagccggttgagctcacgctggatgacgacgggaaggtcaagggtatccggatgctgcgcacccgtctgggcgagccggatgcgcaggggcggcgtcgtcctgtcccggtggcgggcagtgagtttgtcatgccagcggatgcggtgatcatggcgtttgggtttaatccgcacgccatgccgtggcttcaggcgcagggcgtcgacaccgacgactgggggcgcatcagggcctccgtggagagccgttatcgttaccagacctcgaatccgcagatttttgctggcggtgatgcggtacgtggtgcggatctggtggtcaccgcgatggcggaagggcgccatgccgcgcaggggatcatggactggcttggcgtgccgccgcgcaacatgcattaa

SEQ ID NO: 524806 - DNA, 1695 bp, Stenotrophomonas maltophilia
gtgaccgttaaacgccccgtatcgggaagcctggctcgggctttcttttcgatgattgtcttgtccgttctgatcagcgccattgcgctggttacactcgccagcagccagcgcgacgccgaggcgattaacatcgccggatcgctgcgcatgcagagctaccgcctgggctacgaaatgcagcgcgccagcccgtcactggcagagcaccgcgcggtctggcagaaaacgctgagcgcgcctgcgttgcagaagctaaaccgctggtatgtgccagaggacgtcaaacagcgttaccagcagttgcagcttggctggcaggagatggacacgcgtatcgccagcggcgataccgggtggtatcagagccacatagaggatttcgtgggccggatagatgcctttgtgctggcgctacagcactacaccgaacataagatacagctggtgattttcatgtcgctgacgggcggcctgggcatcctgctgctggcggtgatgaccctgcggcgcatccgccgtcaggttgtgctgccgctgaataatctggtggcagcgagcgagcgtatcgaacaggggcagttcgatacccccgcgccggatattatgcttcccaacgagctgggccagctttcccgcgccttcaaccatatgtcggcggaattacacaccctgtaccgttccctggagcactccgttgccgaaaaaacccgccacctgaatgaagcgcatcagcagcttgaaatgctgttcaaatgctcacaggcgttgaataccgggcagatagacagccactgcttccggcatattttgcaaattgtgcatgactatacgcagatgaattacctgcaattgcgcaccagtgacgactggcagctttacgaaggacaggagtccccgggtgagaaaatgcacaatttaccggtattaatgcaggacaccctgtacggcgaactgcgctggcaaagcgcgaccggggatgttccgctgccgctcatggaaagcgtggcgacgatgctgggccgggggctctatttcaatcaggcgcagaaacattatcagcagttgctgctgatggaagagcgcgccaccatcgcgcgtgagctacatgattctttggcgcaggtgctctcctatttgcgtattcagcttacgctgctgaagcatgccgtgccgggcgacaatgccccggcccagaccatcattacggacttctcccgcgagctgaataacgcctggcatcagctacgcgagctgctcaccaccttccgcctgacgctcaaccacgccaatcttcctgccgcgctacaggagtctctcgacggtttgcaaagccagaccagcgcgaagctggtgcttgactgccgtctctcatcgcttgcgctggacgcgcaaaaacaggtgcacctcttacagattgtgcgtgaggcagtgctgaatgcgattaaacatgccgacgccagcgagattgtggtcagctgcgtcaccaccgcggacggttctcacacggtcacgatccgtgacaacggtattggtatcggcgacgccagtgaaccgccggggcattacgggctgaatatcatgcgcgaacgcgcgggacggctcggcggaacattacacttttctcagccgccacagggcggtacacaggtcagcgtgacgttccggacacctgcggcgcaggctgaaaaatag

SEQ ID NO: 524807 - DNA, 3114 bp, Stenotrophomonas maltophilia
atggcgaattttttcatcgatcgccccatttttgcctgggtgcttgcaatcctgttgtgtctgacgggtgtcctggcgattacttcccttcctgttgagcaataccccgacctcgccccccctaacgtgcgtatcacggcgaactaccctggcgcctcggcacagacgctggaaaataccgtcacgcaggttatcgagcagaacatgacgggtcttgataacctgatgtacatgtcctcgcagagcagcgccacgggccaggcgacggtaaccctgagctttacggcgggcacggatccggacgaagcggtgcagcaggtgcaaaaccagctgcaatcggccctgcgtaaactgcctcaggcggtgcagaaccagggggtgaccgtgcgtaagaccggtgacaccaatattttgaccatcgcgtttgtttcaaccgatggctcgatggataagcaggacatcgcggactacgtcgccagtaatattcaggacccgctcagccgtatcaacggcgtgggtgatatcgacgcctacggctcgcagtattccatgcgtatctggctggatcccaacaagctgaacagcgtgcagatgaccgccaaagatgtcaccgacgccatcgaatcgcagaacgctcagattgccgtggggcagctcggtggtacgccgtccgtggataaccaggcgcttaacgccaccatcaactcccagtcgctgctccagacgcctgaacagttccgcaatatcactctgcgcgtgaatcaggatggttccgaagtgcgtctgggggatgtcgccaccgtggaaatgggggcggaaaaatatgactacctgagtcgctttaacggcaatgccgcgtccggcctgggggttaaactggcctccggcgccaacgaaatggcgaccgcgcagcgggtattagagcgtctggatgagctgtcgcattacttcccgcacggactggagtacaaagtcgcctacgaaaccacctcattcgtaaaagcctccatcgaagatgtggtgaaaaccctgctcgaagctatcgcgctggtgttcctcgtgatgtacctgttcctgcaaaacttccgcgccacgctgatccccaccattgcggtgccggtggtgttgctgggaacctttgcggtgctgtatgccttcggttacagcatcaacaccctgaccatgtttgccatggtgctggccatcggcctgctggtagatgatgccatcgtggtggtggaaaacgtcgagcgcatcatgagcgaggaagggctttcgccccgcgaggccacgcgcaaatcgatggggcaaattcagggtgcgctggtcggtatcgccatggtgctgtcggcggtatttatcccgatggcgttttttggcggcactacgggcgcgatttatcgccagttctcgatcaccatcgtctctgcgatggtgctctccgtactggtggcgatgatccttacccctgctctgtgctcgacgctgctcaaaccgctgcataagggcgaacaccacggtcaaaaaggcttcttcggctggtttaaccgcatgtttaaccgaaatgcggcgcgctatgaagcgggcgtgggtaaagtactgcaccgcagcgtgcgctggatggtggtttatgtcctgctgctcggcggcatggtcttcttattcctgcggctgccaacctcgttcctgccgctggaagatcgcggcatgtttatcacctccgtacagttaccgagcggctcgacccagcagcagaccctgaaagtggtgcagaaggttgagaactacttccatactcaggagaaggataacgtggtctccgtcttctccaccgtcggctctggccctggcggtaacgggcagaacgtggcgcgtatgtttgtgcgcctgaaagactgggaccagcgcgacagcgatagcggctcctcctttgccatcattgaacgtgcaactaaagcgttcaacaaaatcaaggaagcgcgcgttttcgccagcagcccgcccgctatcagtggcctgggcagctcagccggatttgatatggagcttcaggatcacgcgggtgccgggcatgacgcgttgatggcagctcgcgataaactgctcgagctggccgggaaagatccgcagcttacccgcgttcgtcataacggtctggatgacagccctcagctacaggtggatattgaccagcgtaaagcgcaggcgctgggcgtctccatcgacgacattaacgacaccctgcaaacggcatggggctcaagctacgtgaatgactttatggatcgcggtcgcgtgaaaaaggtctacgttcagtctgctgccaaataccgcatgctgccggacgatatcaaccgctggtatgtgcgcaataacaccggcggcatggtgccgttctcggcgtttgcgacgtcacgctgggagaccggttcgccgcgtctggagcgttacaacggctattcggcgctggagattgtcggtgaagccgcgcctggcgtcagtaccggtaccgcaatggacattatggaaaaactggttcagcagttaccgaccggctttggcctggagtggacggcgatgtcctaccaggaacggctttccggcgcgcaggcgcctgccctgtatgccctgtcgctgctggtggtgttcctctgcctggcggcgctgtatgaaagctggtcagtgccgttctcggtaatgctggtggtgcctctcggggtcatcggcgcgctgctggcaacctggatgcgtggcctggaaaacgatgtctatttccaggtcggactcctcaccgtaatcggattgtcggcgaaaaacgccattctgatcgtcgaatttgccaatgagatgaatgccaaaggtcacgaactgatggccgccacgctgcacgcctgtcgtcagcgcctgcgcccgatcctgatgacttctctggcgtttgtatttggcgtcctgccgatggccaccagctccggcgcaggctccagcagccagcacgcggtgggaacgggcgttatggggggaatgatttccgcgacgattctggctatctatttcgtaccgctgttctttgtgctgatacgccgtcgtttcccgctgaaggataagccggaataa

SEQ ID NO: 524808 - DNA, 357 bp, Stenotrophomonas maltophilia
atggttgtgatgtacggcattaagaattgcgatacgattaaaaaagcccgccgctggctggaagcacacaacatcgactatcgcttccatgattaccgtgccgacgggcttgaccctgcgtttctccattccgccatcagtgaactgggctgggaagcgctgctgaacacccgcgggaccacctggcgaaaactggatgaatctctccgggccacgatcaacaacgccgacagcgcagccaaactgatgcttgaaatgccggcaatcatcaaacgcccattgctctgcaagccaggtcagcctatgctgctgggtttcagtgaaaccctttattcagatttattcgttgaggtgtag

SEQ ID NO: 524809 - DNA, 1128 bp, Stenotrophomonas maltophilia
atgtcatgcccggtcattgagctgactcagcagcttattcgccgtccttcccttagcccggacgacgcaggttgtcaggcattaatgattgagcgcctgcgtgccatcggttttaccgtcgagcacatggattttggcgatacgcagaacttctgggcatggcgcggtcagggggagacgctggcgtttgccggacataccgacgtagttcccgcaggcgacgcagaccgctggatcaacccgccttttgagccaaccatccgcgacggcatgcttttcggacgcggcgctgcggatatgaaaggttccctggctgcgatggtcgtggcggcagagcgtttcgtcgcccagcatccgaaccataaaaaccgtcttgcgtttttgattacctccgatgaagaagccagcgcccacaacggcaccgtgaaggtcgttgaggcgctgatggcgcgcaatgaacgtctggactactgtctggtgggcgaaccgtccagtaccgaagtggtgggcgatgtggtgaaaaatggccgccgtggatccctgacctgcaatttgaccattcatggcgtgcagggccacgttgcctatccgcacctggcggataacccggtacaccgcgccgcgccgatgctgaacgaactggtgggcattgaatgggataaaggcaacgaatttttcccgccaaccagcatgcagatagccaacatcaaggccggcactggcagcaacaacgtcattcccggcgatctcttcgtccagtttaacttccgcttcagcaccgaactgaccgacgagatgatcaaagcacgcgtgattgcgatgctcgaaaaataccagctgcgctataccctcgactggtggctgtctggccagccgttcctgacgcagcgcggtaaactggtggatgcggtagtgaacgccatcgcgcactataatgagattaagccacagctgctgacaacaggcggcacgtctgacggacgctttattgcccgcatgggcgcacaggttgtcgaactgggtccggttaacgcgacgattcacaaaatcaatgaatgcgtgaacgctgccgatttacaactgctggcccgcatgtatcaacgtattatggagcagctcgtcgcctga

SEQ ID NO: 524810 - DNA, 198 bp, Stenotrophomonas maltophilia; identical to SEQ ID NO: 116106

SEQ ID NO: 524811 - DNA, 696 bp, Stenotrophomonas maltophilia
atgaaacatgaccattttgttgtgcaaagcccggatacacctgctaaacagctactgcttctgtttcatggcgtgggcgacaatgccgtcaatatgggacagattggcagctggtttgcacccgttttcccacacgcgctgatcgtcagtatcggcggcgtggagccctgcggtccggacgggcggcagtggttttccgtcgagggcgtgacggaggaaaatcgtcaggcacgtattgatgccgttatgccagcctttatcgatatcgtgcgttactggcagcagcagagcggcgtaggtgccaatgcaacagcgctgattggcttctctcagggctcaatcatgtcgctggaaagcgtaaaagcgcagcccggactggtgtcccgcgtgattgccttcaatgggcgttttgcgacgttaccgcaaagcgcgaccacgcagaccacgatccatctcattcatgggggtgaagaccgggtaattgagctttcgcatgcggttgcggcccaggacgcgctgatgcgtgaaggcggggatgtgacgctggatatcgtggacgatctggggcatgccattgacgatcgcagcatgcagttcgcgctcggtcatctgcgttataccgtaccgaagcactactttgatgaagcgctcagcggcggtaagccgaatgacgatgatatcgtcgagtttatgtga

SEQ ID NO: 524812 - DNA, 1947 bp, Stenotrophomonas maltophilia
atgttgggggttgaacagctggttaaccagcttcagcgtaccgggcaccgccggctggtggtgcttagcggcgatgaagcgtggacgttgagccaggcgaccatcctgcgcgatacgttaccaggagactggctgtggctggaggaaaacccctctaaggccatcagcggcctgctgggacgtgaatatctgcacgccgtttttgacgcgcgtcgcgggtttgacgtctcggccctcgccgccctcagcgggaccctgcgcgccggaagccttctggtgctgctggtgccgccgttctccgtctgggctaacaggcccgacgcggattctctacgctggagcgacagcgcagagccgatcgccaccccgcactttgtttaccatttttgccggacgctggccgccgattcagatgctatcgtctggcatcaacatcgtcctctgtgccttcccgttgcgccagatttacccgcctggcagcccgccagcggtgaaccgcagcgcgagcaggctgcgatcctcgacgcgcttctgaccatgcctgctggcgtggctgccgtgacggccccgcgcggacgaggaaagtccgccctggcgggcatgttgctcaacggcattcaggatagtgctgtagtgaccgcaccggcaaaaggggcgacggatgtcatcgcgcgtttcgccggggaacattttcactttatggccccggatgcgctgctggcctccacaacagaagctgactggctgattgtcgatgaggcggccgccatccccggcccgctgctcaagaaactgacgatgcgctttccccgcgtgttgttgaccactacggtgcagggttatgaaggcacgggcaggggattcctgctgaagttctgcgcccggttcagcggtctgcggcgatataccttatcaacccctgtacgctgggctgccggatgtcctcttgagcgaatcgtggcgaacgcgctgctgttcgacgatgcgcttatcgatcgcaaaccggcaggggaggtaagtttaacgtcgctggcgcccgggatatgggagagcgatccggcgcgcggggcaggcgtgtatgaactgctgtgtgccgcgcactaccggacgtcccccctcgatttacgccggatgatggacgcgccgggacagcattttaccgttgctgaagccgactcaaccctcgccggtgctctctggctggtggaggagggcggcttatccccagaacttagccgcgcagtatgggcggggtttcgtcggccgcgtggaaatctggtggcacagtcgctggcggcgcacggcggttcgcctctcgcggcgacgctgaaaggccgacgcgtcagccgtattgcggttcatcctcatcgccagcgggaaggcatcggccaggggctgatccgcagtgccagcggagaagattatctctcggtcagctttggctataccgacgagctgtggcgtttctggcggcagtgcgggtttgtgctggtgcgaatgggcagccaccgggaggccagcagcgggtgctatacggcgatggcgttgatgccgctgagcgaggcggggcatcagctctgcgaagaggcgcatcagcgtttatgtcgtgatatgcgcgtcctgtcggcctggaatggcgaaaagatcccggtgatggatgcatgggaagctacccttaatagtgacgactggctggagctggcggggtttgcctttgcgcaccgggcgttttcaacctcggttgcggcgctaacgcgattgttgttagccgtggatatgccgctcccggcgctgcgcgggaaaatggaagggaatacgcacgatttcgggcgcaaagcgttgctggcgaagctacgcgaggaaaccgctcacgcgcttgaaaggcttgattactcccgtagccagcggctgaaagccgacattttgcaatggcaattttttcaatga

SEQ ID NO: 524813 - DNA, 870 bp, Stenotrophomonas maltophilia
atgcgctggcaagggcgtcgtgaaagtgacaacgtagaagacagacgcagcagtggtggcggtggtccgtctatgggcgggccaggtttccggttacccagcggcaagggcggtattattctgctggtcgtcgtgctggtagcgggctactacggtgtcgacctgaccggtttgatgaccggtgaaaccgggcaacagcagcagtattctcagcgctccatcagcccgaatgaagatgaagcggcgaaatttacttccgttattctcgcgacgactgaagatacctggggtcagcagttcgagaaaatggggcggacttatcagccgccaaaactggtgatgtaccggggtgcaacccgcaccggctgcggcaccgggcagtccgttatggggccgttctactgcccggcggacagcaccgtctatatcgatctctccttctatgacgacatgaaaagcaagctgggcgccgacggcgattttgcccagggctacgtgatcgcgcatgaagtcggccaccatgtgcagaagctcctcggcattgaacctaaagtgcgtcagatgcagcagaatgcgtctcaggcggaggtgaatcatctctccgtacgcatggagcttcaggccgactgcttcgctggcgtctggggacacagcatgcagcagcagggcgtgctggaaacaggcgatctggaagaggccctgaatgccgcacaggcgattggtgacgatcgcttgcagcagcaaagccaggggcgcgttgtgccggacagctttacccatggcacctcagagcagcgctacagctggtttaagcgtggctttgacagcggcaacccgtcgcagtgtaataccttcggcaaagctatgtga

SEQ ID NO: 524814 - DNA, 714 bp, Stenotrophomonas maltophilia
atgcagaagcaagctgagttgtatcgtggcaaagcgaaaaccgtatacagcacggaaaacccggatctgttggtgctcgaattccgcaatgatacgtcagcaggagacggcgcacgcattgagcagttcgatcgtaagggcatggtgaacaacaagttcaaccacttcattatgaccaaactggccgaagccggtatcccgactcagatggaagcgttgttgtccgatacggaatgtctggtaaaaaaactggatatggtgccggttgagtgcgtgatccgtaaccgtgccgcaggctccctggtgaagcgtctgggcattgaagagggtatcgaactgaatccaccgctgttcgatctgttcctgaaaaacgacgccatgcatgacccgatggtcaacgaatcctactgcgaaaccttcggctgggtcagcaaagagaacctggcgcgcatgcaggaactgacctacaaagccaacgacgtgctgaaaaagctgtttgatgacgcgggcctgatcctggtcgacttcaagctggagttcggtctgtacaaaggcgaagtggtgctgggcgacgagttctctcctgacggcagccgcctgtgggacaaagagacgctggataaaatggacaaagaccgtttccgccagagtctgggtggcgtggtcgaagcgtacgaagcggttgctcaccgtttaggcgttaagctcgactaa

SEQ ID NO: 524815 - DNA, 1035 bp, Stenotrophomonas maltophilia
atggcttattcagtacagaagtcgcgcctggccaaggttgcgggtgtttcgcttgttatgctcctcgctgcctgtagttcagactcgcgctacaagcgccaggtgagcggtgatgaatcctatctggatgcgccgccgcttgctgaacttcacgcgcctgccggcatgatcctgccgatccagaacggtgattataatattccggttaccaacggcagcggcctggtgggtaaagcgctcgatattcgtccaccagctcagcctctggcgctggtgagtggcgcgcgcacgcagttcaccggtgatacagcttctctgctggtggaaagcgcacgcggtaccacgctgtggccgcaggttgtgagcgtcattcagtcgaaaaactatacgattgataaacgcgacgacgccagccagaccttaaccaccgactggattgagtggaaccgtctcgatgaagaccagcagtatcgtggtcgttatcaagtctccgttaagccgcagggttatcagcaggcggttaccgttaagctgttgaatcttgagcaggcaggtaaaccggttgccgatccgtccgccatgcagcgctacagtaccgaaatgctgaacgtgattgcagcgggtctggataagaacgctgctgatgccgcaaacgccgcgcagaaccgtaacggttcaacgtttgacgtgcagagcggtgcagacgataccggcctgccaatgctggtggtgcgtgcgccgtttaaccagacctggcagcgtctgccagccacgctggaaaaagtgggcatgaaggtgaccgacagcacccgttcaacgggcagcatcacagcgacctataagccgctgtctgaaagtgcctggcaggagctgggggcaagcgatccacagctgccttccggtgactacaaaatccaggtcggcgacctcgataaccgcagcagcctgcagtttatcgatccgaaaggacacacgctgacccaggcgcagaacgatgcgctggtcgctgccttccaggccgcattcagcaaataa

SEQ ID NO: 524816 - DNA, 879 bp, Stenotrophomonas maltophilia
atgttcacgggaagtattgtcgcgcttgttacaccgatggatgaaaaaggtaatgtctgccggtcaagcatgaagaagctcattgattaccatgtcgccaatggaacctcggcgatcgtttcggtagggactaccggtgaatccgccacgctgagccacgaagagcacggcgacgttgtgatgctgaccctggaactggcggacgggcgtattccggtcatcgcgggtacgggcgcaaacgcaacggcagaggccattagcctgactcagcgttttaacgacagcggcattgttggctgtctgacggtgaccccttactacaaccgcccaactcaggaaggtttgttccagcatttcaaagccatcgctgaacatactgacttgccacaaattctgtataatgtgccgtcccgtaccggttgcgatatgctgccggaaaccgttggccgtctctcgaaagtaaaaaatattatcgggattaaagaggcgacagggaacttaagccgcgttcatcagatcaaagagctggtttcagacgactttatcctgttgagcggtgatgatgcgaccgcactggactttatgcagctcggtggtaacggcgttatttccgtgacggcgaacgtggcggcgcgtgatatggctgacatgtgcaaactggccgcagccggtcactttgatgaagctcgcgtgattaatcagcgtctgatgccgttgcataataaattatttgtcgaacccaatccgatcccagtgaaatgggcatgtaaggagttggggcttgtagcaaccgacacgctgcgtctgccaatgacaccgattaccgaccatggtcgtgaaattgtcgctggcgcgctgaagcatgccggtttgctgtaa

SEQ ID NO: 524817 - DNA, 570 bp, Stenotrophomonas maltophilia
ttgacaacctcatcacaacattacctggttatcactgcgctgggtgctgacaggccgggtatcgtgaataccatcactcgccacgtgagcagctgcggctgcaatatcgaagacagccggctggctatgcttggcgaagaattcacgttcatcatgctgctttccggaacatggaatgccattaccctcatcgaatctaccctgccgctgaaaggcgcagagctggatttactgattgtgatgaagcgcaccaccgcgcgcccgcgtccggctctgcctgccacagtctgggtacaggttgaagtgcctgattcacctcatttgattgaacgttttacggcactgtttgacagccatcagatgaacattgccgaactggtttcccgcacgcagcctggcgatgaaaacgccatcccgacgctgtttattcaaattaccgcccacagccctgcctcgcaggatgcgtcaaatatcgagcaagcgttcaaagccctctgtacagaattacacgcgcaaggcagtataagcgtcgtcgattattcgcagcacgaacaggatggagttgagtaa

SEQ ID NO: 524818 - DNA, 471 bp, Stenotrophomonas maltophilia
atgaacccactgaaagccggtgatatcgcaccgaaatttagcttaccggatcaagacggcgagcaagtaaatttgaccgacttccagggacagcgtgttctggtctatttctacccgaaagccatgaccccgggctgtaccgtacaggcctgcggtttacgcgacaacatggatgagttgaaaaaggtcggtgtggaagtgctgggcatcagcaccgataaaccagagaagctgtcacgttttgcggaaaaagagctgctgaacttcacgctgctttccgatgaagaccaccaggtttgcgagcagtttggcgtctggggtgagaagtcctttatgggcaaaacgtacgacggtattcaccgcatcagcttcctgattgacgctgacggtaaagttgagcacgtgtttgatgatttcaaaaccagcaaccaccacgacgtggtgttgaactggctgaaacaaagcgcctga

SEQ ID NO: 524819 - DNA, 1317 bp, Stenotrophomonas maltophilia
atgataaatacaacaaagcttgatccgatcgaaaccgcgtccattgatgaattgcaggcgttgcagaccgcgcgcctgaagtggacgctgaaccacgcctacaacaacgttccgatgtacaaacgtaagtttgatgccgcgggcgttcaccctgacgatttcaacgagctggcggacctgcaaaaattcccgtgcaccaccaagcaggatctgcgcgacaactacccgttcgatacctttgcggtgccgatggagcaggtggtgcgcatccacgcttcgtcgggcaccaccggaaagccgaccgtggtggggtatacccagaatgatatcgacaactgggccaatatcgtcgcccgttccctgcgcgccgccgggggcagcgcgaaggataaaattcacgtcgcctacggttacgggctcttcaccggcgggctgggggcgcactacggtgcagagcgtctgggggcgacggtgatcccgatgtccggcggccagacggagaagcaggcgcagctgatccgcgatttccagccggatatgatcatggtgacgccctcttactgcctgaacttgatcgaagagctggagcgtcagatgggcggtgatgccagcgcctgttccctgcgcgtcggcgtgtttggcgccgagccgtggacgcaggcgatgcgccgcgaaatcgagaaacggctgggcattaccgcgctggatatctatggtctctccgaggtgatggggccgggcgtggcgatggagtgtcttgaaaccgctgacggtccgaccatctgggaagatcacttcttcccggagatcgtcaacccgaatgatggcacgccgctggccgacggcgagcagggcgaactgctgttcaccacgctgaccaaagaggcgctgccggtgatccgctaccgcacccgcgacctgacgcgcctgctgccgggcaccgcacgcaccatgcgccggatggatcgcatcagcgggcgcagcgacgacatgctcatcattcgcggcgttaacgtcttcccgtcacagctggaagaggagatcgtcaagttcgaacatctttcgccgcactatcagctggaggtgaaccgccgcgggcatcttgattcactttcggtgaaagtcgagctgaaacagagtagcttaacgctgacgcatgaacagcgttgtcaggtctgccatcagctgcgtcatcggattaaatcgatggtggggatttcaaccgatgtgatgatcgttaactgcggaagcataccgcgatccgagggtaaagcctgccgggtgtttgatttgcgtaaagtagcagccaacggttga

SEQ ID NO: 524820 - DNA, 1206 bp, Stenotrophomonas maltophilia
atgcgtaacgcatttatttgtgagggtgtgcgtaccccggtcggtcgctacggtggaggattatccagcctgcgtgccgatgacttaggggccgttccgctgcgtgcgctgctggcgcgttacccgcagctcgatctggagcgcatagatgacgtgatcttcggctgcgcaaatcaggccggagaggataaccgcaacgtggcgcgcatgtcgtcgctgctggccgggctgccgcagaccgtttccggtaccaccattaaccgcctgtgcggctccggtctggatgcccttggctttgcggcgcgcgccattaaggccggggatggcgatctgctgatcgccggtggcgtcgaatccatgtcccgtgcgccgttcgtgatgggtaaagccaccgcggcgtttcagcgtcaggcggagatcttcgataccaccatcggctggcgatttgtgaatccgctcatgcatcagcaatacggaactgacagcatgccggaaacggcagagaatgtagcggaattgttaaatataagccgtgccgatcaggacgcatttgccttgcgcagccagcagcgcaccgcgctggcgcagcagaatggcgttctggcgcaggagataatcccggtacaggtaacggggaaaaaaggcgcggtaacggaagtgagcgtagacgagcatccgcgcgccgaaaccacccttgaacagcttgccgcgctgaaagccccgtttcgcaagaacggtgtggtgacggcggggaacgcctctggcgtcaacgacggggcggcggcgctgattatcgccagcgagccgatggcgcttgcccaggggttaatcccgcgcacccgcattgtggccatgtcgaccgcgggcgtcgagccgcgtctgatgggattaggcccggttcccgccacccgtaaggtgctggaacgtgccggactcagtatcaccgatatggacgttattgagcttaacgaagccttcgccgcacaggcgctgggggtgctgcgtcagctgggcttgccggatgacgcggagcatgtcaacccgaacggcggggcgatcgcgttaggtcatccgctgggaatgagcggtgccagactggcgctggccgcgagcaatgaattgcaccgacgcggcgggcgctacgcgctgtgtacgatgtgcatcggtgtgggtcagggcattgccatgatccttgagcgtgtttga

SEQ ID NO: 524821 - DNA, 423 bp, Stenotrophomonas maltophilia
atgagtcataacgcctggcataacgcccgcgcgatgtacgaacgggacgcctgcgcgcaggcgatggggatggacattatcgagatgggcgagggctacgcggtggtgaccatgaccatcaccccgcagatgcttaacgggcataaaacctgccacggcggacagctattctcgctggccgataccgcctttgcctacgcctgcaacagtcaggggctggcggcggtggcctcaggctgcgccatcgattttctgcgtccgggctttgctggcgataagctgaccgctaccgcgcgggtgaagcatcagggcaaactgaccggcgtctacgacatcgaaattcagaatcaacaacagaaaaccgtcgctctttttcgcgggaaatcccaccgcaccggcggcagtgtgacaggagaagcctga

SEQ ID NO: 524822 - DNA, 1425 bp, Stenotrophomonas maltophilia
atggtgaatatccatacggtcgccgtcattggcagcggcaccatgggcgccgggattgccgaagtggcagccagccacggtcatccggttctggtgtacgacattgacgctgcggcgatttcccgcgccgtcgacggcattcgccagcggctgtcctctcgcgttgcgcgcggaaaactctctgccgacgccggggaacagatcctcgcccgcctgacgccggtgacgaatatcggtgctctggcgaaagccgaactggtgatcgaggcggcctccgagcggcttgaagtgaaaaaggcgctgtttacccagctggcagaggtttgtccgccgcagacgctactcgccagcaatacctcgtccatttccgttaccgcgattgcggcggagataaaccaccctgaacgcgtcgccgggctgcacttcttcaatcctgccccggtgatgaagctggtggaggtggtcagcgggctggcgacctcacccgaagtggccgatgcgctgtgcgagctggcgctgagctggggaaagcagccggtacgctgccagtccacgccggggtttatcgtcaaccgcgtagcgcgtcctttctactcggaagcctggcgcgcgctggaagagcaggtggcagcgcccgaggtgatcgacgccgccctgcgagacggcgggggtttcccgatggggccgcttgagctgacggacatgattggtcaggacgtcaactttgccgtgacctgctccgtatttaacgccttctggcaggagcgtcgttttttgccgtcgctggtgcagcaggagctggtgctggcggggcgtctgggtaagaaaagcgggcagggcgtttaccgctggcaggaggacaaacccgccgtcagctggctcgccccggtcagccacagcttcagcccgatgcgcgcacagcgaagaagtgacggtgtcacggaaattgacgatatgttgctgatcgaaacgcagggtgaaaccgcgcagtcgctggcgctgcgccacggctgtccggtggtggtggtcgaccgcatcgagcgggatgtggccgttatagccgccgcgcccggcaacccgcacgccgccacgcagaaagccatttactggttgcagcaccaggagaaacgtgtggtccagattgcggattaccccggcctgctgatctggcgcacggtggcgatgattgccaacgaagcgctggatgccctgcaaaaaggggtcgccagtgagcaagacatcgataccgccatgcgcttaggggtcaactatccctgcggccccatcgcctggggcgagcgccttggctggcagcgtctgttaacgctgctggagaacctgcaacgtcactacggcgaggaacgttatcgcccctgttcactgctgcgccagcgtgcgcttctggagagtagttatgagtcataa

SEQ ID NO: 524823 - DNA, 786 bp, Stenotrophomonas maltophilia
gtggaatttattctgagccatgttgagcagggcgtaatgaccattacgctgaaccgcccggagcgcctgaacagctttaacgatgtcatgcaccagcagctttccgaatgcctgaagcaggccgagcgcgatgacgctatccgctgcctgctgatcaccggggcaggacgcggtttctgcgccgggcaggatctcaacgaccgtaacgtggacccgaacggccctgcgccggatctgggcatgtccgttgagactttttacaacccgctggtgcgccgcctggcaaaactgccgaagccggtgatttgcgcggttaacggcgtggcggcgggggcaggagccacgctggccctcggctgcgacatggtgattgcgggccgttcagccagctttgtgatggccttcagcaagctcgggctggtaccggactgcggcggaacctggctgctgccgcgcgtgaccggacgcgcccgcgccatggggctggcattgctgggcgacaagctcagcgccgagcaggcacaggcctggggaatgatctggcaggtggtggacgacgagcagctctccgccaccgcacagcagatggcgctgcattttgcctcgcagccgacctatggcctgggcttgatcaagcaggcaatcaacgccgccgaaaccaacaccctcgacgcccagcttgatctggagcgcgactatcaacgtctggccggacgcagcgacgactaccgggaaggcgtcagcgcgttcctggcaaaacgcgcgccgaactttacggggaaataa

SEQ ID NO: 524824 - DNA, 618 bp, Stenotrophomonas maltophilia
gtgatttacggcaacgaacgctgctttgccgccggggccgatctcaacgaaatggcggagaaagacctgcccgcaaccctgaacgatatccgcccgcagctgtgggcgcgaataaacgccttcaccaaaccgctgattgccgccgtgaacggctacgcgctgggggcaggctgtgagctggcgctgctctgcgacgtggtgattgccggtgataacgcccgctttggcctgccggaaatcaccctcgggatcatgccgggcgcaggcggcacacagcggctaatccgtagcgtgggcaaatcgctggccagcaaaatggtgctgacgggcgaaagcatcacggcggttcaggcgcacagcgccgggctggtcagcgacgtctacccggcctcgctgacgctggagtacgccctgaagcaggcggggctgatggcgcgccactcgccgctggcgttacaggcggcgaagcaggcgcttcgccagtcgcaggaagtgccgcttcaggccgggctggcgcaggagcgtcagctgtttgcgctgctcgcggccacagacgatcgccgggaaggtatcaacgcctttttacaaaaacgcaccccagactttaaaggacgctaa

SEQ ID NO: 524825 - DNA, 1071 bp, Stenotrophomonas maltophilia
atgacaacgtttcattcattaacagtggcaaaagtggaacccgaaacccgcgacgcggtgaccattaccttcgcggtgccgcaggcgttacaggaggcgtaccgcttccgtcccggtcagcatttgaccttgaaagccagtcctggcggggatgaactgcgccgctgctactccatctgccggagcaccgcgtgcggtgagatcagcgtggcggtcaaagccatcgagggcggacgtttttcccgctatgcccgggacgagatcaaacctggcatggcgctggaggtgatggttccccaggggcattttggctaccagccgcaggccgaacgcgaaggccactatctggcgattgccgccgggtccgggatcaccccgatgctggcgattatgtccgctacgctggccactgaagcccacagccacttcaccctgatttacggtaaccgcagcagccagagcatgatgttccgccgggcgctggcggacctgaaagataaatacccgcagcgtttgcagctgatctctatcttcagccaggagacgctcgacagcgatctgctccatggccgtattgacggggaaaagctccatgcgctggcaaaaacgctggtgaatttccgccagtacgatgaagccttcatctgcggcccgtcggcgatgatggacgaggctgaggcggcgctgaaagcgctgggtatgccggaaaaagcgatccatcttgaacgctttaacacgccgggaacccccgttaagcggacagtcagcgtgcaggccgacgggcagaaggtcaccgtccgtcaggacgggcgcgacagggagatcaccctgacggcggacgacgagagcattcttgacgcggccctgcgtcagggggcagatctgccttacgcctgcaagggcggcgtgtgcgccacctgcaaatgcaaagtgcttcgcggggaggtggacatggcgaccaactacagcctggagccggacgagctggccgcaggctatgtgctgagctgtcaggcgctgccgttaaccgctgacgttatcgtcgattttgatgcgaaggggatggcatga

SEQ ID NO: 524826 - DNA, 498 bp, Stenotrophomonas maltophilia
atgcaacgcctcgtcgacattgcgcctgcccaaatcccgcagatttgggcgctgttaagccagatccccgacccggaagtgccggtgctgaccatcaccgacttaggcatggtgcgcagcgtgaaggcgcagggggaaggctgggttataggcttcacgccaacctattcgggctgtccggcaacggagcatctgctgggggcgatccgcgaaactctgaccgggaacggcttttccccggtacatattgtgctgcaactggagcccgcctggaccaccgactggatgaccgacgatgcccgcaggcgcctgcgggaatatggcatcagcccgcctgtcggccatagctgccatgcccacgttcctgcggaggtgagctgcccgcgctgtgcgagcaccgatacctcgctcatcagtgaatttggttccacggcctgcaaagcgctctaccgctgcaatacctgccgtgagcccttcgactatttcaaatgtatttga

SEQ ID NO: 524827 - DNA, 747 bp, Stenotrophomonas maltophilia
atgaacaacgtatctgcttatgccctgcgtctgggcgacaacggtctggtgctctcacagcgtctgggcgcctggtgcggccatgcgccggagctggaaattgacctggcgctcgccaatatcggccttgatctgctcgggcaggcgcgcaatttcctgacctacgccgctgaacgggagggtaagggtgatgaagacaccctggcctatggccgcgatgagcgtcagttccgcaatctgctgctggtggaacagccaaacggcagcttcgccgacaccattgcccgtcagtatctgatggatgcgtggaacgtagcgctgtacgaacggttgatccacagcagcgacagtcagcttgccgccatcgcggcaaaagccattaaagaggcgcgctatcacctgcgcttcagccgcggctggctggtgcggctgggggacgggacagaaacctcctcacagaaaatgcagcaggcggtggatagcctgtggcgctttacggctgaattgtttgacgccgacgacgtcgagctggagctggttgacaccgacgtggcggttgatccgcgcgccctgcgggaaccgtgggagcgcgaagtgtttgcggggctggcggaagctaccctccgcgtgcccgaggaagtggcgtatcgcacgggcggcaagaaggggctacatactgaacacctcggaccgatgctggctgagatgcagtatctccagcgcgtttaccccgaccagcagtggtaa

SEQ ID NO: 524828 - DNA, 288 bp, Stenotrophomonas maltophilia
atgagcaatgtttactggccgttatacgaagtttttgtccgttcgaagcaggggctgtcgcaccgccatgtgggcagccttcacgctgccgacgaccgcatggcgctggaaaacgcgcgcgatgcctatacccgccgcagcgaaggctgttctatctgggtggtgaaggcgagtgaaatcgtcgcttcccagccggaagagagcggggagtttttcgatccggcggaaagcaaggtctaccgccatccgacgttttacaccatccctgatggcattgagcatatgtga

SEQ ID NO: 524829 - DNA, 846 bp, Stenotrophomonas maltophilia
gtgacgcaagaacaacgctttgagcaacacgcccactctgagattgtcggcatgctgccggaaggaaactggatcacccgcgcgccgacgctgcgccggaaagccattctgctggcgaaggttcaggacgaagccggacacggcctgtacctctacagcgcggcggaaacgctgggctgcgcccgggaggacatctatcaaaagatgctcgacggcaagatgaaatactcctccatcttcaactatccgaccctgagctgggccgatatcggcgtcattggctggctggtggacggggcggccattgtgaaccaggtggcgctgtgccgtacgtcttacggcccgtacgcccgggcgatggtgaaaatctgtaaagaagagagcttccaccagcgtcagggttttgaggcctgtatggcgctggcgcagggcagcgaagcacagcggcagatgttgcaggacgccatcaaccgtttctggtggcccgcgctgatgatgttcggacccaacgacgacaactccccaaacagcgcccgcagtctcgcctggaagatcaaacgctttggcaacgatgagcttcgccagcgcttcgtggacaacacggtgcctcaggtggagatgctcggcatgaccgtgccggatcccgacctgcgtttcgatgaagagagcggccactaccgcttcggcgaaatcgactggcacgaatttgacgaggtgatcaacgggcgcgggatctgcaaccacgaacgtctggccgcaaaacgtaaagcctgggatgacggcgcatgggtgcgtgaagccgctctggcccacgcggaaaaacaacgcgcccgccaggccgcataa

SEQ ID NO: 524830 - DNA, 2040 bp, Stenotrophomonas maltophilia
atgcagcagttagccagcttcttgtccggcacctggcaatcaggccggggccgcgagcgcaccatcacccacgccatcagcggggaaacgctatttgaagtcaccagcgaagggctggatatggcggccgcgcgccgttacgccattgaacaaggcggagaagcgctccgcgcaatgagctttatcgagcgcgccgccatgctgaaggcggtggccaaacatctgctgagccagaaggatcggttttatgccctgtcagcccagaccggcgcgacgaaggccgacagctgggtggatattgaaggcggtatcggcaccctcttcacctacgcaagcctcggcagccgtgagctgccggacgataccctgtggccggaggatgagctgatcccgctgtcgaaggaaggcggctttgcggcacgtcacgtgttaacgtcgaaatccggcgtggcggtgcatatcaacgcgttcaacttcccgtgctgggggatgctggaaaagctcgcgcccaactggcttgccgggatgcccgccatcatcaagcccgccaccgccaccgcgcaggtgactcaggcgatggtgaaagcgatcgtcgagagcggactggtgccggacggcgccatcagcctgatctgtggtggcgcgggcgatctgctgaaccagctcgacagccaggacgtggtgacgtttaccgggtcggccagcaccgggcagagcctgcgcgtacatccgaatatcgtcgcgcattccattccgtttaccatggaagcagattcccttaactgctgcgtactgggtgaggacgtgacgccggagcagccggagtttgcgctgtttattcgcgaagtagtgcgcgagatgaccgccaaagccgggcaaaaatgtaccgccatccgccgcatcatcgtgccggaagcgcaggttgaagccgtcagccaggcgctgattgcgcggctggagaacgtggtcgtcggcgatccggcccaggaaggggtgaagatgggggctctcgtcaacagtgagcaacgtgctgacgtgcaggaaaaagtcgatcatctgcttgcctcgggctgccagatccgtctgggtggtaaagccgatttgcgggcggctggcgcattcttcccgcccaccctgctgttctgcccgcagccggacgaaactccggccgttcacgccaccgaagcctttggccccgtcgccaccctgatgccgtaccgcaacagtgaacacgccatgcagctggcgcgggcgggcggcggcagcctggcgggaacgctggtcacggcagattcaaacgtggcgcgccaatttattgccggtgccgcgcgcgcccacggacgcattcagatcctcaaccagaaatcttcgaaagaatccaccggccacggttcaccgctaccgcagctggtgcacggcggcccgggacgtgcgggcggcggcgaggagctgggcggcctgcgtgcggtgaagcactatctccagcgcacggcaattcagggcagcccatccatgctcgccgccatcggcaaacagtgggtccgtggcgcggaggtgcaggaagatcgcgttcatcctttccgtaaatacttcgaggagttacagccgggcgacagcctgctgaccccgcgtcgtaccctgacggaagcggatatcgtgaattttgcctgcctgagcggggatcatttctatgcccatatggacaaaattggcgcggcggagtcgatttttggcgagcgcgtggtacacggttatttcctgatttccgccgcggcggggctgtttgtcgatgccggggttgggccggtcattgccaactacggcatggaaaacctgcgctttatcgagccggtcaagccgggcgataccattcaggtgcgcctgacctgtaaacgtaaaacgctgaagaaacagcgcactgccgaggaaaaaccgactggcgtggtggaatgggcggtggagatcttcaaccagcatcagcaggccgtggcgctttactccattctgacgctggtggcgcgccagcagggtgacttctga

SEQ ID NO: 524831 - DNA, 2166 bp, Stenotrophomonas maltophilia
atggtcccgatggacaaaacgcttcaggcgtttggcgcggacgtgcagtgggatgattacgcccagatgttcaccatcgctaaagacggtgcctttgtgaaggtcaaacccggcgccaacaccgccatcgttaacggcaaaccgctgacgctccaggtgcccgtggtgatgaagaacaataaggcctatatcccggagacttttatcaacgatgtctttcagtccggtcttgatcagacattccaggttgaaaaaagcccccacccgttaaacgcgctgacggctgatgaaatcaaccaggccgtagccattgtgaaagcctctgcggattttaaacccaatacccgctttacccagattgcgctggcggagccagaaaaagccaaagtctgggacttcgtgcttaacggcacggcggtggatgcgccccgccaggccaatatcattatgcttgacggcaaacgcatcatcgaaagccgggtggatctgaaggacaaaaagatcctccgctgggagccgatcaaagacgcgcacggcatggtgctgctggatgacttcaataccgtgcagcagatcatcaatgaaagcccggagtttgccgccgtgctgaaaaagcgcggtattaccgatccgaagaaagtgatcaccaccccgcttaccgtcggcttttttgacggcaaggatgggctgaaacaggaagaccgcctgctgaaagtgatcagctatctcgacgtgggcgacggtaactactgggcgcacccgatcgaaaacctggttgcggtggtggatctcgagcagaagaaaatccagaagattgaggaaggcccggtcgtgccggtgccgctcaccccgcgtccttatgatggccgtgaccgcgttgaaacggtgaaaaaaccgctggagattatcgagccggaaggcaagaactacaccattaccggggatatggtgcactggcagaactgggattttcatctgagcctggactcgcgcgtcggcccgatgatctccaccgtgacctataacgacaacggcaaaaagcgacaggtgatgtatcagggatcgctcgggggcatgattgtgccgtacggcgacccggatatcggctggtactttaaggcctacctggactccggcgactacggcatgggtaccctgacctccccgctggtgcgcggcaaggatgttccgtctaacgccgtgatgctcaacgaaaccatcccggactataccggtgcgccaatggagatcccccgggcgatcgccattttcgagcgttacgccgggccggaatataagcatcaggagttaggtaaacccaacgtcagcaccgagcgccgcgagctggtggtgcgctgggtcagcaccgtgggtaactacgattatatcttcgactgggtattccacgaaaacggcaccatcggcattgatgcaggggccacgggcattgaagcggtgaaaggcgtgcagacgaaaaccatgcatgatgccaccgcgaaggatgacacccgatacggtacgctgatcgaccataatattgtcggcaccacccaccagcacatctacaacttccgtctggatatggacgtggacggcatcaacaacaagctggtggccatggatccggacgtcaaaccgaacaccgctggcggaccgcgcaccagcaccatgcaggttaatcagtatgatattgataccgaacagcaggcggcgcagaagtttgatccgggcaccatccgcctgttgagcaacaccagcaaagagaaccgcatgggcaacccggtctcgtatcagatcatcccttacgcggggggcacacacccggtggcgacgggcgcgaagtttgccccggacgagtggatatatcaccgcctgagctttatggataaacagctgtgggtgacgcgttaccatcccgacgagatgtacccggagggaaaatacccgaaccgttccacgcatgatacgggcctcggccagtacagcaaagataacgagtcgctgaacgaccaggataacgtcatctggatgaccaccggcaccacccatgtcgcccgcgccgaggagtggcctataatgccgacggaatgggtgcacacgttactcaagccgtggaacttctttgacgagacgccaacgctcggtaagaaaaaagagcagaaataa

SEQ ID NO: 524832 - DNA, 1974 bp, Stenotrophomonas maltophilia
atgaaagtcactgagatagtaagaagccttgcgctggccggttttttcatttccgccagttcagcctgggccgcagaagcctctaaggatgcaaccgcagcaactcagcaggccaacaacgcactcttcaaccagcttcctttctccgataacaccgattttaccaatgcccacaaagggtttatcgccccgctacctcaggaaattatcaaaggggagcaaggcaacaccgtctgggatccacagcagtacgcctttatcaaggaaggcgataaagcgcccgattcggttaacccgagcttatggcgtcagtcccagctgattaacatcagcggcctgtttgaagtcaccgagggcgtgtaccagatccgtaacctcgacctgtcaaacatgaccattattgaaggtaaagaaggcattaccgtggtcgacccgctggtgtcggcggagacggccaaagtcggtatggatctttactataaaaatcgcggcaagaaacctgtcgtcgctgttatttacacccacagccacgttgaccactatggcggcgtgcgcggcgtggtggacgaagccgacgtgaagtccggcaaggttaaagtctacgcgccagccggatttatggaggccgccgtcgcggaaaatatcatggcgggtaacgtcatgagccgccgcgccagctatatgtacggcaacctgctgaagccggatgcgaaaggccaggtgggtgcgggtctcggcaccaccacctccgccgggacggtgaccctgattgccccgaccaatatcatcgagaaagatggtcagaaagaggtgatcgatggcctgacctatgattttatgctcgcgccgggctccgaagcgccttctgagatgctctggtatatcgaagagaaaaagctgatcgaatctgcggaagatgttacccataccctgcacaacacctactccctgcgcggtgcgaaaattcgtgaaccgctgccatggtcgaaatacatcaatcaggcaattgtacgctggggtgataaggccgaagttatcatggcgcagcaccactggccgacctggggcaacgagaatgtggttaacctgctgaaaagccagcgcgacctctaccgccacatcaacgaccagaccctgcgcatggcgaatgaagggctgacgcgtgacgagatcgccgccaacttcaagctgccgaactccctggccaatacctgggccaaccgaggctattacggttcagtcagtcatgacgtcaaagccacctacgtgctctatttaggctggtttgacggcaaccccgcgaccctggatgaactgccgcctgaagaagccgcgaagaaatttgtggagtatatgggaggcgcggatgccatcctgagtaaagctaaaaccgattttgaccagggcaactatcgctgggtggctcaggtggtcagcaaagtggtattcgccgatccaaacaaccaggccgcacgtaaccttgaagcggatgccctggagcagttgggttatcaggctgaatccggcccatggcgtaacttctacctgaccggcgcgcaggagttgcgtaacggcgtggtgaaaggtcccaccccgaataccgccagcccggataccgtgcgcgcaatgacgccagaaatgttctttgactatctggcggtgcatatcaacggtgaaaaagcagcagatgcaaaatcggtgtttaacatcgacctcggcagcgacggcggcaaatacaagctggagctggaaaatggcgtgctgaaccacacggcgaacgccgaagcgaaggatgctgacgcgaccgtgaccctcaaccgcgatacgctgaataaaatcatcctgaaagaagtgacgcttaaacaggctcaggataatggcgatatcaaagtgacgggcgatgccgcaaaactcgatgccatgctcggttacatggataaatttgaattctggtttaacattgtgaccccgtaa

SEQ ID NO: 524833 - DNA, 1107 bp, Stenotrophomonas maltophilia
atggaaaaaagacacaacgccactccggagcccgcgacctggccgacccgtaacgccatggttgtccacgggctggccatgaacctgccgtggctcgccttcgtcaacgcgagctttgcgctaatgatcctgctgcgcaattccctgttcggccaaattgataccctcttacacgtcagcccacctctcacacagatgattgacgcttccatgctgggggtagtcatcctttccgtggcgctggtaataatggcctggcgccacatccgcggcgtcagcgccgtgctgttaatgtgtagcctgctatggtcgataagttgttactggtttatcaacgtgatacagcttcctcatccctggccgatattcgttaccctgctgatggccggtatgaccgcgctctattttcatccggtggggctggtgtgctttatcgcgccgctgtggatcaccatgcccgttgccagcctgctgctgaatcaggagatgaaccttcgctttgccgggctgtgggtggtgttcacgttcattctcgtttgcggacgctacatcctcttaagctggtttgaagaggcctggcgtcgcaaccagcagaatcagcgtttaatttcgcggctggatgcgctggcccatcaggatccgctgacgaaaacggccaaccgccgggcgatggagctggtgctggaaaacgcggtggaccaaggcaaacgcttcgcggtcctgatgctggatgtcgactacttcaaactgtataacgacacctatggtcaccaggcaggagacgcatgtctcgcgcgggtcgcggaggtgctgaactcctcggtgcgcacgccagaggatgtggtttcgcgctacggtggtgaggagttcgtcgtgatcctctttgactgtgaagaaagcgttgctgagagagtcgccgcgcggatccaggctggcctgcgcaccgcagccattgcgcacagcgcgtcgaaggtgagtgaatgtgtgacggtgagtatgggcattgcaggctataccccaggactggccggcccggaaatcatcgcccgcgccgatgcggcgttgtatcgggcgaaggagtccgggcgggataggtggtcgctgtaa

SEQ ID NO: 524834 - DNA, 1500 bp, Stenotrophomonas maltophilia
atgtccgaatcacacgtcgccgtcctgcctggcgtgcagcagtttttagatcgccagcacggcctgtggatcgaagggcgtcaggcggcatccgatagcgaaaagcgtctgaacgtctacaacccggcgaccggagaggtcattgcctccaccgccgatgccagcgttgatgatgtcgatcgtgcggtgatgtctggctggcgcgcctttgtcgcccgaagctgggccgggcggcttccggcagagcgggaacgcatcctgctgcggtttgcggatctggtggaacagcatggcgaagagctggcacagctcgaaaccctggagcaggggaaatcgattaacatttcccgcgccttcgaggtgggctgcaccctgaactggatgcgctacacggcagggctgaccaccaaaattgccggtaaaaccctcgatctctcgattccactgccgcagggcgcgcgttatcaggcgtggacgcgtaaagagccggttggggtcgtggcggggattgtgccatggaacttcccgctgatgattggcatgtggaaagtgatgcccgcgctggcggcaggttgctccatcgtgatcaaaccctcggaaaccacgccgctcaccctgttacgggtggcggaactggcgagcgaggcggggatcccggatggcgtattcaacgtggtgaccggcagtggcgccgtctgtggcgcggcactgacctcgcacccgcgcattgccaaagtgagctttaccggatcgacggcgacgggcaagcagattgcccgcgcggcggcggatacgctaacgggcgtgacgctggaactgggcggcaaaaacccggccatcgtgctgaaagatgccgatccggcgtgggtgattgaagggctgatgaccggcagcttcctgaatcaggggcaggtctgcgcggccagttcacgtatatatattgaagctccgctgttcgacacgctggtcagcggctttgaacaggccgtgaaatccctgagcgtcgggccgggcatgtcgccggatgcgtttatcaacccgctggtgtcgcgcgcccactgcgataaggtccaggcgtttctggatgaggcgaaggcgcacaatgcggagctgatcgccgggaaccgggggccagacggcaaaggctattacgtttcgccaacgctggtggtcaacccggataatcatctgcgactgacgcgtgaagaggtcttcgggccggtggtgaatctggtccgtgtagctgacggggaagaggcgcttcagctggcgaacgacactgaatacggcttaacggccagcgtctggacgcagaacatcagtaaagcgctggagtacaccgacaggctacaggccggaaccgtgtgggtgaacagccacacgctgatagatgccaacctgccgttcggcggcatgaagcagtctggcaccgggcgcgatttcggccccgactggctggatggctggtgtgaaaccaagtcggtgtgtgtgcggtattaa

SEQ ID NO: 524835 - DNA, 909 bp, Stenotrophomonas maltophilia
atggcatgtgcaagcgaacaggacaattttcagcagtggctggcgcaaattaaccaggtttgtgggcgctttgcggcacgtccgttagagggggcgtttctcggcgaactggtaaccagctacacccaaagtctgaagctgagcgcggtgaccgccgcaggcgttaacctgtttcgcacccgtcaggagatcaaaaacggcaacgatgcctggttctacaccgtgtttcagctggaaggcagcgccggaatcgaacaggacgaccagcgcgcgctgctgaaagccggggatatcacgctgattgacgcctcccgcccgtgctcaatttactggcaggagcgttcccgccagatttcgctgctgctcccgcgacaaatcattgagcaacacgcgcgttttcaggaagtgaggtgcgcgttgcccctctcccgcagtctgcctaccgtacagctgagctaccgactgttacaggagagcatgggcaatgccgatctcagcgccagtgaaagcgaagcggcgctggaggcgatggtgtgtctgctgcgtccggccttccagcagcatgacgaggtgctgccgcgcaaggagcgtcagttccgccacgttctgtccctgattgacgatcatattcagtcggaggcgttaagaccggagtggatagcctcagagagcggcatgtccgtgcgtagcttgtaccgcatgtttgccgggaaagggctggtggtggcgcagtatattaagaaccgtcgcctcgatttatgcgctcaggcactgcgttccatcggcgatgacgaaaagctggcgggcattggctacagctggggctttaccgaccatagccatttttccaccgcctttaagcagcgtttcggggtttcgccgggcgaataccgtaagcgttaccgctag

SEQ ID NO: 524836 - DNA, 318 bp, Stenotrophomonas maltophilia
atgaaacgattagctctgatgttactggcgctggggatgaacgttcacgccgccacgcttacgctcaacgatgcgcgcacccaggggcgcgtaggggaaaccctgagcggctatcttgcgcccgttcagcacgacgctgaaaccctggcgctggtgaaccgtatcaacgccgcacgcacggaaagttaccagctgcttgctgacagcaataatttgcccgtcgacgaggtggcgaaaatggcggggcaaaagctggtggcccgcgcgcagccgggtgagtacgtgaaggggattaacggcaaatggctgaaaaagtaa

SEQ ID NO: 524837 - DNA, 192 bp, Stenotrophomonas maltophilia
atgaaaaagagggcaggtgtactcaccgtggccgtcgtcgcgctgctgtcaggctgcacgccgcgcattgaagtggcggcgcccaaagagccgatcaccatcaacatgaacgtgaaaatcgagcatgaaatccatatcaaggtggataaagacgtcgaagccctgctgaaatcccgcagcgatctgttctga

SEQ ID NO: 524838 - DNA, 2640 bp, Stenotrophomonas maltophilia
atgaagggtaaatacaaagccgcaatcgcgcttttactgctgctatttcttgtgccgctgacgctgctgatgacgctcgcccagtgggtgcccacgctcgccgggatctggcttcccgttggaacacgcatcgcgtttgaaaaaagcccacggctcacgcgccacgccctgatcatccccgatctccgttatctggtagaagagtgcgaaattgcccgcgtggaaaacgtgaccctgtcacaccccagccgctgggatctggatattggcgcacttgaacttaactctgtctgcctgagcaaattaccgcaatcggcgccgtctacggtggcgccgaaaacgctggcgcagtggcaggccatcctgcccaacacctggctgaccatccaccgttttaccctttctccctggcagcagtgggagggtgagctacatgcctcactcacgccagcccgccaggacatcacctataaaggcgagcaggtgagcattaaggggcagttgcgcggccagacgctctccttcagccagttcgatgtgcagcttccggaccagtcgcagcccgtgaagctggtcggtgaatttaccctgccgctggtgccggacggcgtaccggtgaaagggcatacggtcgcgacctttaacgtgccacagttatcctcgctggtcgatgccgatctggactgggaggataatcagggccagctggtggttatggcgcgggacaaccccgatccgctgctcgatttaccgtggcagatcaccgctcagcagttgaccatcagcgacgggcgctggaactggtcagcctccggtatgccgatgagcggtcgcatcggcctgaaggtggataactggcagcaggggctggagaaagccaccttcacggggcggctaaacgtgctgacccagggggacgcgggtaagggcaacgcggtgctgaatatcggtcccggctcgctcagtatggaaaacagcgctatgccgctgcacctgagcggggaagccaagcaaaacgatctgatcctgtatgccagactcccggcgaagctgaccggcagcctttacgatccgcagcttacgtttgaacccggcgcactattgcgctcgcgcggacgcatcattgactcgctggatatcgatgagatccgctggccgctggcgggcgtgaagctcacgcaaaagggcgtggacggccgcctgcaagccattctgcgggcgcatgaaaacgagatgggcaattttgagctgcatctggacggccaggctaacgactttttaccggacaacggtttgtggcagtggcgctactggggtaaagggaacttcacgccgatgaacgcgcgctgggatgtccggggaaccggggagtggcgcgacaacgttatcgaactgaccgatctttccacggggttcgacaaattgcagtacggcacgatgctggtcagcaaaccgcgcctggtgctggatcacccggtgcgctggtcgcgggacccggataacccctcctttagcggcgcgctcgcgctcaatgccgggcaaacaagcttttcaggcggaagcgtgctgccgccgtccgttttgaccttcagcgttgacgggacagatccgacggtgttccagtttaaagggaacctgcatgcggacgacatcggcccggtccaggtgaatggacgctgggacggcgaacgcctccgcggtcaggcctggtggccaaaacagtctcttacagtgttccagccgctgatcccgccagactggaaaatgaccctgcgcggcggcgaaatgtacgcgcaggtggctttctcggcggcccccgaccaggggtttgaggccggggggcacggcgtgctgaaagcgggcagcgcgtggatgccggataacgaaatcaacggcgttgattttgttctgccgttccgcttaagccagggcacctggtcactgggtacgcgcggaccggtaacgctacgaatcgacgaggtgaaaaacctggtcacagcccgaaatatcaccgcggatctccagggcgattatccctggaccgaagcgaacccgctcctgctcaccaacgtgaaggtggaagcgctcggcgggaaaatcaccatgcagcagttgagaatgccgcagcacgatccggctttactgcgcgtggataatatttcctccagcgaactgataagcgcggtaaatccgaagcagtttgccatgtccggcccggtgagcggcgcgctgccgttctggctggacaatgagaaatggatcattaaagatggctggctgaccaacccggggccgatgacgctgcgcatcgaccaggacacggcggatgccattgtgaaagacaacgtggttgccggggcggcgatcaactggctccgctatatggaaatttcgcagtcgtggacaaaactcaatgtggataatctgggtgtgttaaccatgcaggcggccattaaaggcaccagccgcgtcgagggcaaaagcagcttcgttaacctgaattacacccatgaagagaacatttttaccctctggcgcagcctgcgctttggggacaatctgcaaacatggtttgagcaacatgcggcgataccccttctccgcagttcgacaggcaaggaaagtgaggaacaacaatga

SEQ ID NO: 524839 - DNA, 786 bp, Stenotrophomonas maltophilia
atgaaactcgcggtatatagcacaaagcagtacgacaaaaagtatctgcaacatgttaacgagacgtacggtttcgatcttgaatttttcgactttctgctgactgaaaagacggctaaaaccgcccacggctgcgaaggcgtgtgtatcttcgttaacgatgacggtagccgaccggtactggaagagttgaaaaaacagggcgtgaaatacattgccctgcgctgcgcgggctttaacaacgtcgatctcgatgccgccaaagagctgggtctgaaggttgttcgcgttccggcctattctccggaagccgtggcagaacatgcggtcgggatgatgatgtcgctcaaccgtcgtattcaccgtgcctatcagcgtacccgtgatgccaacttctctctggaagggctgaccggctttactatgtacggtaaaaccgcaggcgtgatcggtaccggcaaaattggtgtggccgccctacgcatcctgaaaggatttggcatgcgcctgctggcgtttgatccgtacccaagcgccgctgcgctggagctgggcgtggagtatgtcgatctgaaaacgctcttctcgcagtctgatgttatctccctgcactgcccgctgactcctgaaaactatcacctgcttaaccagtcggcgttcgaccagatgaaagacggcgtgatgatcatcaataccagccgcggcggactgatcgactctcaggccgctatcgaagcgttgaaaacgcaaaaaatcggcgcgttgggtatggatctaacgacgtga

SEQ ID NO: 524840 - DNA, 168 bp, Stenotrophomonas maltophilia
gtgattcaggacgacgtgttccgtcgcctgtcggcctgccacaacgtgttgttcaccggccaccaggcatttctgaccgccgaagcgctgatcagtatttcggaaaccacgctggggaatttacagcagcttgataagggcgaagcgtgccctaacgcgatcgtttaa

SEQ ID NO: 524841 - DNA, 837 bp, Stenotrophomonas maltophilia
atggcattcgtaacaacgaaagatggtgtcagtatttattacaaagactggggtccgaaggatgcgcagccgatcgttttccatcacggctggccgctgagcgccgatgactgggataaccagatgctctttttccttgcagaaggcttccgcgtcatcgccctcgaccgtcgtggtcatggtcgttccgatcaggtaagtgaaggtcatgatatggatcattatgcctccgacgcatcagccgtggtcgaaagccttgatttgcgtaatgcagtgcacgtcggccactccaccggcggaggccaggtcgccagatacgttgcgaagtacggccagcctcaggggcgggtggccaaagcggtactggtcagcgccgttcctccgctgatggtaaaatcagacacgaaccccggcggtacgcccattgaggtgttcgacggcttccgccaggcgctggccgctaaccgcgcccagttttacctcgacgtcgccagcggtcctttctatggatttaaccgagacggagcagaggtttcgcagggaacaatccagaactggtggcgtcagggtatgatcggtagcgccaaagcccactatgatggcattaaggcattttcagaaaccgaccagacggacgatctcaaagccatcacggttcccgtcctggtgttgcagggtgatgacgatcaggtcgtcccgtataaaaatgcctcccttcttcaggataagctgctcgcaaacagcgagcttaaaatctatccaggcttcccgcatgggatgcataccacgcatgcagataccataaatgccgatatcctgacgtttattcgctcataa

SEQ ID NO: 524842 - DNA, 174 bp, Stenotrophomonas maltophilia
atgaaagttgacgcaatgacgcaaaaggcagaggaagaaatttcagcgcttatagccaaaaaaattgcagaattacgaaaaaaaacagggcaggaagtatctgaaattgagtttatcgctcgtgaggccatgacaggcttggaggggtatgaagtaaaaatcaaactcctgtaa

SEQ ID NO: 524843 - DNA, 279 bp, Stenotrophomonas maltophilia
atgaaaaaagcactattagggagtgtattggctttaacagttgcaagctttggcgcatctgcggcagatatgatttccaaagatgaagcgcaccacttcaaacttgaatacctgggcaatgtatctgtaggggcttcaggtggacaaatttcttcaccttcagatcttcatcaaaaactctcgaaactggcagatgagaagggcgggaaatactatgtcatcatcgccgctcgagagcatggccctaacttccaggccgtagcagaagtcttcaaataa

SEQ ID NO: 524844 - DNA, 591 bp, Stenotrophomonas maltophilia
atgcacacgagtaaaaccctgaaaaggctgctagccgtatcagcagttgcagcaatgttcagcaccgttggcgtacaagcccagacgacaagcgccgcgcaaactaacgctgcgggccaggctcaaccggacgccagactcagctccggcgacgagaaagcgttaaaggacatggcgcaggccaatatcaacgaagtcgccgccgccaggctcgccctggacaaggcccagaccagtgaagtgaaaacattcgcccagaaaatggtcgacgaccacggtgccgccctgaccaaagtgcaggccgttgcccagaaaaagggcgtagagctgccgaccgagccagacgccgcccataaagccctgaactcaaggcttgaaaaccagcgcggtgacgcttttgacaaaatgtatatggaatatgctggcgtgaaggaccacgagaaggtgctgtcgaagcttaagagcgacgccagtaaaatcgacgattcggatgtgaaggctctggccaacgagcacacgccagtcgttgagcagcatctgaagtccgccgagcagatgtcaacgcgtgctggcgcatcagccgataaataa

SEQ ID NO: 524845 - DNA, 2097 bp, Stenotrophomonas maltophilia
gtgcataacgataagcattatcccttcataaaagtcagcatgacggcgctggcgctgctggtcaccccgttcgcgctgcaggcgcaggataaagccgctgaggcctctcaggggacccaggaatcactgaatattgatgcggccgatcagcaggcgcctggaaccacaaaaaccacagacgatgcctcaaccggtagcggtgacggaaagaaagtcgcctcggccagccagccagcgacgccgctggtgcccggcacgccaacctgggacagcttccacggccagcttaacgcgcagaaatacagcccgcttacccagatcacggcggataacgtcaataaattaacgaaagtctgggagttccataccggcgacgtctcagatggtaaaggtgatacgccagcgaccgtgtggtccgcaacgcccattttcgctaacgacacgctctacatcggtacccctttcgatcgcctgattgcgctggatccgggcacgggtaaagagaagtggcactatgacaccaaatcgtcgcgcaaggcactgacccagccggtgctgaaaaaccgcggcgtttcctattggcaggccaaaaatccggtgaagggagaggcgtgccagaagatggtctatatgggcaccgttgacggcaagctctttgcgctggacgccgattcaggcaaaccgtgcagcggctttgcggacaacggggtgctggatctgaaccagtggaacaccgttaacgccaagtatccgctctctgtcctgcaaccgccaaccgtcgtcggcaaccatctgctggtgggttgggccgggaaagactgggcctatgccgaagcgcctccgggtaccgtattttctgtcaacgcccagaccggcaagcttgaatggacctttgaggcgataccggcagagatccgcaagcgtaccggtaccgccaacgtctggacgcacatgtccgccgatgaggccaatgggctggtctatctcccggtctcatcgccgtctcccaactattggggcggcaaccgcgtcgacgcaattccgcttggcacctccaccaccgcgctggacatcaacaccggtaaagtggtctggtcccgtcagtgggtacaccacgacgtctgggattacgacatcaactctgccccgacgctgatggatatcaccgtagacggcaagcagatcccggcgctggttcaggccaccaagcagggcttcctgtttgtggttaaccgcctgaccggggaggacgtctggccaattgaagagcgtccggttccgcagggtgatggttcggtccagggcgaagttctctcgcctacacagccgttcccgaccaaacctgcgccgctgctcgaccagtcgaaaaagccggaaatctggaagctggcggatatcgtcggtggcggccagtgctctcgcctgtgggataacctgacctatgagggaatgtatactccgcctaccaccaaaggcgaaggcacgctcacctatcccgatagcgccggcggcgtgcagtggggcggggtggcgttcgatccgcaaaaacagatcgccatcgtcaacacctcgcatatcgttcagtacgtgaagctctacagccgtgaggattacgataacgcggacaaagactccggcaacgaaagcggctttgccccacaggaaggcgccccgtacggtatgcgtctgctggtggcgagcaactggctgggcatgccgtgctggcagccgccatttggcgaaatcgtggcgatagacatgcacacgggcgatgtgaaatggcgtcgtccggttggcgcctcacagcagtatggcttcttcatgccggaaagctggggttcgcctaccattggtggcccggcagtgacggcgggtggcgtgatcttcatcggtgcttcaatggatgccaaagtgcgtgcctactcggtagagagcggtgaagagctgtggtccgatcaggcagaagctccagcggtagcgaacccgtccgtgtatgaatataagggtcggcagtatgtggccttcgtggctggcgggaacacgatcctgaaggatcaggtaggcgatcaggtggttgtctacgcgttgccggaataa

SEQ ID NO: 524846 - DNA, 366 bp, Stenotrophomonas maltophilia
atgttgcattctcaatcttcgcgcgtcggcactattttgctgctgttggccgcggttataggcttcgcggtggcgctatacgcctggtggacgccgcttaccggcgtcacaggcaccattggcgcactgggcgtggccattgccagcgcggtgctggcgatactgatctttgtgttacgtgcggcatcggggcgcggggcgcgtgttttcctgattattgtcaccctggtggtgttggcgggtattggttttgccgccgcgctgctgcaccagtacatcataacggcagccatggtggtcggcctgattggtctgattatgctgagcagccattccgcccgttacaaccattccgtcagaacctga

SEQ ID NO: 524847 - DNA, 858 bp, Stenotrophomonas maltophilia
atgcgttcagtcataatacccgtcaatgaaggtggatttctggcagccacaatttgggaaagaagcgatgccaaagcgatagtgctccttcatccggcaacggcggttgtacagggattttataagggattcgcagaatatctttttaacagaggattcaacgtcctcacatacgattatcgcggcaccggcctctctaaatccgggctggtccgtacttaccgcgtttcgatgtctgactggatcgaccaggacgtcggatgtataaccgccagggctaaagcacattttccagagcttagcctgttggcggtaggacacagtgtgggcgggcatgccgttctgctttcaacagccacccacgccctgcaagctgcggtcattgtagcctcacatgccggggtgacgagcaccatcaaacgcaccacagaaaaggtgcgtgtctggtgcgtattacgtgttctggctccgattctgtgccgtatcttcggttacatgcctgccaggcgcctggggctgggtgaagatttaccggcgccagtcatgcttcaatgggggcgctggagcgcaatgcctggatatttctacgatgatccacactggaatgcacgccaacgggcaagtgagatcaccctacccgtgctggtaatgggatttgatgacgatccctgggctaaccgtgaagctattgcgcggctgatggagccagtgcaacaagcaaaaatagaacgctgcgagatacggcacgcagagtttggtctttcgtccattgggcatatgggattttttcgtacacgatgtgcggagaaattatggcccgtcgtcggtcaatggctggagagtcagtgcccggattga

SEQ ID NO: 524848 - DNA, 966 bp, Stenotrophomonas maltophilia
atgattgttaactgtatggtctaccgttcaggccaccccgccgaaaccgtagatattgaggatatcagtgaagtcatccaggataccgatgcgtttatctggctggggctttggcagcctgaacctgcgtttatgtacaaagtccaggaggagttcggtctgcacgatctggccgttgaggatgcgcttaatgcacatcagcggcctaaaatagagcgttatggcagctcggcatttatcgttgtaaaaaccgtcagtggacaggacgacaatattgagtttggcgaaacgcatttgtttgtgggccgaaacttccttattacggtgcgccatggtgcttcagtgagctatgcacctatacgcgcccgtgctgctgaggccccggacatgctttcgtacggtccggcttatcctctttactgtattctggattttattgttgacagttatgcagagctgactgcgcgcctcaacaccaaaattggtgatatagaagcgacactttttcacagtgaatttgaccgtgaagctattcaggacgtgtattccctccgccgtaatctactcgggcttcgcaacgccgctcagccagtagaagaaatctgtacagagcttatccgcattcatgaagaacttattccaaaacccctcagggcgtatttcagagatattcaggatcacgcaagccatgtagtaacggatgtaaatgacatgcgtgagctgctaagcagcgcgatgcacgttaacctggcactggtttcagtgcagcaaaacgaagtcgtgaagaaactggccggttggggggccatcctcgtgatcccgacggtagtctttagcatgtatggtatgaacttcgaccatatgccggaactgaagacgctctttggttatccggctacggtcgctgtcacgctgggagcctgtgtattactgtggcttcggctcaaacgctctcgctggctttga

SEQ ID NO: 524849 - DNA, 423 bp, Stenotrophomonas maltophilia
atgcctgccggtgaaatagcctttatcaagccgtacatcaaagccttgtggatcccatctgttattgcatccattacacaatattacttgccctggccgggcaggattgccacggtcatcgcgcagatggctggtccaggagccaaaaggcacggtatcgaaagcgggcgtgaatgtgccacttccttgcagatcggtaaccatattggatattcccagtccatgggccagctcatgaacagcgacgctgaccagatcggcctttccagtgcgcggcaattgcgcgggcacatagggaacgttatcaaaatccagtttgcccatgatgaactgggcgtgggagccaaaggtcagctctccggtatcaataccgttcaatgcgccttgcaactgcgtcagacttataatgccgtcggtaactga

SEQ ID NO: 524850 - DNA, 246 bp, Stenotrophomonas maltophilia
atgaagccaggatccacgatagtccacctcgttacccaggaggttattgccaaaatcaaaactgataccgacgccactggctcccagtgcctgaacgtcgccacgttgaataaggctgtgctgtttaccgtaggcaaacatcaccccacggccattaacgccatcggcgtatatccgtacaccgggatcgatgctcagggtgttattttgcccatctatacggatgcccgcgccgccagcccctga

SEQ ID NO: 524851 - DNA, 867 bp, Stenotrophomonas maltophilia
gtgggctcggagatgtgtataagagacaggggttcgagtggggcgggaaccactaccaccagcctcgccttccgcaagattttcgcccagcttaacttacgggcggcagaggtagagggcgacagctttcaccgctacacgcgcccggagatggatatggccatccgcaaggcgcgcgatctgggtaaacacatcagctattttggcccggaggccaatgacttcggcctgctggagcaaaccttccgtgaatacgggcagagcggcaccgggcagtcccgcaagtatctccacacctacgatgaagccgtgccctggaaccaggtccccggcacgttcacgccctggcagccgctgccggaaccgactgacgtgctgttttacgaaggattgcacggcggcgtggtgacgcctcagcacgacgtggcgcgccatgtggatttgctggtgggggtggtgccgattgttaaccttgagtggatccagaagctgacgcgtgacatgagcgagcgcggccattcgcgagaggcggtaatggattcggtggtgcgctccatggaagattacatcaacttcctgacgccgcagttctcccgaacccacattaacttccagcgcgtccccaccgtggacacctccaacccgttcgccgcaaaaagcatcccttccctggacgagagctttgtggtgatccacttccgcaacctggaaggcattgattacccctggctgctggcgatgctacaaggttcgtttatttcgcacatgaatacgttagtggtaccgggcggaaaaatggggctggcgatggagctgatcatgacgccgctggtgcagcggctgatggaaggaaagcaaatcgcgtga

SEQ ID NO: 524852 - DNA, 405 bp, Stenotrophomonas maltophilia
atgcaagcgcgtgtgaaatgggttgaagggttaacgttcctgggcgagtctgcttccgggcaccaggttttgatggatggcaactccggcgataaagctcccagcccgatggaaatggtgctgatggcggcaggtggatgcagcgcgatcgacgtagtgtcgatcctgcaaaaaggccgtcatgacgtgaccgattgtgaagtgaagctgacgtcagaacgtcgcgaagaggcgccacgtctgttcacgcatattaatctgcactttatcgtcaccggcaaagaactgaaggatgcggcggtctcgcgtgcggttgacctgtctgcggagaaatattgctctgtggcgctaatgctggagaaagcggtaaacatcacccattcgtatgaagtgatcgaggcttaa

SEQ ID NO: 524853 - DNA, 633 bp, Stenotrophomonas maltophilia
atggtgcttggcaaaccgcaaacagacccgactctcgaatggttcttgtctcattgccacattcataagtacccatcaaagagcacgctgattcaccagggtgaaaaagcggaaacgttgtattacatcgttaaaggctcggtggccgtgctgatcaaagatgaagaagggaaagagatgatcctttcttatctgaaccagggcgattttatcggtgaactgggcctgtttgaagaaggccaggaacgtagcgcctgggttcgtgcaaaaacagcatgtgaagtggctgaaatttcttacaagaaattccgtcagctgattcaggtcaaccctgacatcctgatgcgtctttcttcccagatggcacgccgtctgcaagtgacctctgagaaggtgggtaacctcgccttcctggacgtgaccggtcgtatcgcgcagactctgttgaacctggcgaaacagccagacgccatgacccaccctgacggtatgcaaattaaaattacccgccaggaaatcggtcagatcgtcggctgctcccgtgaaacagtgggccgtatcctgaagatgctggaagaccagaacctgatctccgcccacggtaaaaccatcgtggtttacgggacccgttaa

SEQ ID NO: 524854 - DNA, 2088 bp, Stenotrophomonas maltophilia
atgtggcgcaggctgatctatcacccggaagttaactacgcactgcgacaaacgctggtgttgtgtcttcccgtggccgtgggcctgatcctcggacatcttcagcaaggcctgctgttttccctcgtgcccgcctgctgcaacattgccggtctggacaccccgcataaacgctttttcaaacgcctgattattggcggctgcctgtttgccggctgtagccttgccgtgcaactcttactggcccgcgacattcctctgccgctgatcctgaccgtgctggcgatgacgcttggcgtaaccgctgaaatcagctcgctgcacgcccgcctgcttcccgcgtcgctgattgccgccatcttcaccttaagccttgcgggcaatatgccggtgtgggagccattgctgatctacgccctcggcacgctgtggtacgggctgtttaactggttctggttctggttgtggcgggaacagccgctgcgcgaatccctgagcctgctctacgtgcagcttgctgaatactgtgaagcaaaatacaccctgctcacccagcataccgacccggaaaaatccctgccgccgctgctggcacgccagcaaaaagtggtggatctgatcagccagtgctatcagcagttgcacatgcttgccgccaacaaaaatcatgaatataagcggctgctgcgtaccttccaggtcgggctggatttgcaggagcatatttccgtcagccttcataatccggaagaggtgcaaaagctggtggagcgcagccatgcggaagcggtgatccgctggaacgcgcagaccgtcgcggcgcgcctgcgggtgctggctgaggatatcctctatcaccgctatccgacgcgctttaacatggacaaacagctcggcgcgctggaaaagattgcgcgtcagcacgcggataacccggtcgggcagtttgccgcctggcatttcagccgcatcgcccgggtgttgcgcacccagcgcccgctttatgcccgggacctgatggccgataagcaaaaacgactgccgttgctgcctgcgctcaaaagctacctgtcgctgaagtcttccgccctgcgcaacgccgcaagaattagcgtcatgctcagcatcgccagcctgatgggaatggccctgcacctgccgaaaccctactggatcttaatgaccgtgctgtttgtcacccagaacggctatggcgccacgcgggtgcgcattctgcatcgggcgggcggcacgatggcggggctgattatcgcgggcgtaacgttgcacttccacgtgccggaagggtatacgctggtcggcatgctggcgattacgatggtgagttatctgatcatccgtaaaaactacggctgggcgacggtgggctttacggtaacggcggtgtacaccctgcagttgcttacgctcaacgccgatcagttaattattgcccgcctggtcgataccctgattggctgcctgatcgcctttggcggcatggtctggctgtggccgcagtggcaaagtggattactgaggcaaaacgcccacgacgcgctggaggcggatcagcaggccattcgcctgatcctgagcgacgacccgcagccgtctccgctggcctacgagcgcatgaaggtcaaccaggcgcataatgccctgttcaactcccttaaccaggccatgcaggagccgggcttcaactcgcactatctggcagacatgaagctgtgggtcacgcacagccagtttatcgtcgaacacatcaatgccatgaccacgctggcgcgcgagcacaccatgctgacgccggatctggcgcagcgctatttgcagtcgtgtgaaattgccctccagcgctgtcagcagcgtctggagtacgacgcgccgggcgagtcaggggattcgaacattctggaagcgccggagacgctgacccacgggccgatgagcaccctggagcagcatttacagcgcgttctcgggcatctcaacaccatgcacaccatttcgtcggtggcatggcgtcagcgtccgcatcacgggatttggttaacgcgccggttaaaacgaaccgcgtattag

SEQ ID NO: 524855 - DNA, 1221 bp, Stenotrophomonas maltophilia
atggcaactgaacaaccagcaattacccgcgcgacattcgatgaagtgatcctgccgatttatgcaccggctgagtttatcccggtgaaagggagaggcagccgcgtctgggatcagcagggcaatgagtatgttgatttcgcaggcggtattgcggtgacggcgctgggccattgccatcctgcgctggtggacgcgctgaaaacgcagggcgaaacgctgtggcacaccagcaacgtgttcactaacgaaccggcgctgcgtctggggcgtaagatcatcgatgccaccttcgccgaacgcgtgctgtttatgaactctggcaccgaagccaacgaaaccgcctttaagcttgcgcgctactacgcaaccacgcgtcatagtccgtacaaaaccaaaatcatcgccttccataacgccttccacggtcgctcgttctttaccgtttccgttggcggccagccgaagtattccgacggctttggtccgaaacctgcggatatcatccacgtgccgtttaacgatctgcacgccgttaaagcggtgatggacgatcacacctgtgccgtggtggtcgaacccattcagggggaaggcggcgtcacggcggccaccccggaatttctgcaagggctgcgcgaactgtgcgacgagcaccaggcgctgctggtgtttgatgaagtgcagtgtgggatggggcgtaccggagacctgttcgcttatatgcactacggcgtaacgccggatattctgaccagcgcgaaagcgctcggcggcggtttcccggtcagcgcggtgctcaccacccaggatattgcttccgcatttcatgtgggctcacacggctccacttacggcggtaatccgctggcgtgcgccgtggcgggagcggcgttcgacatcattaatacgccggacgtcctgaatggcgtgaatgcgaaacgcgccctttttgtgaaacatcttcagcagattgacgaacagtttgatgtcttcagtgaaatccgcggaatggggctgctgatcggtgccgagctgaagcctcagtacaaaggccgcgcgcgcgatttcctgcacgccgccgcgcacgaaggcgtcatggtgctcaacgccgggccggacgtgatgcgcttcgcgccgtcgctggtggtggaagacaaagacatcgaagacgggttaacccgttttgctgcggcggtcgcgaagatcgtcagaggctaa

SEQ ID NO: 524856 - DNA, 564 bp, Stenotrophomonas maltophilia
atgattctgctgattgataactacgattcctttacctggaacctttaccagtatttttgtgaactgggggcagaggtggttgtccgccgtaacgatgagatcgcgctggctgacattgacgcgctggcgccccagaaaatcgtgatttcgcccgggccgtgtacgccgtcggagtccggtatctcgctggaggtaatccgccactatgcgggcaagctgccgattctgggcgtctgcctgggtcatcaggccattgcgcaggtctttggcgccaccattgttcgtgccgcgaaagtcatgcacggcaaaacctcaccgatcacgcacaccggtaccggcgtgttcctggggctaaacaatccgttaaccgtgacgcgctaccattctctggtgattgatccgccgaccctgcccgcagactttgaagtgaccgcctggagtgagacccgggaaatcatgggcattcgccaccgcgagtacgatctggaaggggtgcagttccacccggaaagcattctcagcgaacaggggcacgcactgctggccaatttccttaatcgctga

SEQ ID NO: 524857 - DNA, 585 bp, Stenotrophomonas maltophilia
gtgaaaaaactcaccgacaagcaaaaatcccgactctgggagcaacagcgtagcgtcaatcttcaggccagttgcctccttgaaaaaggcaagggtcccgctgaacccgatatcgagacgctggcactggggccttctgcaccgggtttaccccatctgtgccttattcaccgccatttattccgcaacgaaatgaaaggcgctggcgagctgcgcaccgccgatatctccaagggcgacattccattttgccatttcgagtacatcgagaaggtgggtaatgagctgatggcttcgctggaaagcgataaatatctggtgggccttcagaaagaagagtttacagacagaatcagtcattactactgtgaaatcaatatgctacatccgtttatgagcggtaatggcgtggctcagcgcatcttctttgaacagctggcgatccatgcgggctacgtgctgaactggcaggggatcgacccggacgactgggcatccgccaaccagagcggggcgatgggtgatctgaccgccctgaatgctacctttgccaaagttgtgagcgaagcgcggggatctgagtaa

SEQ ID NO: 524858 - DNA, 573 bp, Stenotrophomonas maltophilia
atgctcaaatcaacactggcggctgtcgcagctgtgtttgctctttctgccgtttcccctgctgcgctggcagccaaaggagaccctcacgtcctgctgactacctctgcggggaatattgagctggagctggatagccagaaagcccctgtttccgtgaaaaacttcctcgactacgtgaacagtggtttttataacaacaccacgttccaccgcgtgatcccgggctttatgattcagggcggcggtttcaacgagcagatgcagcagaaaaagcctaacccgccaatcaagaatgaagcggataacggcctgctgaacaagcgcggcaccatttctatggcgcgtacggcggataaagacagcgccaccagccagttcttcctcaacgtggcggataacgccttcctggaccacggccagcgcgactttggctacgcggtgttcggtaaagtggtgaaaggcatggacgtggcggacaagatctctcaggttcagactcatgatgtcggtccataccagaatgtgccgtctaagccagtggtgattctctccgcgaaagtgctgccgtaa

SEQ ID NO: 524859 - DNA, 1185 bp, Stenotrophomonas maltophilia
atgactaacagcaatcgcatcaagctcacatggatcagcttcttctcctacgccctgaccggcgcgttggtgatcgtcaccgggatggtgatgggaaatatcgcagactacttccagttgcccgtttccagcatgagcaataccttcactttcctgaacgcggggatcctgatctctattttccttaatgcctggctgatggaaatcgtgccgctgaaaacccagctgcgcttcggcttcgtgctgatggttgccgccgtggcgggcctggtgctgagccacagcatcgccctcttctctgccgccatgttcgtgctgggcctggtgagcgggatcaccatgtcgatcggtacgttcctgatcacccatatgtatgaaggccgccagcgcggcgcgcgtctgctgttcaccgactccttcttcagcatggccgggatgattttcccgatggtcgccgcgtatcttctggcgcgcagcattgagtggtactgggtatacgcctgcattggtctggtctatgtcgcgatctttattctcaccttcggctgcgagttcccggtgctgggcaaaaaagcgcagaccacgtctgagccagttgcgaaagaaaaatggggtatcggcgtgctgttcctttccatcgccgcgctgtgttacatcctcggccagctgggctttatctcctgggttcctgaatacgcgaaaggtctgggcatgagtctgaacgacgcgggtaaactggtgagcgatttctggatgtcttacatgttcggcatgtgggcgtttagctttatcctgcgcttcttcgacctgcaacggatcctgaccgttctggcgggtctggcaaccgtgctgatgtatctgttcatcaacggttccccggagcatatgccgtggttcatcctggccctgggcttcttctccagcgcgatttatacctcgatcatcacccttggctctcttcagaccaaagtggcctcgccaaagctggtgaacttcgtgctgacctgcggcaccatcggcaccatgctgaccttcgtggtcacgggcccaattgtggcgcacagcggcccgctggcggcgctgcataccgctaacggtctgtacgccgtggtgttcatcatgtgcttcgtgctgggctttgtgacccgtcaccgtcaacacaacccggcaacagctacccactaa

SEQ ID NO: 524860 - DNA, 2544 bp, Stenotrophomonas maltophilia
atgagcaaagtcagactcgctatcatcggtaacggcatggtcggccaccgctttattgaggatcttctcgataaagccgatgctaaccagttcgatattaccgtgttctgtgaagaaccccgcaaggcgtacgaccgtgtgcacttgtcttcctacttctctcaccataccgccgaagaactctctctggtgcgtgaaggtttctacgagaagcatggcgtaaaagtgctggtgggcgaacgcgctatcaccatcaaccgtcaggagaaagtgatccactccagcgccggacgcacggttttttacgataagctgatcatggcgacaggctcgtatccgtggatcccgccgattaaaggttcggaaacccaggattgcttcgtttaccgtaccattgaagacctcaacgccattgaatcctgcgcacgtcgaagcaaacgtggcgcggttgtcggcggtggtctgctgggtctggaagcggcaggcgcactgaaaaacctcggcgttgaaacccacgtcatcgaatttgccccgatgctgatggcggaacagctggaccatatgggtggcgaccagttacgccgtaaaatcgaaagcatgggcgtgaaggttcacaccagcaagaacaccaaagagatcgtgcaggaaggcactgaagcgcgtaaaaccatgcgctttgccgacggcagcgagctggaagtggatttcatcgtcttctccaccggcattcgcccgcgcgacaaactggctactcagtgcggtctggccgttgcgcagcgcggcgggatcatgatcaacgatacctgccagacctccgatccggacatctacgccatcggcgaatgcgccagctggaataaccgcgtatacggtctggttgcacctgggtacaaaatggcgcaggtcgccgttgaccatatcctcggcagcgaaaacgccttcaccggcgcagacatgagcgcgaagctgaagctgctgggcgtggacgtgggcggtattggcgatgcgcatggtcgcaccccgaactcccgcagctatgtttatctggacgaaagcaaagaagtctacaaacgtcttatcgtcagccaggacaacaaaaccctgctcggggcggtgctggtgggcgacaccagtgacttcggcaacctgctccagctggtgctgaacgccattgagctgccggaaaacccggacgcgctgatcctcccggcgcacgcctccagcggtaagccgtccattggcgtagataaactgccggacagcgcgcaaatctgctcctgcttcgacgtgaccaaaggcatgctgatctccgccattaacaaaggctgccacaccgttgcggcgctgaaggcggaaactaaagccgggaccggctgcggcggttgtatcccgctggtcacccaggtgctgaacgccgagctggcaaaacagggcattgaagtgaacaacaacctgtgcgagcacttcgcttactctcgccaggagctgtatcacctgatccgcgtggagggcattaagtccttcgacgaactgctggagaaacacggccagggctacggctgtgaagtatgtaagcctaccgtcggttccctgcttgcgtcctgctggaacgaatatgtgctcaaaccagaacacactccgcttcaggacaccaacgataacttcctggccaatattcagaaagacgggacttactcggtgatcccgcgttctgccgggggagaaattacccctgaggggctggtcgccgtgggccgtatcgcccgtgagtttaatctgtacaccaaaatcaccggttcccagcgtatcggcctgttcggtgcgcagaaagatgatctgccggaaatctggcgtcagctgattgaggcgggcttcgaaaccggtcacgcgtacgccaaggcgctgcgcatggcgaaaacctgcgtgggtagcacctggtgccgctacggcgtgggcgacagcgtgggcttcggcgtcgagctggaaaaccgctacaaaggtatccgtacgccgcacaaaatgaagttcggcgtctcagggtgtacccgtgaatgtgcggaagcacagggtaaagacgtgggtattatcgccaccgagaaaggctggaacctgtacgtgtgcggtaacggcgggatgaaacctcgccacgccgatctgctggctgccgatctcgatcgcgatacgctgatcaaatacctcgaccgcttcatgatgttctacattcgtaccgccgataagctgacccgtaccgcgtcatggctggataatctcgaaggcggcatcgactatctgaagtcagtcattatcgacgacaagctgggcctgaatgaacagctggaatccgagatgactcgcctgcgcgaggcggttatctgcgagtggaccgaaaccgtgaacacgccagcggcgcagacgcgcttcaaacactttatcaacagcacccagcgcgacccgaacgtgcaggtggtgccggagcgcgaacagcatcgtccagcgaccccgtatgaacgtattccggtgatgctggtggaggaaaacgcatga

SEQ ID NO: 524861 - DNA, 327 bp, Stenotrophomonas maltophilia
atgagccagtgggtaaacatctgcaacattaacgacattctgccagcaaccggcgtctgtgccctgctgggcaacgagcaggtagcgattttccgccctcgccacgatgaacaggtttttgccatcagcaatatcgacccgttcttcgaggccagcgtgctctcccgcggtctgattgcggagcaccagggcgaactgtgggttgccagcccgctgaaaaagcagcgcttccgcttaaccgacgggcgctgcatggaagatgaaagcttctcggtcaaacactacgacgtccgcgtgaaggacggcgaggtgcagctgaaagcgtaa

SEQ ID NO: 524862 - DNA, 1374 bp, Stenotrophomonas maltophilia
gtggatcacctgccgattttttgtcaattacgcaaccgcgactgcctgctcgtgggcggcggcgatgtggctgaacgcaaggcgcgcctgctgttagaggcgggcgcccgactgaccgttaacgccctcaccttcgccccacagtttgacgtctgggcgcaggaagggatgctcacgcaggtgcagggcgaatttgatgaatccctgctggatacctgctggctgaccatcgccgcaacggataacgatgacgttaaccagcgcgtcagcgacgcctgcgaagcgcgccgcatcttctgtaacgtggtggatgcgccgaaagaggcgagctttatcatgccatccattatcgaccgctcgccgctgatgattgcggtgtcgtccggtggccgctcgcccgttcttgcccgtctgctgcgggaaaaactggaagccgtgctgcctcaacaccttggtcagattgcccattacgccgggcagctgcgttcccgcgtgaagcaaaccttcgcaaccgtgggcgaacgccgtcgcttctgggagaagttctttgtcaacgacaggctggcgcagtcgctagccaatcaggacgccaaagcggttgaagagacgaccgagcaactcctctctgaaccgctggatcatcgcggtgaagtggtactggtgggcgcaggtcccggcgatgcgggcttgctgacgctgaagggtctccagcagatccagcaggcggacatcgtggtgtatgaccgtctggtctctgatgacatcatgaatctggtgcgccgcgatgctgaccgcgtattcgtcggcaaacgggcaggttatcactgcgtaccgcaggaggagatcaaccagatcctgctgcgggaagcgcaaaaaggtaagcgcgtggtgcgtttgaaagggggcgatccgtttatctttggtcgcggcggcgaggagctggaaactctctgcaacgcgggcattccgttctccgtggtgccgggcattacggcggcatccggctgttctgcctattccggcattccgttaacccatcgcgactatgcccagagcgtgcgcctggtgacgggccacctgaaaaccggcagcgagctggactggcataatctggccgctgaaaagcagacgttggtcttctatatggggctaaatcaggcagccacgattcaggcgaaactgctggagcacggcatggaagcagatatgccggtcgcactggtagaaaacggtaccgccattacgcagcgcgtggtcgatggcgtactgacgcagctgggcgagctggcgcagcaggttgaaagcccggcgctgatcgtggtgggccgcgtggtagcactgcgtgaaaaactgaactggttctccagccactaa

SEQ ID NO: 524863 - DNA, 171 bp, Stenotrophomonas maltophilia
atgttcaaactggcaaaagctgccgttctggtcggcctgttaacaactctgacggcctgcaccggtcacgttcaaaatactaaaaataattgcagctacgattacctgctgcatccggcaatctccatttcgaagatcattggcggttgcggcccggcggcacagcagtaa

SEQ ID NO: 524864 - DNA, 1005 bp, Stenotrophomonas maltophilia
atgactaagcccatcgtttttagtggcgcacagccttcaggtgaactgaccattggtaactacatgggtgcgttacgtcagtgggtgagcatgcaggatgactaccactgcatttactgcatcgtggatttgcatgctatcaccgcgcgtcaggatcccgagaagctgcgcaaggcgacgctcgatacgctggcgctgtacctggcgtgcggtatcgatcccgagaagagcaccatttttgttcaatctcacgtgccagagcacgcgcagctgggctgggcgctgaactgctacacctatttcggcgagctgagccgcatgacccagttcaaggataaatctgcgcgctactctgaaaacatcaacgccggtctgtttgattatccggtgctgatggcggcagatattctgctgtaccagaccaaccaggtaccagtgggcgaagatcagaagcagcacctggagctgagccgcgatatcgcccagcgcttcaatgcgctttacggcgacgtgttcaaagtgcctgagccgtttattccgaaatccggcgcgcgcgtgatgtcgctgctggagccgaccaaaaagatgtccaagtctgacgataaccgcaacaacgttatcggcctgctggaagatccgaaatcggtggtgaaaaagctcaagcgtgcggtgaccgactccgacgagccgccagtggtgcgctacgacgtgcagaacaaagcgggcgtatccaacctgctggacattctctccggtgtgaccggacagagcatccctgagctggaaaaacactttgaaggcaagatgtacggccacctgaaaggtgaagtggcagacgccgtttccggcatgctgaccgagttgcaggagcgctatcaccgttaccgtaacgacgaagctttcctgcaaaaagtgatgaaagagggcgcggaaaaagccagcgcgcgcgcctccgaaaccctgaaagcggtgtacgacgcgattgggtttgtggcgaaaccttaa

SEQ ID NO: 524865 - DNA, 762 bp, Stenotrophomonas maltophilia
atggataaattgcaggctattcggggtgtagcatttgacctcgacggcacgctggtcgacagcgcgccagggttaacccgcgccgtcgatcaggcgctgtatgcccttgaactccccgttgcgggcgaagagcgcgtcgtgacgtggattggtaacggtgcagacgtgctgatggagcgcgcgctgtcctgggctcgtcaggagcgtgcctctcagcgttccgcgcaagggaaaccgagtgttgaccacgcggatattccccaggatgagcagcagcgtattctgcgcaaactgttcgaccgtttctacgaagagaccgtcgaagagggcagcttcctgttcccggatgtcgctgaaacgctgagcgcgctacatgcgaaaggcatcccgctggggctggtgaccaacaagccaacaccgttcgttgcgcctctgctggaagcgctggatatcgcgaaatacttctccgtaattgtgggcggcgatgacgtgcagaataaaaagccgcatccggaaccgctattgctggtggcaggaaaattatccttagcgcctgcggagctgctctttgtcggggattcccgcaatgatattctggctgccagagcggcaggttgcccgtctgttgggttgacctacggctacaactacggtgaagccattacgctgagtgagccggacgttgtgttcgaccacttcaaagatttgttgcccgcactcgggctctcgcacagtgaacatcaggaattgaataatgactaa

SEQ ID NO: 524866 - DNA, 678 bp, Stenotrophomonas maltophilia
atgaaacagtttttgattgccccctcaattctgtcggccgattttgcccgcctgggtgaagacactgccaaagctctcgcggctggcgcagatgtcgtccatttcgacgttatggataaccactacgttcccaacctgaccatcggtccgatggtgcttaaagcgctgcgtaactacgggatcaccgcgcccattgacgtgcatctgatggtgaaaccggttgatcgcatcgtgcctgatttcgccgcggcgggtgccagcatcatcactttccacccggaagcctccgaacacgttgaccgcacgctacagctgatcaaagagaacggctgtaaggcgggactggtctttaacccggcgaccccgctgagctatctcgactacgtgatggacaagctggacgtgatcctgctgatgtccgtcaacccgggctttggcggccagtcgtttatccctcagaccctcgacaaactgcgtgaagtgcgccgccgtattgatgagtctggctatgatattcgcctggaagtggatggcggcgtgaaggtcaataacatcggtgagattgcggcggcaggagcggatatgttcgtcgcaggctccgccatcttcgatcaaccggattacaaaaaagtcattgatgaaatgcgccgtgaactggcgaaggtaagtcatggataa

SEQ ID NO: 524867 - DNA, 813 bp, Stenotrophomonas maltophilia
atgaaaaaaaatcgcgcttttcttaaatgggcaggggggaaataccccctgctcgacgatattaaaaagcacctgccgaaaggcgagtgtcttatcgagcccttcgtgggtgctggatcggtattcctgaataccgatttttctcgttatatcctggcggatatcaacagcgaccttatcagcctctataacatcgtgaaactgcgtaccgatgagtatgtggaagaggcgcggaagctgtttacgccagagaacaacaacccggacatttactatcagttccgcgctgagtttaatcagagccaggacccgttccgtcgcgcgctgttgtttctttatctcaaccgccatggctacaacggtctgtgccggtataatctgcgtggcgagtttaacgtgccgtttggccgctataagcgtccctatttcccgcaggacgagctgtatcactttgctgaaaaagcgcagaatgccgagttctactgtctctcctatgaagagtgcatggagctggcgggcgtaaactcggtggtctactgcgacccgccttacgcgccgctgtctgccacggcaaatttcaccgcctaccacaccaacagcttcagcccggccgagcaggcgcgtctggctgagatggcggaaaagctggtcagcaaaagaattccggtgttaatttcgaatcacgacacgcctgatacgcgcgaatggtacaaagccgcgaagcattttcaggtaaaagtgcggcgtagcattagtagcaatggcggcacacgtaaaaaggtggacgaacttctggcgctttatcgaccctga

SEQ ID NO: 524868 - DNA, 651 bp, Stenotrophomonas maltophilia
gtggtgaactccacgctgcctactgaacctgccaccgttgcgccagttcatggcagcaatgcccagcagcaaacggcggcaacggaaaccaaaccgcgccatacccagactgcgccgcgtcaggagcgtaagcaggctgtgattgagccgaagcgtgagacgaaaccgcagaccgtggcaaaagcgccagaaacgaaagcgccagcgcagacaaaacctgcggtgagccaaccggttaaagcgccaacgcctgcggcaaccgctgcacctaaagcaacggcgaccacaaccgcgcctgctgcaactgcggcaccggctgctacgccaaccgctagcgcatccagcaccgcggcaggtaaaacgacgggtaacgtgggttctctgaaatccgcatcatccagcaactacacgttgcagctgagcagttcgtctaactacgacaacctcaacgcctgggcgaagaaatcgaatctgaaaaactatgtggtttatcagacgacccgtaacggacagccttggtacgttctggtaagcggagtttatgcctcaaaagatgaagcaaaacgagccgtctccacgctgcctgccgatgtgcaggcgaaaaatccgtgggcgaagccaattcatcaggtgcaggccgatctgaagtaa

SEQ ID NO: 524869 - DNA, 492 bp, Stenotrophomonas maltophilia
atggatgaattcaaaccagaagacgagctgaaacccgatcccagcgatcgtcgtactggtcgttctcgtcaatcttcagaacgtgataacgagccgcagatcaactttgacgatgtcgatctggatgcagacgatcgtcgcccttcgcgtagccgtaacgcgcgaaatgagcgtgaagacgaggagtatgaatccgaagaagagttaatggatgaacagcctgttgaacgtcgtccgcgcaaacgtaaaaaagcggtagcggcaaaaccggcctcccgtcagtacatcatgatgggccttggcgttctggttctggtattgctgattgtcggcattggttccgcgctaaaagcaccttctacccattctaccgagcagacagcgtctgccgagaagagcatcgacctgtcaggatatctctctgccgcccgtctctgcgaccccaactcagggccaggcgcctgttacgccggagggccagcagcgtgttga

SEQ ID NO: 524870 - DNA, 1089 bp, Stenotrophomonas maltophilia
atggagaggattacagttactctcggggaacgtagttaccctatcaccatcgcggctggtttgtttaacgatccagcttccttcttaccactgaaagcgggtgatcaggcgatgctggtcaccaacgagacgctggctccgctttatctcgaccgtgtacgccacctgcttgagcaggcgggcgtgaaggtcgacagtgtgattctgcccgatggcgagcagtacaaaagcctgacggtactggataccgtctttaccgcacttctgcaaaaaccgcacggtcgtgatacaacactgcttgccctgggcggcggcgttgtgggcgatctgaccggttttgcagccgccagctaccagcgcggtgtgcgctttattcaaattccaaccacgttgctctcacaggtcgattcttctgtgggcggtaaaacggcggttaaccatccgctcggcaaaaacatgattggcgcgttctaccagcctgcatcggtggtggtggatctcgactgtctgcaaaccttgccagcgcgcgaactggcgtccggccttgcagaagtgatcaaatacggcattattcttgacggtgagttcttcacctggctggaagagaatatggatgcgctgctgcgcctcgatgggcaggcaatggcctactgtattcgccggtgctgtgagctgaaagcagaagtcgttgccgcagatgagcgtgaaaccggcttacgtgctttactgaatctggggcatacgtttggtcatgcgatcgaagccgaaatgggctacggtaactggcttcacggtgaagctgtcgctgccggaatggtcatggcggcccgtgcctctgaacgtctggggcagttcaggccggaagagacagcacgtatcatcacgttgcttaaacgtgctggcttgccggtgattggtccgcaggaaatgtctgcgcaagcgtaccttccccacatgatgcgcgataaaaaagtattggcaggtgagatgcgtctggtactcccgcttgcaatagggaaaagtgaagtgcgcggcggagtgccgcacgaagtcgtacttggcgctattgctgattgtcagcaggcgtaa

SEQ ID NO: 524871 - DNA, 522 bp, Stenotrophomonas maltophilia
atggcagagaaacgcaatatctttctggttgggcctatgggtgccggcaaaagcactattgggcgtcagttagctcaacaactcaatatggaattttacgattctgatcaagagattgagaaacgaaccggagcggatgtgggctgggtcttcgacgtagaaggcgaagaaggtttccgtgaccgagaagaaaaagtgatcaacgaactcacggaaaaacagggcattgtgctggcaacaggcggcggctctgtaaaatctcgcgaaacccgcaaccgtctctccgcccgtggcgtagtggtctatcttgagacgaccatcgaaaaacagctggcacgcacgcagcgtgataaaaagcgcccgttgttgcaggttgaaacaccgccacgtgaagttctggaagctttggccgatgaacgcaatcctctgtacgaagagattgctgatgtgaccattcgtactgacgatcaaagcgctaaagtggttgcaaaccagattattcatatgctggaaagcaactga

SEQ ID NO: 524872 - DNA, 261 bp, Stenotrophomonas maltophilia; identical to SEQ ID NO: 117232

SEQ ID NO: 524873 - DNA, 1239 bp, Stenotrophomonas maltophilia
gtgaagatatggatagggctgttactggcggcactcagccagcccctgtgggccgcgacgccaaaaccggtcaccctgctggtggatgatgtcccggtggtgcaggtattacaggcgatggtagcgcaggaggatcgcaatctggtggtgtcgccggatgtcagcggttcgctttcgctgaatctaacgcgggtgccctggaggcaggcgcttcagacggtagtgaacagtgccgggctggtattgcgggaagagggcggcattttttatgtgcatacggcggcctggcagcgggagcaacagacgcgtaaagcgcaggagcgggcccagcgtctgctcgacgctccgctgctctctcacagcattccgtttgcttatgcggatgcggccgaattgcaaaaagcggcggaaaagctcttaagcccgaaaggcagtctctccgtcgacaagcgcaccaaccgtctcctggtcagggataacaagtcggtggtggatatgctccagcgctgggcagcgcagatggatctgcccgtcgagcaggtagaactggcggcgcagattgtgaccatcagtgaaaaaagcctgcgtgaactgggggtgaaatggaacctcgctgacgcaacggaggccggtaaggtgggtcaggtcacgacgttgggcgctgacctgtcggtggccagtgcaaccacacacgttgggtttaatatcgggcgcatcaacggcaggatgctggatcttgagttgtcggcgcttgagcaaaagcagcaggtggatatcatcgccagcccgcggctactggcgtcgcacatgcagccggccagcatcaagcagggcagcgaaatcccgtatcaggtttccagcggcgaaagcggagcgacctccgttgagtttaaagaggcggtattaggcatggaggtcacgccggtggtgctcccgggcggccgcgttcgtctgaagctgcatatcagtgaaaatatgcctggccaggtgctgcaacaggcggacggcgaaacgctggcgattgataagcaggagatcgaaacgcaggtagaggtaaaaagtggggaaacgctcgcgctgggcgggatcttttcgcaaaagaataaaaccggacgcgacagcgtgcccgtgctgggcaacattccgtggctgggtcagttgttccgccatgacggaaaagataacgaacggcgcgagttagtggtgtttatcacgccacgtctggtcagtattcattaa

SEQ ID NO: 524874 - DNA, 453 bp, Stenotrophomonas maltophilia
gtgggcatctggtatcaacgctggacagatgcacgtccttcccggcgcgtcctttgctggttgatcgcgtcggggatcgttgcgtttgcgatttggggagcgctgctcagacccgctgctctgtgctacgccgatattcaggcgcaggccagcagtgcgaagcgaatcaacgcctcgctgtggccaaaggccgggcggcgacctgtggttacgcaagtgaagccggtgcagcccttttctccgctggcatttcagcgtgaggacgcaaggctggtgtactggaaaccgcagcacagtgggggagagctggcgctggatgccttatggggcgcagttccggcgatcttttcccggctggcgcttgagaacgtgcgggtgagcgcgttttccatcaccccacagggaaaacagctacgccttagcctgcaactggagatcggtcatgcgcagtaa

SEQ ID NO: 524875 - DNA, 495 bp, Stenotrophomonas maltophilia
atgagcatgcccaatcttttaccctggcgtcggcagcaacgtaatcagcgcctgcgtttttgggggctgctgtttaccgcctcattgttggtgatgctggcgggaggcgtcagccttcgggcgacgcagactctcgcgtcacaggcgttgcagagcgatctggcgggaacgcgtgcggtgcagaaggtattgaaagcccgtcagccgcagtctgcggggctggaacccctttcgcagccgcctgagacggtggcatggcaacccgcgcttgaatcccttgccagtgcaatgccccggcaggcgtggctgacggcgctgcgttatcagccaccctcgctgatcctgacgggctataccacctcactcccgacgctctccgccatgaccgatgcgctgaaaagggtgacggggtttaaccccggaccggcaggcgaattgcaacaggatagccaggggcgatggatgttctcttttcaactgcatagccggaggtag

SEQ ID NO: 524876 - DNA, 774 bp, Stenotrophomonas maltophilia
atggcttttaaaacgtggcaaacaggcgttcatattcaacaggataaggtgattgccgtggcgctgaccagagagcgggccggctggcgtttacggcgctggtgggcggtgccgctgtcggacggggttatcggtgaaggcaaaatacttaagccagaacaactggttaacgcattacgtggctggcggaaaacattgccgcactcgcatcgggtatttctctcatttccggcaacgcgcgttctgcaacgcgcgttgccccgtccatccgttaacttgcgtgacagcgaacagctcacctgggtaggcgccgcattagcgcgtgagctggagatgcctcccgatacgctctgctttgactacgcgcaggatacgttcagcaacacttttcaggttaccgccgcgcaaaacagagaggtcgataccctgttgtcgctggcgaaagcgctgcgtttgcgcctggccgcaatcgtcccggatgccggcgcactggctaatcttctctctgctgttgcccccgtccggtgcgtagcctggagggataaacaccagtggctgtgggcgatgcgtcaccagtgggggcggcgctacaccacagaagcggcgacggtgaatgagctggcggcgttgcttgcactttctccttctgatatcgccgtgtttgatgctgcacggtatccctgggaagcggtgacgctgtgtcagccgccgttgccagaatgtggtgctgattacaccgtcgccctggcgctggccatgagcgaggcgccgtaa

SEQ ID NO: 524877 - DNA, 2553 bp, Stenotrophomonas maltophilia
gtgaagttcgtaaagtatttattgatccttgcagtctgttgcattctgctgggagcaggctcgattattggtttgtacaaatatgtcgagccgcaactccctgatgtcgccacacttcgtgatgtgcggcttcagatccctatgcaggtctatagcgccgatggtgaactgatggcgcaatacggcgagaaacgtcgtatcccactgaccttaaatcaaattccacccgtgatggtgaaggcttttatcgccaccgaggatagccgtttttacgagcaccacggtgtcgatccggtcggtattttccgtgcggcaagcgtggcgctgttctccggtcatgcctctcagggggcaagtaccattacccagcagctggcgcgtaacttcttcctcagcccggaaaagacgctgatacgtaagatcaaagaagtgttcctcgcgatccgcattgagcaactgctgagcaaagacgagatccttgagctttacctcaacaagatttatctgggctaccgcgcctatggcgtaggggctgcggctcaggtctatttcggtaagtcgatcgatcagctcacgctgagcgaaatggcgaccattgccggcctgccaaaagcgccatcaacgtttaacccgctctactcgctggaccgcgccaccgcgcgccgtaacgttgtgctatcgcgtatgttgagcgaaggctacatcagccaggatgagtacgatcgggcacgcagcgatgtgattgatgccaattaccatgcaccggaaattgctttctcatcgccgtatctgacggaaatggttcgccaggagatggtgcgccgctacggcgacaaagcatatgaagacggctatcgcgtttacaccaccgtgacccgcaaggtgcagcaggctgcccagcaggcggtgcgtaataacgtgatggattacgatatgcgtcacggctatcgcggcccgtccaacgtgctgtggagagtgggcgaaggcgcatgggacagcaaaaaaattactgattccctgaaagcgctgccgacctatggcccgctgcgtccggcggtggtcacccaggccgatccgcaggaagcggtggcgatgatggccgatggtacatccgtttcgctgcgtatggagggtatccgctgggcgcgttcgtaccgttctgacacccttcaggggcctactccacgtaaagtgacggatgtggtacaaaccggacaacaaatctgggtgcgtcaggtaggcgatgcctggtggctggcacaggtgccggacgtcaactctgccctggtctccatcaatccgcagaacggtgccgtgatggcgctggttggcgggttcgatttcaaccagagcaaatttaaccgcgcaacccaggcgctgcgtcaggtcggttcgaacatcaaaccgttcctgtataccgcggcgatggacaaggggctaacgctcgccagcattctcaacgacgtgccaatttcccgatgggatgccggtgcgggctctgactggcagccgaagaactctccggcgcaatacgctggccctatccgtctgcgtcagggccttggccagtcgaagaacgtggtcatggttcgcgcgatgcgtgcgatgggcgttgattatgcggcagagtatctgcaacgcttcggcttcccggcgcaaaacatcgttcataccgaatctttggcgctcggctccgcgtccttcacaccgctccaggtcgcgcgtggctactcggttatggcaaacggcggcttcctggtcgatccgtatttcatcagcaaaatcgagaacgatcagggcggcgtactgtttgaagcgaagccgaaaattgcctgccctgaatgtgatattccggtgatttacggcgacacgccaaaatccaatgtccttgaaaacaaggacatggaagatgttgccatctctcaggaacgtcagaatctggcggtgccgcagcctcagctggaacaggccaatcaggcgctggtcgcccagagtggcgcgcaggagtatgctccgcacgtgatcagcacgccgctgtcgttcctgattaagagcgcgctgaacaccaacatctttggcgaaccgggctggcaaggcaccggctggcgagcgggccgcgatttgcaacgccgcgacatcggcggcaaaacaggcacaaccaacagctcaaaagatgcctggttctcaggttatggcccgggcgttgtcacctcggtctggattggttttgacgatcaccgccgcactctggggcgcacaaccgcttctggcgcgattaaagatcagatttccggttacgagggtggggctaagagtgcgcaaccggcctgggatgcttacatgaaggccgctctcgagggcgtgccggagcagccgctaacgcctccgccgggcattgtcacgatcaatattgaccgcagcaccggacagctcgcgaatggcggcaacagccgtgccgagtatttcatcgagggtacgcagccaaccacgcaggcggtgcatgaggtgggtaccgaaatcattgataacggcgaaacgcacgaactgttctga

SEQ ID NO: 524878 - DNA, 561 bp, Stenotrophomonas maltophilia
atgaccaaacccttacaaaagcccaccattctgaatgttgaaaccgtcgcaaaatcgcgtctgtttaatgttgaaagcgtggatctggagttcagcaacggtgtgcgtcgtgtttatgagcgtatgcgcccctcctcgcgtgaagcggtgatgatagtgcctatcgtcgacgagcacctgatcctcattcgtgaatacgccgtgggcacagaatcctacgagctgggcttctccaaaggactgatcgatccgggcgaaacggtgtttgaagcggcaaaccgggagctgaaagaagaggtcggctttggcgcgaaagagctgacgttcctgaaaaagctgagcatggcgccgtcctatttctccagcaaaatgaacattgttgtcgcggaagatctctatcctgaatcgctggaaggagacgagccggaaccgctgccgcaggttcgctggccgctggctcatctgatggatttgctggaagatcctgactttaacgaggcacgcaacgtgagcgcacttttcctagtgcgggagtggctgaaggggcaggggcgtttgtag

SEQ ID NO: 524879 - DNA, 2139 bp, Stenotrophomonas maltophilia
atgagcaccattttgatttttctcgctgctgtgctggcctgcgcgtcgattgcggtgtgggtattcaggcgccgcgtacatcgccgttatcggctgccctttttgaacgcgtttgccggggcaaacacgcgcaagctttcgccagaggaacgcagcaccgttgagcagtatctcgacacgctgaaccgatcccggctttcgcctggccctaccggcgccagcgccgcccccgtatcgctcaaccttaacgcacaaagcgacaccgttttgtgcgtaacgcgctctattacccgctacggcatcacaaccgacgatcccaacaaatggcgttactatctcgactctgttgaagtgcacctgcctcccttctgggagcagtatatcaacgacgaaaacagcgtcgagctcatccataccgatacgctgccgctggttatctcccttaatggtcatactctgagcgaatatgttcaggaagcgccacgctttgcgctggaacgtgcgagcggaacgcaggcctctattcgtggtgaagagacagagcagattgaactgctcaacatccgccaggaaacgcatgaagagtacgtcctgagccgcccggatggcattcgcgaagcggtgctgattgtcgtctcgttcctgctctttttcatctgcctgctgacgccggacgtgtttgttccgtggctcgcgggcggcgcagtactgcttctggccgccgggctgtggggcatatttgccccgccggcaaaaacgtcattacgcgaaattcactgcctgcgcggaaccccaaaacgctggggactgttcggcgaaaacgatcaggaacatatcaacaatatctcgctcgggatcatcgatcttatctatccgcgccactggcagccgtggattgcgcaggacctgggccacaaaacggatattgatatctatctcgaccgccacgttgtacgccagggacgttacttatccctgcacgacgaagtgaaaaactttccgcttcagcactggcttcgcagcgcggtgattgccggtggcgccgcgttaatcttcctcatgctgctgcttttcgtgccgctggatatgccgattaaatttaccctgtcatggatcaaaggggcgcaaaccgtggaagccaccagcgtacagcagctcgaagaagcgggtgtacgcgtgggggatacgttgcggctgaaaggcaccgggatgtgtaatatccactcaccgggcgcctggaacacgcgccagaactcgccgttcgcgccgttcgactgctctcagatcatctggaatgacgcctctccgctgccgcttccggaatcggatgtggtcaataaggccaccgctctcacccagacgattaatcgccagctccatccaaaaccggatgatgattctcgcgtcagccctgccctgcgttcggccattcagaagtccggcatggtgctgctggatgactttggcgaaatcgtcctgaaaacagaagatctctgctcagctcaggatgactgtatccggctgaagaacgcgctggtcaacctcggcaacagcaaagactgggacgcgctggtgaaacgcgccgaagcgggacgcctcgatggtgtgaatgtgcttctgcgtccggtcagcgccgagtcgctggataacctggtggcgacctctaccgcccccttcgtgatgcgtgaaaccacccgtgccgcccaggcgcttaacagcccggcgcctggcggttttgtgattgccagcgatgaaggcagcgacctggtggatcaaccctatccgcaggtttcgctgtatgactatcctgctcaggaacagtggagcgaatttcagcgtctggcgcagatgctgatgcagacgccattcagcgcggaagggatcgtcaccaccctctttaccgatgccaacggcacgcgtcatattggcctgcaccgtatgccggatagcgctggcctgtggcgctatgtagggacatccctgctgctgattgcgatgctggcgtgtattatctggaacggttatcaggccgtacgccgctatcagcgctcccgcacgcgactggcagaaatccaggcctactacgaaaattgcctaaacccgaaactgatctcctcttctgagagcctgatcggataa

SEQ ID NO: 524880 - DNA, 684 bp, Stenotrophomonas maltophilia
atgcatcttaatatcgactggcaggcggtcgataccgtcctgcttgatatggacggcacgctgcttgatctcgcctttgataactatttctggcaaaagctggttccggaaacgtacggtgaacagcaggggatctccccggtggaagcgcaggaattcattcgttcgcaatatagcgcggtgcagcatacgctaaactggtactgtcttgactactggagcgagcgactcggtttggatatttgcgccatgaccaccgcccagggcgcacgcgccgttctgcgcgaagatacggtcccgttcctggacgcgctgaaagcctgcggtaagcgccgtattttgctgacaaatgcgcatccccataacctggccgtgaagctggaacataccggtcttgcttcgcaccttgatttattgctttccacccacacatttggttatccgaaagaggatcagcggttgtggcatgccgtggtggaagagaccggtttacagccggaacgcacgctgttcattgacgacagcgagccgattctggattctgcggccgcttttggcattcgctattgcctgggcgtgaccaatcctgattccggcctggctgaaaaaagctatctgcgacatccggggctgaacgactatcgccggatgatcccctcactcaccgtgaaggagacgccatga

SEQ ID NO: 524881 - DNA, 402 bp, Stenotrophomonas maltophilia
atgaaagaaaaaccctctgatggggtaagactggataaatggctgtgggtcgcccgtttttacaaaacgcgcgcccttgcccgagaaatggttgacggcggaaaggtgcattacaacggtcagcgcagcaaaccgagcaagctggttgaactgaatgccacgttaacgcttcgccagggcaacgatgagaaaacggtggtggtgaaagccattaccgaacagcggcggcccgcaaccgaagccgttttgctgtatgaagagacggccgaaagcatagagaagcgcgagaaaaccgcgctggcgcgcaaaatgaacgcgctgacgatgcctcacccggaccggcgaccggataaaaaagagcgccgcgatctgatgaaatttaaacacggtgagagcgagtaa

SEQ ID NO: 524882 - DNA, 879 bp, Stenotrophomonas maltophilia
atggcccaacacgaccaattacaccgctatctgtttgaacaattcgccgtgcgcggcgagctggtcaccgtatccgaaacctggaaacagattctggaaaaccacaactacccgctgccggtaaaaaccctgttgggcgaactgctggttgccaccagcctgctgaccgccacgctgaagtttgctggcgatattaccgtccagttgcagggcgatggcccaatgtcgctggcggtgatcaacggcaataaccagcagcagatgcgcggcgtggcgcgcgttcagggcgatatccctgaaaatgcggatctgaaaacgctggtcggtaacggctacctggtcatcacgatttcgcctgaagaaggtgagcgctatcagggcgttgtcggtctggaaggcgatacgcttgccgcctgcctggaagattacttcatgcgttccgaacagctgccaacccgtctgttcatccgcaccggtgaagtggatggccagcctgctgccggtggtatgctgcttcaggttctgcctgcgcaggatgcgcagaccaatgatttcgagcatctggcaacgctgacggaaaccatcaaagcggaagagctgttcaccctgtcggcgaccgacgtgctgtggcgtctctaccacgaagaagaagtgacggtttacgatccgcaggcggtggaatttaagtgcacctgctcccgcgagcgttgtgctggcgccctgaaaacgctgccggatgaagagatcgacagcatcatggcggaagatggtgaaatcgatatgcactgtgactactgcggtacgcactacgtgttcaattcgatggatatcgcggagatccgcaataacgcctctccggcggatccgcaggttcactaa

SEQ ID NO: 524883 - DNA, 1758 bp, Stenotrophomonas maltophilia
atggaaaaccgtgagacgttatctccttcaacgcgcgtagccgtcgtgctggcgggggctctacagggcgtaatttgctatgtaattacgtggtatatcgagtacgcaaaattgccatcggatacgctgtggctgatgtgtgtagtacctgccaccgtggtaatgacaaccacgttgtctcttgccatgacgtcattcagaaagccatttttgtggctgtcactcgggatgatcggcgcggcagtcgcgggtatgggcggctggcttaagtggagcgttgcaggactcgaaagctggaatctcagagatgagatgctcgttttcggctttcatctgctgctgatgacgctgttcgtgttgccatggcttcagcggcgtctggatcccgtcccgactacctcgttctacagcgacttttatcaacgaaactggcataacgcgctgacgctgctcattatttttgtttcgaatggtctcttttggctggtgcttttcctctgggccgagcttttcgaacttatcggcatcggcttttttgatcggcttttctttcattctgacggatttatttcagtggcgattggcgtggtttcagccagtgcggccgtgctcacgcgtatgcaggtaaggttaatccttgccctgcaaaatctgctgaccctcatagccaccggtctgcttcccctgatggcggcgctggcgctgctctttattggcgcgttgccttttgtcggctttgaatccatttcagccagaatatccgccgcgggcttgctgaccaccttagcgctgctgctgttattcctggtgacgatagtgtggcatccacagcgtcaaacgctgccttactatgccccgctgcgagggatgattcgccttgctgtggctatcgtacccgcgtatccggttctggcggggtgggcgctgtggctacgcatttcgcaatacggctggtcacccgagcgtctgtacggggtattgataaccatcgtggcgctggtctgggcggtcggtttttgcgccagcgttctgattcagcgccgtgagccgcagaagatccatgcgtacgtcatcccgacgaccgggctgctttccctcatcttcctggcgttgatccatacccccgtgctggatccgtggcgaataagcgttgcaagccatatggcccgctatcaggacggcagaataactgcggatcaagtcagcctgtatatgctcagtaacgctggacgaaaggggcgggaggcaatgctcacgctgcaaaacgatccgcagtttatctctaacccaaaacggcagcgtgaaataaatggtcttctctccaggaacgctggcggagcaggtaagatgaccgccgcgatgctggaaaaacaggtccagctcgcaccgggaatggctcgtcctgataagacattgtggcaagccatgctcagcaatcagtatcgctttgagagctgcgatagcgcccagagtaactgtttactcatgccgctggatcttaacggcgacggcaagcctgaggccgtgctatttcaatttaccgatcgcacgatcgtggcttacacacaaaccaacacgggctggaggatcgccggggacgcgtggaaaatgccggaggcattgaccagagaagaacttgaccgcgcattaaggcagaggaaagtgaaatctgtcgtgaagccctgggcggatattgagatttttggggagcgtgtcgatatgagctacgacagttacaataatgcgcagcggcgttag

SEQ ID NO: 524884 - DNA, 1617 bp, Stenotrophomonas maltophilia
atgcgtgttaatggtttaaccccgcaagatctcaaggcttatggtattcacgacgtccaggaagtggtctacaaccccgattacgatacgctgtatcaggaagagctcaatccggctctggaagggtacgagcgaggtgtgttgacgaatcttggtgctatcgccgtcgataccggtatttttaccggccgttcgccgaaagataaatacattgtccgagatgataccacccgcgatacgctgtggtgggccgataaaggcaaagggaagaacgataacaaaccgctctctcctgaaacctggcagcatctgaaagggctcgtcacccatcagctttccggcaagcgtctgttcatcgtcgatgctttctgcggcgctaacgccgacacccgtctctccgttcggtttatcactgaagtggcctggcaggcgcatttcgtgaagaacatgttcattcgtccgaccgatgaagaactgcaaaacttcacccctgactttatcgtgatgaacggcgcgaaatgcaccaacccgcagtggaaagagcagggtctgaactccgaaaacttcatcgccttcaacctgaccgagcgtatccagctgatcggcggtacctggtacggcggcgaaatgaagaaagggatgttctcggtcatgaactacctgctgccgctgcgcggtatcgcctccatgcactgctcggcgaacgtcggtgaaaaaggtgacgtggcggtgttcttcggcctttccggcaccggtaaaacgacgctgtccaccgatccaaaacgtcgtctgattggcgacgacgagcacggctgggacgacgacggtgtgtttaactttgaaggcggctgctacgcgaaaaccattcgcctgtctgaagaggcagagccggatatctaccacgcgattcgccgcgatgcgctgctggaaaacgtcaccgtgcgtgccgatggctctgtcgacttcgacgatgcgtccaaaaccgaaaacacccgcgtctcttacccgatttaccacatcgagaacatcgtgaagccggtgtcgaaggcgggccacgccacgaaggtgattttcctgaccgcagacgcgttcggcgtgttgccgccagtttcccgcctgaccgccagccagacgcagtaccatttcctctccggctttaccgctaagctggcgggtaccgagcgcggcgtgaccgagccaaccccaaccttctccgcctgcttcggcgcggcgttcctgtcgctacacccaacgcagtatgcggaagtgctggtgaaacgcatgcaggcatccggcgcacaggcatacctggtgaacaccggctggaacgggacgggcaaacgtatctccatcaaagatacccgcgccatcatcgacgcgattctggatggttcgttggataacgccgagacctttacgctgccgatgttcgatctggcgatcccaaccgagctgccgggcgtggatacgcgtatccttgacccgcgcaacacctacggttcaccggaacagtggcgcgagaaggcagaatcgctggcgaaactgtttatcgaaaacttcgagaagtataccgacaccccggcgggtgctgcgctggtgagtgcgggaccaaggtaa

SEQ ID NO: 524885 - DNA, 2313 bp, Stenotrophomonas maltophilia
gtgctcgcaaactacggcctcgatcgcggtctggaagacagtaacgcggcggcaaactacgccgagatcaaagcctacaccccggcctggggcgaacaaattaccggcgtccccgcttacctgatagaaaaaatcgcccgtgaatttgccgacacggcgcacaaaacccatggtcgttcgatgatcatcctcggggccggtgtgaaccactggtaccacatggacatgaactaccgcgggatgatcaacatgctggtcttctgcggctgcgtcgggcaaagcggcggcggctggtcgcactatgtcggccaggagaaactgcgtccgcaaaccggctggctgccgctggccttcgcgctggactggaaccgtccgccgcgccagatgaacagcacctcttacttctacaaccacgccagccagtggcgctatgagaagctcaccgcacaggagctgctttctcctcttgcagacgcgtcgaaattcaccggacatctgattgatttcaacgtccgcgccgagcgcatgggctggctcccttccgcgccgcagctcaacctcaacccgctgcacgttaaggcccgcgccgacgccgccgggatgtcgccgcaggattacaccgtgcaggcgttaaaatcgggcgatattcgcttcgcctgcgaacagccggacaacggcaagaaccacccgcgcaacctgtttgtctggcgttctaacctgcttggctcgtccggaaaaggccatgagtacatgctcaaatacctgcttggcaccgagagcgggatccagggcgaggatttaggctcaacggatgatgtcaaacctgaagaggtggaatggcaaaccgccgccattgagggcaagctggatctgctggtgacgctcgatttccgtatgtccagcacctgcctgttctccgatatcgtcctgccgaccgccacatggtatgaaaaagacgatatgaatacctcggacatgcatccgtttattcacccgctctctgccgccgttgacccggcgtgggagtcccgcagcgactgggagatctacaaaggcatcgccaaagtcttctctgaagtgtgcgtcgggcatctcggcaccgaaactgacgtggtgctacagccgctacagcatgactccccgggggaactgtcgcagccttttgatattctggactggcgcaaaggcgagtgcgatctcatccccggtaaaaccgcgccaaacattgcggtcgtcgagcgcaactatccggaaacctacgagcgcttcacttctctcggtccgctgctggacaaactcggcaacggcggaaaaggcatatcgtggaacacgcaaaacgaagtcgatttcctcggcaagctcaattacgtcaagctcgacggaccggccaaaggccgaccacgcattgaaaccgccattgatgcttcagaggtgatcctcgctcttgcgccggaaaccaacggtcaggtcgcggtcaaagcctgggaggccctcggcgaactgaccgggcgcgatcacacccatctggcgctgaacaaagaagacgagaaaattcgcttccgcgatattcaggcgcagccgcgcaaaattatctccagcccaacgtggtccggccttgagagcgagcatgtctcgtataacgcaggctataccaacgttcacgagctgatcccgtggcgcacgatttccggccgccagcagctgtatcaggatcacacctggatgcgcgccttcggtgaaagtctggtggcctatcgtccaccgattgatacccgcagcgtcacccatatgcgcgagatcccgccgaacggcttcccggaaaaagcgcttaacttcctgacgccgcaccagaaatggggcattcactccacctacagcgaaaacctgctgatgcagaccctgtcacgcggggggccaatcgtctggatcagcgaaaccgacgcgcgcgagctggggattgaggacaacgactggatcgaagccttcaacgccaacggcgccctcaccgcccgcgcggtggttagccagcgcgtgccgccgggcatgaccatgatgtaccacgctcaggagcgcattctgaacattccggggtcagaagtgaccggacggcgcggcgggatccacaactcggtcacccgcgtctgtccgaaaccgacccacatgattggcggctacgcgcagctggcgtacagctttaactattacggcaccgtcggctcgaatcgcgacgagttcattatgatccgcaaaatgaaaaacattaactggctggacggcgaaggtcgggatcaggttcaggaggcgaaaaaatga

SEQ ID NO: 524886 - DNA, 1494 bp, Stenotrophomonas maltophilia
  misc_feature (1432)..(1441): n is a, c, g, or t
atgagcaaactgttggaccgcttccgttacttcaaaacaaaaggcgacagtttcgccgatgggcacggccaggtgtaccacaccaaccgcgactgggaggacagctaccgtcagcgctggcagttcgacaagattgtgcgatccacccacggcgttaactgcaccggctcctgtagctggaagatttatgtcaaaaatggcctggtgacatgggaaacccagcagaccgactacccgcgtacccgccccgacctgcctaaccacgaaccgcgcggctgcccgcgtggcgcaagctactcctggtatctctacagcgccaaccgtctcaagtacccgctggtacgccgcaggctgatcgaactctggcgcgaggcgctggcgcagcataccgatccagtgctggcctgggatgccattcagaacgatccacagaaagcgcaaagctacagaaaggcgcgcggtaaaggcgggtttatccgctcaaactggaaagagcttaaccagctgattgctgccgccaacgtctggaccatcaaaaattacggcccggatcgggtggccggtttttcgcctatcccggccatgtcgatggtctcttatgccgccggtacgcgctatctctccctgctcggcggcacctgcctgagcttctatgactggtactgcgatttgcctccggcatcgccgatgacctggggcgagcagaccgacgtgccggaatcggcggactggtacaactccagctatatcattgcctggggctcgaacgtgccgcagacgcgtaccccggacgcccacttctttaccgaagtgcgttacaaaggcaccaagaccgtcgccattacgccggacttctcggaggtggcgaagctcagcgaccagtggctggcccccaaacagggtactgacagtgcccttgccatggcgatggggcatgtgatcctcaaagagttccaccttgataacccgagcgattacttcctcaactattgccgccgctacaccgacatgccgatgctggtcctgctggatgaacaggctgacggtcgcgtggtgccgggccgcatgctgcgcgcgtcggatctggccgacgggctgggtgaaaccaataatccggagtggaaaaccatcgcctttgacgtcgccggaaatctggtggcgccgaacggctctatcggtttccgctggggcgaaaaaggcaaatggaacctggagtcgctggccgcgggacaggagaccgagctgacgctttccctgctcatcacccacgacagtgtggcagacgtggccttcccttacttcgggggcaacgagaacccgcatttccgcagcgtgaagcaggagccggtgctgacgcgccgcgtaccgagtaaaaccctgacgctggccgacggcagccagagacgcgtggtcagcgtgtacgatctctgtnnnnnnnnnntacgatctggtgctcgcaaactacggcctcgatcgcggtctggaagacagtaa

SEQ ID NO: 524887 - DNA, 1386 bp, Stenotrophomonas maltophilia
atgtcacatcaaagcgagaagagtaatcagcatctgttgagtaactggaaaccggaaaacgcgcaattttgggagaataaagggaaacatatcgcacgaagaaacctgtggatttccgtggcgtgtttgttgctcgcattttgtgtctggatgttgtttagcgctattgcggtaaatcttaataaggtcggatttaatttcagcaccgatcagctttttatgctaacggcattaccttctctctccggcgcgatattgcgtgtcccctactcttttatggtgccgatatttggcgggcgttactggaccgtgttaagcaccgttatcctggtcgtaccctgtgtctggcttgggatcgccatccagaataccgccacgccctattggatcttcatcatcatcgcgctgctttgcggttttgccggtgccaacttcgcttccagtatgggaaacatcagcttcttcttcccgaaagccagacagggcagcgcactgggcattaacggcgggctgggtaacctgggcgtgagtgtgatgcagctggttgcgccgctggtgattttcctgccgatgtttaccttcctcggcgtgcacggcgtaccgcaggaggatggctcgacgatgtggctggcgaacgcggcgtggatctgggcgccgctgctgattctggccaccattgcggcgttttttggcatgaatgacatcgccagctcgaaagcgtccattgccagccagcttccggtgcttaagcgctttcatctctggctgctgagcctgctttatctggcaaccttcggctcgtttatcggtttctcggcaggctttgccatgctgtcgaaaacccagtttccggacgttaatatcctccacctcgccttctttggcccactgatcggcgccctggcgcgttcggctggcggaatgatttcggacagactgggcggcgtaagggtgacgctgatcaacttcgtctttatggccatctttagcgccctgattttcctgacgctccccgggtctggttcaggcagctttatcgccttctatctggtctttatgggcctgtttctgaccgcaggcctgggtagcggctcgaccttccagatgatcgcgattatctttcgccaaatcaccctcgaccgcgtgaaaaaacagggcgggagcgatgaacaggcacagcatgaagcggtgaccgaaacggctgcggcgctgggctttatctctgccatcggtgcggtgggcgggttctttattcccaaagcctttggcacctccctggcgatgaccggttccccggtgggcgccatgaaagtcttcctcgtgttttacatcgtctgcgtggtcgtcacctggctggtgtacggccgcaaatcctcacaaaaataa

SEQ ID NO: 524888 - DNA, 576 bp, Stenotrophomonas maltophilia
atgcgttatctgagcaaggacgagcggcgggaagagatcctacaggccgcaatgcgcgtggcgctgaccgaaggattcgctgcgatgaccgtgcgccgaatcgctaccgaagcgggcgttgccaccgggcaggtgcatcaccactttgcgtcggcgggcgagcttaaatcgctggcgtttgtcaggctgattcgcgatttgctggatgctgaaatcgttggcgaaaacgcaggctggcgcgagcgcctgcatgccatgctcggcagcgatgacggtgggtttgagccctacattcggctgtggcgggaggcgcaaattctcgccagccgggatagcgatatcaaaggcgcctacgttttgaccatggagatgtggcaccaggaaacggtcgcaattatccgcgccggggcggaggccaacgcctttacgcttgctgatcagccggaaaatatcgcctggcgtttaattggtctggtatgtggcctggatggcatatacgtcttgaatatgcctgaaatggacgacgcggcatttaataagcatctggataaacttatctccctcgaattgttttaa

SEQ ID NO: 524889 - DNA, 1269 bp, Stenotrophomonas maltophilia
atgatcggcagcgtgctgtttggcctgtcatcgttagcggcggcttttgcgccgtccgcgggctggctgattgccgcccgcgcgtcgctggcgattggcgcggcgatgatcattccggctacgcttgcagggatccgcacgctgtttattgacgtgcggcaccgtaacatcgcccttggcgtctgggctgccgttgggtcgggcggcgcggcgtttgggccgctgattggcggcatgctgctggagcacttttactggggttcggtcttcctgattaacgtgccgatcgtgctgatcgtggtttcgcttgctgcgcgctttgtgcctgctcagcagggtcggcccgagcagccgctcaatatcagccatgccattatgctgattgtcgccattttactgctggtctacagcgccaaaaccgccctgaaaggggtgctgtcgccgtggatggtggcctctacgctgcttaccggggcggtgatgctgtttattttcgtccgtatccagctgcgcgcgagcgtgccaatgatcgacatgcgtctgttttgccatcgcattattttaagcggcgtggtcatggcgatgaccgccatgattgcgctggtgggctttgaactgctgatggcgcaggagttgcagttcgtgcatggttttacgccgtttgaagcagggatatttatgctgccggtgatggtggcgagcggatttagcgggccgatcgcgggtgtgctggtcgggcgtctggggctgcgcattgtcgcggccggaggcatggggctaagcgcgatcagttttatcggcctgtcgacgctcgatttcagcacccaacagtggcaggcgtggagcctgatggtgctgctgggcttcagtgccgccagcgcactgctggcatcgacgtcagcgatcatggctgccgcgcccaaagagaaagcggccgcggcaggcgcgatcgaaaccatgtcctacgagctgggcgctggtctcgggatcgccattttcggtctgttgttaacccgcagcttttcggcgtcaattgtactgccgcaggggctgagcgcgtcgctgaccgataaagcctcgtcgtccatcggtgaagcgatgaaggttgcgcaggaactgacgccgtcactggccgagccggtgatgacggcggcgaaaaccgcgttcatcacctcgcacagcgtggccctgggcagtgcgggtgccatgctgatgattctggcgatcgggatctggtttagtctggcgaaggtcggagggcagcagtaa

SEQ ID NO: 524890 - DNA, 1077 bp, Stenotrophomonas maltophilia
atgaaacttaaattagttgcagtggcagtgacttccatgttggcggctggcgttgttaacgcggctgaagtttttaacaaagacggtaacaaactggatctgtacggcaaagttactggtctgcactatttttctgatgatgctggtagcgacggcgacaaaacatacgttcgtctgggcttcaaaggtgaaactcagatcaacgatcagctgactggctacggtcagtgggaatacaatttccagggtaacaactctgaaggcggcgatgcgcagaacggcaacaaaacccgtctggcattcgctggtctgaaattcgatgaattcggttccttcgactacggtcgtaactacggtgttgcttatgacatcggcgcatggactgacgttctgccagagttcggtggcgatacctggacgcagactgacggcttcatgaccggtcgtaccactggcgttgccacctaccgtaacaccgacttctttggtctggttgacggcctgaacgtggctgcccagtaccagggtaaaaacgaccgttcagagatcaccgaatccaacggtgacggctggggtctgtcttctacctatgaattcgacggcttcggtgtgggtgcgacctacgcgaaatctgaccgtactgaccgtcaggttcgtgctgcaagcaacctgaacgccggtggcgaaaacgcagaagtctgggctgctggcctgaagtacgatgcgaacaacatctacctggcaaccacctactctgaaacccgcaacatgacggcgttcggtagcggtcacgttgccaacaaagcacagaacttcgaagttgtggctcagtaccagtttgacttcggtctgcgtccatccatcgcttacctgaaatccaaaggtaaagacatcggttcttatggcgaccaggacctggttgaatacgttgacgttggcgcgagctactacttcaacaaaaacatgtccacctacgttgattacaaaatcaacctcgtggatgacagccagttcaccaaagatgccaaagtggctaccgacaacatcgtggctgtaggtctgacctaccagttctaa

SEQ ID NO: 524891 - DNA, 1401 bp, Stenotrophomonas maltophilia
atgagcgttgtgcctgtagccgacgtactccagggccgtgtcgccgttgaccaggaggtcaccgtgcgcggatgggtgcgtactcgccgagattctaaagctggcatctccttcctcgccgtctatgacggttcctgctttgatcctgtacaggccgtcattaataattctctgcccaattacaatgatgacgttctccacctgacaaccggctgttccgtgatcgtcaccggtgttgtggtggcctctccgggccagggtcagagctacgaaattcaggcgacctcggtggaagtgaccggctgggttgaagatccagacacctatccgatggctgcaaagcgtcacagcatcgaatatctgcgtgaagttgcgcacctgcgtccgcgcaccaacctgattggtgcagtggcgcgcgtgcgtcatacgctggcgcaggcgctgcatcgcttctttgacgagcagggttacttctgggtgtctactccgctgatcacggcatccgataccgaaggcgcaggtgaaatgttccgcgtttcaacgctggatatggaaaacctgccacgtacgccggaaggaaaagtcgattacgacaaagacttctttggtaaagaagccttcctgacggtttccggccagctcaacggcgaaacctacgcctgtgcgctgtctaagatctacaccttcggcccaaccttccgtgcggaaaactctaacaccagccgtcacctggcggaattctggatgctggagccggaagtcgcctttgccgatctgaatgacgtggcaggcctggcagaagcgatgctgaaatacgtgttcaaagcggttctcgaagagcgcgcagacgacatgaaattcttcgctgagcgtgtcgataacgacgccatcgcccgtcttgagcgcttcgtctccgcagacttcgcgcaggtggattacaccgacgcggtcgctatcctggaaaaatgcggcgagaaattcgaaaacccggtttactggggcgtggatctctcctccgagcatgaacgttatctggcagagaagcacttcaaagcaccggttgtggtgaaaaactatccgaaagacattaaggcgttctatatgcgccttaacgaagatggtaaaaccgttgccgcgatggatgttctggcgccgggcatcggtgagatcatcggtggctcccagcgtgaagagcgcctggatgtactggacgcgcgtatgcaggagatgggcctgaacccggcggactacagctggtatcgcgatctccgtcgttacggcaccgttccgcactctggctttggcctgggcttcgaacgtctgattgcttacgtaacaggtgttcagaacgtacgtgatgtgattccgttcccacgtacaccgcgtaacgcaagtttctaa

SEQ ID NO: 524892 - DNA, 1203 bp, Stenotrophomonas maltophilia
atgactcaattcgcttctccggttctgcatacgttgctggataccgacgcgtacaagctgcatatgcagcaagccgtgtttcaccactatcatgatgttcatgttgcggcggaatttcgctgccggggtgacgacttgctgggtatctacgcagattccattcgtgaacaggtcgatgccatgcagcatctggcgctcaccgatgacgaatatcagtggctttcaggcctgcctttctttaaagcggactatctgaactggctgcgtgagttccgctataagccggaacaggtcaccgtcaccaatgataacggcaagctggacattcgtctgaccggcccgtggcgcgaagtgatcatgtgggaagtgccgcttctggccgtgatcagcgagctggcccaccgttatcgctcccctgaaactggtgtaacgcaggcggttgccgctctggagaataaactcgttgagttttccagactgacagaagggctggatatgtcccgcttccgtctgatggactttggcacgcgccgccgcttctctcgcgaggttcaggaagccattgtcagacgtctgcaacaggagccgtggttcgttggcaccagtaactacgatctggcgcgtcgccttgatttaacgccgatgggtacccaggcgcacgaatggttccaggcgcaccagcagatcagccctgaccttgccaacagccagcgcgccgccctcgccgcgtggcttgaggaatacccggatcggctgggtattgcccttaccgactgcattaccatggacgcgttcctgcgcgactttggctctgagtttgccgaacgctaccagggtttgcgccatgattccggggacccggttgagtggggtgagaaagccatcgcccattacgaaaaactgggtatcgatcccatgagtaaggtgctggtcttctccgataaccttgacctggcgaaagccgtcgacctttatcgccacttctcatcgcgggtgaacctgagtttcgggattggtacgcgcttaacctgtgatatcccccaggtgaaaccgctgaacatcgtcataaagctagtggaatgtaacggtaagccggtcgcgaagctctccgacagccctggcaaaaccatctgccatgacaaagcgtttgtccgcgcattacgtaaagccttcgatctgcctcaggttaaaaaagccagttaa

SEQ ID NO: 524893 - DNA, 2613 bp, Stenotrophomonas maltophilia
atgacacaacagccacaagctaaataccgccacgactaccgtgcgccggattacctgataagcgatatcgatctgaccttcgacctggatgccacaaaaaccgtcgtgacggcggtaagccaggtgacgcgccagagcgcgacagccgtgccgctgcgtctggatggtgaagacctgacgctggtttccctgcatattaatgatgaagcctggtcagactataaagaagaaggcaaccagctggtcatcgacaacctgccggaacgctttaccctgcgcatcgtgaatgaaatcagccctgccgccaataccgcgctggaagggctttaccagtcaggcgtagccctgtgcacccaatgtgaagccgaagggttccgccacattacctggtatctggatcgcccggacgtcctggcgcgctttaccaccaaaattattgccgacaaaacgctgtacccgtacctgctttccaacggcaaccggattggtgaaggggaactggagaatggccgtcactgggtacagtggcaggatccgttccctaaaccctgctacctgtttgcgctggtggcgggcgatttcgatgttctgcgcgacacctttaaaacgcgctctggccgtgaagtcgcgctggagctgttcgtggaccgtggcaaccttgaccgcgccccgtgggcaatgacctccctcatcaactccatgaagtgggatgaaacgcgctttggcctcgaatatgacctcgacatctatatgatcgttgctgtcgatttcttcaatatgggcgcgatggagaataaaggtcttaacatcttcaactccaaatacgtgctggcgcgtaccgataccgcaacggataaagattacctcgatatcgaacgcgttatcggccacgaatatttccataactggaccgggaaccgcgtcacctgccgcgactggttccagctgagcctgaaagagggcttaaccgtcttccgcgatcaggagttcagctccgatctgggatcgcgggcggtaaaccgcatcaacaacgtgcgcaccatgcgtggtctgcaatttgcagaagatgccagcccaatggcccatccgatccgcccggataaagtcattgagatgaataacttctacaccctgacggtgtacgaaaaaggcgctgaaattatccgcatgatccacaccctgctgggcgaagcgaatttccagaaagggatgcagctttacttcgagcgtcatgacggcagtgcggccacctgcgacgatttcgtccaggcgatggaagacgcctctaacgtggatctgtctcatttccgccgctggtacagccaggccggtacgccgattgtgacggtcaaagacgactacaacccggaaactgagcagtacacgctgaccatcagccagcgcacaccgccaacggcggagcaggaagagaaacatccgctgcacattccgttcagcgttgagctgtacgacaacgaaggcaacgtgatcccgttacagaagggcggtcacccggtgcataacgtgctgaacgtgacccaggcagagcagacctttatcttcgataacgtctatttccagcctgttcctgccctgctgtgcgagttctccgcgccggtgaaactcgaatacaagtggagcgatcagcagctgacgttcctgatgcgtcacgcgcgcaacgatttctcgcgctgggatgcggcacaaagcctgctggcaacgtacatcaagctgaacgtgaaccgttaccagcagggccagccgctgacgctgccggttcatgtggcagacgccttccgtgccatcctgctggatgagaatattgacccggcgctggcggctgaaattttgacgctgccgtctgcgactgaaatcgccgagctgtttgacatcattgaccccattgcgatcgtcgccgtgcgtgaagcgctgacccgcacgctggcgaccgaactggcagatgaattcctcgcaatttacaacgccaacaagctggacgcgtatcgggtggaacatgcggatatcggtaaacgttccctgcgcaatacctgcctgcgctatctggcatttggtgaggcagagctggcgaacacgctggtcagcaagcagtaccatgaggccgataacatgacggatgcgctggccgcactggctgcaagcgttgccgccgagctgccgtgccgcgatgcgcttatgcaggagtacgacgacaggtggcatcaggatggtctggtgatggacaagtggttcattcttcaggccaccagcccggcagtcgatgtactcagcaaggtccgcagcctgctgaagcaccgttcgttcaccatgagcaacccgaaccgcgtccgctccctgattggcgcgtttgccagcagcaacccggccgcgttccatgctgaagacggcagcggttatcagttcatggttgaaatgctgaccgagctgaacagccgtaacccgcaggtggcgtctcgtctgattgagccgctgatccgcctgaaacgctacgatgcgcagcgtcaggcgaaaatgcgtgccgcacttgagcagctgaaagggctggaaaatttgtctggcgatctgtacgagaagattacaaaggcgctggcctga

SEQ ID NO: 524894 - DNA, 771 bp, Stenotrophomonas maltophilia
atgaatactgcacgactgaaccagggaacaccgttactgctgaacggcgtgaccaaacgctacggcgacaacaccattctgaatgcactggatctgcatattcctgccggacagtttgtggccgttgttggccgcagcggtggcggcaagagtaccctgctgcgtcttttagccgggctggaggcgccaaacagtggtgacattctggcaggcaccacgccgctgtccacgattcaggatgatacgcgcatgatgtttcaggacgcgcgtctgctgccgtggaaaacggtgatggataacgtcgggctgggcctgaagggcagctggcgggagcacgcccggcaggcactcgccgccgtcgggctggagaatcgtgcgggagagtggcctgcggccctgtcgggtggacaaaagcagcgcgtggccctggcacgcgcgctgattcatcgtcccggcctgctgctgcttgatgaaccgctcggcgcgcttgatgccctgacgcggatcgagatgcaggatctgattgaaaccctctggcagacgcacggctttacggtgctgctggtgacgcatgacgtaagcgaagctgtggcaatggcagacagggtgctgttaatagaagagggtaaaattggtctggatctgacggtggatattccacgtcctcgccgggtgggatcggccagactggcggagctggaggcggaagtgctggatagagtgatgaaacgtggagaagcggagattcagcggataaaggctaatgcctga

SEQ ID NO: 524895 - DNA, 792 bp, Stenotrophomonas maltophilia
atgtcttcaaccgcacaaaaatggctgctgcgcgccgcaccgtggtttctgcccgtcggcattgtcctcgtctggcaactggcgtcttcaactggctggctgtcgagccgtattttgccctctccggagggcgttgtggaagcgttctggtcgctaagcgccagcggtgagctgtggcaacatcttgccatcagctcctggcgcgcggtaatcggcttttcgattggcgggagcatcggcctgacgctggggctgatcagcggcctgtcccgctggggtgagcggctgctggatacctccgttcaaatgctgcgtaacgtgccgcatctggcgcttattccgctggttatcctgtggtttggcattgatgagagcgccaaaattttcctcgtggcgctgggaacattattcccgatttatatcaatacctggcatgggatccgcaatatcgatcgcggtctggttgagatggcccgcagctatggcctgtcaggttttgccctgtttacccatgtgatcctgccgggcgccctgccctccattatggttggcgtgcgttttgcgctcggcctgatgtggctaaccctgattgtggcggaaaccatttcggctaactccggcattggttatctggcgatgaacgcccgcgagttcctgcaaacggacgtggtggtggttgccattatcctttatgccctgcttggcaaacttgcggacgtcagcgcccagtggctggaacgtagctggctgcgctggaacccggcctacaccgctcaggaggcgaaagcatga

SEQ ID NO: 524896 - DNA, 1146 bp, Stenotrophomonas maltophilia
atgagtctgaatcttttctggtttttacccacccacggtgatggacactatcttggcacagaagaaggcgcccgcccggtcgatcacggctatctacagcagatcgcccaggcggcagaccgcatcggttttaccggggtgctgatcccgacgggccgttcatgtgaggatgcgtggctggttgccgcgtcgatgatccccgtcaccaagcgcctgaaattcctggtagccttgcgcccaagcgtggtgtcgcccaccgtcgcggcacgccaggcggcaacgctggacaggctctccaacggccgcgcgctgttcaatctggtgacgggcagcgatccgcaggagctggcgggcgatggtgtttttctcgatcataccgagcgctatgaagcctccgcagagttcacccgcgtctggcgacgtctgctggaaggggaaaccgtcaccttcgaaggaaaacatatccacgttcgcgatgcgcaactctacttcccgccggtacaacagtcgcgccctcccctttatttcggcggatcgtcggacgtggcgcaggagctggcggctgagcaggtcgatctctatctgacctggggcgagccaccggagctggttaaagagaaaattgctcaggtacgcgccaaagccgcagaacatggccgtacggtgcgcttcggcattcgcctgcacgtgatcgtacgcgaaaccaacgacgaggcctggcaagctgccgaccgtctgatcgctcatctggacgacgacactatcgccaaagcacaggcggcgtttgccaaaaccgactccgtgggccaacaccgaatggcctccctgcacaacggcaagcgtgaaaatcttgagatcagcccgaacctgtgggccggggtgggtctggtgcgcggcggcgccggtacggcgctggtcggcgatggtccaaccgtagcggcacgcattaatgaatacgcggcgctggggatcgacagctttatcctgtctggctacccgcatctggaggaggcctacaaggtgggtgaactgctcttcccgcacctggatgtcgctatcccggaaattccgcagccacgtcagcttcagttgcagggcgaagccgtggcgaatgcgtttatcccgagaaaagtcgcgcaaagttaa

SEQ ID NO: 524897 - DNA, 963 bp, Stenotrophomonas maltophilia
atgtttaaaacagttacccgtatcgggctggcaggtctgctggcagtggcatcgctggctcaggcggcggagaaaacgccggagagcctgcgtatcggttatcagaaaggcagcgtcagcatggtgctggcgaaaagccatgcgctgctggagaaacgtttcccgcagaccaaattctcatgggtcgagttccctgccggaccgcagatgctggaggcgctgaacgtcgggagtattgatttaggcagcaccggcgatatcccgccgatctttgcccaggcggccggggcggatctggtttacgttggcgttgaacccgccaagccgaaggcagaggttattttggtgccggaaaacagcgagatcaaaagcgtcgccgatctcaaaggtcataaggttgctttccagaaaggttccagctcgcacaacctgctgctgcgcgcgttgcaggaggccggccttaaattcaccgatatccagcccgtttacctgacgcctgccgatgcgcgcgcggcgtttcagcaaaaaaatgttgatgcctgggctatctgggatccgtactactccgccgcactgttgcagggcggtatgcgggtgctgaaagacggcaccaccctgaaacaaaccggttcgttctacctggcggcacgtccttacgctgaaaaaaatggcgcatttattcagcaggtgctggataccttctctcaggccgatgcgctgacccaaagccagcgtcagcagagcatcacgctgctggcaaaaaccatgggcctgcctgaaccggtgatcgccacttatcttgaccaccgtcctcccaccaccatagcaccggttgacgcccacgttgccgctctccagcagcaaacggcagaccttttttatcaaaaccgcctggttccaaagcaggtgaatattcgcgaacgcatctggcaacccgctggcattgaaggaaaaaaatcatga

SEQ ID NO: 524898 - DNA, 576 bp, Stenotrophomonas maltophilia
atgcgcgtcattaccctggccggaagcccccgcttcccctctcgatccagcgcactgctggaatacgctcgcgaaaagcttaatgctctggatgtcgaagtgtgtcactggaatttgcacaatttcgcgcctgaagatctgctctacgcccgtttcgacagcccggcgctgaaaaccctgatcgaacaacttaagcgtgctgacgggttggtcgtcgcgacaccaatttataaagcctctttttccggtgcactgaaaacgctgctcgatctgctgcccgaacgcgcgctggacggtaaggtcgtcctgccgctggccacaggcggtacggtagcccatttactggcggtggattatgccctcaagccagttctgaacgcgctgaaagcgcaggagatcctgcatggcgtcttcgctgacgactcacaggtaatcgactaccagcataaaccgcatttcacgccgaatctgcaaacccgcctcgacagcgcgcttgaaaccttctggcacgcccttaatcgtcgggatcgccacgcggcggcatttcatcaatcacaaggagtggcgcatgtttaa

SEQ ID NO: 524899 - DNA, 1011 bp, Stenotrophomonas maltophilia
atgtactaccccttcgttcgtaaagcccttttccagctcgatcctgagcgcgctcatgaatttacatttcagcagttacgtcgtattacaggaacgcctctggccgcgctggtgcgtcaaaacgtgccggaaaaacctgtccaatgcatgggcctgacgttcaaaaatccactgggccttgcagccggtctggacaaaaatggcgaatgcattgatgcactcggtgcgatgggctttggctcgatcgaaatcgggacggtgacgccgcgtccgcagccgggaaatgacaagccacgtctgttccgcctggttgaagccgaggggctgatcaaccgcatgggctttaataaccttggcgtcgatcatctggttgagaacgttaagaaagcccattttgatggtgtgctgggtattaatattggcaaaaataaagacacgccagtcgagcagggtaaagatgactatctgatttgtatggaaaaagtctatgcttatgccggttatatcgcggtgaatatatcctcgcctaacaccccagggctgcgttcattacaatatggcgaagcgcttgacgatcttcttagcgccattaaaaataaacaaacggcactacaggcgatccaccataaatatgttccggtcgcggttaagatcgccccggatctttcggcagaggaattgatccaggttgccgacagtttagttcgccataatattgatggtgtgattgcgaccaatacaacgctcgatcgctccctcgtccagggaatgaaaaactgtgacgaagcgggtggattaagtggccgtccggtacaattaaaaagcaccgaaattattcgcgcactctctgcggaattaaaaggccagctgccgattattggcgtgggtggcattgactccgtcatcgctgcacgtgagaagatggcggcaggggcttcactggtgcaaatttattccggctttatttttaaagggccgccattgattaaagaaattgtcacgcatatctaa

SEQ ID NO: 524900 - DNA, 543 bp, Stenotrophomonas maltophilia
atgcgaattaaacctgacgataactggcgctggtatttttgtgacgagcatgaccgtatgatgctcgacttagccaatggcatgttgtttcgctctcgttttgcgcgccgaatgttaacgccagacgcgtttgctccctcaggcttttgcgttgacgacgctgcactctatttctcttttgaagaaaaatgccgcgacttcaatctctccaaagaacagcgcgctgaactggtactaaatgcgctggtggcgatccgtttcctgaaaccacaaatgccgaaaagctggcatttcctcgcgcacggtatgagctggaccccggctatcggcgatgcggccagcgtcaatctgagcgataccgaagaagaggtgaatctgctggtggttgaacccggtgaaaacgctgcgctctgtttgctggcccaacccggcttgaccattgccgggcgagtcatgcagttaggtgatgccatcaaagtgatgaatgacaggctgaagcctcagctgcgcgtcgattccttcagcctcgaacaggcggtttaa

SEQ ID NO: 524901 - DNA, 906 bp, Stenotrophomonas maltophilia
gtggcgacgttatccaggctttttattcatccggtgaaatccatgcgtggtatcggcgtgacgcacgcgctggccgatatgagcggattcgccttcgatcgtatttttatgatcaccgagcctgacggtacgttcatcaccgcacgtcagttcccgcagatggttcgctttaccccttccccgcttcatgacggattgcatttgaccgcgccagacggttcaagcgtcgtgatccgctttgctgattttgcgccggttgaagcgccaacggaagtgtggggcaatcattttaccgcgcgtatcgcgccggataacattaaccagtggctgagcggctttttctcacgtgacgttcagctgcgctgggttgggcctgcgctgactcgtcgcgtgaaacgccacgacgcggttcccctctcctttgcggatggttttcccttcctgctgaccagcgaggcctcgctgcgtgatttacaaacccgttgcaaagccagcgtgcagatggagcagtttcgcccgaatctggtggtgaccggagcggatgcctgggatgaagatacctggaaagtgatccgcatcggcagcgttatctttgatgtcgtgaagccgtgcagccgctgtatttttaccaccgtcagcccggagaaaggccagaaacacccttctggcgaaccgctgaaaacctgcctgcaagagtgtacggcgcaggccaggaagaagaaatggttgacgttgtcaccaacgtcgcttccgcggtggatattcactgggaaggcaaagttattcgtggtaacaatcagcaggtgctactggaacagctggagcaggcgggtatccgcgtaccttattcctgtcgcgcggggatttgcggatgctgtcgcattaaactggtcgatggtgaagtga

SEQ ID NO: 524902 - DNA, 2127 bp, Stenotrophomonas maltophilia
atgagtaaaagtgacgatatgaattctctgtttgccagtacggcccgtgggctggaagagctgttaaaaactgaactggaaaccctgggcgcgaaagagtgccaggtggttcagggtggtgtccattttgagggcgacacgcggcttatttaccagagcctgatgtggagccgtctggcgtcgcgcatcatgctgccgatgaaagagtgcaaggtctacagcgatcttgatctctacaccggtgtacagatgatcgactggacagagatcttcaccccggacgccacctttgcggtgcatttcaacggcgtcaacgatgagatccgcaacagccagtacggtgccctgcgcgtcaaagacgccattgtggactgcttcacgcgtcgtaataaagaacgtccgaacgttgatcgtgaaaacccggatctgcgtatcaacgtctggctgaacggcgacactgccagcatttccctggatctgagcggcgcaggcctgcatctgcgcggctatcgcgatcgcaccgggatggcgccgatcaaagaaacgctggctgccgctatcgtgatgcgctccggatggcagccaggtacgccgctgctcgatccgatgtgcggttccggtacgctgctgattgaagccgcgatgctggccaccgaccgcgcgccagggctgcatcgtggacagtggggcttcaaaggctgggcgcagcacgatgaagccctctggaaagaggtcaaagacgacgcgcagacccgtgcccgtaaagggctggcggagtacacctctcacttttacggttcggacaacgacccacgggtgattgaacgcgcgcgcagcaacgcccgtcgtgccggtatcggtgagctggtgaccttcgacgtcaaagatgtggcgaacctgaccaatccgctgccaaaaggcccgtacggtacggtgatcagcaacccgccgtatggtgagcgtcttggcagcgagccagcgctgattgcgctacacagcctgctgggccgcaacatgaaagcgcatttcggcggctggaacctctccctgtttagcgcctcgccggagctgctgagctgcctgcaattacgtgccgatcgccagttcaaggcgaaaaacggcccgctggactgcgtgcagaaaaactaccatctggcagagatagcagcggacagcaaaccgtctggcgtggcggaagattatgccaaccgtctgcgcaaaaacctgaagaaatttgagaagtgggcgaagcaggaaggcatcgaatgttatcgcctttacgacgctgacctgccggaatacaacgtggcggttgaccgctatgcagactgggtggtggttcaggaatacgccccgccgaaaaccattgatgcgcaaaaagcgcgtcagcgtatgctggatgtgattgcggccaccatcgccgtactcggcatttcgccaaacaagctggtgctgaaaacccgtgagcgtcagaaaggcaaaaaccagtatcagaagatgggcgagaagggcgacttcatcgaagtgggcgaatataacgcgcgcctgtgggttaacctgaccgattaccttgataccggtctgttcctcgatcaccgcatcgcccgccgcatgctgggacagatgagtaagggcaaagacttcctgaacctgttctcctataccggcagcgccagcgttcatgcagggcttggcggggcgcgtagcaccaccacggtcgatatgtcccgtacttatctggagtgggcagagcgcaacctgcgtcttaacggcttaaccggtcgtcagcatcgcctgttacaggccgacgtgctgggctggctgcgcgataccgatgagcagtttgaccttatctttatcgatccgccgaccttctctaactccaagcgtatggaggatagctttgacgttcaacgcgatcacctgcgcctgatgaccgacctgaagcgtctgctgcgtaaaggcggcaccattatgttctcgaataacaagcgcggattccgcatggatcacgacggcctggccgaactgggacttaaagcacaagaaatcagccaaaaaacgctgtctcaggactttgcccgtaaccgtcaaatccacaactgctggctgatctccgcggtctga

SEQ ID NO: 524903 - DNA, 1908 bp, Stenotrophomonas maltophilia
atgtctttaattagtatgcacggcgcgtggctctctttcagcgactcaccgcttctcgataatgcagagctgcatatcgaagataacgagcgcgtctgtctggtcggccgtaacggcgcaggtaaatcgacgctgatgaaaatcctcaaccgagagcaggggctggacgacggccgtattgtttacgagcaggatctggtcgtctctcgtctgcaacaggatccgccgcgtaacgttaccggcagcgtgtacgattttgtggctgaaggaatttcagagcaggcggaatacctcaagcgctaccacgagatttcgcatctggtcatgaccgacccgagcgacaaaaatctcaacgagctggcaaaagtgcaggagatgctcgatcaccacggcctgtggcagctggaaaaccgcattaacgaagtgctggctcagcttggcctggaagcggatatggagctgtcggcgctctccggcggctggctgcgtaaagccgcgctgggccgtgccctggtgagcgggcccagggtactgctgctggacgaaccaacgaaccacctggatatcgaagcaattgactggctggaagggttcctgaaaactttcaatggcaccattatcttcatctcccacgaccgttcgttcatccgcaacatggccacgcgcattgtcgacctcgaccgcggcaagctggtgacctatccgggcgattacgatacctatctgctggagaaagaagagaacctgcgcgtggaagagctgcaaaacgccgagttcgaccgcaagctggcgcaggaagaggtatggatccgtcagggcatcaaggcgcgtcgtacccgtaatgaaggccgcgttcgcgccctgaaggcgatgcgccgcgaacgtagcgaacgccgtgaagtcatgggtagcgccaaaatgcaggtggaagaggcgtcccgctcgggcaagattgtcttcgaaatggagaacgtgaattattcggttgacggcaaagtgctggtgaacgatttctccgcacaggttcagcgtggcgacaaaattgcgcttattggtccaaacggctgcggcaaaaccacgctgttgaaactgatgctgggccagttgcaggcagacagcggtcgtattcactgtggtaccaagctggaagtagcgtactttgaccagcatcgcgcagagctggatccggaccgtacggtgatggacaacctcgcagagggtaaacaggaggtgatggttaacggcaagccgcgtcacgtgctgggctaccttcaggacttcctgttccacccaaaacgcgccctgacgcctgtgcgcgcgctgtccggcggtgagcgtaaccgtcttttactggcgcgcctgttcctgaaacccagtaacttactgattctcgatgaaccgacgaacgatctggatgtcgaaacgctggaactgctggaagagttgattgatggctatcagggaaccgtgatgctggtcagccacgatcgtcaatttgtcgataacaccgtgaccgagtgctggatcttcgaaggcgaaggacgcatcggtcaatatgtgggcggctatcatgacgcgcgtggacagcaatcgcagtcgctggcgcaaaaacaggcgaagaccaaaaatgtcgctgaacctgttgttgtgaaagcagaaactgtcaaaaagtctcctgctaaaatgagctataacttgcagcgcgagctggaagggctgccgcagcgtctggaagagctggaagcggcactggaagcactgcaaattcaggtcgctgatgcgtcattctttacgcagcctcacgactatactcagaaagtattggctgaactctcccaggccgagcaggtgctggaagaggcatttgagcgctgggagtaccttgagtctctgaaaaacggcgcataa

SEQ ID NO: 524904 - DNA, 1254 bp, Stenotrophomonas maltophilia
atgtgtgaccagcaccatgccgatcggcatattttatgctcgcaatgcgatatgctcgtggcgttgccagagcttggtcacggacataaggctgcctgcccgcgctgcggagctacgctgacgaccgagtgggacgcgccaaggcagcgtcctacggcttacgcgctggcagccctgttcatgttactgctctccaatctcttccctttcatctctatgaaagtgggtgggatggtaagccaggtggagttactggaaattccaggcgtaatgttctcggaagattacgccagccttggcaccttctttcttctgttcgtgcagatagtcccggctttttgcctggtcgtcattctgctactggtcaatcgcgtcaggatgcccaccgcccttaaaatcaaactcgcgcggatcctgttccagctgaaaagctgggggatggcggaaatttttctggcgggtatcctggtcagcttcgtgaagctgatggcctacggcgatgtggggattggcagtagctttattccgtggtgtctgtattgcgtgctgcaactgcgcgctttccagtgcgtggaccgacgctggacctgggacgatattgccccggcaccgacgctctcgcagacggtaaaggtgggcgtaccgggtatccgtcaggggctgcgctcctgctcctgctgcaccgccgtgctgcccgcggatgtcgaggtgtgtccccgctgtgaaacaaaaggtcacgtccgacgcaaaaatagcctgcaatggaccatggcgctgctggtgacctctgtcatgctttatctgcccgccaatattttgccgatcatgatcaccgatctgctcggcgacagaatgccctcgaccatccttgccggggtgattttgctgtggagcgaagggtcataccctgttgcaggcgtcatatttctcgccagcattatggttccgaccttaaagatgattgccattgcctggctttgctgggatgcaaaagggcacggtaagcgtgacagtgagcgcatgcatctgatttatgaggtcgtggaatttgttggccgctggtcgatgattgacgtgttcgtgattgcggttctctcagcgctggtgcgtatgggtgggctgatgagtatttatcccgctatgggagcgctgatgtttgctttggtcgtcattatgaccatgtttgcggccatgaccttcgaccctcgtttatcgtgggatcgtgagcccgattcaagccatgaggaagagtaa

SEQ ID NO: 524905 - DNA, 1641 bp, Stenotrophomonas maltophilia
atggaaaataagagtggagaggctaaagtgcagaaggtcagaaactggtcgccggtgtggattttccccatcgtgaccgcgctgatcggtgcatggatcctgttttatcattacagccatcagggaccggaagtcacgctaattaccaccaatgcagagggaattgagggcggaaaaaccaccatcaagagccgcagcgtggatgtgggtgtcgtggaaagcgcgaccctgacggatgatttaacccatgttgaaattaaggcccgcctgaatgctggcatggaaaaactgctccatgaagattccgttttttgggtggtgaaaccgcaggtcggaagagaagggatcagcggcttagggacgctattgtcaggggcttacattgaactccagcccggcaataaaggcgcccagccagcaaactatcagttgctggattcaccgccgcttgcgccaccggatgcaaaagggatccgcgtcattctggacagcaaaaaagcgggccagctctcgccgggcgatccggtgctgttccgtgggtatcgtgtcggttcggttgaaacgagcaccttcgatccgcaaaaacggaccatcagctatcagctatttatcaatgcgcctaatgaccgactggtgaccagtaacgttcgtttctggaaagacagtgggatcgctgtggatctcacctctgcggggatgcgcgttgagatgggttcactcaccacgctgtttggtgggggcgtcagttttgacgtgccggaaggtatagatctgggacaaccggtggcggaaaaaaccgccttcagattgtttgacgatcaaaaaagcattcaggatgcgctctataccgatcacatcgattatctgatgttctttaaggactctgtacgcggcttgcagccaggagcgccagttgagttccgcggtatccgtctgggtacagtagggcaagtgccttactttgttccgggactcaagcaaatgcttgatgatgattatcgtattccggtgctgatacgcattgagcctgagcgtttaattaaccagattggtgaggatcaggatattggggagcatatcagcgacctgatgaatcgcggtctgcgtggcttgctgaaaaccggcaacctggtgacaggggcgttgtatgtcgatatggacttctatccaaaagcgccacctatgacgggagtccgtgaatttggcggctacaaaatcattcctacggtcagcagtggcctggcgcagatccaacagcgtctgatggaaacgctggataagatcaacaatctgccgctgaatccaatgcttgaggctgcgacgggatcactgcatcagagccaggcgacgatgcaacgtctgcaaaccaccctggataatatcaacaagatcacggccaaccagtccatgcagcagctgccgcaggatatgcagaaaacgttgcgtgaactgaatcgcagcatgcagggcttccagccgggctcagcggcctacaacaagatggtggcggatatgcaacgtcttgatcaggttttacgcgagctacagcccgttctgaaaacgctcaatgaaaagagcaacgcgctggtgtttgaagcgaaagataaaaaggatcctgagcctaagagggcgaaacaatga

SEQ ID NO: 524906 - DNA, 567 bp, Stenotrophomonas maltophilia
atgaaaaaatggctaatcatcgcaggcgcactggtattaacggcctgtagctctggaagcgataacaaaagctactaccagctgccgttaaacgcgcagtcgggggcgcagagcagcgcctcgcagggcagccgtctgctgtgggttgagcaggttgccgtgccagattacctggcgggcaacggggtggtctaccagaccagcgatgtgcagtatgtaatcgccaacaataacctgtgggccagcccgctggatcagcagctacgcaatacgctggtggcgaatctgagcagccagctccccggttgggtcgttgcctcgcagcctctgggaagcgatcaggacactctgaatgttaacgtgacgggattccatggccgctatgatggtgccgttgttatcagcggggagtggctgctgaatcaccagggtcagctgattaagcgtcctttccatcttgaactcaagcagcagaaagatggctatgacgaaatggtgaaagtacttgcgcagggatgggcacaggagtcggctactatagcaagagagatttcccgcctgccataa

SEQ ID NO: 524907 - DNA, 519 bp, Stenotrophomonas maltophilia
atggtagataaacgcgaatcctatactaaagaagaccttcttgcctctggtcgcggtgaactgtttggcgcgaaaggcccgcagttaccagccccaaatatgctgatgatggaccgtgtcgtgaaaatgaccgaaaccggcggcaactttgataagggttacgtagaagcagaactcgatatcaacccggacctgtggttcttcggttgccactttattggcgatccggtaatgcctggctgcctgggcctcgatgccatgtggcagctggttggcttctatctgggctggcttggcggtgaaggcaaaggccgtgcgctgggcgtaggcgaagtgaaattcaccggtcaggttctgcctaccgcgaagaaagtcacctaccgtatccatttcaaacgcatcgttaaccgccgtctgattatgggcctggcggacggtgaagtgttggttgatggtcgtctgatctataccgcgaacgacctgaaagtgggtctgttccaggatacctccgctttctaa

SEQ ID NO: 524908 - DNA, 1761 bp, Stenotrophomonas maltophilia
ttgaccattacgaaacttgcatggcgtgacctggttccggataccgagagctatcaggagctgtttgcacagccagacctcacaaaagaacacaaattcatacttagcgagacacaaccgcgtttgcattacgcgctggagcagatgtcatccccatgggctacatctcctttcatgctgctcaaagccccggaagaagccgagtatctgacgcttctcggtgatgccatgcgccagttgcagccaaaaacgaatgccgtttttggtggtcagtatcatattgccggtcgcgacgtgacattcgaacctgccacgcaggcagatggattgttcgctgcaaaaggcgaggtgatcaccgccaactgggtggaagcagaacagttgttcggctgccttcgtcagttcaatggcgatgtttcactgcaacccgggctggtacaccgcgcgaatggcggcgtattgctcatctcccttcgcacactgcttgcgcagccgctgctgtggatgcgcctgaaaacggtggtgacgcagcaacgttttgactgggtaggcttcgacgagtcacgtcctctgcctgtttccattccgtctatgccgctgtcgctgaccgtcgtgctgacgggtgaccgtgaatccctggctgacttccaggaaatggagccagaactcgcggagcaggcggtttacagcgaatttgaagacaatattcagattgcagatgccgatgacatggcgcagtggtgtcagtgggttatggccgtggcggaacgtttcgcgctgccctcacctgccgaggatgcgtggccgggcttaatccgagaggccgtacgctacaccggcgatcaggaaaccctgccgctctgtccgctctggatcggcaaacagctgcgtgaagtgggcgttatcagcggcaacggtacgttcaacggtgagcaactgagccagatgctggcccagcgtgaatggcgcgaaggctatcttgctgaccgtatgcaggatgaaattctgcttgaacagattctggtggagaccgaaggcgaacgtatcgggcaaatcaatgccttgtccgtcatcgagttccccgggcacccacgcgcctttggtgagccttcccgtatcagctgtgtcgtacacattggtgacggcgaatttaccgatatcgaacgcaaggccgaactgggcggaaacattcatgctaaaggcatgatgatcatgcaggcattcctgatgtctgaacttcagctcgagcagcagatccccttctctgcctcgttgacctttgagcagtcctacagtgaagtcgacggcgacagcgcctcaatggcagagctgtgcgccgtgatcagcgcgcttgcagacgtgccgattaaccagaatattgcgattaccgggtccgtggatcagtttggccgtgcccaaccggtgggcggactgaatgagaaaatcgaaggcttcttcgcaatctgccagcagcgcggtttaaacggcaaacagggcgtgattattccggcacctaacgctcgccatttgagcctgagccaggcgattctggatgcggtagagcaggaacaattcactgtctgggccatcgaaggggttgaggatgcactacccttactgacaaacctggtctgggacggcgaaggccagacaaccctgatgcagaccattcaggaacgtatagctcaggcgacacagcaggatgctcgtcatcgttatccgtggccgttacgctggttaagttggtttagtgcgaactga

SEQ ID NO: 524909 - DNA, 453 bp, Stenotrophomonas maltophilia
atgaaatatcaacaactggaaaacctcgaaagcggctggaaatggaagtacctggtcaaaaagcaccgtgaaggggagctgatcacctgctacatcgaagccagcgcggcacaagaagctgtggatatgttgctgaccctcgaaaacgaaccggtacaggtcaacggctggatcgagaaacacattaatccggccttgttaaaccggatgaagcaaactatccgtgctcgtcgtaaacggcatttcaatgccgagcatcagcacacccgtaagaaatccatcgacctggaattcatggtctggcagcgtctggccgggcttgcgcaacggcgcgggaaaaccctgtcggaaacggtggtgcagctgattgaagatgccgagcacaaagagaagtatgccagccagatgtcgacgttgaaaaacgatctacaggcactgttaggtaaaaaataa

SEQ ID NO: 524910 - DNA, 588 bp, Stenotrophomonas maltophilia
atgacccgtgacatcgctacccgtctggaataccagtgggttaacaacatcggtgacggtgctaccgttggtgttcgtccagacaacggcatgctgagcgttggtgtttcttaccgtttcggtcagcaggaagatgcgccagtcgtagctccagctccggctccagcgccagaagtacagaccaagcacttcactctgaagtctgacgttctgttcaacttcaacaaagctaccctgaaaccagaaggtcagcaggcactggatcagctgtacacccagctgagcaacctggatcctaaagacggttctgtagtggttctgggcttcaccgaccgtatcggttctgacgcttacaaccagggtctgtctgagaaacgtgctcagtctgtagttgattacctggtatctaaaggtatcccagctaacaagatctccccacgtggtatgggcgaatctaacccagttaccggttctacctgtgacaacgtgaaaccacgcgctgcactgatcgactgcctggcaccagatcgtcgcgtagagatcgaagttaaaggtatcaaagacgttgtaactcagcctgcggcataa

SEQ ID NO: 524911 - DNA, 315 bp, Stenotrophomonas maltophilia
  misc_feature (253)..(262): n is a, c, g, or t
atgaaaaagacagctatcgcgattgcagtggcactggctggcttcgctaccgtagcgcaggccgctccgaaagataatacctggtatgcaggtggtaaactgggctggtctcagttccatgacaccggttggtacaacagcagcctgaacaacgatggccctactcacgagagccagctgggtgcaggtgcgttcggtggctatcaggttaacccgtatgttggctttgaaatgggttacgactggttaggtnnnnnnnnnnggcgacaacgtaaatggcgctttcaaagctcaaggcgtacagctgaccgctaa

SEQ ID NO: 524912 - DNA, 510 bp, Stenotrophomonas maltophilia
atgtacacttcaggctatgcaaatcacttaacaccttctacttctgccgcaggcaatgctgcgcagaattctatcgggcgtgaatcgacagggcttatcagtgaagtggtttaccgtgaagaccagccgctgttgacacaactcttactcctgccgcttttgcagcagctcgggcaacagtctcgctggcagctctggctgacgccacagcaaaaattaagtcgcgaatgggttcagtcggctgggctgccgttagcgaaggtgatgcagattaatcaactctccccttgcgatacggtcgagtcgatggtccgggcattacgtaccgggaactatagcgtcgtgattgggtggttgcctgaggatctgtcgcaagaggaacatttgcgtctgactgaagcggctgaagaaggtaacgcgatgggtttcatcatgcggccagttcgtggagattcctatcgcagaggacaacatcccgggctaaaaattcactcaaatgtgtatcattga

SEQ ID NO: 524913 - DNA, 1044 bp, Stenotrophomonas maltophilia
atgagtgtgatgtttgatcccgaaaccgcaatctatcccttcccgccgaagccagctccgctaagccgggatgagaagcagttctatcgtgaaaaaatcaagcgcctccttaaagagcgtgatgcggtgatggtggcgcattactacaccgacccggaaattcagcagctggcggaagagacgggtggctgtatctcagactccctggagatggcgcgtttcggtgctaagcattcagcctccacgctgctggtcgcgggggttcgttttatgggtgaaacggcaaaaatcctcagcccggaaaaaacgattctgatgcctacgctgaatgccgaatgttctcttgacctcggttgcccgattgatgagttcaccgccttctgtgatgcccaccctgaccgtaccgtggtggtctatgccaatacgtctgcggcggtgaaagcccgggcagactgggtagtaacgtccagtattgccgttgagctgattgaacatctggacagcctgggggagaaaatcatctgggcgcccgatcgtcacctgggaaactacgtacaaaaacagaccggtgcggatgttctgtgctggcagggcgcctgtatcgttcacgacgagtttaagacccaggcactgaccaggatgaaacgcttatacccgcaggccgcaattctggtgcatccggagtcgccgcagtcgattgttgagatggcggacgccgtcggctcaaccagccagttgataaacgcggcaaaaaccctgccgcataagcagctcatcgtggcgaccgatcgcggtatcttctataaaatgcagcaggccgtaccagaaaaagagctgctcgaagcgccaaccgccggagaaggggcgacctgtcgaagctgcgcgcactgcccgtggatggcgatgaatggacttaaggcgatagcggaggggctggagatcggtggcgcagcgcatgagatccacgtagacgccgccctgcgcgaaggcgcgttaattccgcttaaccgtatgctggattttgcggctacactacgtacttaa

SEQ ID NO: 524914 - DNA, 720 bp, Stenotrophomonas maltophilia
atggatttttttagcacacagaacatcctggttcatattccgattggtgcgggcggctatgacctgtcgtggattgaagcggtaggtacgctggccggtttactctgtatctggctggccagccttgagaagatcagtaactatgcgttcgggctgataaacgtcacgctgtttgcgatcatcttcttccagatccagctctacgccagcctgcttctgcagctgttcttcttcgcggccaatatctatggctggtacgcctggtcgcggcaaaacagtcagcaggaggcggagctgcaaatccgctggctgccgttgccaaaagccattgcctggctcgcggcctgcgtggtggcaatcggctttatgaccgtctttattgacccggtatttgccttcctgacgcgcgtggcggtctcggtcatgtcgggtctgggattaaacgtgacgatgcctgagcttcagcctgatgccttcccgttctgggattcctgcatgatggtgctgtcaattgccgcaatgatcctgatgacccgtaaatacgttgaaaactggctgctgtgggtggtcatcaacgtgattagcgtggtgatttttgcccgtcagggcgtttatgccatgtcgctggagtatatgctgctgaccgtcattgccctgaacggtagccgcatgtggatcaacagcgcgcgtgagcgtggctctcgtgcgctttcccgctaa

SEQ ID NO: 524915 - DNA, 939 bp, Stenotrophomonas maltophilia
atggcgcactcccactcccattcccactccactggcgatgaaaatgccaaacggcttctgctggcttttggcgtcactgccacctttatgattattgaggtgacaggcggactgatctccggatcgctggcgctgctggccgatgccgggcatatgctgaccgacgctgccgcgctcctgtttgctctgctggccgtgcagtttgcacgtcgccctcccaatgcccgccacacctttggctggctcagactcaccacacttgctgcgttcgtgaatgcgattgcactggtggttattaccattcttatcgtctgggaggcgtttcagcgctttcgtcatccacaaccggtagccggaacgacgatgatggtgattgctattgccgggttggtcgccaatattctggcattctggatattgcaccgcggcagcagcgaaaaaaatctgaacgtacgggccgcggcgcttcacgtgctgggcgatctgctgggttccgtaggtgccatcgtcgccgcgctgatcattatgggtacgggctggacccccatcgacccgattctttccgtgctggtatcgtgccttgtattacgcagtgcctggcggctgttgaaagagagcgtgaatgaactgctggaaggcgctcccacgtcgctggatattggcgagctaaaacgcaatctgtgtcgttccattcctgaagtccgtaacgttcaccacgttcacgtctggctggtgggtgagaaaccgcttatgacgctgcacgttcaggttattccgccccacgatcacgatgcgttgcttgaacgtattcggcacttccttgagcatcactacgaaattgcgcactccaccatccagatggagtatcagccctgtaacgggccagactgtcacctgaacgaggcgcagtccggccactcacacgagcatcaccattag

SEQ ID NO: 524916 - DNA, 360 bp, Stenotrophomonas maltophilia
atgaaaatgacgaaactgactacgcttttcctgacggcaacccttaccctggcaagcggtagcgtactggcagccgatacaggctcctccggcagcaacggcgacgcgaatgccgctgccgaagcgggccaggttgcgccggatgcaaaacagaatatcgcgccaaataatgttgataacagtaatatcaacacgggcaataccaacaccggcggtacgaataccggcacgatgaaccatgacggtatgagcactgacgaagttcacaaaaactcaatgtgtaaagacgggaagtgcccggacccgaatgacaaagtgggcagcgatgccaatcccaaaacggacggtactacccagtaa

SEQ ID NO: 524917 - DNA, 1053 bp, Stenotrophomonas maltophilia
atgaattatcagaacgacgatttacgcattaaagagatcaatgagttattacctcccgtagcgctccttgaaaaattccccgccaccgaaaatgccgccaacacggtgtctcatgcccgtaaggcgatccacaagatcctgaaaggtagcgacgatcgtcttctggtggtcatcggaccgtgctccattcacgatcctgctgcggccaaagagtacgcgtcacgtctgctcaccctgcgcgaagagctgaagggcgaactggaaattgtgatgcgcgtttatttcgaaaaaccgcgtaccaccgtgggctggaaagggttgatcaacgatccgcacatggacaacagtttccagatcaacgacggcctgcgtattgcgcgtaagctgctgctggagattaacgacagcgggctgcctgctgccggagaattcctcgatatgatcaccccgcagtatctggctgacctgatgagctggggcgctattggtgcgcgtacgactgaatcgcaggttcaccgtgagctggcgtctggcctgtcatgcccggtgggtttcaaaaacggcactgatggcaccatcaaagtcgctattgatgccatcaatgcggctggcgcgccgcactgcttcctgtcggtgactaagtggggccactcggctatcgtgaataccagcggtaatggcgattgccatatcattctgcgcggcggtaaagagcctaactacagcgcaaaacacgtggcggaagtgaaggcgggtctggagaaagcgggactggcgccgcagatcatgatcgatttcagccatgcgaactcaagcaaacagttcaaaaagcagatggaagttggtgcagacgtttgtcagcaaatcgccaacggtgaacgcgcagtgattggggtgatgattgagagccatctggtggaaggcaatcagaatctggagggcagcgagccgctggtctacggtaagagcgtgacggatgcctgcattggctgggatgataccgatgcgatcctgcgtcagctggcggatgcggtaaaagcgcgtcgcggttaa

SEQ ID NO: 524918 - DNA, 753 bp, Stenotrophomonas maltophilia
atggctaatactaagcttgtcctggtgcgccacggcgaaagccagtggaacaacgaaaaccgcttcaccggttggtatgacgttgatctgtccgagaaaggcgtgagcgaagcaaaagcggcaggtaaactgctgaaagaagaaggcttcacctttgactttgcttacacctctgtgctgaaacgtgccatccataccctgtggaacattctggacgagctggatcaggcctggctgccggttgagaaatcctggaaactgaacgagcgtcactacggtgcgctgcaaggtctgaacaaagcagaaaccgcagaaaaatacggtgacgagcaggttaagcagtggcgtcgtggttttgcggtcacgcctccagagctgagcaaagatgacgagcgctacccgggccacgatccgcgttacgcgaagctgactgaggctgaactgccgcagaccgaaagcctggcgctgaccatcgaccgtgttgtgccttactggaacgaaaccattctgccacgcctgaaaagcggcgagcgcgtcattatcgctgctcacggtaactccctgcgtgcgctggtgaaatacctggacaacatgggtgaagatgaaatcctcgagctgaacatccctaccggcgtgccgctggtgtacgagttcgacgaaaacttcaagccagttaaacattactacctgggtaacgccgacgaaatcgctgcaaaagcggcggccgtggcgaaccagggtaaagcgaagtaa

SEQ ID NO: 524919 - DNA, 1044 bp, Stenotrophomonas maltophilia
gtgctaaacgaaacacctactctcgcaccggatggtctgccgtatcgcctgttgaccctgcgcaacagcgccgggatggtggttacgctgatggactggggcgcaacgttactttctgcccgcgtaccaatgcctgacggcagcgtgcgcgaaaccctgctcggctgcgcatcgcccgagcagtatatcgagcagaccgcttttctgggcgcatccataggccgctacgccaaccgcatcgccagaagccggtttacgctggacggcgtaacctattccctgcttgccagccagggtgaaaatcagctgcacggcggccccgaagggtttgataaacgtcgctggaagattgtgcagcaaaatgaccgtgaggtctggttctctctggactccctcgacggagaccagggcttcccgggcaatctcaccgcaaccgcgcgctttaccctgaccgaagataatcgtatcgccattgagtaccgcgcgatcgtcgacaagccgtgcccggtcaacctgactaaccacgcctatttcaaccttgacggcaatcagaccgatgtccgcagccacaaactccagatcctggcggacgcgtatctgccggtcgatgagatggggatcccttatcaggggctgaaaccggtaagcggtaatagctttgatttccgtcagccgaaaaccatcgcccaggatttcctgagtgatgacgatcagcgcaaggtgaaaggctacgaccacgctttcctgttgcaggcgaaaggcgatctttctcaacctgccgcacaggtctggtctgcggatgagaagttacagatgacggtctacaccaccgcccctgccctgcagttctactccggtaactacctggaggggaccacggcgcgtgaacataacgactacgccgcctggcaaggtctggcgctggagagcgagttcctgccggacagtcctaaccatcctgaatggccgcagcctgactgtgtgctgcgtccgggtgaagagtacgtaagcgtcacagagtatcatttcattccgcgcgcataa

SEQ ID NO: 524920 - DNA, 1149 bp, Stenotrophomonas maltophilia
atgagtctgaaagataaaacacaatccctgtttgctgaaaaatttggctaccctgccacccatattatccaggcgccaggccgcgttaatctgatcggcgagcacaccgactataacgacggttttgtcctgccgtgtgccatcgactaccagacggtaatcgcctgcgcgaaacgttcagatcgtaacgtgcgagtgatcgccgcggattacggcaatgaaattgacgaattttccctcgatgcgccgatcgtgacccacgacagccagcagtggtcgaactatgttcgcggcgtggtgaagcatcttctgaagcgtaacaagaatttcggcggggccgatctggtgatcagcggcaacgttccgcaaggggcgggattaagctcttccgcatcgctggaagtggcggtcggcaccgtgttccagcagctttatcatctgccgctggacggggcgcagatcgccctcaatggtcaggaagcggaaaaccagttcgtgggctgcaactgcggcattatggatcagctgatttccgcgctgggcaagaaagaacatgctttgctgattgactgccgctccctcgggaccaaagcggttccactgccaaaaggtgcggctgtggtgatcatcaacagcaacttcaaacgcacactggtggggagcgagtacaacacccgccgcgagcagtgtgaaaccggcgcgcgcttcttccagcagccagccctgcgtgatgtctcacttgacgaatttaacaaggttgcccacgaactggatccggttgtcacgaagcgcgtgcgtcacgtgctgacggaaaatgcccgtaccgtagaagccgcctccgcgctggcgaaaggtgacctgaaacggatgggcgagctgatggccgaatcgcatgcctccatgcgcgacgatttcgaaatcaccgtgccacaaatcgacaccctggttgaaattgtgaaagccacgattggcgacaaaggcggcgtgcgtatgaccgggggtggatttggcggctgtgtcgtcgccctggtgccggaagagctggtccctgccattcaggacgcggtggctaaacagtacgaagccaaaacgggcatcaaagaaactttctatgtctgcaaagcatcacaaggagccggacagtgctaa

SEQ ID NO: 524921 - DNA, 1047 bp, Stenotrophomonas maltophilia
atgacacaattcaatcccgttgatcacccgcatcgtcgttttaacccgctcagcgggcaatggattttagtttcaccgcatcgcgccaagcgcccctggcagggggcgcaagagacgcctgccaaacagtcgctgccgcagcacgatccggactgcttcctctgtccgggcaacacgcgcgtgacgggcgatacaaacccgaactacaaaggcaccttcgttttcactaacgattttgcggcgctgatgaccgacacgccggacgcgccggaaaaccacgacccgctgatgcgctgtgaaagcgcccgcggcaccagccgcgtgatctgcttctctcccgatcacagcaaaacgctgccggagctgagcgttgaggcgctgaaagaggtggtcagcacctggcaggcgcaaacggcggagctgggccagacctatccgtgggtgcaggtatttgaaaataaaggcgcggcgatgggctgctctaacccgcatccgcacggccagatctgggcgaacagcttcctgccgaacgaagccgaacgtgaagaccggctgcaaaaagcctatttcgcccagaacggttcgccgatgctggtggattacacccagcgtgaactggcggacggcagccgcactgtggtggaaaccgagcactggcttgcggtagtcccttactgggcggcgtggccgtttgaaacgctgctgctgccaaaggcccatgttcagcgtattacggacctcagcgacgcccagcgagacgaccttgccctggcgctgaaaaaactgaccagccgctacgacaacctgttccagtgttccttcccctactccatgggctggcacggtgcgccgtttaacggcgaagagaatcaacactggcagttacatgcacacttctatccgccgctgctgcgttctgcgacggtacgtaaattcatggtgggctatgaaatgctggcggaaacccagcgcgacctgacggcggaacaggcggcagaacgcctgcgtgccgttagcgacgtccattaccgcgaatcaggagtctaa

SEQ ID NO: 524922 - DNA, 1017 bp, Stenotrophomonas maltophilia
atgcgagttctggtaacaggtggtagcggttacataggaagtcatacctgcgtacaacttctgcaaagcggccacgatgtcgtcattcttgataacctgtgcaacagtaagcgcagcgtgctgccggtcattgaacgccttgcgggtaaacagccgactttcgtggaaggcgatatccgcaatgaagcattgatgactgaaatccttcacgatcacgcgattgaaaccgttatccacttcgcgggcctgaaagcggtgggcgaatcggtagcaaaaccgcttgagtactacgacaacaacgtcaacggtaccctgcgtctgatctccgccatgcgtgcggcgaacgttaaaaactttatcttcagctcttccgcgaccgtctacggcgatcagccaaaaattccttacgttgaaagcttcccgaccggtacgccgcaaagcccgtatggcaaaagcaagctgatggtagagcagatcctgaccgacctgcaaaaagcccagcctgagtggagcatcgcgctgctgcgctacttcaacccggttggcgcgcatccgtcaggcgacatgggtgaagatccgcaaggcattccaaataacctgatgccgtatatcgcgcaggttgccgtagggcgtcgcgactccctggcgatttttggtaacgattatcccaccgaagacggcaccggcgtgcgcgattacattcacgtgatggatctggccgacggccacgtggcggcgatgcagcagctggcggataaaccgggcgtgcatatttacaacctcggcgccggcgtcggcagcagcgtgctggatgtggtgaatgccttcagtaaagcctgcggcaagccagtgaagtatcacttcgcgccgcgtcgtgatggcgacctcccggcttactgggccgatgccaccaaagcggataaagagcttaactggcgtgttacccgcacgcttgatgaaatggcacaggatacctggcactggcagtcacgccatccgcagggttatccggattaa

SEQ ID NO: 524923 - DNA, 1473 bp, Stenotrophomonas maltophilia
atgtcatcattgcatatttcgcaaggcacgtttcgtcttagcgatacccgtaccttatcgctgccagagttaacccttcgcgccggagaaagctgggcgtttgtgggcacgaatggcagcggaaaatccgcgctggcccgcgccctggctggcgaattaacccagctgaagggtgagcgtcagtgcacctttacccggcttacgcgcctttcctttgaacagctgcaaaagctggtcagcgatgagtggcagcgtaacaataccgatttgctcagccccggcgaagaagataccggccgcacgacggcggacattatccaggatgagataaaagatcctgcccgctgtcagcagctggcggagcaatttggcattaccgccctgcttaaccgccgctttaaatatctctctaccggcgagacgcgcaaaacgctgctgtgtcaggcgctgatgagcgagccggaactcctgattttggatgaaccgtttgacggactggatgtgcagtcccgcgcgcagctggcagcgttgctggcgtcgcttaaccagcagggatacacccttgtgctggtccttaaccgctttgatgagatcccggatttcgtacattacgcgggcgtgctggcggactgtagcctgaccgaaaccggcgagaaagccgtactgctccggcaggcgctaattgcacagctggcccacagcgagaaactggacggtattgcgctgccggagccggatgccccttcggcacgccacgggctggatcctgaccagccgcgcattgtgctgcgcgatggggtggttgcttacgacgatcgccctattcttaatcatctcagctggacggttaatcctggtgagcactggcagatcgtcggccccaacggggcgggtaaatccacgctgctaagcctgatcactggcgatcacccgcagggttacagcaacgatttgaccctcttcggccgccgccgcggcagcggggaaaccatctgggatatcaaaaagcatatcggttatgttagcagcagcctgcatctggactaccgggtgagcactacggtgcgaaacgtgatcctctctggcttcttcgattccattggtatttatcaggcggtatccgacaagcagcacaagctggcgcagcagtggctggatattctgggtatggacaaccgggtagccgatgcgccattccacagcctgtcgtgggggcagcagcggctggcattgatcgtccgcgcgctggttaagcatcctacgctgttgattcttgatgaaccgttgcaggggctggatcccctcaaccgtcagctgatccgccgctttgtggatgtcctgattagcgaaggtgaaacccagctgctgtttgtctcccaccatgctgaggatgccccgtcctgcatcacccatcggctggaatttgtgcctgacggcgagcattaccgctacctgctgagcaaaatcgattaa

SEQ ID NO: 524924 - DNA, 789 bp, Stenotrophomonas maltophilia
atgcaggccgaaattctcctcaccctacgacttcagcagaagcttttcgccgatccgcgacgcatcgccctgttaaaacaaatagaacaaactggctcgattagccagggagccaaaaacgccggcatcagctataaaagcgcctgggatgcgattaacgacatgaacaccctgagcgaacaaacgctggtagagcgcgccaccggcggaaaaggcggcggcggcgccgtgttgacgcgttacgggcaacgcctgatccagctctatgacttactggcgcagatccagcaaaaagcatttgatgtgctgagcgatgacgacaacctgccgctggacagcctgctgggcgccatctcccgtttctctttgcagaccagcgcccgcaaccaatggtttggtacggtgacggggcgcgatcattcgcaggtgcaggagcatattgagatcctgctcgcggacggcacaacgcgcctgaaagccgccatcaccgcgcaaagcggtcaacgccttgggctgaacgaaggtcaggaggtgctggtattactcaaagcgccctggatcagcatcacgcttaaccctgagcaggccgccgaggccgacaaccagctacgcgggcgtatcagccacatcgagcgcggcgcagaacagtgtgaagtgctgatgaccctgccggatggacagtcgctctgcgccaccgttccggtgaacgacgcgaccgaattagatgaaggtgctgtggtgaccgcatatttcaatgcagaccgggtaattatcgccacattgtgctaa

SEQ ID NO: 524925 - DNA, 153 bp, Stenotrophomonas maltophilia; identical to SEQ ID NO: 116322

SEQ ID NO: 524926 - DNA, 777 bp, Stenotrophomonas maltophilia
atggcacgttcatgggtacgccttttcgcaggggcaacgctgactctctcactcaccggccacgcgctggcggatgaaggaaaaatcacggtctttgcggcggcgtcgctgactaacgcgatgcaggatattgctgcggtatacaaaaaagagaaaaacgtcgaggtcgtttcgtcgtttgcctcctcgtccacgctggcccgccagatcgaagcgggggctccggctgatctgttcatctctgccgatcagaaatggatggactacgcggtggagaaaaaatctgttgatacggctagccgcgaaaccctgctgggaaatagcctggtggtggtcgcgcccgcaaacagcaagcagggcgacatcgccatcaacaaacagacggactggacccgtctgctcaacggtggccgtctggcggtaggcgatccggagcatgttcctgccgggatttatgcgaaagaagcgctgcaaaaactgggcgcatgggagaccttatcgccgaagctggctcccgcagaagatgtgcgcggcgcgctggcgctggtggagcgtaacgaagcgccactcgggatcgtttacggctccgatgccgtcgccagtaaaggtgtgaaggtggtcggtaccttcccggaagactcgcataagaaagtagaatatcctgttgcgatagttgatggacataaaaatgcgaccgtgacggccttcgttgactacctgaaggggcctgaagcgtccgctatctttaaacgttacggatttacgactcacgaatga

SEQ ID NO: 524927 - DNA, 693 bp, Stenotrophomonas maltophilia
atgatattgaccgaacctgaatggcaggccgtgctgctgagcctgaaagtctcttccctggcggttgcactgagtttgccctttggggtgttctttgcctggttactggttcgcgtgaagtttccaggcaaagccctgctcgacagtgttctccatcttccgctcgtgttaccgcctgtggtggtcggctatctgctgctgatctctatggggcgacgcggttttatcggcgaatggctgtacgattggttcggcctgacctttgctttcagctggcgcggcgcggttctggccgcggcagtaatgtccttcccgctaatggtgcgcgctatccgcctggcgctggaaggggtggatatccggctagagcaggccgcccgcacgctgggtgcaggccgctggcgggtattcctgaccattacgcttccgctcaccttaccgggcattatcgtcggtacggtgttagccttcgcccgctcactgggtgagttcggcgcgaccatcacctttgtgtccaacattcccggcgagacgcggaccatcccgtcggccatgtataccctgattcaaaccccgggtggcgaaggtgcggcggcccggctgtgtattatttcgattgtactcgccctggtctcgctgctggtgtctgaatggctggcgcgcctcagccgtgaacggatggggaaaccgtga

SEQ ID NO: 524928 - DNA, 1059 bp, Stenotrophomonas maltophilia
atgctggaactcaactttacgcaaaccctgggcagccacactctgacgcttaacgaaacgctgcctgccagcggtatcaccgccatttttggcgtttccggggcagggaaaacgtcgctgattaatgcgattagcggcctgacgcgtccccagtctggcagaattgtgttaaataaccgcgtcttaaacgacgcggagaagaaggtctgcctgtcaccggacaagcgccgcatcggctatgtgtttcaggatgcgcgcctgtttccgcactacagcgtgcgcggaaatctgcgctatggcatggcaaaaagcatggccggacagttcgataagctggtggcgctgctgggcatcgaaccgctgctcgatcgtctcccgtcttcgctgtcgggtggtgaaaaacagcgcgtggcgattggccgcgccctgttaaccgcgccggaattgttgctgctggatgagccgctggcctcgctggatattccgcgcaagcgcgagttgctgccgtatctgcaacgtctggcgcgggaaatcaacgtgcccatgctgtacgtcagccattcgctggatgagatcttacatctggccgacaaagtgctggtgctggaggcgggcagggtgaaggcattcggcaatctggaagaggtatggggcagcagcgttatgcatccgtggctgccaaaggagcagcagagcagcattctgaaggtgagcgtgctggagcaccatccacattatgcgatgaccgcgctggcgctgggtgaccagcatttgtgggtgaataaaatcgatacgccgattcagtccacgttacggatccgcattcaggcgtcggatgtctccctggtgctgcaaccgccgctgcaaaccagtatccgcaatattttgcgcgcaaaagtggcgcagtgttttgatgataacggccaggtagaagtgcaactggaagtgggcaacagaacgctgtgggcgcgcatcagcccgtgggccagggatgagttaggcatcaagcctggcctgtggctttacgcgcaaatcaagagcgtctctatcaccgcctga

SEQ ID NO: 524929 - DNA, 819 bp, Stenotrophomonas maltophilia
atgacctcgcgagtgattgccctggatttagacggaacactgcttacccctcagaaaaccctgctcccctcttctcttgaggccctcaaacgagcccgggaagcggggtatcaacttctcatcgtaacgggtcgacatcacgtagccattcatcctttttatcaggcactgggcttagatacacctgcaatttgttgtaatggcacttatttgtatgattatcaggcaaaaaaggttttaacctctgatccgcttcccgttccgcaggcgctgcaattgattgatttactggatgagcacgcgattcacggcctgatgtatgtggataacgccatgctgtatgaacgccctaccggccatgtgatccgcaccagcaactgggccctgtctctgccggaagcgcagcgtccggtgttcactcaggtttcctccctgcgccaggcggcggaagacgtccaggcaatctggaaatttgccctgaccgatgaagacactgccaaactgaacaccttcgcaaaacatgtcgagcatacgctgggtctggaatgtgaatggtcctggcacgatcaggtggatatcgcccgtaaaggcaacagcaaaggaaagcgtttgacccagttcgttgagtcacagggctggtcaatgcaggacgtgattgccttcggcgataactataacgacatcagcatgctggaagcggccggaacgggcgtggcgatgggcaacgccgatgatgcggtgaaagcgcgtgctaacgtggtgattggcgataacaccaccgacagcatcgcgcagtatatttatacccacctgctgtaa

SEQ ID NO: 524930 - DNA, 996 bp, Stenotrophomonas maltophilia
atgaaacaaaccgtttataccgccagtcctgaaagtcagcagatccatgtctggcgtttgaatacagaaggttcgcttacgctggttcaggttgttgatgtgccaggccaggtgcagccgatggtcgtcagcccggataaacgttttctttatgtcggggtacgcccggaattccgcgtactcgcataccgcatctccccggatgacggcgcgctgacctataccgcagaagcgccgctgccgggcagcccgacccatatttctaccgaccataaaggcaactttatcttcagcggctcctacaatgcaggctgcgtgagcgtcacccgcctggaagacggtattcccgttgaaaccgtcgacgtggtagaagggcttgagggttgccactccgccaacatttcgccggataaccgcacgctgtgggtgccagcgctgaagcaggatcgcatctgcctgtttaccctgagcgatgacggtcatctggtcgcgcagagcccggcggaagtcaccaccgtggaaggcgcaggcccgcgccatatggtcttccacccgaatcagcagtatgcctatgtcgttaacgagctgaacagctcggtagatgtctgggagctgaacgatcctaacgggcagatcgagtgcgtacagacgctggacatgatgccagctgatttctccgacacacgctgggcggcagacattcacatcacgccggatggccgccacctgtatgcctgtgaccgtacctccagtttgatcaccgtcttcagcgtctcagaagacggcagcgttctggcagttgagggcttccagccgacagaaacccagccgcgcggctttaatgtcgatcacagcggcaaatacctgattgcggcggggcagaaatcccaccacatcgcgctctatgaaatcaaaggcgtgcagggtctactggaagagaaaggacgctatgcggtcggacaagggccgatgtgggttgtaattaacgctcactga

SEQ ID NO: 524931 - DNA, 1284 bp, Stenotrophomonas maltophilia
ttgaatatttccaggatttcccgtctggcgttggcactcgcctttggcgtgactttatccgcttgcagttcaacaccaccggatcagcaaccatctgagcaggttgctccgggcaccgcttcccgtccgatcctgtcagcggctgaagcgaagaacttcacccgtgcgcactatttctcggcgatggatcccaatgcagccccatggacgccttcttctattaacctgccgaaacagccagacttcgttgtcggcccggccggagcagagggcgttacgcacacctcaattcaggcagctgttgatgccgcaatcaccaaacacagcgcatctcgtcagtacattgccatcctgccgggtgaatacgaaggaaccgtttatgttccggctgcaccgggaagcattacgctttacggacttggcgaaaaagcggtcgacgtgaaaattggcctggcgattgattcagagatcgacagcaccacctggcgccatctggtgaacccggccggtaaatacatgccaggtaaaccggcgtggtatatgtttgataactgccagcgcaaacgtgccgccaccattggcgtgatgtgctcggcggtattctggtcacagaacaatggcctgcaattgcagaacctgaccattcagaacaccctgggcgacagcgttgacgcaggtaatcaccaggccgtggcgctgcgtagcgatggcgacaaggtacagattaacaacgtcaatatcctgggccgccagaataccttcttcgtgaccaacagcggcgtgcagaatacccttcagaacaaccgtctgacgcgtactctggtcaccaacagctacattgaaggcgacgtggatatggtctccggtcgcggcgcggtggtgtttgataacaccgacttccgcgtggtgaattcacgtacgcagcaggaaggttacgtctttgccccggccacgcagtccaatctgttctatggcttcctggccgtgaatagccgctttactgctgctggcgatggcgtggcgcagcttggccgctctctggacgtggactccgccactaacggccaggtcgtgatccgcgacagcgtgattaacgaaggctttaacatggcgaaaccgtgggcggatgcggcgatctcgaaacgtcctttctccggcaacaccggcacggtggatgataaagacaacgtgcagcgtaacctgaacgacgctaacttcaaccgcatgtgggaatacaacaaccgcggtctgggtagcaaagtggttactgaaccgaagcagtaa

SEQ ID NO: 524932 - DNA, 1224 bp, Stenotrophomonas maltophilia
atgcagcagcttcatcccgatgatgtgatatggcgaaatgcgcgactggcgaccctggcgacaggtgagccggaaccctacggcctgaaagaacaacatgccctcgtcgtgcgcggccagacgattgcggccgttattcctgaagccgagatcccctccgggcatcgtcagtgtgtcgatctcgacgggcgtctggttactcccggcctgatcgattgccacacccatctggtgttcggcggcgatcgcgcagcggaatgggaacaacggcttaacggcgtgtcgtatcagaccatcagcgcgcagggcggcggtattaacgccacggtcacggcgacccgcaacagttcgccggaaatgctcctgacggtggcacagcagcggctccagcggctgatgaatgaaggcgtaacgaccattgaaatcaaatcgggatacggactgaatgcccaggccgaagagaaaatgctgctggttgcccgccagctcagcctgaacaatctggtcgatatcagcccgacgctgctggccgcgcacgccgttcctgccgagtaccgacaggatccggatgcctatctcacgctggtctgtgagcagatcatgcccacgctgtggcaaaaagagttatttgaagcggtggacgtgttttgtgaaaacgtcggctttaccccggtgcaaaccgagcgcctgttccgggccgccgccgcgctcgggataccggttaaagggcatgtagagcagctgtcgaatctgggcggcgcggcgctggtcagccagtataaggggctgtcggccgatcatattgagtatctcgatgatgcaggtattcaggcgatggcgcaaagcggcacggtggcggtattgctccccggcgcgttctattttcttcaggagcgccagcgtccaccggtggcgcagctcagagagcagggcgtgccgatggcggtggctaccgactacaacccgggcaccagcccgtttgccagcctgcatctggcaatgaacatggcctgcgtccagtttggcctcacgccggaagaggcctgggctggcgtgacgcggcatgcggcgcaggcgctaggtcgtggcgcgacgcacgggcagttaaagcccggttatgtggctgatttcgtcgtctgggaggcgaatcatccggttgagatggtttacgagccggggcggaatcctttatatcaacgcgtgtttcgggggcaggtagcatga

SEQ ID NO: 524933 - DNA, 939 bp, Stenotrophomonas maltophilia
atgaaattgtggcatcccgcttccccgcaggtctggcagggtcgtgacgacagcgccgaatccagcaccgcgaaacgtcttttccagaccatacagcagcgcgtacactttgcacccgtgccgtcaggcatcgccctgctgggctttgaatgtgatgaaggggttaagcgtaaccagggcaggcccggtgctgcacaggctcccgatgtgctgcgcggcgcgctggcgaatatggcgagccatcaggggcatgcgcgcctcgtggatatgggctccatttttgttgaaggcaatgcgctggaggcggcacagcaggcgctgagcgaggccataaccgcgtgccagcaatccgggatgcgtactctggtttttggcggtggacatgaaaccgcctgggcgcacgggcgcggcgtgctggacgcctttccgaacgatcgcattgcggtgatcaacctggatgcgcacctcgatttacgtaaggctgaacgggctacgtccggcacgccgttccgccagctggcgctctactgcgcgtcgcagtcgcggtcgtttcactacgcctgcctgggggtaagccgtgcggcgaatacccaggcgctgtgggaggaagctgaacggttgaacgtgatgctggttgaagatctcgattttcgccgggatgcgctatccgcgctggaaagcgtgcttgcgcaggcagaccgggtttatctcaccgttgaccttgatgtgctgcccgccgcagaaatgcccgccgtatccgcccctgcggcgttggggatcccggcgctggatctgttcccggtgattgagcgtatctgccgaagcggtaaactacaggcggcggatctggtggaatataatccgcactacgaccgggacggtcagggggcgaagcttgccgcccgactggcctggcaaattgctcactggtgggcataa

SEQ ID NO: 524934 - DNA, 735 bp, Stenotrophomonas maltophilia
atgttttcacgctcaccgcagcaaccctccagcccacccgcacctttttatgagaaggtgaaaaaggcgatcagcgaaaaaattgctgccggcgtctggcgtccgcacgaccgtattccctccgaagctgaactggtcgcgcagtttggctttagtcgaatgaccattaaccgggcgctgcgggaactgaccgatgaagggttgctggtgcgtttgcagggtgtcggaacctttgtcgccgagccaaaaggacagtcggcgctgtttgaaatccgcagcattgccgatgaaattgccgcccgcaaccatcagcaccactgcgaagtgctggtgcttgaagagacgcaggccagcgccgaacaggccatcgagctgaacgttaacgagggcacccggatcttccattcggtgatggtgcattatgagaacgatattccggtccagattgaagatcgctgcgtcaacgcggagcggatcccggactacctgaaccaggattacacccaaaccacaccgcatgcgtatctctcgctcgtcgccccgctgacggaaggggagcatatcgtggaggccgtgcgcgccacgcctcaggagtgcgagttgttacgtattaaagagcacgatccctgcctgctgatccgccgtcgtacctggtcattctcgcagatcgtgtcgcatgcgaagctgctgttcccggggaatcgctaccggttgcagggccactttatgtcataa

SEQ ID NO: 524935 - DNA, 1689 bp, Stenotrophomonas maltophilia
atgtcgtcagataaataccgcaagcaggatgtccgcgccgcgcgcggcaccacgctcaccgcaaaaagctggctcaccgaagcaccgctgcgcatgttgatgaacaaccttgatcctgaggtagcagagaatccccatgagctggtggtctacggcggcattggccgcgccgcgcgcaactgggcgtgctatgacgcgattgtcgagtctttgacgaatctcgaaaacgacgaaacgctgctggtgcaatccggcaaaccggttggcgtattcaaaacccataaaaatgcgccacgtgtgctgattgccaactccaacctggtgccgcactgggcgacgtgggaacatttcaacgagctggacgcaaaagggctggccatgtacggccagatgaccgccggcagctggatctacatcggcagccaggggattgtgcagggcacctatgaaaccttcgtggaagcgggccgacagcactataacggctcactgaaaggccgctgggtgctcaccgccggactgggcggcatgggcggcgcgcagccgctggccgcgacgctggcgggcgcgtgctccctgaacattgagtgccagcagagccgcatcgatttccgtctgcgtacccgctatgttgatgaacaggccgacaacctcgatgacgcgctggcgcgcatcaaaaagtacaccgctgaaggcaaagccgtgtcggttgccctgtgcggcaacgcggcggatattctgccggaactggtggcgcgcggcgtgcgtccggatctggtcaccgaccagaccagcgctcacgatccgcttcatggttacctgccaaaaggctggacgtgggaagattaccagcaaaaagcggaaaccaatcctgagggcacggtactggcggctaaacgcgccatggcggaacacgtctccgcgatgctggccttcagtaagatgggtattccgacctttgattacgggaataacatccgccagatggcgaaagagatgggggttaataacgcctttgatttccccggcttcgtgcccgcctatattcgtccgctgttctgccgcggcatcgggccgttccgctgggttgccctctccggcgacccggaggatatctacaaaaccgacgccagagtaaaagagattgtcgccgacgatgaacatctgcaccgctggctggatatggcgcgcgagcgcattaattttcagggcttaccggcgcgtatctgctgggtcgggctggagtggcggcaaaaactcggcctcgcctttaacgaaatggtgcgcagcggcgaagtctccgcgccgatcgtcattggccgcgaccacctggactccggctctgtcgccagtccgaaccgtgaaaccgaagccatgcgcgacggctcggatgcggtctccgactggccgctgctgaatgccatgctgaacaccgccagcggcgcaacctgggtgtcgctgcaccacggcggcggcgtcgggatgggcttctcccagcactccgggatggtcatcgtctgtgacggtaccgacgaagcggcggcacgtattgctcgcgtgctgcataacgacccggcaaccggcgtgatgcgccacgcggatgcgggttacgagattgccattgattgtgccaaagagcagggcttgaacctgccgatgatccccgccacacaaggaaagcctgcatga

SEQ ID NO: 524936 - DNA, 1521 bp, Stenotrophomonas maltophilia
atgaacgcgttaacacttactcccggctctttgtcgctcaaacagctgcgtcacgtctggcgtcagccggtgacactcgcccttgatgaaagcgcccaccgtgccattaatgacagcgtggcctgcgtggaggcgattgtagcggaggggcgcaccgcctacggcatcaataccgggtttggcctgctggcgcagacccgcattgccacgcacgatctggagaatttacagcgttcgcttgtgctctcgcacgcggcgggcgttggccagccgctggacgatgagatcgtccgcctgatgatggtgttgaaaatcaacagcctggcgcgtgggttttccggcattcgtctgagcgtgatccaggcgctgatggtgctggtgaatgctgaagtttatccgtggatcccggcgaagggctccgtcggagcttccggcgatctggcaccgctggcgcatatgtcgctgctcctgctgggtgaaggcaaggcgcgctggcaaggggagtggctgcctgcgaaagaggcgctgaaaaaagccggcttagcgccgatcaccctcgcggcaaaagaagggctggcgctgctcaacggcacgcaggcgtcgacggcctttgcgctgcgcggcctgtttgaagcggaagatctgttcgcctccgcggtggtgtgtggtgcgctgaccactgaagcggtgctcggctcgcgtcgtccgttcgatgcccgcatccacgaggtgcgcggccagcgtggtcagattgatgccgcagccatgtaccgccacgtacttaccgataccagcgacattgccgattcgcatcacaactgcgagaaggtgcaggatccgtattctctgcgctgccagccgcaggtgatgggcgcatgcctgacacagcttcgccaggcggcagaagtgctgctggtggaggccaatgcggtgtccgacaacccactggtgtttgctcaggaaaacgaggtggtctccggcggcaacttccacgccgagccggtggcgatggccgcagataatatcgcgctggcgatggccgaaatcggagcattgtccgagcgtcgaatcgcactaatgatggataaacacatgtcccagctgccgccgttcctggtgcgcaacggcggcgtgaattcgggctttatgatcgcccaggtcaccgccgcagcactggcaagcgaaaacaaagccctgtcgcatccgcacagcgtggacagcctgccaacgtcagcaaatcaggaagatcacgtttcgatggccccggctgccgggcgtcgactgtgggagatggcctccaacacccgcggcgtgctggcggtggaatggctggcggcgtgtcagggtattgatttacgcgaagggctaaaatccagcccgctgctggagcaggcgcgtcatacgctgcgcgagcacgttacgcactacgatgaggaccgcttctttgcgccggatattgataaggcgatacagcttctggaagaagaaacccttgcaggactgctaccttccgtgctgtga

SEQ ID NO: 524937 - DNA, 477 bp, Stenotrophomonas maltophilia
atgaaaatcatcagtaaagatttgcgcgacggcgaaaagctgccggaacgtcacgtgtttaacgggatgggttatcagggagataatatctctccccatctggcgtgggacgatgtaccagcgggaactaaaagttttgtcgtaacctgctatgatccggatgcgccaaccggctcgggctggtggcactggatcgtggcaaacctgcccgccgacacccgcgtgctgccgcagggttccggttccgatctggttgccctgcccgacggtgcgattcagacccgcacggactttggcaaagcgggctacggcggcgcggcgccgccaaaaggggaaacgcaccgctatatcttcacggtgcacgcgctggatgtggacaagattgaggttgacgaaggggcgagcggggcaatggtaggctttaacgtccatttccattcgctgggcagcgcgtcgattacggcgatgtattcataa

SEQ ID NO: 524938 - DNA, 1338 bp, Stenotrophomonas maltophilia
atggtttacaagtcgattatgacccaagacgatctcgccttcgacaagcagcatatctggcacccttacacctccacgacccgcccccttcccgtctatccggtagcctcggcccacggctgcgagctgcatctcgccagcggcgagcggcttgttgacgggatgtcctcctggtgggcggcgatccatggctacaaccacccgcgtctgaacgcggcgatgaaagcgcagattgaccagatgtcacacgtgatgtttggcgggatcacgcatcagcccgcggtggatttatgccgtcgcctggtagcgatgacgcctgaatctctggagtgtgttttcctggctgattccggctcggtggccgtggaagtggcgatgaaaatggcgttgcagtactggcatgcgaagggcgaaacgcgccagcggttcctcaccttccgcaacggctatcacggcgacaccttcggggcgatgtcggtgtgcgatccggacaactccatgcacagcctgtggaaaggctacctgccggaaaacctgtttgcgccagccccgcagagccgcttcgacggcgaatgggacgagatggacatggtgggcttcgcgcggttgatggcagcccatcgccacgagattgccgccgttattctcgaaccgattgtgcagggcgcgggcggaatgcggatgtatcaccccgagtggctgaagcgcattcggaagatgtgcgaccgcgaaggaattttgctgattgccgatgagatcgccaccggctttggccgtaccgggaagctgtttgcctgcgagcatgcggggatcgcgccggatattctgtgcctggggaaagcgctcaccggcggcaccatgacgctctccgccacgctcaccacccgccaggttgccgacaccatcagcgacggcgacgcgggctgctttatgcacggcccgacgtttatgggcaacccgctggcctgcgccgtggcaagcgaaagcctcgccattctggagagcggcgagtggcagacgcaggtggcggcgattgaggcacagctgaagcagcagctaagcgcagcggtggaggcggaatacgtcgcggacgtccgcgtgctgggcgccatcggggtgatcgagacaacgcatccggtgaacatggccgcgttgcagcgcttcttcgttgaccagggcgtttgggtgcgacctttcggtaagctgatttacctcatgccgccgtacagcatttctccggatcagctccacaagctgaccggggcagtggttaaagccgttaacatatcagcgcatttcacgatttacccccatgcgttacactttctgaatgagtga

SEQ ID NO: 524939 - DNA, 1041 bp, Stenotrophomonas maltophilia
atggctcaccacgcacgctggacgatgtcgcaagtcactgaattattcaacaaacctttcctggagctgatgtttgaagcgcaacaggtgcaccgccagcacttcgatccgcgtcatgttcaggtcagcacgctgctgtcgattaaaaccggggcttgcccggaagactgcaaatattgcccgcaaagcgcgcgctataaaaccggtctcgaatccgagcgcctgatggaagtcgagcaggtgctcgactcagcgcgcaaggccaaaaacgctggctcaacccgcttctgcatgggcgcggcgtggaaaaacccgcatgaccgcgacatgccctatctggagcagatggtgaagggggtgaaggagatggggcttgaagcctgcatgaccctgggtacgctaaacgaggagcaggcgcagcgcctctcggcggcagggctggattactacaatcacaacctcgatacctcgccggaattctacggcaacatcatcaccacgcgcacctatcaggagcgtctggacacgctggataaagtgcgtgatgcggggatcaaggtctgttccggcgggatcgtgggactgggcgaaacggtaaaagatcgtgccggcctgctgttacagctggcgaacctgccgacccctccggaaagcgtgcccatcaacatgctggtgaaggtaaaaggcacgccgctggcggataatgaggacgtggatgccttcgatttcatccgcaccatcgcggtggcgcgcatcatgatgccaacctcttacgttcgcctctctgccggtcgcgagcagatgagcgagcagacccaggcgatgtgctttatggccggggccaactccatcttctacggttgcaaactgctgaccacaccaaacccggaagaggacaaagacgttcagctgttccgcaagctggggctgaacccacaccagactggggtacaggcgggggataacgagcaacagcagcagctggagcagcagattttcaacgccgacactgaccagttctacaacgcggcagccgtatga

SEQ ID NO: 524940 - DNA, 1158 bp, Stenotrophomonas maltophilia
atgacctggcaggcacgtatcaggaccgcgctcgacgagcggcgggcggcggatgcatttcgggtacgcagggtagtggaaaacggtgcaggccgttttctcacccgggaaggagagcggttctgtaatttctccagcaacgattatctgggcctgagccagcacccgcaaatcgttcgtgcctggcagcagggcgcggatcgttacggcgtgggcagcggtggctccgggcacgtcagcggctacaccacggcgcatcaggcgctggaggaagagctggccgactggctgggctacccgcgggcgctgttgtttatctccggttttgccgcgaatcaggcggtgattgccgccctgatgggcaaagacgaccgcatcatcgcggaccgcctgagccacgcctccctgcttgaagccgccagtctcagcccggcacagctgcggcgttttgcccataacgatgcctctcagctgaacgtcctgctgggtaaaccctgttcagggcttcagctggcggtgacggaaggggtatttagcatggacggagacagcgcgcccctggccgcgttgcacgacgccgcaaaacagcaaaacgcatggctgctggtcgacgatgcccacggcattggcgtcacaggcgaggaggggcgcggaagcgcttatcagcagggcgtcaggccggaactgctggtggtcaccttcggcaaaggcttcggcgtcagcggtgccgcggtgttgtgcagcgagccggtggccgactacctggtgcagttcgcccggcacctgatctacagcaccagcatgcccccggcgcaggccgtggcactctctgcgtcgcttgcggtgatccgcagcgaagacggcgctgaacgccgggctcgcctggccgaccatattcagcgttttcgccggggggtaagcgaactgccttaccggcttaccgactcgcacagcgccattcagcccgtgattgtgggtgaaaaccatcgggcgctgatgctggcacaggcgctacgagaacgcgggcagtgggtcacggcgatccgcccacccaccgtgccgccaggcaccgcgcgcttgcgtctgacgcttacggcagcgcacgagccgcaggatatcgatacgcttctggaggcactgtatgtctcccgtcaataa

SEQ ID NO: 524941 - DNA, 756 bp, Stenotrophomonas maltophilia
atgtctcccgtcaataaacaggccgttgccgccgcgtttggccgggcagcgcaaagctattcacagcacgatgagctgcaacgcctgagcgcgcgcgggctgctggccgcgctcggtgacgggcgttttgcgcaggtgctcgacgcgggctgcgggccaggcggcaatagccgctactggcgcgcaacgggcagccacgtcacggcgctggatttatccgcgcagatgctggatgaagcccgccagcagcagtcagcagaccgttatctggtggccgatatcgaggccatcccgctggaggatgcgctgtttgacctcgtctggagccatctggcggtgcagtggtgcaccagcctgtcgcaggcgctacgcgagctttaccgcgtggcacggcccggcggagcggtggcctttaccaccctgctggaaagttcgttgccggagctgaatcaggcgtggagggcggtggatgcgcagccgcacgccaaccggtttctctcgcacgaacaggtcactcaggcgctggcaggctggcgctatcgcagtgaggtccagaccgtcaccctcgaatttagcgatgcgttaagcgccatgcgctctcttaaggggataggcgcgacgcacctgcacgccggtcgggagaagaaaccccttacccgcggccagctccagcgtctggagctggcctggccgcaggaacgggaccggttcccgctctcttatcatctttttcatgggattattgaacgtgactga

SEQ ID NO: 524942 - DNA, 717 bp, Stenotrophomonas maltophilia
atgggattattgaacgtgactgaacgttattttgttaccggtacggacaccgaagtcggtaaaacggttgccagcgccgcgctgttgcaggcggcgcgtcagctggggaaaacaacggccgggtataagcccgtagcctccggcagcgagatgacgccggaaggcttacgcaatactgatgcgctggcgctacagcgtaacagcagccttgtgctggcctattctgcggtgaacccctatacctttgctgaacccacctcgccgcacatcgtcagcgccgatgaagatcgtccgattgatttttcggttctctcttccggattacgcaacctggaaacgcaggccgactgggtgctggtggagggggctggcggctggtttaccccgctgtccgacgagcagacatttgctgactgggtgcaggccgagcagcttccggtcattctggtggtgggggtgaagcttggctgtatcaatcacgccatgctgaccgctcaggccgtgcagcaggccgggttgcgtctggcagggtggattgccaatgacgtggttgcgccgggtaaacgtcatgctgagtatctggcgacgctgaagcgggtgctgcctgcgccgtttctcggtgagatcccgtggcttgccgacggcgcagagcaggcggaaaccggacgctatcttgacctcagcgccttatgtcccgcgccatccagtgcgcaataa

SEQ ID NO: 524943 - DNA, 723 bp, Stenotrophomonas maltophilia
atgttgagtctgcgtgctgtaaatcagttttacggaagccaacatacgctatggaacgtgaatatcgatttcccgcaaggcatctgtacgggcattgttggcctgcctggcatgggtaaatccacgctcatgaactgcattaccggaaaggtgcccgttgagagcggcaccatcatctggcatgaggctggcgcgccgccgcgtaatttgctcagccctgcgtcagcattaacggcgccgccaacgataggctacgtcccgcaggatcggcggatattttcccaactgaccgtcgatgaaaatctgcatatcgctatgcgggcgacggggaaatccgacccgacatcaaaaaatgatgtgtacgccctgtttccggagctctatccgctgcgacagagccgtgcctctgcgctgtcccccgacgaccagtatcagcttgccctcgccagtgcgctggttaatcgcccgcgcgtgttgattctggatgagcccatgtatggcgcagggcaaggcttcgcccgcaggctgggtcaactgctggtacggttgaatcgggagctgggaatgacggtgctgttagcggagcaacagctgtcgtttatccgccgggtagcggatcgtttctgcatgctttatcgcgggcgtaacgtggcgcagggccacgttaacgagctggatgacgatcttattgcgcactggatggcgcgggacataaggcgctga

SEQ ID NO: 524944 - DNA, 2016 bp, Stenotrophomonas maltophilia
atgagtaaaccgttcaaattgaattctgctttccgtccttccggggatcagcccgaggccattcgtcgcctggaagaggggctggaagacgggctggcgcaccagaccctgctgggggtaaccggttcgggtaaaaccttcactattgccaacgtcattgccgatcttcagcgtcctacgatggttctcgcgccgaacaaaacgctggcggcgcagctgtatggtgagatgaaagagttcttcccggaaaacgcggtggagtatttcgtctcctactacgactactaccagccggaagcctacgttcccagctccgacacgtttatcgagaaagatgcctcggtgaacgaacatatcgagcagatgcgtttgtcggcgaccaaggcgctactggagcgtcgtgatgtggtggtggtggcctcggtgtcggcgatctacggcctgggcgatccggatctctatctcaagatgatgctgcacctgacgcaggggatgatcatcgatcagcgggcgattttgcgccgtctggcggagctgcagtacacccgtaacgatcaggcgttccagcgtgggaccttccgcgtacgtggtgaggtgattgatatcttcccggcggaatcggacgacatggcgctgcgcgtagagctgttcgatgaagaggttgaacgcctgtcgctgttcgacccgctgaccggtcatgtggagtcggtgatccagcgcttcaccatctacccaaaaacgcactacgtgacgccacgcgagcgtatcgtacaggcgatggaagagattaaaattgagctggcagaccgccgcaaggtgctgctggcgaacaacaagctgctggaagagcagcgcctgagccagcgtacccagttcgatctggagatgatgaacgagctgggctactgctccggcattgaaaactactcacgctacctctccgggcgcggaccgggcgaagcgccgccgacgctgtttgactaccttccggcggacggcctgctggtgatcgacgaatcccacgttacgatcccccagatcggcgggatgtaccgcggtgaccgcgcgcgtaaagagacgctggtggagtacggattccgactgccgtcagcgctggacaaccgtccgatgaagtttgaagaatttgaggcgcttgctccgcagaccatctacgtatcggcgacgccgggcaactacgagctggagaaatccggtgatgacgtggtggaccaggttgtgcgtccgaccgggctgctggatccgattatcgaggtgcgtccggtggcgacgcaggtggacgatctgctctcggaaatacgtgcccgctctgccatcaacgagcgcgtgcttgtgaccacgctcaccaaacgtatggcggaggatttgacggagtatctggaagaacacggcgagaaggtgcggtatctgcactcggatattgataccgtggagcgtatggagatcatccgcgacctgcgcctgggcgagttcgacgtgctggtgggtatcaaccttctgcgagaaggtctggatatgccggaagtgtcgctggtggcgattctggatgcggacaaagagggcttcctgcgttccgagcgctcgctgatccagaccattggccgcgccgcgcgtaacgtcaacgggaaggcgattctgtacggggataaaatcaccccgtcgatggccaaagcgattggcgaaacggaacgtcgtcgcgagaagcagcagcgctataacgaagagcacggcatcacgccgcaggggctgaacaagaaggtggtggatatcctggcgctgggtcagaacattgcgaagaccaaagcgaaagggcgcggcaaggcccgttcagtggtggaagaggataccgtcgcgctgaccccgaaagcgttgcagcaaaagatccacgagctggaagggcagatgatgcagcacgcgcagaatctggagttcgaagaggctgcgcaaatccgcgatcagctgcatcagctgcgggatctgtttattgcggcatcgtag

SEQ ID NO: 524945 - DNA, 750 bp, Stenotrophomonas maltophilia
gtggcagaagagaacgacgacaaaacagaagcccccacaccccaccgacttgaaaaagcccgtgaggatgggcagatcccccgatcccgagagctgacctccctgctgatcctggtggtgggcgtctgcataatctggtggggcggggagatgcttgcccgcagactggcgggaatgctctctgctggcttacgttttgatcacagcatggtcaatgaccccaatctgatcctcattcagatcatcaacctggttaaaagcgccatgatcgctctgctgccgttgattgccggggtggtcatcgtggctcttgtttcgccggtcatgctcggtggcctggtgttcagcggtaaatcgctgcaaccaaaattctccaagctcaacccgctacccggtattgcgaaaatgttttcagctcaaaccggggctgagcttcttaaagcgatcctgaaatcacttcttatgggcagtgctgccgggttttttctgtggcaccactggccggagatgatgcgtctgatcagtgaatcccccatgacggcgatgaagaatgccctgaacctggtcggattaggctcgctgctggtggttctcagcattattccgatggtggcgttcgacgttatcttccagatcttttcccatatcaagaagctgcgaatgtcgcgtcaggatattcgcgatgaatataaacagatggaaggcgacccgcacgtcaagggccgtatcctgtctcttatacacatctga

SEQ ID NO: 524946 - DNA, 645 bp, Stenotrophomonas maltophilia
atgttgcaacctgctatgaaacccgttgaagaacattcgccgagcgacattattgcccgtattggtagcctgacccgcatgctgcgcgacagcctccgtgagctggggctggaccaggctatcgccgaagcggcggaagccatccccgacgcgcgcgaccgtctggactacgtggtgcagatgaccgcgcaggcggccgagcgagcgctgaacagcgttgaggcgtcacagccgcaccaggatgcgatggagaagggggcgaaagcgctgacccaacgctgggatgagtggtttgagaaccccattgagctggcggatgcccgcgaactggtaacggacacccgtcagttcctgggcgatgtgccagggcacaccagcttcaccaatgcgcaactgctggacatcatgatggcgcaggatttccaggacctcaccggccaggtgatcaagcgcatgatggatgtgattcaggagattgaacgtcagctgttgatggtgctgctggaaaatattccggaaccggctgcccgtccgaaacgcgagaacgaaagcctgctcaatggtccacagcttgacaccagcaaagcgggcgtggtggcaagccaggatcaggtggacgatctgttggacagtcttggtttctga

SEQ ID NO: 524947 - DNA, 390 bp, Stenotrophomonas maltophilia
atggcggataaagagcttaagtttttggttgtggatgacttttccaccatgcgtcgcattgtgcgcaacctgctaaaagagctaggcttcaacaacgttgaagaagcagaagacggggtggatgcgctgaacaaactccaggctggcgggtttggttttgtgatttccgactggaacatgccgaacatggacggtctcgaactgctgaaaaccatccgcgcggatgcaggcatggcctctctgccggtgctgatggtgaccgcagaagcgaagaaagagaacattattgccgctgcacaggcgggcgcaagcggctacgtggtgaagccattcaccgcggcgactctggaagagaagctcgggaagatcttcgagaaactcggcatgtga

SEQ ID NO: 524948 - DNA, 1050 bp, Stenotrophomonas maltophilia
atgagtaaaatcagggtattgtctgtcgatgattctgcgctgatgcgtcagatcatgaccgaaatcatcaatagccacagcgatatggagatggtggcaacagcgcccgatccgctggtcgcgcgggatttaatcaaaaaatataaccccgacgtgctgacgctggatgtcgaaatgccacgcatggatggcatcgatttcctggaaaaattaatgcgcctgcgcccgatgccggtggtgatggtttcatctctgaccggtaaaggttcagaaatcaccctgcgcgcgctggagctgggggcggtggattttgtcaccaagccgcagctcggcattcgcgaggggatgctggcgtacagcgagatgatcgccgagaaaatccgtaccgcgtcgcgcgcaaaactggcggcccacaagccgatggccgcgccggcaaccctgaaggccggaccgttactcagctcggaaaaactgctggtcattggggcgtcaaccggaggaacagaggcaattcgccatgtactccagccattgccgctctcaagcccgggtatcctgattacgcaacatatgccgccggggtttacccgctcattcgcggagcgcctgaataagctgtgccagatcagcgtgaaagaggcggaagacggcgagcgcgtgctgccaggtcacgcgtatatcgccccgggtgacaaacatatggagctggcgcgcagcggggcgaactatcaaatcaaaattcatgacgggccgccggttaaccggcaccgtccgtcggtggacgtgctgtttcattcggtggcgaaacatgcggggcgcaacgccgtgggggtgatcctgacggggatgggcaacgacggcgccgccggaatgctcgcgatgcaccaggctggcgcctggacgattgcgcagaatgaagcaagttgtgtggtgttcggcatgccgcgcgaggccatcaatatgggtggcgtaagcgaagtggtcgatcttagccaggtaagccagcagatgctggcgaaaatcagtgccggacaggcaatacgtatttga

SEQ ID NO: 524949 - DNA, 867 bp, Stenotrophomonas maltophilia
atgacatcacccatgccctcagggcaaacgtcattattgttgcagatgacacagcgcctcgcgctgtccgacgcgcattttcgtcggatatgtcagttaatctaccagcgtgcggggatcgtgcttgcggaccataagcgagacatggtctacaaccggctggtgcggcgcttgcgcacgctggggctggatgattttggccgctatctgagcatgctcgaagcgaaccagaacagcgccgaatggcaggcatttatcaactcattaaccaccaacctgaccgcgtttttccgcgaggcgcatcacttcccggtgctggcggaacacgcccgtcgccgtagcggagagtatcgcgtctggagcgcggcagcctctaccggggaagagccgtactcgctggccatcacccttgcagacaccctgggaatggcgccgggccgctggaaagtgtacgccagcgacatcgacaccgaagtgctggaaaaagcccgtaacggcgtttatcgccaggatgaactaaaaacgctgtctcctcagcagctacagcgttacttcatgcgcggtaccggcccgcatgaaggactggtgcgcgtacgccaggagctggcgaactgcgtggaatttgctcccgttaatttactggataagcagtacaacgtgccggggccattcgacgccattttttgccgtaacgtgatgatctattttgataaaacgacgcaacaggacattctgcgtcgctttgttccgttgctcaagcctgacggtttactgtttgccgggcactcggaaaacttcagcaacctcgtgcgtgagtttagcctgcgtgggcaaacggtttatgcgctgagtaaggaaaaagcatga

SEQ ID NO: 524950 - DNA, 1602 bp, Stenotrophomonas maltophilia
atgttaaatcgtattcgtatctcgaccacactgtttttgattctgatcctgtgtggggttttgcaggttggcagtaacgggttgtctttctgggcgtttcgcgatggctatcagaatttgcaggaagttgagacgagtaatcagcagcgctccgcactggcacaaacgcgtgccgtgctgttacaggcaagcactgcgctgaacaaagcagggacgttaaccgcgctgagctatccgccggatgatattaaggcgctgatggtcgtggcccgcagcagcctgaagcaggccgacgcgcagtttaaggcgtttacggcgcaggaggcggtgagtgagaaagagaaaacgctgaaggtcgccatgaaaaagaactttgatgtgtggtacggcgatctcgaccatcaggcgacgtggctggagaacaaccagctttctgacttcctgaccgcgccggtgcaggcgtctcaggcggcatttgacgacagctttaacgcatggcagcaggatattaaccagtttgtggcgcgtgccggtgcggacagccgtaccagctaccgcatgtcaggggtgattttcctgaccatggtgatcctggccgccctgctgaccggcggctcgctgtggtggtcgcgcaaaatgatcgtccagccgctggcgatcgtcagcagccacttcgacagtatggcgaagggcgacctggcgcgtccggtggccgtgtatggcaggaatgaaatatcagcgattttcgccagcctgaaggcgatgcagagttcgctgcgggaaaccgtaagcaacgttcgtcagggcagttacgccatgcataccgggatctccgagattgcggcaggcaataacgatctctcatcccgcaccgaacagcaggcggcatcgctggcgcagacggcggccagcatggagcaactgaccgcgacggtaagccagaacgccgataacgcgcgtcaggcgtccgacttgtcaaaacaggcggcgatgacggcgaaacgtgggggcgaccaggcttctcacgtcgccagcacgatgcagcagattgccgccagctcgcagaaaattggcgacattatcagcgtcatcgacggtatcgcgttccagaccaatattctggcgctgaacgcggccgttgaagcggcgcgtgccggagagcaggggcgcgggttcgcggtggttgccggtgaagtccgaaacctcgccagtcgcagcgccaacgcggcgaaagagatcaaagggctgatagaagagtcggtctcccgcgttcagcagggctccgcgctggtggataccgccgcgcagaccatgcacgagattgtcacctccgtgacgcgggttaacgacattatgggcgagattgcctcggcgtctgatgaacaacgccgtggtattgagcaggtggcgcaggccgttacacagatggatcaggttacgcagcagaacgcctcactggtggaagaggcggcggcggctaccgatcagctggcaaaccaggcggatcaccttaccgggttggtcgccgtatttaatgtgaaagagcacgttgaagcagtaacagaagtcggacggtcacaggccgtacccgttgtatcctga

SEQ ID NO: 524951 - DNA, 1668 bp, Stenotrophomonas maltophilia
atgttgaaccgtatccgcgttgtcacaatgcttatgatggtgctggtcattttcgcacttcttcagcttatttctggcggcctctttttctcctcgttaaaacagaaccaggacagcttcgcggcctcgaacgatttgcggatgcagcaaagcgaactgaccacaacctgggatctgatgttgcagacgcgtatcaatctgagccgctcgtctgcccgcatgatgatggatccgaacaaccagcagagcagcgcaaaaacggaactgctgaagaatgcgcgcgccacgctggcagacgcggcgaaacattacgaggccttcaaaaaaatcgcccctcagcccgcaatggcgcaggcgagcgcgaacatagatgaaaaatatctggcctacttcgccggcctcacggagctggtgcagttcctggagaagggcaatatggacgcctatttcgcgcagccgacccagggcatgcagaacgccctcggcgcggcgctcggcgagtacgccaaagccagcggcgagctttatcactccgcctttacgcaaagccagaacgactaccgtttcgcgaaatggcagatggcggtgctcgccctcgcgcttgtcatcgtgctggtggccgtgtggtacggcattcgtcatatccttcttaatccgcttggccgcgtcattgcccatatccgcgatattggccggggcgatctcacgaaaacgctgaccgtttctggtcgcaacgagatcaccgagctggcgaccagcgtcgaccatatgcagcgttcgctgattgataccgtcgccaacgtgcgcgagggggcggatgccatctataccggcacgagtgaaatcgcgatgggcaacaacgatctctcgtcccgtaccgaacagcaggcgtccgctctggaagagacggcggcaagcatggagcagctcaccgcgaccgtgaagcagaatgccgacaacgcccgtcagacgtcgcagcttgcagaaagcgcgtccgacaccgcccagcgcggcggtcgggtggtcgacggcgtggtgaaaaccatgcatgacattgccgacagctcgaagaaaatcgccgatatcatcagcgttatcgacggcatcgccttccagaccaacattctcgcgctgaacgcggccgttgaagcggcgcgtgcgggcgagcagggacgtgggtttgccgtggtcgctggcgaagtacgtaacctcgccagccgcagcgccaatgcggcgaaagagatcaaagccctgattgaagactctgtttcacgcgtggataccggctcggtgctggtggaaagtgcgggtgaaaccatgaatgacatcgtgaatgccgtgacgcgcgtgacggacatcatgggtgaaatcgcctctgcatcggatgagcagagtcgtggtattgaccaggtcgctctggcggtatcggaaatggatcgtgtgacgcagcaaaacgccgccctggtgcaggagtccgctgccgcggccgctgcgcttgaggatcaggcgagccgcctgaaaatggccgtctcggcgttccgtcttacttcaaaaacaacaaatacggtcagctcgcggtcggcgtacagcgaagcaaccccggcgcccgtgacaacacctacgcgcgcagcggtgaccggacaagatgaaaactgggaaacattttga
